United States Patent Application Publication US 2003/0194704 A1 - sequence listing, part 5

SEQ ID NO: 12851 - DNA, 514 bp, Homo sapiens
  MAP TO CHR19.3; EXPRESSED IN HEART, SIGNAL = 5.5; SWISSPROT HIT: Q07020, EVALUE 1.00e-25; EST_HUMAN HIT: AI797902.1, EVALUE 0.00e+00; NT HIT: gi16163056, EVALUE 2.00e-65
atgtggtggtgaaagttccggaagtgttgagaactgctgctgtcagcccagggtgctccgggtagtaaacgatagtgttggttaccagggctctgctgcgccaaggcagtggagggtgagtcctggcagcccctgggtgaccacgcaggggtctgacccgccagccttgtcctctccaccaggtatgtgcactgcgcgtgaccagccgggcccgcagccgcatcctcagggcagggggcaagatcctcactttcgaccagctggccctggactcccctaagggctgtggcactgtcctgctctccggtgagtgatacgtggtcgacgggtttggactgagctgtgtggctactggcagccttcaccctcctggatctgggaggccagaagctgggcgccagatccctgtctcacccggttctccttccccttccctaggtcctcgcaagggccgagaggtgtaccggcatttcggcaaggccccaggaaccccgcacagccacaccaagtgagt

SEQ ID NO: 12852 - DNA, 598 bp, Homo sapiens
  MAP TO CHR18.3; EXPRESSED IN HEART, SIGNAL = 1.7; EST_HUMAN HIT: BG281698.1, EVALUE 8.40e-01; SWISSPROT HIT: P02674, EVALUE 4.40e+00
gtctgggagacctcagaacggagttgttctccatatagcacttgactcattccagccatgatatccctatcccagcggcagctgcaacctgctgtgtcccacgtgcagctaaagccatcctcatcttccctggaccacagccaatctaaaaagctatgtaagtccatcttagggggctgcacactaataatactcctgccacggtgctctggttctaatagttggtgctccattttactctcctacccctatttccagggcttgaggttctgtttcctgagccccagctcagtggctgggactgccccgtcaccacagacctgcctagtgccactggctttcctgttttgccttcttgagtattcctcactgtgtattacgctgctgctattcttctcctggctcatgggactcctttcctgggtcacttacatcatctaaatccgcactgcccacacctggacaccatgtgctttgattgccactgaatgtgcagctccttcttggatgcatgctagcctgctacaccagtgctttttttggtagcagctggaactgggtttgtccctatggtacctgttcctggccttctcatttg

SEQ ID NO: 12853 - DNA, 558 bp, Homo sapiens
  MAP TO CHR18.3; EXPRESSED IN HEART, SIGNAL = 2.7; SWISSPROT HIT: P15881, EVALUE 6.00e-37; NT HIT: gi16163928, EVALUE 0.00e+00; EST_HUMAN HIT: BG058782.1, EVALUE 1.00e-127
tgtctgccactgctcaagactggcgtgcccatctcagcttgtgcctgccacaagctcctcacgagctctgcaaggaggctggcctgcactgacctcggacttgctgctccagactgaggatgacggccaccgcctggtggaggatcaggagcttggtctggggcttgtcactcttgaggtggagctgcaccatgcggccgagctctttgaaagcctcgttgatgtcacggacccgcagacgctctcgggcattgttggccatcctccgctccttctcacgctctgccttctgctctggtgtcaggtcctcatcgtcattattgctgtgggacaaaagggatgcaacattttctaatggtgtggggaaaaagaaggtgtctacattactttgttttcttccagagttttcagggaacttttccatcttatgccatgtttttggcagaatttttatatccacttgaccttgggattggtttagatggctttgacagttcacaatacacaagatatttggttttctcgcagacattaaacccaaaccaaacaggtgagggt

SEQ ID NO: 12854 - DNA, 577 bp, Homo sapiens
  MAP TO CHR16.3; EXPRESSED IN HEART, SIGNAL = 3.8; SWISSPROT HIT: P55042, EVALUE 5.00e-45; NT HIT: U46165.1, EVALUE 0.00e+00; EST_HUMAN HIT: BF841978.1, EVALUE 0.00e+00
caccagctctctcccatttccctccccgccagttttctttctgaacatttttagcctctgatgatccccagggactcaagctgagccaagactgcctggatcagggcccagctgggctctccctccccctgcaacctgccgcctactcaccatccaccgagacctcacgagagcgcaccaggtcgctcttgttgcccacgaggatgatgggcacatcatctgtttgccgtgcacgccgcagctggacccgcagttctgaggccttctcgaagctgcccttgtccgtcactgagtacacaatgacataggcatcccccatggccatgcagtggccgggcaaccagcggcccccgtcctggagaacacacaacacacatctgcccaacagtcctcatgcccccgacacgagcctggcactcccagacctctaacccaactcactcctccctcccctgccctgggtctctgcttgcaccctacctgctcccaaatgtcgtagaccatgagtgatgcctcttctccgtccactacaatggagcgatcataggtgtgccctaggcagaaggccagtagacag

SEQ ID NO: 12855 - DNA, 534 bp, Homo sapiens
  MAP TO CHR18.3; EXPRESSED IN HEART, SIGNAL = 1.5; SWISSPROT HIT: Q9Y4I1, EVALUE 4.40e-01; EST_HUMAN HIT: BF902848.1, EVALUE 3.00e+00
tgacgcataacacaatgttggtatttaatcattttaatctgcgttcaatattctcattatacataaatcataatgacctggctaggtattggatgatgtccaaatttatcaaatctgaaaaacttagaccatattatcaaggttaaggagatcagaacatttgtacaggaagtcatccttcttgttaatgcagaggaacattaattcattaaaccagaaatgtatatttaagacactctacatgcaattttagagactttgggagaataaccactggtttatgtcattcctgcacttacagaacaaggttatacactgttcagacactgtgatcatgctatatgtatctggatttatagcctataacacaatgcaaatcatagagcatgggttactaaatatttgtgaaatcaacttagacatcaagggattgaaagtttgtatggttgtgtggattgaggtggggataggagataaaggataaggcttaattttctgattcctaaataaaaaagtaattggcacagggagctc

SEQ ID NO: 12856 - DNA, 515 bp, Homo sapiens
  MAP TO CHR14.3; EXPRESSED IN HEART, SIGNAL = 2.6; NT HIT: U53530.1, EVALUE 0.00e+00; EST_HUMAN HIT: BI061179.1, EVALUE 1.00e-100; SWISSPROT HIT: Q14204, EVALUE 7.00e-42
agtgccttctctttcatggggctctaattaataatttctatcattgttatagaagaaaaaacttgatttattttttaactctcaaagctctaccgcaatggccagcgcttactggaaaagcaaaggttccagttcccaccttcctggctttatattgacaacatcgagggagagtggggagccttcaatgacatcatgcggcgaaaggactctgccattcagcagcaggtggcaaacctgcaaatgaagattgtccaggaggatcgggccgtggaaagccgcaccaccgacctgctgactgactgggagaagaccaagcctgtcacggtgagtcccgccaggtggggacgcaggagactcctcacccagcagtgtgatttggtgactttctttcaagcctaaaaggccttgctgtgactgagctttctagtattgaagactcttttcctttttgtagttaaaaaagcagatggagatagcaaatgtgaaaatatgaagcccagcttagacctctt

SEQ ID NO: 12857 - DNA, 580 bp, Homo sapiens
  MAP TO CHR6.3; EXPRESSED IN FETAL LIVER, SIGNAL =   3; EXPRESSED IN ADULT LIVER, SIGNAL = 3.2; EXPRESSED IN LUNG, SIGNAL = 3.8; EXPRESSED IN HEART, SIGNAL = 3.5; EST_HUMAN HIT: BF984680.1, EVALUE 0.00e+00; NT HIT: gi15304463, EVALUE 0.00e+00; SWISSPROT HIT: P10667, EVALUE 4.00e-05
attcaggggtggtaggaaccggcatagctcttactgtggaagacctcagtgttttgctctgaccaccctgagctatggcctcaggggtgacggactggtctgtgggggtaaaaggctcaagatcagaggctgctggttcaactggtttgggagtcttgacagaggacctatttgtctttctcctagtggccctagatgtgagcttgggggtgacaggctggtctgtggaggtggtaggatggggctcaggggctgtggggacaactggctcaggggtcttgacagaggacctatttgtcctgcacctagtggcccgagatgtgggctcaggggtgacaagctggtttctggaggtggaaggctgaagctcaggggctatagggacaattgattcaggggtcttgacagaggacctatttgtcctgcccctagtggcccgagatgtgggctcaggggtgacaggttggtctgtggaggtgggaggctggagctcaggggctgcgggcacaactgtttcaggggtcttgacagaggaccgattttttcttcccctagtggtccgagatgtgggatcagaggt

SEQ ID NO: 12858 - DNA, 541 bp, Homo sapiens
  MAP TO CHR12.3; EXPRESSED IN HEART, SIGNAL = 1.3; EXPRESSED IN ADULT LIVER, SIGNAL = 1.6; EXPRESSED IN FETAL LIVER, SIGNAL = 1.7; EXPRESSED IN BRAIN, SIGNAL = 2.5; EST_HUMAN HIT: AA978092.1, EVALUE 1.00e-118; SWISSPROT HIT: Q9WVM4, EVALUE 3.90e+00; NT HIT: gi16187843, EVALUE 3.00e-67
cagctccagcctacaggaacacatgaggaacagaaattagagaccacatcctatctctttacaatcccaaaccaggcccatggcctcaatttttttccatcctctcaaaagggagtcacaaagccctttttcctgaccctttccccaactcctagagcatttcacttgctcagttggctgtagtgcaagaaaattaagtgctttcctaactaacctccaacctttctttgggtctcaggtgtgtctcagcatcattacctgctgcatccggcggctggcaggcctggtccctggcatgttgccatctgtgatgctgaggaaggggctatatccaaagccacctgacaacatacggctcatatgctgacggtgaatagcaaagggatccctgtggagtgagcacatagtatggatggcagaagcgccaaactgtcaatccctccaccaccctgcaaaaaaatacgcacagagcaacagtggcaccgatgcctacttcctgctaggtaggagctaggtatccagccagttccaaccattccta

SEQ ID NO: 12859 - DNA, 579 bp, Homo sapiens
  MAP TO CHR12.3; EXPRESSED IN HEART, SIGNAL = 1.2; EXPRESSED IN ADULT LIVER, SIGNAL = 1.2; EST_HUMAN HIT: AL578116.1, EVALUE 0.00e+00; NT HIT: gi15295687, EVALUE 0.00e+00; SWISSPROT HIT: P08345, EVALUE 1.90e+00
acctcacctcatcctcatcgcctcccgagacatcgcggctggggaggagctcctgtatgactatggggaccgcagcaaggcttccattgaagcccacccgtggctgaagcattaaccggtgggccccgtgccctccccgccccactttcccttcttcaaaggacaaagtgccctcaaagggaattgaattttttttttacacacttaatcttagcggattacttcagatgtttttaaaaagtatattaagatgccttttcactgtagtatttaaatatctgttacaggtttccaaggtggacttgaacagatggccttatattaccaaaacttttatattctagttgtttttgtactttttttgcatacaagccgaacgtttgtgcttcccgtgcatgcagtcaaagactcagcacaggttttagaggaaatagtcaaacatgaactaggaagccaggtgagtctcctttctccagtggaagagccgggaccttccccctgcacccccgacatccagggacggggtgtgaggaagacgctgcctcccaatggcctggacgggatgtttccaagctcttg

SEQ ID NO: 12860 - DNA, 582 bp, Homo sapiens
  MAP TO CHR11.3; EXPRESSED IN FETAL LIVER, SIGNAL = 5.3; EXPRESSED IN ADULT LIVER, SIGNAL =   2; EXPRESSED IN BRAIN, SIGNAL = 1.5; EXPRESSED IN LUNG, SIGNAL = 2.2; EXPRESSED IN HEART, SIGNAL =   2; EST_HUMAN HIT: AA452218.1, EVALUE 2.00e-97; SWISSPROT HIT: P08397, EVALUE 1.00e-15; NT HIT: M95623.1, EVALUE 0.00e+00
cagactcaggcagagggaaccgcacgaggccccagattgcccgacactgtggtccttagcaactctccacagcggggaaacctcaacacccggcttcggaagctggacgagcagcaggagttcagtgccatcatcctggcaacagctggcctgcagcgcatgggctggcacaaccgggtggggcaggtagggcctgcccctatcctctccccagctcatctgcatctcctttctgccttacagtcatccccaatttaggatttttagactttatgattgtgtgaaagcgatatacgttcagtagaaactgtacttagtacccatacagccattctgttttttactttcagtacagtattcattacatgagatattcactttattgtaaaacaggcttggtgtcagatgattttgtccaactataataggctaatcttaagtgttctgagcacatgtaaggtaggctaggtgtattaaatgcattttcagcttgttttcaacttaacaatgggtttatcaggatgtaaccctattgtaagtcaaggaccatctgtcttcacttcttgaccaccccacctctaa

SEQ ID NO: 12861 - DNA, 506 bp, Homo sapiens
  MAP TO CHR5.3; EXPRESSED IN BRAIN, SIGNAL = 3.1; EXPRESSED IN HEART, SIGNAL = 0.52; EXPRESSED IN FETAL LIVER, SIGNAL = 0.41; EXPRESSED IN ADULT LIVER, SIGNAL = 0.36; EST_HUMAN HIT: W23121.1, EVALUE 1.00e-125; SWISSPROT HIT: P43003, EVALUE 1.00e-37; NT HIT: Z31707.1, EVALUE 0.00e+00
gcttggtggaaaccagactccaaccgtgctggtgttgcttctccccaggtatgcccccgtgggtattctcttcctgattgctgggaagattgtggagatggaagacatgggtgtgattggggggcagcttgccatgtacaccgtgactgtcattgttggcttactcattcacgcagtcatcgtcttgccactcctctacttcttggtaacacggaaaaacccttgggtttttattggagggttgctgcaagcactcatcaccgctctggggacctcttcaaggtatgtatgtatgtgtggaaaatgagtctgaaatgttaccttgaaccagggcccctcaagtagggtgtaggagaagccattttattctgagttttaaacttccaagaatgatgagttagctttctcatttctgatgtcaatcacacctgtttgggattcaggaaatgcctggctacatatcttttgtggggacaaattggaaatcaactatcctttcccgtcca

SEQ ID NO: 12862 - DNA, 521 bp, Homo sapiens
  MAP TO CHR11.3; EXPRESSED IN ADULT LIVER, SIGNAL = 0.7; EXPRESSED IN BRAIN, SIGNAL = 2.7; EXPRESSED IN LUNG, SIGNAL = 1.2; EXPRESSED IN HEART, SIGNAL =   1; EST_HUMAN HIT: BI039007.1, EVALUE 1.00e-110; SWISSPROT HIT: O08560, EVALUE 7.00e-16; NT HIT: D10604.1, EVALUE 0.00e+00
caccatctgccactacatcgtggaggccggggcctcgctcatgaagacagaccagcaggtgagcagacggcaggcagggagcccacgagggcaccaaccaaacctttcccaaggtcctaggcgggagctggggctgggggctgtccctgggaagacacagtccagaccctgggaaacctgagccagcaggggaggagctggtgggcaaaaaaggcctccctccctgaccaggccacagggaggtagagcccctgcctctcagcctgctaggggttaggcctgcctctggcccctgctgatcgcagctccgccctcctccagggcgacactccccggcagcgggctgagaaggctcaggacaccgagctggccgcctacctggagaaccggcagcactaccagatgatccagcgggaggaccaggagacggctgtgtagcgggccgcccacgggcagcaggagggacaatgcggccaggggacgagcgccttccttgcccacctcactgccacattccagtg

SEQ ID NO: 12863 - DNA, 526 bp, Homo sapiens
  MAP TO CHR13.3; EXPRESSED IN FETAL LIVER, SIGNAL =   2; EXPRESSED IN BRAIN, SIGNAL = 0.88; EXPRESSED IN ADULT LIVER, SIGNAL = 1.4; EXPRESSED IN LUNG, SIGNAL = 2.5; EXPRESSED IN HEART, SIGNAL =   2; NT HIT: gi14757696, EVALUE 3.00e-61; EST_HUMAN HIT: BG252854.1, EVALUE 4.00e-61
ttttctggccttatggttgcatttttcacgttttctcctcctatatcaaatacactaatttctgtggtccccaaccccacaatgaaggatagaaaaggagaagaaaattcagtagagctaaacacataatttacctgcttcaactgatgctacgaagatcccaggaatatcccattttattgtaaacccaaagtcaagactcttcccaggcgtctggtttatgctgattctcatatcactgaactgatcctgaaaacaaaacatgaaacgctggtatccggtgtccctggcacccacatggaggaaagtctatccatgaaaggagggagactgcacgctaggtagacttgaatcatttcatgataaactagaagcttcattctttcttccttaggttggtaaaactttcatttatataaatagcaccaagtttattatttttctgctaaactaagggaaatcttattgtcattacatgtttttcttcatattaatactttaattcagttggccgtggataagctta

SEQ ID NO: 12864 - DNA, 571 bp, Homo sapiens
  MAP TO CHRX.3; EXPRESSED IN HEART, SIGNAL = 3.5; EXPRESSED IN FETAL LIVER, SIGNAL =  12; EXPRESSED IN BRAIN, SIGNAL = 2.1; NT HIT: gi14758358, EVALUE 0.00e+00; EST_HUMAN HIT: BG057288.1, EVALUE 0.00e+00; SWISSPROT HIT: P01033, EVALUE 2.00e-29
gtgagagcaagtctccccagcggctcagtgttgaaagctgaggagaggaagttctgctccacgggggaggcagggagaagccctcagagatgtttccctcctcccttccaggtgtttccctgtttatccatcccctgcaaactgcagagtggcactcattgcttgtggacggaccagctcctccaaggctctgaaaagggcttccagtcccgtcaccttgcctgcctgcctcgggagccagggctgtgcacctggcagtccctgcggtcccagatagcctgaatcctgcccggagtggaagctgaagcctgcacagtgtccaccctgttcccactcccatctttcttccggacaatgaaataaagagttaccacccagcagacactgtttctgtgtagtgcctgggaacaaacccatgttgctgatgacctggtgtgagcaccctgggaccagtggggatgagggatgccaaatgttgggtttttatattttacttaaattctgatgtactggtagtaattctcaacattggcattagcactgatgatctgcaacagcagcaatggtcact

SEQ ID NO: 12865 - DNA, 523 bp, Homo sapiens
  MAP TO CHR19.3; EXPRESSED IN FETAL LIVER, SIGNAL = 0.7; EXPRESSED IN ADULT LIVER, SIGNAL =   1; EXPRESSED IN BRAIN, SIGNAL =   1; EXPRESSED IN LUNG, SIGNAL = 0.88; EXPRESSED IN HEART, SIGNAL = 1.3; SWISSPROT HIT: P48378, EVALUE 7.00e-37; NT HIT: gi10835184, EVALUE 0.00e+00; EST_HUMAN HIT: AU132251.1, EVALUE 0.00e+00
acatggtggctgtgaacttgcgctgcatttgagtgtcatatgccacgtccgaattgctccatatgtctggcctctctgggttgcagcttttacgtgatgtttggctggatatctgtgaactcagacaaggcatttaaatgggacagcgtcccatgcgtgacttctctctttctaacagacgaacagcctacacctacaaccccgagcctcagatgtacgcccccagcagcacggcttcttacttcgaggccccaggcggtgcccaggtgaccgtggcagcctcgtccccgccagcggtcccctcccacagcatggtgggcatcaccatggatgtcggggggagccccatcgtctccagcgcgggagcctatctcatccacggggggatggacagcaccagacactccctggcccacacctcccgctcatcgcccgccacggtatgtaggaggctcttgggaccagcagggtaggccatgagtattctcgaagcagcggcagcagggatggtgagtaagaggca

SEQ ID NO: 12866 - DNA, 545 bp, Homo sapiens
  MAP TO CHR6.3; EXPRESSED IN LUNG, SIGNAL = 2.2; EXPRESSED IN HEART, SIGNAL = 1.7; EXPRESSED IN BRAIN, SIGNAL = 1.4; SWISSPROT HIT: P16106, EVALUE 4.00e-72; NT HIT: X16496.1, EVALUE 0.00e+00; EST_HUMAN HIT: AI351370.1, EVALUE 0.00e+00
aaagagcctttgggttttggttagcacacattcacaagacaatttacgccctctccccacgaatgcggcgagcaagctggatgtccttgggcatgatagtcactcgcttggcgtgaatggcgcataggttggtgtcctcaaacagccccaccaggtaggcctcgcaggcctcctgcagcgccatcaccgccgagctctgaaaacgcagatcagtcttgaagtcctgcgcgatctcacggactagacgctggaatggcagtttgcgaatcagcagctcggtcgacttctggtagcggcggatctcgcgcagagccaccgtgccgggccggtaacggtggggcttcttcacgccgccggtggctggagcgctctttcgagcagccttggtggccagctgcttgcgtggcgctttcccacccgtggacttgcgagcagtctgcttggtacgagccattgcgaacttctaaaccctgctaaatgacgaaaaaacgaaagtctagcctttcgtacccgtatatataaagacacccctgttctgattggac

SEQ ID NO: 12867 - DNA, 564 bp, Homo sapiens
  MAP TO CHR4.3; EXPRESSED IN LUNG, SIGNAL =   2; EXPRESSED IN HEART, SIGNAL = 2.6; EXPRESSED IN FETAL LIVER, SIGNAL = 1.3; EXPRESSED IN BRAIN, SIGNAL = 1.9; EST_HUMAN HIT: AI371133.1, EVALUE 0.00e+00; NT HIT: gi14733422, EVALUE 0.00e+00
ttaggctcagagaagggcagggatgtgacccaggtcagagggtgatctggcggtatggttgggagcaggaaccgagggttccagccccttctctggggcttcccttccaccacatgatggatctgacaatcctgtgttccaaacatttcctgcctgaggctgcagactggtaagacctctaaagccatgaaaatcccacaaacgttcctccccacccagccgccccacacacccccatcacacaaagtcagtgacccacagtgaagagaaaagatatttaattatttctcaggctaatctcttaaagcgctcaaagtgttttcacaagtgcaaggggagggattgttctcagccaacatttaccagtgattccgacacacgcaaaaacactcccaatcacggtgctttatacttacttttaatttctgcactgaaaaagaaaaggaaggtaaaaacaatgacagattagtttacagtgacttcatctttgtccttaaattaacctttgctcttgagagcagaagagggaaagacaggggaacatcaaagcatgatggtgaaacg

SEQ ID NO: 12868 - DNA, 571 bp, Homo sapiens
  MAP TO CHR20.3; EXPRESSED IN ADULT LIVER, SIGNAL = 0.39; EXPRESSED IN BRAIN, SIGNAL = 1.3; EXPRESSED IN LUNG, SIGNAL = 0.64; EXPRESSED IN HEART, SIGNAL = 0.57; NT HIT: gi14786439, EVALUE 1.00e-108; EST_HUMAN HIT: BG193433.1, EVALUE 1.00e-109; SWISSPROT HIT: P18075, EVALUE 7.00e-32
atttgggggttttcttcctgctatatttgttccagagccatctggtgagcacctgaatggattttgagtcagtctcctgccgggtcccgccggggccctgctgggttcctgtggtgggtctgtgatccctcccacctaagcatacctgccacgttggccatccgcagggcttcctggttcttgggcgtcttggagcggttctggctgcgctgtttgctccccgtggaccggatgctgcggaagtggacctccgtggccttgaagaaagccaccatgaagggctgcttgttctggggcccgtgccgcccaatcaggcccgccaacttggggttgatgctctgccctggacaggaagcagccaagtgcacagaagagtagttacaggagggccacgagcgggacagggctgcagagatgctatgcctcccggttcattcatgaactccttattcctccatccagtaagtatttattgagtactcactctaggccaggtactgtttaaggaacttggaacacaactgtgaaagcagccaagaaaacatcctgttctctgggtttccatgcaagt

SEQ ID NO: 12869 - DNA, 510 bp, Homo sapiens
  MAP TO CHR11.3; EXPRESSED IN FETAL LIVER, SIGNAL = 2.2; EXPRESSED IN ADULT LIVER, SIGNAL =   3; EXPRESSED IN HEART, SIGNAL =   2; SWISSPROT HIT: Q60649, EVALUE 1.00e-18; EST_HUMAN HIT: BF891829.1, EVALUE 0.00e+00; NT HIT: gi14783731, EVALUE 3.00e-61
tttatgtgtgtgtgggggtgcccccagtccagtgttccagatttccagtggctggctatcccgcccccacccatgggcagttccctcttactctcttggcccagaagtttagttccttgttgacgagttggatgagctccgagtggcagaaggggaggaagtagacgatctcattgatccgtcccagaaactcatccctccggaagtgagcctgaagggccaggttaggggtgggatgagctcagtgacccagagcgggttagggaaattaccagacaccaggggaagactggggaaattatggggcttccagatctttaggatggctaagatcaccctcccccaaccttaggctccagcaggaagtgccaagaaagacctcttactttcaggatagggcgaatcacattctccttgaagttctttgagatggtgatcttgtcacttatctggacatcccctgtggagaagaatcataaactgcttattccccacattcagggaactttg

SEQ ID NO: 12870 - DNA, 582 bp, Homo sapiens
  MAP TO CHR1.3; EXPRESSED IN FETAL LIVER, SIGNAL = 0.83; EXPRESSED IN ADULT LIVER, SIGNAL = 0.55; EXPRESSED IN LUNG, SIGNAL = 1.3; EXPRESSED IN HEART, SIGNAL = 0.61; SWISSPROT HIT: P32019, EVALUE 3.00e-19; EST_HUMAN HIT: AW401940.1, EVALUE 2.00e-66; NT HIT: gi14732758, EVALUE 1.00e-66
  unsure 89
  unsure 93
  unsure 110
  unsure 125
  unsure 209
  unsure 309
  unsure 473
  unsure 510
gggcactgaaccaagctaagtgcaatgagaatggaagagagaggatgggtgatagatcaacgagactgggcacatgggaggcaaggagnaggngtggagtcagaaatganctcaggtttcggggnttgactcactggaattaagggtgatgccattaaaagaaacaaagacataagagaaagagcaggtttgagaaggaaagataaggntgttcagtttctgagatgctgcacttgaggaactgtgtccactctgttcccttagccccatggggtctggggctaaccacatgctgctcaatgcttcctnctcacctgtttgcttgctgtgtagttgccagaacactccaagcagttatggtaggtgctgtaacagatgacaggctctggaaggctctccaggaaaagcagcagggcttcggctacagaatgattgctggcagcttttggccccattgttaaggaaccgataantgctgctgtccatggttaggaaaaggcccaggagcanagcacatgccagaagtgctgcctgccctgtcaggctctctgctcagggctaggatgccagcctaacttctcg

SEQ ID NO: 12871 - DNA, 507 bp, Homo sapiens
  MAP TO CHRX.3; EXPRESSED IN LUNG, SIGNAL = 1.4; EXPRESSED IN HEART, SIGNAL = 1.1; EXPRESSED IN BRAIN, SIGNAL = 1.4; SWISSPROT HIT: O60907, EVALUE 2.00e-29; EST_HUMAN HIT: AI695065.1, EVALUE 3.00e-89; NT HIT: gi14764641, EVALUE 2.00e-89
gctgggaaaaacaactcctggagatctgatacacattatggagaactgtttgaaaccaccgtgtgtatgtgattttgctttctctcccaccttgctagtgcttcgtttgattctacggtgcgactgtgggacatagaacgaggcgtctgcacccacacgctcacgaagcatcaggagcctgtctatagcgtagctttcagccctgatgggaagtacttggccagtggatccttcgacaagtgcgtccatatctggaatactcaggtaagctcccgacccctacaccaaatccttttagtaagggatgcccaaatagccacgactccagtgcccttggctcagagcagtgccccggagggagttgagcaagctcaggctccccgggcagacccagtggatgctgtccacgtgcaccccacgtgggctgtcagctcttcccccaccagacacctccggcagctcccctccctgaggaagggcgtcgtgtccaccgtaatcatggctctt

SEQ ID NO: 12872 - DNA, 588 bp, Homo sapiens
  MAP TO CHR1.3; EXPRESSED IN ADULT LIVER, SIGNAL = 1.3; EXPRESSED IN HEART, SIGNAL = 1.3; SWISSPROT HIT: O87777, EVALUE 6.60e-01; EST_HUMAN HIT: AL572761.1, EVALUE 0.00e+00; NT HIT: gi13638544, EVALUE 0.00e+00
tggatcctgcctttatccagtctgtctcacctttgaccccatctctccctactcaacgtttgtctctttctctaccccctcttcccctctagtcctctcactattccctctgaccctggtctttctctatcctagatccagtttgtcctggtctcactgcacatctcccagtactactttatgtccagctgtaactaccagtacccagtcattattcacctcatctggatgtatggcaccatcttcttcatgctgttctccaacttctggtatcactcttataccaagggcaagcggctgccccgtgcacttcagcaaaatggagctccaggtattgccaaggtcaaggccaactgagaagcatggcctagataggcgcccacctaagtgcctcaggactgcaccttagggcagtgtccgtcagtgccctctccacctacacctgtgaccaaggcttatgtggtcaggactgagcaggggactggccctcccctccccacagctgctctacagggaccacggctttggttcctcacccacttcccccgggcagctccagggatgtggcctcattgctgtctgccactc

SEQ ID NO: 12873 - DNA, 547 bp, Homo sapiens
  MAP TO CHRX.3; EXPRESSED IN LUNG, SIGNAL = 0.97; EXPRESSED IN HEART, SIGNAL = 0.85; EXPRESSED IN FETAL LIVER, SIGNAL = 1.8; EXPRESSED IN ADULT LIVER, SIGNAL = 0.54; SWISSPROT HIT: P49715, EVALUE 3.90e+00; EST_HUMAN HIT: AL538003.1, EVALUE 0.00e+00; NT HIT: gi14757481, EVALUE 0.00e+00
gtatccgcagagattcgaggacatgccgttgaccttgttacaggactggtgtcggggggaacacctgaacacccggaggtgcatgctcatcctggggatccccgaggactgtggcgaggatgagtttgaggagacactccaggaggcttgcaggcacctgggcagatacagggtgattggcaggatgtttaggagggaggagaacgcccaggcgattctactggagctggcacaagatatcgactatgctttgctcccaagggaaataccaggaaagggggggccctgggaagtgattgtaaaaccccgtaactcagatggggaatttctcaacagactgaaccgcttcttagaggaggagaggcggaccgtgtcagatatgaaccgagtcctcgggtcggacaccaattgttcggctccaagagtgactatatcaccagagttctggacctgggcccagactctgggggcagcagtgcagcctctgctagaacaaatgttgtaccgagaactaagagtgttttctgggaacaccatatccatccca

SEQ ID NO: 12874 - DNA, 547 bp, Homo sapiens
  MAP TO CHR11.3; EXPRESSED IN LUNG, SIGNAL =   1; EXPRESSED IN HEART, SIGNAL = 0.76; SWISSPROT HIT: Q13330, EVALUE 4.00e-06; EST_HUMAN HIT: BI916943.1, EVALUE 1.00e-124; NT HIT: AB012922.1, EVALUE 0.00e+00
gtttccagggtggtgttttgctggatccatttctgacttggtttcttcctctttaatctcccaggggagtttgaagaggaatcaaagcagccaggggtgtctgagcagcagcgccatcaactgaagcaccgggaactttttctttctcggcaatttgaatcattaccagccacccacatacggtacaggacaactggggccagcatagcctgcgtgcacttacgtagaagatggagagaaggaggtggtattgagagatgctgtggggagggagagtggggctcaccggggttttccaatctctctcctatagggggaaatgcagtgtgaccctcttgaatgagacagatatcttgagccagtacctggaaaaggaggtgagaaagagatgttgagagaagagcgaggggaatgggtattgcccgcaaaagagagggggaaaggagcacaatgatgaggtacagggttgccagactgccggtcatggaaactcagatacacctccctccccgccgcctatgtggattgctgccttgcttaccttgtc

SEQ ID NO: 12875 - DNA, 568 bp, Homo sapiens
  MAP TO CHR17.3; EXPRESSED IN HEART, SIGNAL = 1.5; EXPRESSED IN ADULT LIVER, SIGNAL = 1.5; SWISSPROT HIT: Q14457, EVALUE 2.00e-18; EST_HUMAN HIT: AL560004.1, EVALUE 1.00e-106; NT HIT: gi14785898, EVALUE 1.00e-106
ggacagagccaagactggagctctggtttctgcactatttaaccaacatacttttttcacttaatcatgctgactcttcataggtaactctcccaacaaacctctagaaaaagggcatggaagcaatatgcaggatctggggcaggcatgctgctgactgacagctgactagtttacaaactattcagacacattcagctggaagccatttcctctcctggagcctcgagtgtgagaagatagaacagggtgagcactcactgagcttcctcctgatccagtctctcagcctcagcctggaccttctcgagattttctgccactatcttgcggttcttttccacgtcttccagctcctggatcagcctctcctcctctagtgccagctcctttagctccatctgtaactgttcactgtcatcctcattcatttgctctaagatctccaaacagcgtctgccaaagacacaggcagactatacttactagagctccatttgcctgagtggagtacggctcttgggtaagggccaagcagtctcagagcagtaacagctctgagccctgg

SEQ ID NO: 12876 - DNA, 569 bp, Homo sapiens
  MAP TO CHR9.3; EXPRESSED IN ADULT LIVER, SIGNAL = 4.4; EXPRESSED IN LUNG, SIGNAL =   9; EXPRESSED IN HEART, SIGNAL = 3.8; SWISSPROT HIT: P17813, EVALUE 3.00e-13; EST_HUMAN HIT: BI050164.1, EVALUE 3.00e-77; NT HIT: AF036970.1, EVALUE 1.00e-127
gttttctcctggcccttttcctctgtctttaaatattttcaaatatatgtcgtgtaactttttcaaagacaatgaaaagattatcatataaaatattgagttcagttgtcccactggacagagaggcaaactgagcctatgcagaggatcagagttggccagggctgcacatcaacctgactcccacctcttggtctagactctttactgtagtcctggtgccctctgggttctctctggtagagaccattggcttcaccaggcaggaccctggtgaataatgtcaagatgaaagggagaagcagggctgggccgctggggtgggagaccctgacccacagagatggacagtagggacctcccatggccagagcctcagcctggggttggagggaacacactcacgtaggccaagtgcagtgggattcccagggcctggagatgcaggaagacactgctgtttacactgaggaccagaagcacctctcggggccaggtgccattttgcttggatgcctggagagtcagctccagctgtgacgggccctgggggacacagaggagagaca

SEQ ID NO: 12877 - DNA, 552 bp, Homo sapiens
  MAP TO CHR19.3; EXPRESSED IN LUNG, SIGNAL = 1.5; EXPRESSED IN HEART, SIGNAL =   1; EXPRESSED IN FETAL LIVER, SIGNAL = 0.89; EXPRESSED IN BRAIN, SIGNAL = 0.84; EXPRESSED IN ADULT LIVER, SIGNAL = 0.81; NT HIT: AF020797.2, EVALUE 1.00e-78; EST_HUMAN HIT: BE901394.1, EVALUE 2.00e-78; SWISSPROT HIT: Q9Y6Q5, EVALUE 1.00e-41
tgggtgtaaggaactggaggaggtccacggaggtgtccctgggtccagctgcttgtccctgccgccctccctccaggtacatcactcagcagagcaacaagctggagacgggcaagtcacgggtgccacccactgtcaccaacgctgtgtcctggcgctccgagggtatcaagtataagaagaacgaggtcttcattgatgtcatagagtctgtcaacctgctggtgagcctgcacacctccccggcaccccttccacggcctggctgcaggagacggagtttgatgcctgctaactatacccaacgtcctccctcaggtcaatgccaacggcagcgtccttctgagcgaaatcgtcggtaccatcaagctcaaggtgtttctgtcaggaatgccagagctgcggctgggcctcaatgaccgcgtgctcttcgagctcactggccgtaagcatttaggggacctttcttctgagaaatgcacaggggagtcgcaaacccgccccacgtggggacttaagagaatcgcagcccgttttgaaataagcgctcgc

SEQ ID NO: 12878 - DNA, 596 bp, Homo sapiens
  MAP TO CHR22.3; EXPRESSED IN HEART, SIGNAL = 0.71; EXPRESSED IN ADULT LIVER, SIGNAL = 0.76; SWISSPROT HIT: O15442, EVALUE 5.00e-40; NT HIT: gi4502496, EVALUE 1.00e-125; EST_HUMAN HIT: BI915267.1, EVALUE 1.00e-125
gatgaagacacctgttgggggcctggcagcaggtacccctgtcagcgattccagcagcttcctcctgcccgcccctctctcagccatgctgtggcttctggacaagctgacagctgtgtgctgtgtgtctgtctgtgtccacccctgcaggcagcctgccctatgagtacaagatcgtgatcgcgggcaaccacgagctgacctttgaccaggagttcatgcagcttcctcctgcccgcccctctctcagccgtgctgtggcttctggacaagctgacggctgtgtgctgtgtgtctgtctgtgtccacccctgcaggcagcctgccctacgagtacaagatcgtgatcgcaggcaaccacgagctgacctttgaccaggagttcatggccgacctcatcaagcaggacttttactacttcccatctgtgtcgaagctgaagccggagaactatgagaatgtgcagtcgctgctgaccaactgcatctaccttcaggactcggaggtcaccgtgcggggcttccggatctatggctccccatggtgagtgggcctgggtgctggtcctgcctgctggtgagaccagagctgaggct

SEQ ID NO: 12879 - DNA, 569 bp, Homo sapiens
  MAP TO CHR11.3; EXPRESSED IN LUNG, SIGNAL = 0.62; EXPRESSED IN HEART, SIGNAL = 0.67; NT HIT: gi5803214, EVALUE 1.00e-69; EST_HUMAN HIT: BG489265.1, EVALUE 3.00e-68; SWISSPROT HIT: O00526, EVALUE 3.00e-17
cactcctgatcctcctccagacctaggaggcagagaggtgtgggcaaggatccgatgctgcggggaggggtgaggttgggcgctgcccgactcctggcatccaggttctggctctggggaccgcttggtggagggtgcagcttctgcagcccaagcctgccacctggtggtcatactggcacaggcctggctgttctgcccagggttcacagagtggaaagggagatggctccaatgggaccgggccagatctgttggccaggaggggtcagtccccatcggagctccctcctgcctcccatcagacttcaacatctcaagcctctctggtctgctgtccccggcgctaacggagagcctgctggttgccttgcccccctgtcacctcacaggaggcaatgccacactgatggtccggagagccaatgacagcaaaggtctgctaccttctcccaaggcatccctctagtccccaaagaccccttcctgcgacaccctctgcacccttttccccattcatgccttcctgtccacccgtctcctggggtacccacactctaaaagctgcc

SEQ ID NO: 12880 - DNA, 586 bp, Homo sapiens
  MAP TO CHR17.3; EXPRESSED IN LUNG, SIGNAL = 0.99; EXPRESSED IN HEART, SIGNAL = 0.61; EXPRESSED IN ADULT LIVER, SIGNAL = 0.78; EXPRESSED IN BRAIN, SIGNAL = 0.47; EXPRESSED IN FETAL LIVER, SIGNAL = 0.66; EST_HUMAN HIT: AL575305.1, EVALUE 0.00e+00; SWISSPROT HIT: P10147, EVALUE 2.00e-16; NT HIT: D90144.1, EVALUE 0.00e+00
ctccagctccaagtcaggtcacacctcggagccctgcgtcctgtatccccgataggctcctgaaggctgggcctttccaggatagccttctggcctgtctctgccccaaccctgaccctccctacctccatagaggtgagcaggaagactggcacttacatgacaccaggcttggagcactggctgctcgtctcaaagtagtcagctatgaaattctgtggaatctgccgggaggtgtagctgaagcagcaggcggtcggcgtgtcagcagcaactgtggagaaaggaagagaatgagcccgagtcacagctcagaagaaaaggccaggcagcttctgatccccgagcagttgaggaaggcaggcttgctcagaccaagtgactggaaggcatttgggcatttttgctgagaaatgtctctttgtttctgtctgtatccttctttctccttgactcttcatagtgggttctctgtttctctgtgtgatccagatacctgaacggactgttctcttatctcagttctcttcagggaattttgtctggttcaagaagtcataccccaacccaagagaaaccttggaca

SEQ ID NO: 12881 - DNA, 573 bp, Homo sapiens
  MAP TO CHR21.3; EXPRESSED IN LUNG, SIGNAL = 2.2; EXPRESSED IN HEART, SIGNAL = 2.6; EXPRESSED IN FETAL LIVER, SIGNAL = 1.9; EXPRESSED IN BRAIN, SIGNAL = 2.8; NT HIT: AF026952.1, EVALUE 0.00e+00; EST_HUMAN HIT: BF726856.1, EVALUE 0.00e+00; SWISSPROT HIT: P02489, EVALUE 1.00e-32
ctgaggtccagagaagcaggggcatgaatccataaatcccagggggcctggccatgggatgtgctggctgcacccggcccctgtgagagcccccgcaggctggcccccttctgcagtcagtggggctggggcagcttctctggcatggggcgaggcagccgcctgcacagtggcccccctgactgtgcgcccccaccctctccaggacgaccacggctacatttcccgtgagttccaccgccgctaccgcctgccgtccaacgtggaccagtcggccctctcttgctccctgtctgccgatggcatgctgaccttctgtggccccaagatccagactggcctggatgccacccacgccgagcgagccatccccgtgtcgcgggaggagaagcccacctcggctccctcgtcctaagcaggcattgcctcggctggctcccctgcagccctggcccatcatggggggagcaccctgagggcggggtgtctgtcttcctttgcttcccttttttcctttccaccttctcacatggaatgagggtttgagagagcagccaggagagcttagggtct

SEQ ID NO: 12882 - DNA, 551 bp, Homo sapiens
  MAP TO CHR19.3; EXPRESSED IN ADULT LIVER, SIGNAL =   2; EXPRESSED IN LUNG, SIGNAL = 2.2; EXPRESSED IN HEART, SIGNAL = 1.9; EXPRESSED IN FETAL LIVER, SIGNAL = 3.1; EST_HUMAN HIT: AI566486.1, EVALUE 0.00e+00; SWISSPROT HIT: P17038, EVALUE 1.00e-112; NT HIT: gi16163770, EVALUE 0.00e+00
tcaataaggtttgaggatcggttaaaagctttgccacatttttcacatttgtagggtttctctccagtatgaataatcttatgtgtagaaagggttgaggacagtttaaaagctttgccacattcttcacatttgtagggtttctctccagtatgaattatcttatgtttagtaagggttgaggaccacttaaaggctttgccacattcttcacatttgtagggtttctcctcagtgtgaattatcttatgtttagtaagagttgagaactggttaaaagctttgccacattcttcacatttgtagggttttcctccagtatgaatttttttatgtgtagtaaggtttgaagattgggtaaaagctttgccacattcttcacatttgtagaatttctctccagtatgaattttcttatgtgtagtaaggtttgaggattgggtaaaagctttgccacattcttcacacttgtagggtttctctccagtatgaatcctcttatgtttggtaaggattgagaaatggttaaaagctttgccacattcttcaca

SEQ ID NO: 12883 - DNA, 525 bp, Homo sapiens
  MAP TO CHR1.3; EXPRESSED IN LUNG, SIGNAL = 2.8; EXPRESSED IN HEART, SIGNAL = 2.1; EST_HUMAN HIT: AL541085.1, EVALUE 1.00e-100; SWISSPROT HIT: P31994, EVALUE 2.00e-32; NT HIT: M90730.1, EVALUE 0.00e+00
ggggtgtctgtgtgtctgtgctggtggggagaggttggtggggagagagagaaagaactggtgaggatatctcaggtaaagtatatgtatttcgagggtgtttctcttgcctgctccctccttcttccctgttgccctgtcggagtcctgggctccctggggccgttgtggtgggatgtatgagcaaaagcaactgccttcagttgcagaaccattctgggcctggctcggcttttggtgcccctagtaggcctacaggtgcttttttgtctgagattcagggcctctcaagctcctgggcttcctcttcttcatgctacctcctctctctgcccctcagcagctcccccaaaggctgtgctgaaactcgagccccagtggatcaacgtgctccaggaggactctgtgactctgacatgccgggggactcacagccctgagagcgactccattcagtggttccacaatgggaatctcattcccacccacacgcagcccagctacaggttcaaggccaacaacaat

SEQ ID NO: 12884 - DNA, 573 bp, Homo sapiens
  MAP TO CHR12.3; EXPRESSED IN FETAL LIVER, SIGNAL = 0.59; EXPRESSED IN ADULT LIVER, SIGNAL = 0.81; EXPRESSED IN BRAIN, SIGNAL = 0.56; EXPRESSED IN LUNG, SIGNAL = 1.5; EXPRESSED IN HEART, SIGNAL = 0.91; SWISSPROT HIT: Q9Y6K5, EVALUE 7.00e-24; EST_HUMAN HIT: BF095698.1, EVALUE 0.00e+00; NT HIT: gi13652760, EVALUE 6.00e-81
gcccagctctcaagtctacgtcgacctcatccacagctacagcaatgcgggcgagtactccacctgcttcacagagctacaacgggacttcatcatctctcgccctaccaagctgaagagcctgatccggctggtgaagcactggtaccagcaggttcggcacatggataggccaccttcctaagttgccctgggatctgcctctggagcactttcctgggaggaagcagggcccagccctggccaagatcctgggttggtggagcagagcagaaagagtgctatatctcagctgtgggaccttagttttcttatctgtaagatgggggtgataaaactatgtcacaggatgtgatgggataatgcatggcaaggcatctggcacatgtaggtgctcaataaaagttttggggttgctttgccaagtccagaataatcccttctgtacctcatcagtgccaatatgaaccaacatatctttcttctcgttctccagtgtaccaagatctccaaggggagaggctccctacccccacagcacgggctggaactcctgactgtgtatgcctggga

SEQ ID NO: 12885 - DNA, 592 bp, Homo sapiens
  MAP TO CHR18.3; EXPRESSED IN ADULT LIVER, SIGNAL = 0.84; EXPRESSED IN HEART, SIGNAL = 0.76; EXPRESSED IN BRAIN, SIGNAL = 0.76; SWISSPROT HIT: P25637, EVALUE 2.00e-07; EST_HUMAN HIT: BE380089.1, EVALUE 3.00e-71; NT HIT: Z97340.2, EVALUE 1.40e-01
aaaattcccaggcagtgatgagaaattctctagatgtagtacgaagagccacttacaggtgaatttgtgtagttcttttccactagtatgtttctggcacagttgttgatatgtttaaagcgatctggtcctagcagaatccctccataccagcgtgatactaccaccatgacattcttcacattcaaaatctgttattttttggaagcataattagatacatagacagacatgtataaatatgagttttaaaaaaggagaatgaaataacccatgtataaaattgcacataaaatttcccagtgactttaatggtagagccatatgagtgagtaggcactgagtgagattactaacaattcagggagtgaaatggaagaacagaagggaatctggaaaaccatcactgtgtttcacaatgtcctcaaactcccagatttggggcaactggacagagtgaaggggagaccatgcaagtaggattctagcacctggtgacttcaaccagaacagctaagtttaggcagcattttaccactaggccaaataacaacaaaaaaaaccctgcttctgaacaaagctacaggggctg

SEQ ID NO: 12886 - DNA, 572 bp, Homo sapiens
  MAP TO CHR9.3; EXPRESSED IN LUNG, SIGNAL = 4.3; EXPRESSED IN HEART, SIGNAL =  46; EXPRESSED IN ADULT LIVER, SIGNAL = 1.3; EXPRESSED IN BRAIN, SIGNAL =  14; SWISSPROT HIT: P41222, EVALUE 5.00e-32; EST_HUMAN HIT: BI488546.1, EVALUE 0.00e+00; NT HIT: M98538.1, EVALUE 0.00e+00
cttgtgcatgggtagtcacgcccaggcctggcctttgcctctgacgctggtggggcagccatcacctcccaccccatggatctccgcggcagggggctggcccagagtcgtcccggcaagtgtcgcccccaggctgggcccagggggccggtggaggccccactcacggggactccggtagctgtaggagccgagggaccccgcgggctgcagcagcatggttcgggtctcacactggtttttcctgtaggtgggtgacctcagggtcaggggttaggcccgagggtgtccctggacctctccgtcccagaaacccacctgcccgctgtcccacctgaggaaggtggaggtcaggttgaggccaccatccgtggcaggggccaccacagacttgcacatggacaacgccgccttcttctcccggagccagctcgagttggaggcgaggcccgcgctgaaccagcgccccaggaactgcggcgagcgacccccacccgcgtcggccaggaccctccggacccacctgcgcctacctgcgggggcgcctctgccgtctactcctccggtctcca

SEQ ID NO: 12887 - DNA, 597 bp, Homo sapiens
  MAP TO CHR17.3; EXPRESSED IN LUNG, SIGNAL = 0.61; EXPRESSED IN HEART, SIGNAL = 0.54; EXPRESSED IN ADULT LIVER, SIGNAL = 0.57; SWISSPROT HIT: P38398, EVALUE 3.00e-93; EST_HUMAN HIT: BF791668.1, EVALUE 0.00e+00; NT HIT: gi14772936, EVALUE 0.00e+00
ggtgatgttcctgagatgcctttgccaatattacctggttactgcagtcatttaagctattcttcaatgataataaattctcctctgtgttcttagacagacactcggtagcaacggtgctatgcctagtagactgagaaggtatattgtttactttaccaaataacaagtgttggaagcagggaagctcttcatcctcactagataagttctcttctgaggactctaatttcttggcccctcttcggtaaccctgagccaaatgtgtatgggtgaaagggctaggactcctgctaagctctcctttctggacgcttttgctaaaaacagcagaactttccttaatgtcattttcagcaaaactagtatcttcctttatttcaccatcatctaacaggtcatcaggtgtctcagaacaaacctgagatgcatgactacttcccataggctgttctaagttatctgaaatcagatatggagagaaatctgtattaacagtctgaactacttcttcatattcttgcttttttatttcaggatgcttacaattacttccaggaagactttgtttatagacctcaggttgcaaaaccccta

SEQ ID NO: 12888 - DNA, 522 bp, Homo sapiens
  MAP TO CHR13.3; EXPRESSED IN FETAL LIVER, SIGNAL = 6.1; EXPRESSED IN LUNG, SIGNAL = 8.7; EXPRESSED IN HEART, SIGNAL = 5.3; SWISSPROT HIT: P13798, EVALUE 2.00e-16; EST_HUMAN HIT: BE792952.1, EVALUE 0.00e+00; NT HIT: U37055.1, EVALUE 0.00e+00
tggagtattaccgtgccctcaagacccggaatgtgcctgttcggtgagtgcagcatgaaggccctggcagctggtgggcaggtgagcacaggaggaccctccaaccttaaatgttgctgactaatccctacaggctcctgctctatcccaaaagcacccacgcattatcagaggtggaggtggagtcagacagcttcatgaatgctgtgctctggctacgcacacacttgggcagctgaagccctgccattctgcatgagctgatcagcctgtgccacacttcgctcttgaggagctcaacggtctggcagggcagcaggaggctttctgggctctggactccacggatgcgtgggcagaggaatgtgggctatgtagtcataataaattaggacacagagcctggttcctgctggtactttgtaccaaaccatccccaaccccacctcccactctggggtgcagagaccctaggttctgggtgtggcagccacaagggcttcatctgcctccagtgtgaga

SEQ ID NO: 12889 - DNA, 563 bp, Homo sapiens
  MAP TO CHR3.3; EXPRESSED IN LUNG, SIGNAL = 0.34; EXPRESSED IN HEART, SIGNAL = 0.52; EXPRESSED IN ADULT LIVER, SIGNAL = 0.58; SWISSPROT HIT: P51681, EVALUE 1.00e-61; EST_HUMAN HIT: BI764263.1, EVALUE 0.00e+00; NT HIT: AF009962.1, EVALUE 0.00e+00
ttgcttggccaaaaagagagttaattcaatgtagacatctatgtaggcaattaaaaacctattgatgtataaaacagtttgcattcatggagggcaactaaatacattctaggactttataaaagatcactttttatttatgcacagggtggaacaagatggattatcaagtgtcaagtccaatctatgacatcaattattatacatcggagccctgccaaaaaatcaatgtgaagcaaatcgcagcccgcctcctgcctccgctctactcactggtgttcatctttggttttgtgggcaacatgctggtcatcctcatcctgataaactgcaaaaggctgaagagcatgactgacatctacctgctcaacctggccatctctgacctgtttttccttcttactgtccccttctgggctcactatgctgccgcccagtgggactttggaaatacaatgtgtcaactcttgacagggctctattttataggcttcttctctggaatcttcttcatcatcctcctgacaatcgataggtacctggctgtcgtccatgctgtgttt

SEQ ID NO: 12890 - DNA, 576 bp, Homo sapiens
  MAP TO CHR11.3; EXPRESSED IN LUNG, SIGNAL = 4.4; EXPRESSED IN HEART, SIGNAL = 3.9; EXPRESSED IN BRAIN, SIGNAL = 4.2; NT HIT: AF126246.1, EVALUE 3.00e-58; EST_HUMAN HIT: BF956346.1, EVALUE 4.00e-58; SWISSPROT HIT: P17471, EVALUE 8.40e-01
gcaggagcttactgtctgggcgcttatgtctaccacgaaggaattgacgtcgtgctgggttttgggcaactcattgaggaaggcaacaacgttgagacgcgtgtgcttcagcagccggaaccgcaaggctgtgggtagaggagaaagctcagtggtgctgccacacactcctgagttctgactgattccttcccatgcccttttcccatattttgttcgtatcacacacttactagggtctttaagcttcttcacatttctgctatccttgaaatactcggctaagctgcttctgggggaataaaaggaatggacgtggtgttcagagcagtgctgccagcaggtgtgccctgtatctgctgggaaacccagtggtcccgggcagattctgggatgtgatactaaccgggcagggttctgaggaatgaaaggaatgctcagggaacagcaggccccatcatggtaggcatccaggagcccttgccggtctccagagtcgtaaattgcatagtacctatgggaaaaacaaaaaagaaagtatgggctctgtggtctacagccatacaaggacccagt

SEQ ID NO: 12891 - DNA, 518 bp, Homo sapiens
  MAP TO CHR9.3; EXPRESSED IN FETAL LIVER, SIGNAL = 2.7; EXPRESSED IN HEART, SIGNAL = 1.8; NT HIT: gi11429613, EVALUE 1.00e-103; SWISSPROT HIT: Q15526, EVALUE 8.00e-34; EST_HUMAN HIT: AL549808.1, EVALUE 0.00e+00
agccacattttccattcagggtagcaaacagtatgccagatttggcttgcagatggggttttggcccacatattttttaaaatttcacataaaatattcattgaggagtccagatttttagcctctcttgtaaagttggactctggcagtgcagatccacattcccacatggcatcaaagttcccctttgaagagcacgccctttgcctttctccttcacttgtctggccctggtgggctgtgtagtctgccaccctcaggggattcgttttccagccaaaccttgctcggccactgttcttatctccatgcagcccaatggaactgaaaaatctggagtataggccagtgaaggtcagggggtgctttgaccattccaaggagctgtatatgatgccccggaccatggtggaccctgtccgggaggcccgggagggcggcctcatctcctcctcaactcagagtggggcctatgtggtcactcccttccactgcaccgacctggggtgagtaggaca

SEQ ID NO: 12892 - DNA, 592 bp, Homo sapiens
  MAP TO CHR5.3; EXPRESSED IN ADULT LIVER, SIGNAL = 2.3; EXPRESSED IN BRAIN, SIGNAL = 1.5; EXPRESSED IN LUNG, SIGNAL = 2.5; EXPRESSED IN HEART, SIGNAL = 1.5; NT HIT: gi14723088, EVALUE 8.00e-68; SWISSPROT HIT: P81103, EVALUE 9.00e-13; EST_HUMAN HIT: BG216492.1, EVALUE 3.00e-68
tcgttgtttctctcccatccttcttttagttggctgattgcaattctggcccaactcaaccctctctttggaccgcaattgaaaaatgaaaccatctggtatctgaagtatcattggccttgaggaagaagacatgctctacagtgctcagtctttgaggtgactatgcttgtgacctttcttatcagtatggtcaggcagtcagagtttgccttgactttttctcacattttatggccattttaacacgtggcaagggcaagctgctgaatgcaaacacgatctgaagagcagaaataaaattggaacttaagccttagcttacctaaatctcattaagattctttttagattctgctatcaccctgcctttttaaataaatacagtttaatttacaaaattaagcttgcatgcactctttcagacgcagatcaaaaaagtaactgtttatacttggcattgtgagatccagcaactttaaaaagtggctggcagatttaaaattgagcaggtttctttccagcagtagtcagccatccggacagaaccgttcctgtgatggtgttacactgctgggagaggaatgtcttg

SEQ ID NO: 12893 - DNA, 555 bp, Homo sapiens
  MAP TO CHR16.3; EXPRESSED IN LUNG, SIGNAL =  19; EXPRESSED IN HEART, SIGNAL = 8.6; NT HIT: gi15431298, EVALUE 0.00e+00; SWISSPROT HIT: O65729, EVALUE 2.00e-30; EST_HUMAN HIT: BI850531.1, EVALUE 0.00e+00
agtggacgtagggtttggtgtggctgtgcggggttcccggggccttgccaaaatgcccgtacacctttcggcccttgagaggaccggagagcaggacggtgctgcagcccttgcgggagtccacggccagctggtcgaaaagtgaggatcttgccccctgccctgaggacgcggctgcgggccaggttggtcacactcagcacacacaccttcagtttgggcacctcctgaacccgcacgtcatctgttatgctccccacaatcacggccgttttgttttcccggacaggaagcttcactcttctggatcatctgggaaagggacagaggtggccggttggtacgactcataaacaacctcttcagcacaacctggttgaatgtggagtcggttcgtctggccagaaaactgcacagcttgaccaacagcctcaggtagatatcctggctcttgggctccttgcgccgaacctttcggtccttgttgtggcagatgtcagctcccatgatggcgtctcctgctcggccaggtacggaaagagagaacggccaatg

SEQ ID NO: 12894 - DNA, 521 bp, Homo sapiens
  MAP TO CHR1.3; EXPRESSED IN LUNG, SIGNAL = 1.6; EXPRESSED IN HEART, SIGNAL = 0.95; EXPRESSED IN FETAL LIVER, SIGNAL = 0.48; EXPRESSED IN BRAIN, SIGNAL = 1.1; SWISSPROT HIT: P38994, EVALUE 6.00e-05; EST_HUMAN HIT: R06616.1, EVALUE 7.00e-72; NT HIT: gi14780991, EVALUE 3.00e-61
gcgagactgtggagaaaaggggccttcctttgggaatatccctctgatactggagtcacagtgtcctgatatccagatgcttaccaagtaatcatcgggccggataccaaatagctcccggaagtagcggaaggcaacaggtgcataggtcttgaaacgaaagtcattgtagtgatgagcaggggtcaggttgctcccttcactgtggggttaaacagaggtagccataacttgccagtccctatcatccagagaatctaccttgcgaagacactcagagtcacctcatggtggggggagtgggggaatacattcctcctaagataatcacagcccttcttagatgagttagtgagacaatggcacagcatggacagcaagacataagaagaagaagaaatcacactgcctcctatccaatgcattaggttgttttttacgggtcaatccataggacagaggctaatggaagcatctagaggacagtatctgctctccgaactctctagtcccacatcgcc

SEQ ID NO: 12895 - DNA, 519 bp, Homo sapiens
  MAP TO CHR2.3; EXPRESSED IN LUNG, SIGNAL = 2.1; EXPRESSED IN HEART, SIGNAL = 1.6; EXPRESSED IN FETAL LIVER, SIGNAL = 2.2; EXPRESSED IN BRAIN, SIGNAL = 1.6; EST_HUMAN HIT: AU119199.1, EVALUE 1.00e-79; NT HIT: gi16160066, EVALUE 8.00e-80; SWISSPROT HIT: Q92545, EVALUE 6.00e-24
ggtggattgtgggtaagtggagccctgtggtttctaaactactatacttacagctgccaggtttgtgaactggaacggaatcccactccggtggaggagagtctttttcaccctctgagctactggtgttgcctaattcttgactattcgggaggaattttgctagggcaggtggtctgttatccactaacttacttgtacctgcacaaaaatcagaaaagaacatggttaatggagaatcattcctttctttcaggtctatttcaatgaaccttctaatgaggacaagaacacagccttagccttgcatgactaataactactgactgcttactgataatgcacaacaattgttaatacggtgcactatgaaaagatccgtaagacatgatcatagagaacaagatgacaataccttttgttttctgggcatttcgtgatttggatccacttgtcattgcagttggaagaggaatcttgcttgggagatttctacgttgcttactttccaaaggggga

SEQ ID NO: 12896 - DNA, 520 bp, Homo sapiens
  MAP TO CHR9.3; EXPRESSED IN BRAIN, SIGNAL =   1; EXPRESSED IN LUNG, SIGNAL = 0.71; EXPRESSED IN HEART, SIGNAL = 1.2; EST_HUMAN HIT: AL523929.1, EVALUE 0.00e+00; NT HIT: M96264.1, EVALUE 0.00e+00; SWISSPROT HIT: P07902, EVALUE 9.00e-31
cttaggaagctttcgtcccctccgaaggttggaacgctcatcccgagccagaccgacaaggcgtacagtctgcaggcctgtacgagcagcaggccaattggcgctgggaaagtccaatcctgggcctctagctcctgagcgggacagggccgagagggcgctcccgagcttgggcctgctggtgggtgagacccaggagagagggagctagagagctctgaggactgatcttgactgtctgcccccagaccatcagcatatccgctacaacccgctgcaggatgagtgggtgctggtgtcagctcaccgcatgaagcggccctggcagggtcaagtggagccccagcttctgaagacagtgccccgccatgaccctctcaaccctctgtgtcctggggccatccgagccaacggagaggtaagcctgtagagccctgcatctgcaggctgggccacggggagtagttccctcttagaactgtcctccacccacagggatagtgaacctccttctgggtca

SEQ ID NO: 12897 - DNA, 550 bp, Homo sapiens
  MAP TO CHR15.3; EXPRESSED IN FETAL LIVER, SIGNAL = 0.76; EXPRESSED IN ADULT LIVER, SIGNAL = 0.67; EXPRESSED IN BRAIN, SIGNAL = 0.65; EXPRESSED IN HEART, SIGNAL = 0.77; NT HIT: AF067375.1, EVALUE 3.00e-30; EST_HUMAN HIT: AL599623.1, EVALUE 0.00e+00
gcttagcttctggatggtgcctagcaaagtatctcatacaaacggacattttgaaatattcccaagagataagtcactaagaatttttcataatgataattaggcagtaaataacaaaaacaattatcaaacacacattttgcaatacaaataaccatcactaaaacttgttccgtttgacagttttccccaccttatctggagttcaggaggcagttctttttcctcttcccatatagtcatttctacgacatattttatcactgaaggaaatattttcctggcttggacaattacctcttcattcaacggacagcgtgaattctataaaaaagccgagaaaaacatactagtcaagattgtatacaaataaatggataaggaaggtaatgttaagttaaaataatcactttgctgaattcattacaacatcgtccaggaatgaattcaagttgagctcaagagggttgctatatatttagatcagtttagcttaaccccttgtggccaagttggtgttactgatgacagaaaggaggcagaaccatga

SEQ ID NO: 12898 - DNA, 532 bp, Homo sapiens
  MAP TO CHR1.3; EXPRESSED IN LUNG, SIGNAL =   1; EXPRESSED IN HEART, SIGNAL = 0.88; EXPRESSED IN FETAL LIVER, SIGNAL = 0.54; EXPRESSED IN ADULT LIVER, SIGNAL = 0.91; EXPRESSED IN BRAIN, SIGNAL =   1; NT HIT: gi14723839, EVALUE 0.00e+00; SWISSPROT HIT: Q92633, EVALUE 4.00e-16; EST_HUMAN HIT: BF675391.1, EVALUE 0.00e+00
cctctctttactgcccatgcttttaaactatgaaaaaaaattttttaaagaaatctagcagtgattaatggagacctcaaataacactgtacatgggctttgttagagacaggtaatcattcttaacagctcttttcccagaggaggcctgggtgggccgagaggcatccagagtttaggaagtgcttttattgcagactgcaccttggctaatactatcctctatgtactggctgcctgtgtcactcctgctgaggactgtggaggggatgcgagagggacgcctctctgggttctcctgagagaagcagcagatcatcttcttcatggtgccatacatgtcctcgtccttgtaggagtagatgatggggttcacgacggagttgagcagcgccagcagcaggaaccaccttttcacatgctgcacgccacactgcctgcagttcaggccgtcgaggagcagaaccaccaggcccggggtccagcataccacaaacgcccctgcaaggagagaagaggaggcaacagatgc

SEQ ID NO: 12899 - DNA, 549 bp, Homo sapiens
  MAP TO CHR1.3; EXPRESSED IN BRAIN, SIGNAL = 1.1; EXPRESSED IN LUNG, SIGNAL =   2; EXPRESSED IN HEART, SIGNAL =   2; EXPRESSED IN FETAL LIVER, SIGNAL = 1.8; SWISSPROT HIT: P30054, EVALUE 6.00e-12; NT HIT: gi14747175, EVALUE 8.00e-34; EST_HUMAN HIT: AV716481.1, EVALUE 2.00e-35
atgtacttgcccaaggttgccagctagtaagcccagagcccagatctgagccaggtgcatctggctccagaacccacagctactgctgcagctggtcatggcaccagcctgtgagctggaaccagcctgtcccaggaatcacagtgcctgggatgtgaccccagcttttccagtgacttgctatgtgaccatgagcccatcacttccctctctgggtctcagtttcctcatctgtaaaatgaaggggtgaactccaatgcccccttgatagtgagcctctgagcctatgaggaacaagaaacaaaacgcaccttttccttttgcctcgttacacttctgaaagcaagatgggtcaccagcagctctactggagccaccaacaaaaattcggccagggttcttgctcttgtcacgtctgctcaaaccagcagggtctgatccagaaatacggcctccatgtgtgcagctatgtttctgtcggaggatgtaggtagtcttcatgaagctggccttgagtagattagccaaggcacccactcaaggaaagaa

SEQ ID NO: 12900 - DNA, 536 bp, Homo sapiens
  MAP TO CHR11.3; EXPRESSED IN BRAIN, SIGNAL = 3.9; EXPRESSED IN LUNG, SIGNAL = 2.3; EXPRESSED IN HEART, SIGNAL = 1.8; SWISSPROT HIT: P10569, EVALUE 2.60e-01; NT HIT: gi14784557, EVALUE 0.00e+00; EST_HUMAN HIT: BG749033.1, EVALUE 0.00e+00
ttctaccgcctgtgtgactgagctgccctcctgaggcagcaccacaccagggaccaggggtgcccaggcaccccccaacactggatgcaatggtgttacactggagcccgctgcaggccagctctgctgttcactggccctacccgagactggtgaaactggaagtcttcacactggagttgctgttccagctggtcgcccctcacggcacagagggaacctgagagccagagacttcttgggccttcctgcctgccaccccctaggggccaggacaggaccagtttacctctttccagatatggtggttggagggctggttcaggtgccctggagggaaggggaagcctgtggccctgatttgttcagagcccattctcccttgcctccccttttgagactggagccaacccttttggagagaggacctgcccacctttgagatcagcagggggctcggatccagccctaagagacttgggtggacccccatgagtcaatggagggcagacggctctcccccttaaagctgttcc

SEQ ID NO: 12901 - DNA, 557 bp, Homo sapiens
  MAP TO CHR1.3; EXPRESSED IN FETAL LIVER, SIGNAL = 3.3; EXPRESSED IN ADULT LIVER, SIGNAL = 2.4; EXPRESSED IN LUNG, SIGNAL = 2.9; EXPRESSED IN HEART, SIGNAL = 2.3; SWISSPROT HIT: Q99062, EVALUE 2.00e-48; NT HIT: gi14732837, EVALUE 1.00e-101; EST_HUMAN HIT: BI054603.1, EVALUE 1.00e-101
tgtgtttccctctccattcctctcagtgtctgcccattttggggatcccctccctcccctgcatcacccaccaacatccatgggatcaagacacagttgtggggacatgctggtccccagcgcattctctgcctgcacccagatgcccatattctggtacaacagcaggtgtttgcgtgggatgcagcagtggctctgcccgtccttgggcacgcagtccaggatggagtccccttgggtctgacagttgccccggctcctgccaatagtccaggcttgggtgccaagcagaggaagaaagcgaggctcccttctccctcccagaggcatgcccagcatcctacccatgccctaccccagaatccaaagggaggggaccaaggtgggggcccctcctcacttgaaactcttcagagtgaagctggtgggtaggtgggtctcaggtcctggctcccactggcagatgaggctgctggttgtgaggttcatgaggcaggagaggttgtggggtatggctggagggtctgcatgtgggtgggaagagtgtgagggctttg

SEQ ID NO: 12902 - DNA, 550 bp, Homo sapiens
  MAP TO CHR10.3; EXPRESSED IN HEART, SIGNAL = 0.88; EXPRESSED IN FETAL LIVER, SIGNAL = 0.63; EXPRESSED IN ADULT LIVER, SIGNAL = 0.8; EXPRESSED IN BRAIN, SIGNAL = 2.2; SWISSPROT HIT: Q15811, EVALUE 2.00e-09; NT HIT: AJ277074.1, EVALUE 0.00e+00; EST_HUMAN HIT: BG259376.1, EVALUE 0.00e+00
tggacagcttcttgtataaattgctattcagcaatacataaactgcctcaaagatttatgcttacaggtagacattcaatttaccaataaaacagcatgttctgaaaatatgggcacattttaaaacatattaagacagttctgttaaccataatagtcccacagtatgactgagtaataagaatctacttcaaaagaaaaaaaaaaattaatcagtatagtgcatgattgattcaacatagttcccagggaacagaccagtcactcgattgcagactccttcataccagccatcatcattcttctttataacataaatgattgcaccctccataaatgacagctcatcatccttgtcttttgtataatcatatattgcaacaactatggaaaaaacagttgaaatatcacatgagtgcactatatccaaaatttacttgaattttaagacaaagacaattaaatatatagcacagcaaaactatttttatgaagatttcttaatttttgtatctatcaatataagtaggtcagtggccaaccatgtact

SEQ ID NO: 12903 - DNA, 501 bp, Homo sapiens
  MAP TO CHR9.3; EXPRESSED IN HEART, SIGNAL = 1.3; EXPRESSED IN FETAL LIVER, SIGNAL = 0.32; NT HIT: S72008.1, EVALUE 2.00e-55; SWISSPROT HIT: Q16181, EVALUE 3.00e-15; EST_HUMAN HIT: AI239750.1, EVALUE 4.00e-61
ttaaggagcccatggaacacccaggtagcatatccactgggtaaacacaaatctggaacgtaacagtgagatatgggctgtgtatgaagatttgagagtcagttgaccaattgaagataattgaaatctaactggggatgtgaagaatcttgttctcccaaactgatcaattcagtcgtattaaatactgtgtatttcagacttaaaccattggatattgagtttatgaagcgtttgcatgaaaaagtgagtatcaccccacttattgccaaagcagacacactcacaccagaggaatgccaacagtttaaaaaacaggtgagcaggatgtgttaactcaggtttcttataccattctcataatttgcagtttttactatttttagtataatgtgttgcaatccattcctcttactgctttactgtgttgtcatttatgctgtattaaaaataactcttgaatcttctgccttagttttcccctcaaagctcttacccatt

SEQ ID NO: 12904 - DNA, 565 bp, Homo sapiens
  MAP TO CHR1.3; EXPRESSED IN ADULT LIVER, SIGNAL = 1.5; EXPRESSED IN HEART, SIGNAL = 1.2; SWISSPROT HIT: P31994, EVALUE 9.00e-49; EST_HUMAN HIT: AL566658.1, EVALUE 0.00e+00; NT HIT: M90731.1, EVALUE 0.00e+00
atcgtgtcccaccagtaaggaagatctgggtctcagagctgagccaagacctcccgggtcctctgcggttttttgtgtctttcagagtggctggtgctccagacccctcacctggagttccaggagggagaaaccatcgtgctgaggtgccacagctggaaggacaagcctctggtcaaggtcacattcttccagaatggaaaatccaagaaattttcccgttcggatcccaacttctccatcccacaagcaaaccacagtcacagtggtgattaccactgcacaggaaacataggctacacgctgtactcatccaagcctgtgaccatcactgtccaaggtatgaggagtctgccaagatgtagggaggggagaagaggggatggacaagggctgaggtcacatgggcctacatggaggtctgagaaaggccacagcgcaaaattgggcactggagcaaagaggagtggtgtggaggcctggctaagtattgaccaatgagcaggagtaggggccagagcttggagccctcaggtgataggtgaccaggctgttgttccacttt

SEQ ID NO: 12905 - DNA, 504 bp, Homo sapiens
  MAP TO CHR5.3; EXPRESSED IN ADULT LIVER, SIGNAL = 0.67; EXPRESSED IN FETAL LIVER, SIGNAL = 0.87; EXPRESSED IN HEART, SIGNAL = 0.78; SWISSPROT HIT: P02457, EVALUE 2.70e-02; NT HIT: gi13569935, EVALUE 3.00e-79; EST_HUMAN HIT: BI011000.1, EVALUE 2.80e+00
acattttacgcggaggtagcgagctgagctgacagcgcggagctggcgctgtggagcgcaggagccttgccggttcctccgaccggcgtctgcgagtacagcggcggctaacctgccccggcttcaggatttacacagacgtggggcgatgcttgtgaccctgcagctcctcaaagtaagtccatggctggtttggagatctgaaactgcccctctctgagccgcgacgcgactccccccttgggctggggcaaatggtgcgctatttctaggcgcgcctcagtgttccttccctcagcctgcgcctccttgagtcgctgcggtgcgccgcagctccctgacgccctcggcccggccggcacggcgccgggggtgttcacagcctggcaccgccgtttccgacccctgggcattgccaagcccggcttccccgccctctgagactcgggaagccccgtgcgtgtcccgggagtttgcctctggcctggcctctttccttctcct

SEQ ID NO: 12906 - DNA, 598 bp, Homo sapiens
  MAP TO CHR1.3; EXPRESSED IN ADULT LIVER, SIGNAL = 0.74; EXPRESSED IN BRAIN, SIGNAL = 0.55; EXPRESSED IN HEART, SIGNAL = 0.7; SWISSPROT HIT: P56396, EVALUE 5.00e-23; NT HIT: gi7710153, EVALUE 0.00e+00; EST_HUMAN HIT: BG703651.1, EVALUE 0.00e+00
tagcaaaacaattccagggctagaagtactaatgaaacacaattcttggtatatgaagcatcataaacttaccgaatacagtggaggaaaagctgaaaaatactcttgcaatataatgatacttaatgatataaatacaagtaaaacattaagctgaaaaaaatcacatttgaaaaagtcaccttcaaacactttttaaaaatcacgagcaggggctgtatgaaccattcaacattttttcctcaaataatctacacataagagttttctcagttctaatctgagaagctgacctgagattgttggaaaaggatgcttttttccgggtttatgccacaggcaagaagaacagcagtcatgtccaggatgctctgccgaaggacagctgggtcttgggggacagtaatggagtggaggtcaacaatgctgtataatacagagtcatattcatcctgtaacctcacccagctctcaatggctcccaggtaattgcccaggtggaggattcctgtaggttgaatgccggaaaatactcgcttcttgctgtctttctggaacaaaggaaaacaagcatatttgcttttgtaggcagaatccc

SEQ ID NO: 12907 - DNA, 575 bp, Homo sapiens
  MAP TO CHR12.3; EXPRESSED IN BRAIN, SIGNAL = 4.5; EXPRESSED IN ADULT LIVER, SIGNAL = 4.7; EXPRESSED IN HEART, SIGNAL = 3.1; SWISSPROT HIT: Q9Z0N1, EVALUE 1.00e-108; NT HIT: gi13651913, EVALUE 0.00e+00; EST_HUMAN HIT: AL513986.1, EVALUE 0.00e+00
acttgatgacccaagttgccctcggccagaatgttatcgatcttgtgggagcagtatgcctgatgagtttcctacagacattccaggaaccaaagggaacttcagattagtcagacatgtttcctttgttgactgtcctggccacgatattttgatggctactatgctgaacggtgcagcagtgatggatgcagctcttctgttgatagctggtaatgaatcttgccctcagcctcagacatctgaacacctggctgctatagagatcatgaaactgaagcatattttgattctacaaaataaaattgatttggtaaaagaaaggcaggctaaagaacaatacgagcagatccttgcgtttgtccaaggtacagtagcagagggagctcccattattccaatttcggctcagctgaaatacaatattgaagttgtttgtgagtacatagtaaagaaaattccagtacccccaagagactttacttcagagccccggcttattgttattagatcttttgatgtcaacaaacctggctgtgaagttgatgaccttaagggaggtgtagctggtggta

SEQ ID NO: 12908 - DNA, 589 bp, Homo sapiens
  MAP TO CHR5.3; EXPRESSED IN HEART, SIGNAL = 1.1; EXPRESSED IN ADULT LIVER, SIGNAL = 0.89; EST_HUMAN HIT: AU127985.1, EVALUE 0.00e+00; SWISSPROT HIT: Q9Y5E4, EVALUE 1.00e-107; NT HIT: gi15295799, EVALUE 0.00e+00
gcccaggactttgacataggtagcaacactgttcagaactacacaatcagcccaaattcacactttcatgttgctacgcataatcgcggagatggcagaaaatacccagagctggtgctggacaaagcgctggaccgggaggagcggcctgagctcagcttaacactcactgcactggacggtggggctccgcccaggtccgggaccaccacaattcgcattgtcgtcttggataataatgacaacgcccccgaatttttacaatcattctatgaggtacaggtgcccgagaacagcccccttaactccttagttgtcgttgtctccgctcgagatttagatgcaggagcatatgggagtgtagcctatgctctattccaaggcgatgaagttactcaaccatttgtaatagacgagaaaacagcagaaattcgcctgaaaagggcattggatttcgaggcaactccatattataacgtggaaattgtagccacagatggtgggggcctttcaggaaaatgcactgtggctatagaagtggtggatgtgaatgacaacgcccctgaactcaccatgtctacgctctcca

SEQ ID NO: 12909 - DNA, 552 bp, Homo sapiens
  MAP TO CHR19.3; EXPRESSED IN LUNG, SIGNAL = 5.6; EXPRESSED IN HEART, SIGNAL = 1.1; EXPRESSED IN BRAIN, SIGNAL = 1.8; SWISSPROT HIT: P43627, EVALUE 1.00e-11; NT HIT: AF189277.1, EVALUE 0.00e+00; EST_HUMAN HIT: AU120192.1, EVALUE 1.00e-116
tccagtgtggctctgatgtcggctacaacagatttgttctgtataaggagggggaacgtgacttcctccagcgccctggccagcagccccaggctgggctctcccaggccaacttcaccctgggccctgtgagcccctccaatgggggccagtacaggtgctacggtgcacacaacctctcctccgagtggtcggcccccagcgaccccctgaacatcctgatggcaggtgaggagcccagcgggttcagtcagggacccaggctctgcacaggccctgccgggggagcccaggtggtgatggccgggatgaggggtgggggtcccaagggagggagagacagacagagacaggggatgggcggggaggcgagactcagagaaaacagggacagagacactgagggtcccagggagaggcctggggaggtgtcagctcagagcaaggtggggcagcccctcacccatccttcttctctccaggacagatctatgacaccgtctccctgtcagcacagccgggccccacagtggcctcaggagagaacgtgac

SEQ ID NO: 12910 - DNA, 595 bp, Homo sapiens
  MAP TO CHR2.3; EXPRESSED IN LUNG, SIGNAL = 0.85; EXPRESSED IN HEART, SIGNAL = 1.1; EXPRESSED IN BRAIN, SIGNAL = 0.72; EXPRESSED IN FETAL LIVER, SIGNAL = 0.81; NT HIT: gi11429010, EVALUE 0.00e+00; EST_HUMAN HIT: AL532511.1, EVALUE 8.40e-01; SWISSPROT HIT: O95393, EVALUE 3.00e-76
atgcttattctgggcactggtatctatttctagccgtccactgctggcatcctcagcttcatcgtgtttgctctcaatgtggacctccagctggtgggtggatgagcctgacttttgccaacgtctgatggcatctgtgacatcaaaagtctcccactcactgttggttccatatatctccccagacaccaagaccagcatgtttctttctccctcattatcccctttgctctccagcacttcaaaaatggtaattttccggtctactccatcgtatatcatacgatccctttgcaccagtgtgtatagcctaagttcagccatgatgacctcttcatggtgaggaatggacacattgaagaggagggggtattttcggagcccattaaaactgaccggctgggaaaacagatctgaaaaaagaaatttgcaaaaatcaggtttgcagtgggtctcagggaaaaacagatgcttatttatgtaataagaaggccttcccatgcacaaagcttaatgcagaaagaatgaagggagaaaatcaatgagaacaaacacaatgtcagcattctgtgacacaggaaatcccaaaaggtca

SEQ ID NO: 12911 - DNA, 578 bp, Homo sapiens
  MAP TO CHR6.3; EXPRESSED IN LUNG, SIGNAL = 0.76; EXPRESSED IN HEART, SIGNAL = 0.62; EXPRESSED IN ADULT LIVER, SIGNAL = 0.86; EXPRESSED IN BRAIN, SIGNAL = 0.84; SWISSPROT HIT: Q04859, EVALUE 8.00e-23; NT HIT: gi15302015, EVALUE 3.00e-92; EST_HUMAN HIT: BF086479.1, EVALUE 6.00e-11
gaagttctgcaagggaggtgagatgatacagagaggaaggcagaaggagccatgacagatgtcatacttaagaacaggaggaggaagagaagccgaccgtatctgagaacgtgggcagtggagaatgactgaggtcaagagaaagagcctagaatgggcaggtgctcaatcatgccagtgctgaacagggctgagcggaggaagcatgggaagctgttggctttggcccactggcctttgttttgtatcattaccttttttggtgtccccagcacttggcaaattttgaatattgtgtcaatttcactggctccagggaagagtggcctgagggtgtaaacttctgccatgatgcagcccaccgcccagacgtcaatgggggagctgtagttggtagacctcaggagtacttctggagccctgtacctggaggaacaaaggttaactgctagctattgcttccaccactcagacattaaattaaataacaatcagttctcagtgagggggtgtatatgttcctattttctctctagttcactgtggtgtaatggaattgtgagaacttggcaactgcc

SEQ ID NO: 12912 - DNA, 542 bp, Homo sapiens
  MAP TO CHR22.3; EXPRESSED IN ADULT LIVER, SIGNAL = 0.81; EXPRESSED IN LUNG, SIGNAL = 1.6; EXPRESSED IN HEART, SIGNAL = 0.86; EXPRESSED IN BRAIN, SIGNAL = 0.66; EST_HUMAN HIT: BF904628.1, EVALUE 5.00e-73; SWISSPROT HIT: Q9UIA0, EVALUE 9.00e-17; NT HIT: gi14778688, EVALUE 3.00e-58
atgacagttgcagattcccccatttacaggatacagagactaaacctgggagaggcagggcagcttgtctggggcccgcgagggcccacccactccactgcccgtggccccgtttctcccccaggcagttcctgtggagcttccggctgccgggcgaggcccagaagatagaccggatgatggaggcctttgccactcgatactgcctctgcaacccaggcgtcttccagtccacaggtgccaggaggggagtgggacccagggctccgggaccccttcagcattgccaggcatagatttcacagaccccctcaggtttcccccaggtacccagaccctggcagcccagaccccttcatgagccctcactgagcactgacttcattgctgctgggtgcttgtctgacagagctgccttgagacacagttcttaggagagcagtcaggagacgatggcacaggatgctaaggctaaggcagcagcacccctttctgagggcaggagtaagggaatcagcatgtccaagatggcttctcagagg

SEQ ID NO: 12913 - DNA, 573 bp, Homo sapiens
  MAP TO CHR5.3; EXPRESSED IN HEART, SIGNAL = 0.55; EXPRESSED IN ADULT LIVER, SIGNAL = 0.49; EXPRESSED IN FETAL LIVER, SIGNAL = 0.72; EXPRESSED IN BRAIN, SIGNAL = 0.66; SWISSPROT HIT: O14511, EVALUE 2.00e-28; NT HIT: AF119152.1, EVALUE 0.00e+00; EST_HUMAN HIT: BG996653.1, EVALUE 1.00e-108
atcccagttccatcatctgcccttagggaagtgacttcaccattccgagcctctgtttccccatctgtaagtgggtttaaccattgctgtgagctcatggggttactgtgaaggtttcataagctaatgtaaagcttcataccattcaaggcatgaaggaaactctccataagttataactacattgatgtcatcacagactcattataaatgcttattgaattgaactaggaaatgacactaggaggggtggctctcaggatcacccttcccttccccagttccagcccaaagacagtggcccttactctccactactcatgcttggcactgcccctaccaccaccgtgctcacctacctgccttgtaacccacagccacccggcccaagttgaagaagatgaagagccagacgggacaggtgggtgagaagcaatcgctgaagtgtgaggcagcagccggtaatccccagccttcctaccgttggttcaaggatggcaaggagctcaaccgcagccgagacattcgcatcaaatatggcaacggcaggtaagcaatatccagcctgtcctc

SEQ ID NO: 12914 - DNA, 555 bp, Homo sapiens
  MAP TO CHR20.3; EXPRESSED IN BRAIN, SIGNAL = 2.2; EXPRESSED IN LUNG, SIGNAL = 3.5; EXPRESSED IN HEART, SIGNAL = 2.5; EXPRESSED IN FETAL LIVER, SIGNAL = 1.9; SWISSPROT HIT: P07204, EVALUE 4.00e-08; NT HIT: gi12742414, EVALUE 0.00e+00; EST_HUMAN HIT: BI907890.1, EVALUE 0.00e+00
cttggagatgcacgagttccggagctccttgtgccagttagagtaaggcgtgtcctcccccccgcccacccagctgaagcccttcagcggcagactagggtccaggcacttgcccttctctcgctggagcccaatccagaacttgctcatcctcgccgtcagggctgcctcccgcctcaggagctgggccagtactcgctggacgtgctgggcctcctccttgctcttcacagtggccaggttgcccccgttctggttgcagtggttctgggcctcggcagcgctcagcttgcccgagtgggccgtgtagcaggcggtccccacgcagaccaccgcctccgtgtcagctcccgtccccgccccgggctgggtcaggagcagcagcagcagcagcagcaggcccatggaggtggccatcccggtctctgtgtggccctctgcgggaggcgagaagcccagcggcgacaggagcttctatctcggctcccagctgggccccaaggggagctgaggggtgagctgcagccactccggcgcagagaaggacacaaaggc

SEQ ID NO: 12915 - DNA, 502 bp, Homo sapiens
  MAP TO CHR6.3; EXPRESSED IN HEART, SIGNAL = 1.2; EXPRESSED IN FETAL LIVER, SIGNAL = 0.85; EXPRESSED IN ADULT LIVER, SIGNAL =   1; EXPRESSED IN BRAIN, SIGNAL = 1.1; NT HIT: gi14758067, EVALUE 0.00e+00; EST_HUMAN HIT: BG951553.1, EVALUE 8.00e-50; SWISSPROT HIT: P29040, EVALUE 4.60e+00
tgcctccattagtgacaacggttttaacaggcacagccagaacttgaatttagatctttcactccaaagccaagggtctttacaattccatgctgttgcaaacataaatctaccataactggaccctgtatactgaaaaagaaaatatttcacacaataatggggtcagaagaggaataaacagacacgaagctcactggtgaatctgggctgctcaccgactgtggatgcttgttgtggagggatgggaaaagcaacgggcttggcttgtcctcctggagatggcttgggtgatctgtcctggagacctctgctttgtaggggtacgtgagatgcagagggggctggctggcttgatgctgtcgtgaagaaattcgtgtgtgtggcttggctggtggctgggcaggtgggactggcttaatataaggaggtgggcctgccttttccaggatgcctttctgtggtttttctgaatcctgaaggttttgtgtggtgctgccta

SEQ ID NO: 12916 - DNA, 522 bp, Homo sapiens
  MAP TO CHR8.3; EXPRESSED IN HEART, SIGNAL = 0.79; EXPRESSED IN ADULT LIVER, SIGNAL = 0.75; EXPRESSED IN BRAIN, SIGNAL = 0.92; NT HIT: X97368.1, EVALUE 0.00e+00; EST_HUMAN HIT: AA885285.1, EVALUE 0.00e+00; SWISSPROT HIT: Q13519, EVALUE 3.00e-32
aacgtgctgtgacaccagaggtaagttacgctcacctctctgagccctggtttctttgtaaaatgatggagctgggtcagatgattctctgtttgtttccaattctgaaattctacgaacctaaaacctgtgtaaaactgctccacgttacttgataacttagatgcttcagaagcacttgcactggtgcagtgggccagatctcctccctcgccctggattaacagaggtccttgttccttctcccctcctctcacccgtatctttgcaggtgtgcatcctcgagtgtgaagagaaggtcttccccagccccctctggactccatgcaccaaggtcatggccaggagctcttggcagctcagccctgccgccccagagcatgtggcggctgctctctaccagccgagagcttcggagatgcagcatctgcggcgaatgccccgagtccggagcttgttccaggagcaggaagagcccgagcctggcatggaggaggctggtgagatggagcagaagcagct

SEQ ID NO: 12917 - DNA, 590 bp, Homo sapiens
  MAP TO CHR8.3; EXPRESSED IN LUNG, SIGNAL =  10; EXPRESSED IN HEART, SIGNAL = 4.3; EXPRESSED IN BRAIN, SIGNAL = 2.2; EXPRESSED IN FETAL LIVER, SIGNAL =  10; EXPRESSED IN ADULT LIVER, SIGNAL = 9.4; SWISSPROT HIT: P05787, EVALUE 2.00e-86; NT HIT: gi15300590, EVALUE 0.00e+00; EST_HUMAN HIT: BE393977.1, EVALUE 0.00e+00
cctcgagcttctcctgagtgggcagcagcagctttcggggtggcctgggaggcggctatagtggggccagcggcatgggaggcatcaccgcagtcatggtcaaccagagcctactgagcccccttgtcctggaggtggaccccaacatccaggctgtgtgcacccaggagaaggagcagatcaagaccctcaacaacaagtttgcctccttcacagacaaggtacggttcctggagcagcagaacaagatgctggagaccaagtggagcctcctgcagcagcagaagatggctcggagcaacatggacaacatgttcgagagctacatcaacaaccttaggcggcagctggagactctgggccaggagaagctgaagctggaggcggagcttggcaacatgcagaggctggtggaggacttcaagaacaagtatgaggatgagatcaataagcatacagagatggagaatgaatttgtcctcatcaagaaggatgtggatgaagcttacatgaacaaggtagagctggagtctcgcctggaagggctgactgacgagatcaacttcctcaggcagctgtacgaaaaggag

SEQ ID NO: 12918 - DNA, 600 bp, Homo sapiens
  MAP TO CHR22.3; EXPRESSED IN HEART, SIGNAL = 0.8; EXPRESSED IN FETAL LIVER, SIGNAL =   5; EXPRESSED IN ADULT LIVER, SIGNAL = 1.1; EXPRESSED IN BRAIN, SIGNAL = 2.8; NT HIT: gi13655161, EVALUE 0.00e+00; EST_HUMAN HIT: BG993384.1, EVALUE 0.00e+00; SWISSPROT HIT: Q09472, EVALUE 6.00e-50
cagcagcaacaggtgcttagtatccttcacgccaacccccagctgttggctgcattcatcaagcagcgggctgccaagtatgccaactctaatccacaacccatccctgggcagcctggcatgccccaggggcagccagggctacagccacctaccatgccaggtcagcagggggtccactccaatccagccatgcagaacatgaatccaatgcaggcgggcgttcagagggctggcctgccccagcagcaaccacagcagcaactccagccacccatgggagggatgagcccccaggctcagcagatgaacatgaaccacaacaccatgccttcacaattccgagacatcttgagacgacagcaaatgatgcaacagcagcagcaacagggagcagggccaggaataggccctggaatggccaaccataaccagttccagcaaccccaaggagttggctacccaccacagcagcagcagcggatgcagcatcacatgcaacagatgcaacaaggaaatatgggacagataggccagcttccccaggccttgggagcagaggcaggtgccagtctacaggcctatcagcagcgactcctt

SEQ ID NO: 12919 - DNA, 583 bp, Homo sapiens
  MAP TO CHR1.3; EXPRESSED IN LUNG, SIGNAL = 1.2; EXPRESSED IN HEART, SIGNAL = 0.76; EXPRESSED IN BRAIN, SIGNAL = 0.6; EXPRESSED IN ADULT LIVER, SIGNAL = 0.92; NT HIT: L17401.1, EVALUE 0.00e+00; EST_HUMAN HIT: H83216.1, EVALUE 0.00e+00; SWISSPROT HIT: P17927, EVALUE 5.00e-25
caaatgcacacctccaaatgtggaaaatggaatattggtgtctgacaacagaagcttattttccttaaatgaagttgtggagtttaggtgtcagcctggctttgtcatgaaaggaccccccgcaccgtgtgcaatgccaggccctgaacaaatgggagccggagctaccaagctgctccaggggtgtgtttgcctgaggcctagaagggccctgcaagtgacatgcattgctgttggatcaggagatgagtatttgtttagggggagggatgtatgttgaggagggtgggaaagtaagttttgggggaagaagcatgaaattaagaatctggggtgtgcaagcactcatgcatatgtgtcttcattttgaaaagcaagaccttaattagccaagaaaactggtattttggactcacctattaatcaattgtcagggcaaagtaccagctgcaatctctctcaattatattgaaaaattatatggactttatggtcagctgtgccctaagcactttgtatacattatctcatttattatttaaaacaacactgtcttatttaagggcttgtgtttttgatggct

SEQ ID NO: 12920 - DNA, 552 bp, Homo sapiens
  MAP TO CHR11.3; EXPRESSED IN LUNG, SIGNAL = 1.9; EXPRESSED IN HEART, SIGNAL = 1.9; EXPRESSED IN FETAL LIVER, SIGNAL = 0.8; EXPRESSED IN BRAIN, SIGNAL = 1.9; NT HIT: gi9845486, EVALUE 0.00e+00; EST_HUMAN HIT: BE795309.1, EVALUE 1.00e-128; SWISSPROT HIT: Q05512, EVALUE 2.00e-41
ttccgtttgttctcccattcccctcagctccttcctgcccagggccttagtctggtccacttggttccctgatgttttccatcttacctcccaggcagaaaacctgctcttggatgctgatatgaacatcaagattgcagactttggcttcagcaatgaattcacctttgggaacaagctggacaccttctgtggcagtcccccttatgctgccccagaactcttccagggcaaaaaatatgatggacccgaggtggatgtgtggagcctaggagttatcctctatacactggtcagcggatccctgccttttgatggacagaacctcaaggtggagtgaagtgcaagctttttattgcttctcatttcctctcggcctctggtcttagccctgacctcctgcctttgccacctgtctacatttgtcccaagccaaagcttcagagaagggcttgctgaggtagcagcagtcaaaggccttctgcacctgggaatgaataacctcagttcctttctcgaaagatgggataaactgtgtgtgtgttcatcccc

SEQ ID NO: 12921 - DNA, 584 bp, Homo sapiens
  MAP TO CHR21.3; EXPRESSED IN HEART, SIGNAL =   1; EXPRESSED IN FETAL LIVER, SIGNAL = 2.9; SWISSPROT HIT: P48449, EVALUE 2.00e-22; NT HIT: AJ239024.1, EVALUE 0.00e+00; EST_HUMAN HIT: BG982721.1, EVALUE 5.00e-39
aacatcctgcacctcaaacctcgcctcaggcctgcttccagaggacacagtgcacatctgcctcctgcatcccttgagtcctggaagtcccccccaggaaccctgggctacagctactgactgtcccatagcacaagtcccctctgggcagagcttgctcactgtttattataggatggaggaaggtggaggctctgctccacagggctctccgctccacagggccaccaggtgagtggacaggtgtggttagattccagaagccccaggccctgtgggtcccagccccagaggccttcactttgttccctgatgaggtcctacctggcggaggctctggaccagcgggtcttccgcggcactcagccgaacggcgtagcagtagctcatgggcaggtacacctgccggcagtggcaccagagtgtggaggggtgtgccggtgcccagtcaggaaacagcctggggcaacagcaggagtcagtgggagaccccaagactcaagcctgccccctccgccagcatccataccttgggccctttcaagcacgaacactggtggatggctattccccaccacgtcagt

SEQ ID NO: 12922 - DNA, 568 bp, Homo sapiens
  MAP TO CHR18.3; EXPRESSED IN HEART, SIGNAL = 0.53; EXPRESSED IN BRAIN, SIGNAL = 0.48; NT HIT: gi14773067, EVALUE 0.00e+00; EST_HUMAN HIT: BI832095.1, EVALUE 0.00e+00; SWISSPROT HIT: P32780, EVALUE 4.00e-53
cagccagtagtcaaaagggcgaaatcgcaagagtccagtgaatatgaagacttggggaaagataattctataaaaatgattgcactaaacctcaagaagtcaggtaggtattatcatggtctaactccagtctagtcactacagtatgcaacaataaggacattattcttttcaaagtattgggcaagaaatggaagcttatatacccaagttaattgaggttctcttgagtagtgctgccagtagtaccatcatagcactgtcacctgcaggggaccttatgcagggaggaacacagcaaaccataaaccagatggtgccaagtgatattcagtctgaattgaaacacttgtatgtagctgttggagaacttctatggcatttctggtcctactttcctgttaatacaccattcctagaagaaagggtagtgaaaatgaaaagtaatttggaacgattccaagttaagaagatctgcccattccaagaaaagattcggaggcagtatttaagcacacatttggtaagtcacatagagatactccaggcagcctacaagctccacaca

SEQ ID NO: 12923 - DNA, 563 bp, Homo sapiens
  MAP TO CHRX.3; EXPRESSED IN LUNG, SIGNAL = 0.89; EXPRESSED IN HEART, SIGNAL = 1.6; EXPRESSED IN ADULT LIVER, SIGNAL = 1.2; EXPRESSED IN BRAIN, SIGNAL = 1.6; EST_HUMAN HIT: AW967734.1, EVALUE 1.00e-107; SWISSPROT HIT: P15056, EVALUE 1.00e-25; NT HIT: gi4757867, EVALUE 1.00e-127
tgagagaccactctttccccaaattctcacctctattaagctgctgacccgctcattgccaaaaattcaccacagtgcatcaaaaccctccttgaattgggctggtttccaaacagaggattttagtctatatgcttgttcttctccaaaaacacccatccaggcagggggatatggtgcatttcttgtctactgaaacaaataagtgagagagtgcaggagagtagaaacaaaaggaaaataaatgaacatatgtttgcttatatgttaaattgaataaaatattcttttttttaaggtgaaccaaagaaaacctgtgtggttaaagactagatataatttttccccaaactagtatttctacttaacatcacatttttaacatccaaggattaaaatacatagacattgctaaaaattggcagtgcctcttctagaggctttactttctattccgggtttgtttcattcacttggttattttaagtattaaacttcagttttctcatgcaacttttgttactagctatcacatgtccactagggactccagaagaagacca

SEQ ID NO: 12924 - DNA, 576 bp, Homo sapiens
  MAP TO CHR13.3; EXPRESSED IN HEART, SIGNAL = 0.78; EXPRESSED IN ADULT LIVER, SIGNAL = 0.67; EXPRESSED IN BRAIN, SIGNAL = 0.31; SWISSPROT HIT: Q92262, EVALUE 1.10e+00; EST_HUMAN HIT: AW978522.1, EVALUE 1.00e-101; NT HIT: gi7710130, EVALUE 2.00e-53
gattggtggaaaacacctgcaaaacaacattatggggtctttggattttaccattatataactcacaactactctatgaggaatgcctatgattttcaaaaatatattttactgtatctctttactataatttacattattcaatcatttacattttaaagttagcatcaaaattgtacaaacaaaagaaattattttcttccatacacaattctaacagctgctttactccacaccagtacttcctacttctccaaatactcacagaactctgaaggctttcggagaaatcagttgttacagatagatttgaagatttttctgagttgtaaattccagaagttgcatcaatccactttgtttcaggtgaacctataattttggtagccatactggtgagattgagggttttatgccgtataaatggcagggaaggttggtctttgccccagtctgattggcacatgaagatcaaatgagtacacatagatgttgaagtggaaagaataaagtcattgaatgcacatatatataaaaaaaaatctacatatacaagacaaacaaatcaggcagcgt

SEQ ID NO: 12925 - DNA, 563 bp, Homo sapiens
  MAP TO CHR14.3; EXPRESSED IN HEART, SIGNAL = 0.75; EXPRESSED IN LUNG, SIGNAL = 1.4; EXPRESSED IN BRAIN, SIGNAL = 0.82; EXPRESSED IN ADULT LIVER, SIGNAL = 0.75; EST_HUMAN HIT: BE156295.1, EVALUE 0.00e+00; NT HIT: AF195658.1, EVALUE 0.00e+00; SWISSPROT HIT: Q9UHC1, EVALUE 2.00e-15
aggaaacaaacagcctgtggagtcagacgacctgcctttgagtgcctgctccactacttaataactgctatgaccttagacaagtcttgtaacctctcttggtctcatctgagaaatggaacaatagttatgcttattcctcacagaattattgtgagaattgataccatcaacatcacattctcatggtggtactgaccataagagtctcctttgttcctctgtcactgttatctctagcggaggaattagagtagaagacagtaattttttccgaccagagccttgtgcctgttgcttctcgtaggaatctattggcagaaagatgaatgggttaagagtaggaagggaagtcttctagattcagataaaaataaagcacggccttgagataatcattctaatgcaaagcagaatgtttaatgttcagttttagattttggatttccatttttaaagtcaaactaataaatattcagcctattaacaattttggtagtatttttcaaaataagaaatataagacttgcatcttacattcagatgaacaagccaatgttcct

SEQ ID NO: 12926 - DNA, 542 bp, Homo sapiens
  MAP TO CHR17.3; EXPRESSED IN LUNG, SIGNAL = 0.29; EXPRESSED IN HEART, SIGNAL = 0.52; EXPRESSED IN FETAL LIVER, SIGNAL = 0.66; EXPRESSED IN BRAIN, SIGNAL = 0.46; EST_HUMAN HIT: BF822069.1, EVALUE 4.00e-21; NT HIT: AB012943.1, EVALUE 0.00e+00; SWISSPROT HIT: O75106, EVALUE 2.00e-49
aatggctgatttccagttcgcagattcagaggccatggagttttctgatgaccaacacaggtcatccctcctggggtgagattagctctgggacactggctcccccctctccccgcacagctgcttacatggattgctccacgtgttgtatgggcatgaggctggggagagtggaagccaggctgagactggaggctgggattgtgactgaagggtggttctttgggtcacgcttccatagtcctccagctcctccttcttcttgcaggatctggtggcttgggtcacagccagcttcctgcacattccccatgccgaggacatcccaaacacagtgactctggggaacagagttggcttcttgctccgaccctataacttctttgatgaggacccctccatcttctcccctggcagtgtctactttgagaagggccaggatgctgggctctgcagcatcaatcctgtggcctgcctccccgacctggcagcctgtgtcccggacttaccccctttctcttaccacggcttctagtcctgag

SEQ ID NO: 12927 - DNA, 521 bp, Homo sapiens
  MAP TO CHR19.3; EXPRESSED IN HEART, SIGNAL = 0.92; EXPRESSED IN ADULT LIVER, SIGNAL = 0.62; EXPRESSED IN BRAIN, SIGNAL = 0.73; EST_HUMAN HIT: AW381905.1, EVALUE 1.00e-114; NT HIT: AF055481.1, EVALUE 0.00e+00; SWISSPROT HIT: O43240, EVALUE 4.00e-31
tccagacccaccctattctgtctcattactccacgctaccctatcccagcttccttccactttcacgcgcttcttctcctcccattcccttcggtgcacgcgaaacccccaatatttccctaccaccctcgcgttctggctgcgtcccccgtccccgaacgcagtccagtgccacagcccagctccaaccccaaacccagaccctgccctccgtgctttgattccgtcccctttctttctccagccgcagaggcggcgctgctcccccaaaacgacacgcgcttggaccccgaagcctatggctccccgtgcgcgcgcggctcgcagccctggcaggtctcgctcttcaacggcctctcgttccactgcgcgggtgtcctggtggaccagagttgggtgctgacggccgcgcactgcggaaacaagtaggaggagatccatccccgaggacgccacggggggctgtggaggcggcctccagggaggagcgggcagggcggggtctctcggaactcccacag

SEQ ID NO: 12928 - DNA, 579 bp, Homo sapiens
  MAP TO CHR1.3; EXPRESSED IN HEART, SIGNAL = 0.53; EXPRESSED IN BRAIN, SIGNAL = 0.69; NT HIT: U09645.1, EVALUE 0.00e+00; SWISSPROT HIT: P23786, EVALUE 6.00e-76; EST_HUMAN HIT: BE542163.1, EVALUE 0.00e+00
tcacggtgcagaaactcaacttcgagctgactgatgccttaaagactggcatcacagctgctaaggaaaagtttgatgccaccatgaaaaccctcactattgactgcgtccagtttcagagaggaggcaaagaattcctgaagaagcaaaagctgagccctgacgcagttgcccagctggcattccagatggccttcctgcggcagtacgggcagacagtggccacctacgagtcctgtagcactgccgcattcaagcacggccgcactgagaccatccgcccggcctccgtctatacaaagaggtgctctgaggcctttgtcagggagccctccaggcacagtgctggtgagcttcagcagatgatggttgagtgctccaagtaccatggccagctgaccaaagaagcagcaatgggtgaggcaggggtggggagcatgcccttgggtcttgtcctcagtgcttgggtaagcaagcctaaatcattctactccaaatctgatttctacccgttcactaggtttaatccatcgccaactccccaaatttttcttttctaccctagcagtctgaacagcc

SEQ ID NO: 12929 - DNA, 515 bp, Homo sapiens
  MAP TO CHR20.3; EXPRESSED IN ADULT LIVER, SIGNAL = 2.1; EXPRESSED IN BRAIN, SIGNAL =   2; EXPRESSED IN LUNG, SIGNAL = 1.4; EXPRESSED IN HEART, SIGNAL =   2; EST_HUMAN HIT: BG820810.1, EVALUE 4.00e-64; NT HIT: gi9558763, EVALUE 3.00e-64; SWISSPROT HIT: O95793, EVALUE 7.00e-24
aacttcaacacttggcaggcccaaaccaaatcattactccctccacaatctagaggtactggtttatgtaaaagatcagacacgttttctcctgtattttacaaaaaaaaaaaaaaaaaaacacatacctcgggggataagcacctcctctcatgttgtagttataggtggactgcatccgagagtaagggtcaacaggcttatacattggtttttttccaagtttcatgcacagtgcatttagttctacagtaggggttatgctttctgcaagaaagaatcgacaaagaactgtttttttctggtatgagaatgatactcactaaaataaaatgtaatagcatgctttctgctaattggattcatgatactttacataaaaggacctgggtggctcactgctaggcatcagacaaggaaatccaagaatatgctgtgatttctagatatttatacacagtcgacagcacaaaatctactctgagggttaccagaggagccacaatttaacccaa

SEQ ID NO: 12930 - DNA, 536 bp, Homo sapiens
  MAP TO CHR3.3; EXPRESSED IN LUNG, SIGNAL = 0.6; EXPRESSED IN HEART, SIGNAL = 0.95; EXPRESSED IN FETAL LIVER, SIGNAL = 0.68; EXPRESSED IN ADULT LIVER, SIGNAL = 0.94; EXPRESSED IN BRAIN, SIGNAL = 0.62; NT HIT: gi14731441, EVALUE 1.00e-66; SWISSPROT HIT: P25687, EVALUE 6.00e-13
tgtttgtcgagcacgttacccagtccttcatgtcatacagaccctgctcagagttaccacagtagaaccaccatgaatacaaatatatatatactaactttacgagtcagtggatggcagctgtctcccagtttgcccataggtgtgcaaatccttatgctcttgacccagatactgacagcacagcacatgcctccaccacattgggagtccttgtcacaagcctgaaatgtaataaacaaacagataaatatagataacaggaaagactcaggctaaggaaacctaaaattagcagtgaaatgccctttaaatatctaaacacttggactttaataatcaggtatattttttaaatgataaccttcatttacttgtatatagctattataaaatctgatcagaatagctatttctcatttttcgaaagtgggctaaattctagcccctggattatgaaaatcttaaataaacataagatttttttttaaatgaaatcagctctctttttccagtgctttatggctgaattggct

SEQ ID NO: 12931 - DNA, 558 bp, Homo sapiens
  MAP TO CHR8.3; EXPRESSED IN LUNG, SIGNAL = 0.4; EXPRESSED IN HEART, SIGNAL = 0.85; EST_HUMAN HIT: BG427252.1, EVALUE 0.00e+00; NT HIT: AB008822.1, EVALUE 0.00e+00; SWISSPROT HIT: P20333, EVALUE 2.00e-18
cctttggaagcactccagacacatagtacctacctggcaggtttcattacctttgcaatttgctatcctataatgtcatcagaacaaaagtgttctcctaaactgtcacaactatctgactttgcatgatcctaattaattttgctgcacattgacacgtaccagcttgcaccactccaaatccaggagggcagctcctatgtttcaagcagaactctatctcaaggtagcgcccttccttgcattcgcacacgcggttgtgggtgcgattgcactcctgcttgacgtactgcagctccttgcacacggggctgcagtatagacactcgtcactggtgtgccagctgtctgtgtagtagtggtcagggcaaggggcgcacacggtcttccactttgctgtacagtgttgttttaggtaggtaccaggaggacatttgtcacacaacagctgatgagaggtttcttcgtcataatgaaggtactttggaggaaacgtttcctgggtggtccacttaatggagatgtccagaaactagaaggagaaaggaacacagtggc

SEQ ID NO: 12932 - DNA, 595 bp, Homo sapiens
  MAP TO CHR2.3; EXPRESSED IN ADULT LIVER, SIGNAL = 1.1; EXPRESSED IN FETAL LIVER, SIGNAL = 0.6; EXPRESSED IN BRAIN, SIGNAL = 1.8; EXPRESSED IN HEART, SIGNAL = 0.86; EST_HUMAN HIT: BG258285.1, EVALUE 1.00e-95; NT HIT: AF062537.1, EVALUE 7.00e-96; SWISSPROT HIT: Q13618, EVALUE 2.00e-28
gaccatggcacccatttaagcacagcaatgggtcatgcttaatttttatctgtgaaatgtcctaattttacatataattttatatctttaaataaaattaaatgttattttcaaatgcattactacttacccctttgactccctttttcagcttatcatcaataaataatgagaggtattcaggagacctggagttgaggttgagaaaatactcaaagtcacccgcaatagtttgtttaaagagacggtcattgttgaatgattccaggaggaagcgatcgaacctactcttcagatccaataagcccttagaaataaaaacaaaatttaggacacattataataatttttccataaataatacacttatgaccatgtatgtttatcttaactttgctggtaataaacatgtatattcatttttaaacttacagttttgatattattttcaagcctatatctaagcctctattaaaaatgtcaatgagagaagtattataacttccatatatgtattaatacaatgcaaacgaaccaaagaacctcctcactgtttctcattctcctgtcttgatggaatgggttagccagtgaa

SEQ ID NO: 12933 - DNA, 574 bp, Homo sapiens
  MAP TO CHR14.3; EXPRESSED IN HEART, SIGNAL = 0.9; EXPRESSED IN ADULT LIVER, SIGNAL = 1.4; SWISSPROT HIT: P02457, EVALUE 1.30e-01; EST_HUMAN HIT: BE730989.1, EVALUE 1.00e-115; NT HIT: gi15300192, EVALUE 1.00e-115
gtctctccaggcattgttccagcacggaggtgatgtgtcacgggccctgactgagctacagcgccaacgcctagagcccttccgccagcgcctctgggacagtggccctgagcccaccccttcctgggatgggccagacaagcaggtgctgggaggaggcaagaagcccaagggtccacctagaggagcaagagggagctgaggggaagggtccctggagtctgacagcacttcccccctccacctgaatcatattgcagagcctggtcaggcggcttttggcagtctacgcactccccagctggggccgggcagagctggcactgtcactgctgcaggagacacccaggaactatgagttgggggatgtggtagaagctgtgaggcacagccaggaccgggccttcctgcgccgcttgcttgcccaggagtgtgccgtgtgtggctgggccctgccccacaaccgggtaagtccctccccacgatacctggtccaagaattactctattcttttggacccccatcctaccccagtctccatctctgatcctgtcttctgctcttcagttgccc

SEQ ID NO: 12934 - DNA, 558 bp, Homo sapiens
  MAP TO CHR1.3; EXPRESSED IN HEART, SIGNAL = 1.4; EXPRESSED IN FETAL LIVER, SIGNAL = 2.5; EXPRESSED IN BRAIN, SIGNAL = 1.1; EXPRESSED IN ADULT LIVER, SIGNAL = 1.2; EST_HUMAN HIT: BG011316.1, EVALUE 0.00e+00; NT HIT: M91554.1, EVALUE 0.00e+00; SWISSPROT HIT: P12314, EVALUE 2.00e-45
taaacaggcaaccttgtcccccatcaactttctccttagagctatttccagctccagtgctgaatgcatctgtgacatccccactcctggaggggaatctggtcaccctgagctgtgaaacaaagttgctcttgcagaggcctggtttgcagctttacttctccttctacatgggcagcaagaccctgcgaggcaggaacacatcctctgaataccaaatactaactgctagaagagaagactctgggttatactggtgcgaggctgccacagaggatggaaatgtccttaagcgcagccctgagttggagcttcaagtgcttggtgagtgagaatgacgggaagccactggcacagaagaagggactcccttatctcccatgggactgaggtttgttcaagggtttttggcccagacaggaggggaaagtctcttcaggaaaagcccacaagcaggcctttccatccttgattcacaacatcactcttctcctcgcaaactgttaaatttcctttcctttctttttctttttcctttgcctttccttcctccatttc

SEQ ID NO: 12935 - DNA, 597 bp, Homo sapiens
  MAP TO CHR6.3; EXPRESSED IN BRAIN, SIGNAL = 1.4; EXPRESSED IN HEART, SIGNAL = 1.9; EST_HUMAN HIT: AA147916.1, EVALUE 1.00e-67; NT HIT: gi13540472, EVALUE 3.00e-67; SWISSPROT HIT: P11983, EVALUE 5.00e-18
caagtctcaaggggtgatgggggaggaaacaagacttttgagagaccataaaaaaatctgtgtgatgtctgaatactgccataaaaggaaaaataagccctcaaaacttgtgaataccaacatttaaaacaatggggctatgtcaaatgaactcaaattctttcctacttaaactgtacaaactagctgtaactatcaacttacaaattttgtttctgaatctgtacctaagaagcttatttcccctcttaaatgtgtaacttcttttgttttttcttcttgctcaatcttctgggcattcagaatatgtaacttatttctgacacagcacaaatgacccacttatggcttcaactttctgaaagtcggtcgtttttagaaaaatgatcattctttagccagtctacctaccactgaagtagttccatctccaacttctttgtcttgcagatcagccagctcacaaagaactttagctgcaggatgttctacctccagtaacttcaggatggttgcaccatcgttagtaatggttacatcctaagaaattcgcaggaaaaaatatgaaccacttatagaaatcaacacagccccatt

SEQ ID NO: 12936 - DNA, 568 bp, Homo sapiens
  MAP TO CHR19.3; EXPRESSED IN FETAL LIVER, SIGNAL = 2.1; EXPRESSED IN BRAIN, SIGNAL = 1.6; EXPRESSED IN HEART, SIGNAL = 0.7; EST_HUMAN HIT: BE515021.1, EVALUE 1.00e-67; SWISSPROT HIT: Q9QXZ0, EVALUE 1.60e-01; NT HIT: AF155138.1, EVALUE 8.00e-68
taggatggcactgaaccctctttcctggggtgggagaaaagctagtttgccacagagcaggtgtcggggacctggtgccagagcggcttcacctacacagactgcctccttcccaggcatggcgcaggccctgggccctgacacgccattcacagccatcgccggcagtgaaatcttctccctggagatgagcaagaccgaggcgctgacgcaggccttccggcggtccatcggcgttcgcatcaagtaagcgggggacccgaggcgggtgccagaccccagagcctgggagcaaccccgcaccccgggcggctcgtcctttgtcccagagctcatggaaggttgtgattcccgagggtccaggtgtcaggctgtctcctcagatctgctctctggctagggaggagacggagatcatcgaaggggaggtggtggagatccagattgatcgaccagcaacagggacggtgagtctgtgtgagtctgtaccctgctgaggccacctccagcgccagggttggagagagtagatatcaggtctgcactgaggtcagaatcccatggaatg

SEQ ID NO: 12937 - DNA, 542 bp, Homo sapiens
  MAP TO CHR1.3; EXPRESSED IN LUNG, SIGNAL = 1.7; EXPRESSED IN HEART, SIGNAL = 0.95; EXPRESSED IN BRAIN, SIGNAL = 0.34; NT HIT: S75421.1, EVALUE 0.00e+00; SWISSPROT HIT: Q16666, EVALUE 7.00e-65; EST_HUMAN HIT: BG434340.1, EVALUE 0.00e+00
acgcccagtgatagtgaaggtactgagtacaacaaagccatttgaatatgagaccccagaaatggagaaaaaaataatgtttcatgctacagtggctacacagacacagttcttccatgtgaaggttttaaacaccagcttgaaggagaaattcaatggaaagaaaatcatcatcatatcagattatttggaatatgatagtctcctagaggtcaatgaagaatctactgtatctgaagctggtcctaaccaaacgtttgaggttccaaataaaatcatcaacagagcaaaggaaactctgaagattgatattcttcacaaacaagcttcaggaaatattgtatatggggtatttatgctacataaggtaagtcctcaaaattgtttcgtttcatttttccaccaacacctgaaattaaaagtcttgatgtgtgagatgaagctttgcctataaactggatattagaatccaggactctgaagactaatgacaggtggataaagacttctctgaagataagactgggattaggggacctgtt

SEQ ID NO: 12938 - DNA, 551 bp, Homo sapiens
  MAP TO CHR11.3; EXPRESSED IN HEART, SIGNAL = 0.75; EXPRESSED IN ADULT LIVER, SIGNAL = 0.92; EXPRESSED IN BRAIN, SIGNAL = 1.6; EST_HUMAN HIT: BI827808.1, EVALUE 1.00e-58; NT HIT: AJ006692.1, EVALUE 0.00e+00; SWISSPROT HIT: P47033, EVALUE 2.00e-01
gctataagccctgctgttgctcctcaggctgtgggtcatcctgctgccagtccagctgctgcaaaccctgctgttcccagtccagctgttgtaagccctgcagctgctcttcaggctgtgggtcatcctgctgccagtccagctgctgcaagccctgctgttcccagtccagctgctgtaagccctgctgctgctcttcaggctgtgggtcatcctgctgccagtccagctgctgcaagccctgctgttcccagtccagctgctgtgtcccaatttgctgccagtgcaagatctgaggctctgcctacaaatctcagctggtcccacagatctgggctctccaggaatgactgtagctgtgtcctgaattcctgaagcacatctctgagtctgtcctcctctggactaaggcagcctagcgtccagggctcagtactcagctgctcagcctctgaggtcatgagggcttctggcatgctgggtgctgcccatcaaccctcccagaatcccctcttcctttcctgacctcatcacttcaaccttctcagggc

SEQ ID NO: 12939 - DNA, 567 bp, Homo sapiens
  MAP TO CHR6.3; EXPRESSED IN HEART, SIGNAL = 0.85; NT HIT: gi15208634, EVALUE 0.00e+00; EST_HUMAN HIT: BF740958.1, EVALUE 2.00e-57; SWISSPROT HIT: P18850, EVALUE 3.00e-04
aacctggggtgacagagatggaagggcaggagaaactcacccttcggaaagagacaacataaaatgtgtcttcccgtcggtcaattgcatccaagaatgctggctgcgaacggtctgggtggcgatatagttgcagctggcccacagaatccctaggcaggtggggaaacaggatttgaggggaactaagcccaatgctcagtttctaccagggaagcgggtaggatgagagaaaaagacaggagacccccagtggaggagggaggtataatcccactggtgacagtaatgacaggcacaggacagctactgggggtacagctcttgaaagtggaatttcacttaataagtaagcaccccaccccacactcacctttctgggggtccagggggttggatggggactgccttaactggaggtgacttcttccgtggctgagacttctggaaggagaagtatctaaggacttggagagggtgaagggaaaagggaaagagacaaacagcccctggaagctgatgccacctcccactcaaccctccacttccttcaaacgatccctcaaa

SEQ ID NO: 12940 - DNA, 595 bp, Homo sapiens
  MAP TO CHR20.3; EXPRESSED IN HEART, SIGNAL =   1; EXPRESSED IN BRAIN, SIGNAL = 0.65; EST_HUMAN HIT: BG433009.1, EVALUE 0.00e+00; SWISSPROT HIT: P35558, EVALUE 3.00e-88; NT HIT: L12760.1, EVALUE 0.00e+00
gcgtcagtcttgcctaggagagcctcatttactaatgaactccctctctgtttaacaggcaaaatcatcatgcatgacccctttgccatgcggcccttctttggctacaacttcggcaaatacctggcccactggcttagcatggcccagcacccagcagccaaactgcccaagatcttccatgtcaactggttccggaaggacaaggaaggcaaattcctctggccaggctttggagagaactccagggtgctggagtggatgttcaaccggatcgatggaaaagccagcaccaagctcacgcccataggctacatccccaaggaggatgccctgaacctgaaaggcctggggcacatcaacatgatggagcttttcagcatctccaaggaattctgggagaaggaggtggaagacatcgagaagtatctggaggatcaagtcaatgccgacctcccctgtgaaatcgagagagagatccttgccttgaagcaaagaataagccagatgtaatcagggcctgagtgctttacctttaaaatcattccctttcccatccataaggtgcagtaggagcaagagagggcaagtgttc

SEQ ID NO: 12941 - DNA, 527 bp, Homo sapiens
  MAP TO CHR9.3; EXPRESSED IN HEART, SIGNAL = 1.5; EXPRESSED IN BRAIN, SIGNAL = 1.6; EXPRESSED IN ADULT LIVER, SIGNAL = 1.7; EST_HUMAN HIT: AI765115.1, EVALUE 0.00e+00; SWISSPROT HIT: O00602, EVALUE 4.00e-46; NT HIT: gi14735948, EVALUE 0.00e+00
ttctccctctggtgaggttgtgggcatgtggcggcttgactgagctgggggcaaaggggcagctgtgggcgtcatgggagtgtgtctggctggggaaatggggtgacttccacgacgcagcgcttgtgggtgtggcctccccactagcaggtgcatgtggaggggtcctggcccgtctaggcgggccgcaccttcatctctgacaccttgtagctatatttgtaccccttcgccgcactccagttgataccattggcatagctctcatggggtcccatgaggtagagaccattgaggtttgaagcatgacagtcggcgtaccaccaggctccttggaacttctcagcacaattcgaagaactcacatcattgtcttggtctttggtggagaagaagttgttgttgtggcccgttagagaattacctgctcacagaaaatgtggggtttgcagatgctggaaaaagccctgccactgtgagaccctcaccacatcctgcctctgagcagagccaacctcactttagcg

SEQ ID NO: 12942 - DNA, 559 bp, Homo sapiens
  MAP TO CHR16.3; EXPRESSED IN HEART, SIGNAL = 0.91; EXPRESSED IN BRAIN, SIGNAL = 1.2; NT HIT: gi14776741, EVALUE 1.00e-60; EST_HUMAN HIT: AA484989.1, EVALUE 1.00e-100; SWISSPROT HIT: P79797, EVALUE 1.00e-03
gcctagatcctggggaagtcaggaattccttccatcacagggaagggcagattcacactgacgccctactctagccttcatctaccaacgtgactgagtaccaaagaccccatgagccaccttcacgcacccccaactcttggggcggggatgggtatgaggaagactggaaagcaggtcacgtgcccctggctgtcacccgcgtgggcgacactggcgataggcgtacctgtgtggatgagcttcacgtggcgctgcaggtagcggtcgatcatgaaaaccttgttgcagccagggtgggggcagggccgctcccggacctcctcgtggtgctccttgatgtgcttctgaaggagagactcggtgagagaccctcagagccgcacccgggccacatggcacgagccctcagtaggtgacagctgaggcccctggaaggcagatccaactcctcctccagcgacaccactggctccttcacagcttcactccaagaaacttctagaccccccggggggtgtctcaagtgaaagtctggcctcacatctacccccaagga

SEQ ID NO: 12943 - DNA, 582 bp, Homo sapiens
  MAP TO CHR19.3; EXPRESSED IN LUNG, SIGNAL = 1.2; EXPRESSED IN HEART, SIGNAL = 0.99; EXPRESSED IN ADULT LIVER, SIGNAL = 0.81; EXPRESSED IN BRAIN, SIGNAL = 0.9; SWISSPROT HIT: Q15928, EVALUE 8.00e-14; EST_HUMAN HIT: AA295628.1, EVALUE 1.00e-92; NT HIT: gi13652777, EVALUE 8.00e-65
ggaagccttatctgctgtgcaattaaaacctgttgtgaagaaaacgcttgcagtattttctttaatcaagaaactgcacacatctggctttttaaattctcagacctttctggataatggaattgttctattgtacagaggaagttttatctgtggcaataggaatgatagagaatcaggttaatactactgtttaggcaaccaatttcctgttgttttgtgttacttgcttccttcaattacctcctccattttcttctcatttcacttcagaatcattcctgtagaatcatcctgtaatggatttgttgtttcagttgttggtgactttcagggatgtggccattgacttctctcaggaggaatgggaatgcctggaccctgctcagagggacttgtacagggatgtgatgttggagaactacagcaacctgatctcattgggtaagatcatcctacgtaatattcagaatttgttccccataatttctgcctcattcattgtgaatttctgatctccattccctaaggaaaggcttacgtttgagtagaagtagaaatggacagctccaccgtgtacct

SEQ ID NO: 12944 - DNA, 538 bp, Homo sapiens
  MAP TO CHR11.3; EXPRESSED IN LUNG, SIGNAL = 0.8; EXPRESSED IN HEART, SIGNAL = 0.57; NT HIT: U29910.1, EVALUE 0.00e+00; SWISSPROT HIT: Q01432, EVALUE 2.00e-42; EST_HUMAN HIT: AI949966.1, EVALUE 1.00e-122
aaaaggaagcagggaagagcatatgagatgcggggccggcgcagggttggattttgggcaggaaggccagcgcaggcctccgtgtcttttgagcccatgtgtgctcacaaggtcaggggcactttgccatccctcaatcctgttttgcagacttccaccctcctccactgccccaggaagacccctactgcctggatgatgcaccccccaacctggattacttggtccacatgcaggggggcatcctctttgtgtatgataacaagaagatgctggagcaccaggagccgcacagcctaccctaccccgacctggagacctacacggtggacatgagccacatcctggctctcatcaccgatggccccacgtaagctagcttctccgcggctgcctgtctttgcacaggtgctgttctgtaggaaggagatgagaaaggcctcacccctctgccctggggtcccctgtacttaaagcatcccagaaagagcgcggtttctcctttcctcagtgctttgcgggtttctgcaacagtttt

SEQ ID NO: 12945 - DNA, 581 bp, Homo sapiens
  MAP TO CHR12.3; EXPRESSED IN HEART, SIGNAL = 0.56; EXPRESSED IN FETAL LIVER, SIGNAL = 1.2; EXPRESSED IN ADULT LIVER, SIGNAL = 0.84; EXPRESSED IN BRAIN, SIGNAL =   5; NT HIT: gi14757805, EVALUE 1.00e-110; SWISSPROT HIT: P57074, EVALUE 1.90e+00; EST_HUMAN HIT: BG742627.1, EVALUE 0.00e+00
ctggtgggctgtttctcttctggcttctccaggtgttcctctcttctcggccaccgtgtgttctgccctgggagtccttcagcccgggctgcctcttttcctacccagccccctgtccaagtgcccccaggtgtgcctagtcacgctctgctcacccccgcgctctctctgcagtgatacccagcgccgcaaccctcatcattgtggtgtgcgtgggcttcctggtgctcatggtcgtcctgggcctggtgcgcatccattcccttcaccgccgcgtctcaggggccggcgggcctccaggggcctccagtgaccccaaggacccagacctcttctgggatgactcagctctcaccatcattgtgaaccccatggaggtgagaggcctggggaagcggggttctgtagggtcaagactgtggagcacacacggtgaggactcctgaggaggggcaggcctgggtggaggctgttcgcagagctgcagtgagccggagggagagaggttcaggcagggaagggggtacacaggggttaaggggaccgagggaagtgtggtccctgaaagagaggctgggatg

SEQ ID NO: 12946 - DNA, 568 bp, Homo sapiens
  MAP TO CHR17.3; EXPRESSED IN HEART, SIGNAL = 1.1; EXPRESSED IN BRAIN, SIGNAL =   1; NT HIT: gi14775973, EVALUE 0.00e+00; SWISSPROT HIT: Q99456, EVALUE 1.00e-13; EST_HUMAN HIT: AL554824.1, EVALUE 0.00e+00
ttgactcactgccaccattcttatatataaatgataattagctgcctggtgttgtataagttttactgttatgtagaaatactgaaactgagatggaaacagaaaattaatgtgattggacatcacataaggtactataataattaagacacatcaggtcccactttgcatatgtaacaagcaaatatgttttcaaataatttcttaaaattttcattatagtacatgatctgaaaagaagtgaaagatccacaaataatagaaactcaggcacagatagtctcacctggtttctgagatcttcaattattgaatagtatttgctataatctcttcccgatccaccgtctccagacccaggcccatatttgtcataccactccttgattttgttctccagatcagtgttagcctcctccagggctctgaccttgtctaggtaattggccaagcggtcattgaggttctgcatggtttgcttttcccctccagagaaaagccccccatcgccaacaccacctcccataccaccaccatagctgtagaagcctccagtagcaccactgct

SEQ ID NO: 12947 - DNA, 578 bp, Homo sapiens
  MAP TO CHR16.3; EXPRESSED IN HEART, SIGNAL = 2.5; NT HIT: X71874.1, EVALUE 0.00e+00; SWISSPROT HIT: P40306, EVALUE 6.00e-08; EST_HUMAN HIT: BE704212.1, EVALUE 0.00e+00
atgtgtggggctatagcaggggagatagggggctgcaaaaaggggatgggccacatgacaggcccatgttcagaggctgtccctcctccctcccaggtctggccgctaccactttgtgcctggaaccacagctgtcctgacccagacagtgaagccactaaccctggagctagtggaggaaactgtgcaggctatggaggtggagtaagctgaggcttagagcttggaacaagggggaataaacccagaaaatacagttaaacagatggctgtgtcattcttgagtggaatggggtgggcaggcagccagcagggctctgtagctaaggcgtccctgcaggggccattacctaccatagctctagtgtctggcctaagagatgcccttcacccataacctcaggcacctacaactccagaaccccagccctggccagcattgcaggcttggtctccacccaaaccttccttctgactccacacttgaaggctcccccaccactccactgtcttgctcttgccctctagtccactggagacttgtaaattatgaaataccccatgtactaccccctcct

SEQ ID NO: 12948 - DNA, 581 bp, Homo sapiens
  MAP TO CHR17.3; EXPRESSED IN BRAIN, SIGNAL = 3.3; EXPRESSED IN HEART, SIGNAL = 1.1; EST_HUMAN HIT: AL526494.1, EVALUE 0.00e+00; NT HIT: AF036241.1, EVALUE 0.00e+00; SWISSPROT HIT: Q25460, EVALUE 1.10e+00
gcaactgggttacaggaagccgattcccaggccccacttgttcctggcacaccagcctgcctttgaggtcacatgctgagccgcattctgttcttgtgacctggcttccctgggcacggccccaacggagccacctcaccaaggctgaggaccagggagcctaatgagggactgactcccaacttcctgcccccacttctctttacagctgaattcccaagacagccccccaaaacaggactccacagcgccctcgtctacctcctcctccgaccccatcctagacttcaacatctccctggccatggccaaagagagggcccaccagaaacgcagcagcaaacgggccccgcagatggactggagcaagaaaaacgaactcttcagcaacctctgagcgccctgctgccacccagtgactggcagggccgagccagcattccaccccacctttttccttctccccaattactcccctgaatcaatgtacaaatcagcacccacatcccctttcttgacaaatgatttttctagagaactatgttcttccctgactttagggaaggtgaatgtgttcccgt

SEQ ID NO: 12949 - DNA, 514 bp, Homo sapiens
  MAP TO CHR1.3; EXPRESSED IN BRAIN, SIGNAL = 0.83; EXPRESSED IN LUNG, SIGNAL = 1.7; EXPRESSED IN HEART, SIGNAL = 0.67; EXPRESSED IN FETAL LIVER, SIGNAL = 0.94; EXPRESSED IN ADULT LIVER, SIGNAL = 1.1; NT HIT: AJ131016.1, EVALUE 0.00e+00; SWISSPROT HIT: Q13113, EVALUE 5.00e-04; EST_HUMAN HIT: BG750307.1, EVALUE 9.00e-56
gcctaggctctcattccctcatcccgactgtcaccaacccaccccatgaccttgagcctcagtttcccttcccttgagcctcagggggaggattggacacagggtttctgaggcccttctcactgctactagagcaagagcagtggtcctgggcccaccctgcctgctcagggacccttgggcagcactcacggctcctcctggcaccagaagtggttgactgcaaaggcgattgcaacgaggaccaggaacacggccaccgcgataaggccctgcatccagggctgaaggttccccaggcctaacaaagggagaggggctgtagcagacggggccacagtggggctgcatgtgcaggagagcgaggggcctcactcttcaaggaccccacctatgctgaaggccctcagccagctgccaggagcaaggagacattgtggggaggcaggggtgggatacagcccatctgacccacttatgcatcttaagctccaccgagcttaggaaaaggagg

SEQ ID NO: 12950 - DNA, 587 bp, Homo sapiens
  MAP TO CHR19.3; EXPRESSED IN HEART, SIGNAL =   1; EXPRESSED IN ADULT LIVER, SIGNAL = 0.96; SWISSPROT HIT: P20916, EVALUE 7.00e-64; EST_HUMAN HIT: BI755933.1, EVALUE 0.00e+00; NT HIT: gi14766572, EVALUE 0.00e+00
ctgtcatctgcatggtctgcgtgggccttgaggtttgcacccccagccaaatcagcacctcccagatctgccatccaggcctgctggggaaggtgcggggaggccttccggccacactccttcccgccccgctgccccagctcccggtgcctgcacaaccgctggggactcactgacgatatccaggacgctgtgctctgagaaggtgtactggttgtagccgcccaggtccccacggaagtagtacttcccgcccagctcggggctgacgttgctgagcaggagggtgcagtttcgcaggcccaggtcccccaggaggcggctgcggccctggaagctctcgtggactacttgggtgcgcgacttgaagaccaccggggggtagttcttggggtaggggctattgaagtaccagacaccatgcaccacagcgggccgcagctcatccgggaagtcaaagcggcaggggatggagacgcacgtgccttcgaaggccgagatggacgagggcatccaggcaccccagtgaccccctcgggaggctgcgggcaagcaggagagctgaggctcagggacacgtcctaccc

SEQ ID NO: 12951 - DNA, 591 bp, Homo sapiens
  MAP TO CHR19.3; EXPRESSED IN LUNG, SIGNAL =   2; EXPRESSED IN HEART, SIGNAL = 1.7; EXPRESSED IN ADULT LIVER, SIGNAL = 1.5; EXPRESSED IN BRAIN, SIGNAL = 1.9; SWISSPROT HIT: P51522, EVALUE 1.00e-94; EST_HUMAN HIT: AU138727.1, EVALUE 0.00e+00; NT HIT: gi14774829, EVALUE 0.00e+00
aggaattgcgactgaacaccttgccacatttgttacattcgtaaggtttttctccagtatgaattgtccgatgttgtgcaaggtgtgaaatttgatggaagacctttccacattcattacatttataaggtttctctccggtatgaattctttgatgttgtgcaaggtgtgaaatttgattaaagaccttgccacattcattacatttatatggtttctctccagtatgaatcctgcgatgctgtgcaaggtgtgacatattatggaagaccttgccacattcattacatttatatggcttctctccagtatgaattctttgatgacttgcaaggtttgattttttattgaagatcttgccacatatatcacatttaaattgcgtctctttagtatggattatttgatgtatagtaaaatgtaagccttgatgaaaggccttgccacgctcactacatttgtagtgttctgtcccaatatttgctttctctttttgtgtgaataatgaatccacaaaattacattcatatgtatgagaaatgtgggttttgacagtagaagaaatacgttggggtggggaaactaaggaac

SEQ ID NO: 12952 - DNA, 587 bp, Homo sapiens
  MAP TO CHR19.3; EXPRESSED IN ADULT LIVER, SIGNAL =   1; EXPRESSED IN BRAIN, SIGNAL = 1.1; EXPRESSED IN LUNG, SIGNAL = 1.4; EXPRESSED IN HEART, SIGNAL = 1.2; NT HIT: AF124607.1, EVALUE 8.00e-68; SWISSPROT HIT: P35356, EVALUE 2.50e+00; EST_HUMAN HIT: BG107810.1, EVALUE 3.00e-68
atggttctaagatgcaggcgccacatattcccagtggggaagggccagagggttgctgtggccacttctgctgcagtcagaggctgggccccggctgagccacccctgtcccccactgcttgcaggtgcgaggaagaagatgtggagatgagtgaggacgcctacacggtgctgacccgcatcgggctggagacgtcactgcgctacgccatccagctcatcacagctgccagcttggtgtgccggaaacgcaaggtcagccggccgaattagccagcagggccagatggcggcagtgagtgacacagtacttcaggggcttccagggttccgatttcatcctagaatgtacgttttcagacgcagggaattttcatccctcaggttggcttctgtatcatccagcctggcctatagtaggtatcagtaaatctctcttgacttaagtagatgctgttaggtccaccttacagataaagaaactgaggaatgaagaggctgggcccacaacaaggagatggccaggcaggatttgaacccaggcaatctggcccagaatgccctcccctcacatgccacactctgct

SEQ ID NO: 12953 - DNA, 533 bp, Homo sapiens
  MAP TO CHR8.3; EXPRESSED IN HEART, SIGNAL = 1.6; EXPRESSED IN FETAL LIVER, SIGNAL = 0.64; EXPRESSED IN LUNG, SIGNAL = 1.9; EST_HUMAN HIT: BE793406.1, EVALUE 0.00e+00; NT HIT: gi14752654, EVALUE 0.00e+00; SWISSPROT HIT: Q9UPE1, EVALUE 2.00e-51
gagctccaggaaagtgttgcccattcaggcccaaaagcggaggccgaaaagagagaaacaccctacaaagctggagcctcaacagaaagctcctttagttctttctcctccacctccaccaccaccaccgccacctttggcagaccccacaccaccagagccaaaggaggagatcctggatcagatgatgagcaagaggaccctgcggactactgcaaaggtggctatcatccagtgaaaattgcagacctcttcaatggccggtatcatgttattagaaagcttggatgggggcacttctctactgtctggctgtgctgggatatgtaggggaaaagatttgttgcaatgaaagttgtaaaaagtgctcagcgtgatacagacacagccttggatgaaataaaattgctcaaatgtgttcgagaaagttatcccagtgacccaaacaaagacatggtgatccagctcgttgacttcaagatttcaggcatgaatgggatacatgtctgcatggtcttgggagtacttggcca

SEQ ID NO: 12954 - DNA, 572 bp, Homo sapiens
  MAP TO CHR21.3; EXPRESSED IN HEART, SIGNAL = 0.77; EXPRESSED IN ADULT LIVER, SIGNAL = 0.7; NT HIT: U80456.1, EVALUE 0.00e+00; SWISSPROT HIT: Q14190, EVALUE 2.00e-69; EST_HUMAN HIT: BF000531.1, EVALUE 3.00e-31
gagcaggtcactggggtatcgctcgctgtgtgcctgtccccagtgggaccttgcagtggtggcgagggtaggggcagcccttggatggggttgggccccgtcgggacggttcttgcagggccggaaggcagcttcctgccggcccctcgctggcccttcatccatcttctttgccatgcagcaatacagctcgttccaaatggacaaactggaatgcggccagctcggaaactggagagccagtccccctgcaagcgctgctgctcctccagaactgcagccccactcagaaagcagtgaccttctgtacacgccatcctacagcctgcccttctcctaccattacggacacttccctctggactctcacgtcttcagcagcaaaaagccaatgttgccggccaagttcgggcagccccaaggatccccttgtgaggtggcacgctttttcctgagcacactgccagccagcggtgaatgccagtggcattatgccaaccccctagtgcctagcagctcgtctccagctaaaaatcctccagagccaccggcgaacactgctaggcacagcc

SEQ ID NO: 12955 - DNA, 521 bp, Homo sapiens
  MAP TO CHR2.3; EXPRESSED IN ADULT LIVER, SIGNAL = 0.59; EXPRESSED IN BRAIN, SIGNAL = 0.83; EXPRESSED IN HEART, SIGNAL = 0.91; NT HIT: gi4755133, EVALUE 0.00e+00; SWISSPROT HIT: P27460, EVALUE 1.60e+00; EST_HUMAN HIT: AW004023.1, EVALUE 0.00e+00
ttccctgaacctggtactgcaactggcagtggcatcaaaagccacaactcagccctgtacagccaggtccagaagagcggggcctcagggagctgggactgtgggctctctagagtagggactgacaagactggggtcaagtcagagggctctacctgagaaggacggcaaggctgaggtggctaagggggaccatggggaggtggcactagggatcaaagaagatggttagaaccagcagaagccagagggtgggaggggccatgctgtgtgagaccaggggaccagagggatgggagagtcaagggaaggacaatcccaggaagtcctaagaagtggggcagatggcagggctgaggatgggctctgcatcccccaaagccatcccttccctacttccccaaatgaagggacggctgtgggaccaggtctgtggaaagtggtgcatggtcagaatgggtgcagtttgaggggcctgtgtggaggcctcagggagatgttggactgtgcctggatcctta

SEQ ID NO: 12956 - DNA, 596 bp, Homo sapiens
  MAP TO CHR19.3; EXPRESSED IN ADULT LIVER, SIGNAL = 0.49; EXPRESSED IN HEART, SIGNAL = 0.55; NT HIT: gi13652777, EVALUE 0.00e+00; SWISSPROT HIT: Q14585, EVALUE 8.00e-82; EST_HUMAN HIT: AF150239.1, EVALUE 0.00e+00
atgtgcctcccaactgaatgaacatcagagaattcatacaggagagaaaccctatgaatgtaaagaatgcgggaagaccttttttcgtggctcacaacttacttaccacctgagagttcattcaggtgagagaccttataaatgcaaagaatgtgggaaagcctttatttctaattctaatcttattcaacatcaaagaattcataccggagagaagccctacaaatgtaaggaatgtggaaaggcctttatttgtggcaaacaacttagtgaacatcagagaattcatacaggtgagaaaccctttgaatgtaaggaatgtggaaaggcctttattcgtgttgcatatcttactcaacatgagaaaattcatggtgagaaacattatgaatgtaaggaatgtgggaagacctttgtacgtgctacacaacttacatatcatcaaagaattcatacaggtgaaaagccctacaaatgtaaggaatgtgacaaggcctttatttatggctcacaacttagtgaacatcagagaattcacagaggtgaaaaaccttatgaatgtaaacagtgtgggaaggcttttattcgtggctcac

SEQ ID NO: 12957 - DNA, 507 bp, Homo sapiens
  MAP TO CHR4.3; EXPRESSED IN BRAIN, SIGNAL = 0.56; EXPRESSED IN HEART, SIGNAL = 0.71; EXPRESSED IN LUNG, SIGNAL = 0.95; EST_HUMAN HIT: AW951417.1, EVALUE 0.00e+00; NT HIT: X56416.1, EVALUE 0.00e+00; SWISSPROT HIT: P08319, EVALUE 6.00e-45
aatgggaaatgatttgtggcttatagttctaccaccctgtcatccatttgaaagtactaagtaccataataaacataatccactttcccctattatttgacagccaaagaatacattgaaaatatgatccaagaacaaaatatacataccatggtttcagatccacctgcacagtcaagggcaaaatccacacctcccttggtcaattcaatgataacttcctggatcggtttatgtaagtctctaggattgaggcagtcagtggctcccagggctttagccttcacaaacttctcactgttgatgtcaatacctatgattctggaagctcctgctgctttacaacccattacagcagaaagacccacacctcctaggccaaagacagcacaagtcgaaccaggggtgacctgcaagcaggaaaattataaagtaacttctaaagcagccagtcccactttttttcttttaagagtcaggaggaagtgggggcatgaacatatgaat

SEQ ID NO: 12958 - DNA, 549 bp, Homo sapiens
  MAP TO CHR1.3; EXPRESSED IN ADULT LIVER, SIGNAL = 2.4; EXPRESSED IN BRAIN, SIGNAL = 1.8; EXPRESSED IN LUNG, SIGNAL = 7.2; EXPRESSED IN HEART, SIGNAL = 2.3; NT HIT: gi14732837, EVALUE 2.00e-77; SWISSPROT HIT: Q99062, EVALUE 7.00e-26; EST_HUMAN HIT: W02014.1, EVALUE 0.00e+00
aaatcagcatcctttgggtggggtaccctccaaacagccatctctgcccagcccccgtctccccttacctggggtcaaggtcatcagggtgaggactgtactgttggtggccccagcctggctggcagccatgaggtggatgtgatacagactggcgggctccaggccatggaggacaaagccacgggaggaggcattcaggatggcggctgggaggggtgtacggtcagcataggcctggatggtaaagctgcctccgtggcagctgagcacccccttccaggccttctggggctgtgggggaactgaggatagactcacagaaggactggttctgagcgttggtccagaagatggtgtagtgggtaagggggctcttccccagctcagggggctcaggcacccactccagctgtgcccaggtcttgccaatgtgctttagatgcagctctggggcatgggagggagctatgggaagagagaggtgcgggggctgaagggagtggggcagagcaagagcccggttggacttcttgtggcttcccagac

SEQ ID NO: 12959 - DNA, 589 bp, Homo sapiens
  MAP TO CHR13.3; EXPRESSED IN HEART, SIGNAL = 0.8; EXPRESSED IN ADULT LIVER, SIGNAL = 0.49; EXPRESSED IN BRAIN, SIGNAL = 0.69; NT HIT: gi15301844, EVALUE 0.00e+00; SWISSPROT HIT: Q9I962, EVALUE 4.00e-24; EST_HUMAN HIT: AI652112.1, EVALUE 0.00e+00
atctgaaggcatctggttggtgtgagagttgacctgtgtttacaggaaggtagaggccatgttctctccctctcaggtctcaggagctacgctggggtgtgggctctgtgccccgctgagctctgcctggggctctggaggctgagtgtaagtgtggcaccatcactcagctcctttcttgtttttcagggttggggtgctgagtatcatcgccaggatgtcaccagcaccccctgctggattgagattcatcttcatgggccactgcagtggctggacaaagttctgactcagatgggctctccacataaccccatttcttcagtgtcttaacagtcatgtcttaagctgcatttccataggatagaggctattgcagggagtggcttgtatcatttcagatttgcaactgaagtttctaaaaacatgtgtaaatacatagaatgtatactgttcttattttttttaatcaccgtttgttttgtgctttctagttaacctgatgccagtacagtgcaattggaaaagcaggactttggtgcctgtgctataagcagcagattttgtgggaggaaacacttgagaggcg

SEQ ID NO: 12960 - DNA, 512 bp, Homo sapiens
  MAP TO CHR17.3; EXPRESSED IN ADULT LIVER, SIGNAL = 0.43; EXPRESSED IN HEART, SIGNAL = 0.55; NT HIT: S83275.1, EVALUE 4.00e-97; SWISSPROT HIT: Q09199, EVALUE 4.00e-25; EST_HUMAN HIT: BE246483.1, EVALUE 1.80e-01
aggaaatgcaacaaattgggtatgttgtaaatgtctttattttctaatgcaactaacaaactcttattaagcacctcctgggtacaagaggcatgagacccacagacactgacaggttatggcagaaagaagccatcagatcaaagcaggaaaagacagtgaagcttcctacaggacagagctctgacacccactgttttctgcccagagaggaagctcagaaacctggttaccattgctaccaagactttcctccgcccccacaagctcatgatcatgctccggagtattcgagagtattacccagacttgaccgtaatagtggctgatgacagccagaagcccctggaaattaaagacaatcacgtggagtattacactatgcctttgggaaggtatgtccctctcagattgggtggcacctgcattccaggacaagagggccccagggtcaggttctaccctggatggggccgcttcctcaagggtcttcccaagaaagcagagtccag

SEQ ID NO: 12961 - DNA, 538 bp, Homo sapiens
  MAP TO CHR11.3; EXPRESSED IN HEART, SIGNAL =   2; EXPRESSED IN BRAIN, SIGNAL = 1.6; EXPRESSED IN ADULT LIVER, SIGNAL = 1.6; NT HIT: AF121975.1, EVALUE 7.00e-31; SWISSPROT HIT: Q9H346, EVALUE 1.00e-11; EST_HUMAN HIT: BI009327.1, EVALUE 7.50e-01
gttgggaagctggaagacagggagaccagattagtttaggacactgttgcaacagaacaggtaaatgatgatcaaagcctgagcaagaacatgccaatgagaatggggaggtatgtatggcttctagatattgctgagatgtgatcagaaacctttgtttatatttgtatctgcaattataatgtgagaagtggaagaataacattatatactctcagtcaaggcattagtgattgattccatgttcaacttttagtggaacttacaactggctctgctgactaactctcatgttctttagtcttcatagagagactccaaaagaaggcatgtttggtgctaatctcaccaccttccatcccactctattcattctccttggcatcccaggactggagcaataccacatctggctttccattcctttctaccttatgtacatcactgcagtcttgggaaatggagccctcatcctagttgtcctcagtgaacacaccctccatgtcttcctatccatgctggctggcactgatatcct

SEQ ID NO: 12962 - DNA, 599 bp, Homo sapiens
  MAP TO CHR12.3; EXPRESSED IN BRAIN, SIGNAL = 1.3; EXPRESSED IN LUNG, SIGNAL =   1; EXPRESSED IN HEART, SIGNAL = 1.8; EST_HUMAN HIT: AL539938.1, EVALUE 0.00e+00; NT HIT: gi4885290, EVALUE 0.00e+00; SWISSPROT HIT: P21695, EVALUE 4.00e-40
agggctgtacaatggaatggtcatagatgggaagatcaactagagagaagagtggttttcagaaaatgtcctcgaggagggagtatggggcagggcttaagaaagggggtgcagcaaggggggaaaccaagaggcggaagtaggcttctaaaaggccacacactatacctctcttctgcagtgggtgtcacggctgatgaaatgagtatgagggggctccacatggggcctataggagggggtcttttctcacctatgacctccactccttcaagaatgtagtggccgtgggggctggcttctgtgatggcctgggctttggcgacaacaccaaggcggcagtgatccggctgggactcatggagatgatagccttcgccaagctcttctgcagtggccctgtgtcctctgccaccttcttggagagctgtggtgttgctgacctgatcactacctgctatggagggcggaaccggaaagtggctgaggcctttgcgcgtacaggaaaggtgggccccgggagaagggagaacagaggggcggctctgtaggcatccaggtagaggtgcttggcgggaggcatctctggagcacaaaca

SEQ ID NO: 12963 - DNA, 512 bp, Homo sapiens
  MAP TO CHR19.3; EXPRESSED IN ADULT LIVER, SIGNAL = 0.96; EXPRESSED IN LUNG, SIGNAL = 1.8; EXPRESSED IN HEART, SIGNAL = 0.92; EST_HUMAN HIT: AW872942.1, EVALUE 1.00e-119; NT HIT: AJ001704.1, EVALUE 0.00e+00; SWISSPROT HIT: Q9VSF4, EVALUE 5.00e-22
agcagctctagtgaccccagacattgacatgggccctgtctgggagcgaatgtctgtgaagggcttccttcatctgggacacacctctcagcctgtttggctacggtgtcctccctctgtgtctgtctcctgtgactggctgactgggcccaccgtgcccccgcctccccacagcggaacggggccgactacgctgtttacatcaacacagcccaggagtttgatggctctgactcaggtgcccgaccagacgaggctgtctcctggggcaagatccgggtggatgcacagcccgtcaaggtaagcgctggctgggtggggcatagggtctctgggacgatgagtgtgggtcccatggcttacccaggttcccccctacccaggtctatgctgacgcctccctggtcttccccctgcttgtggctgaaacctttgcccagaagatggatgccttcatgcatgagaagaacgaggactgagcggctgcggtcccaggaaggtcttaccccctc

SEQ ID NO: 12964 - DNA, 532 bp, Homo sapiens
  MAP TO CHR12.3; EXPRESSED IN HEART, SIGNAL = 1.5; EXPRESSED IN FETAL LIVER, SIGNAL =   2; SWISSPROT HIT: Q13438, EVALUE 6.00e-14; EST_HUMAN HIT: AL537744.1, EVALUE 0.00e+00; NT HIT: gi14758330, EVALUE 0.00e+00
actgtccctgtgggagtgtcaacttccctctctcaagactcacccgaacctcggcctcccggggcctcccattaaggtcgcacttggacccattgccataggtctggctgtggtagcgtttaagacgatgctgcttggaggcctggagaagacatgaggcaggaatgggggacatgagaaagatagcaaagaggaaggatggcactgcgtccccaaagagacaaaagaatggcctgtgcccccaggccccaggaaactttgtcctaatggccaccaagccccaagaaacagatcagctaatcttgaccctccccttcttgtcagggctctcagccggtggccagaaccctttcttcctgaatcccacactcttgccaccttggctgtttcatcatcccagtcgaaggctgattggtagtagccgagatagaggacttcacctttgatctctgaatctgcaagggaagccacagtgaagcactgttactcttaagaggaggaggaggaggagggaactggggaacttccatga

SEQ ID NO: 12965 - DNA, 549 bp, Homo sapiens
  MAP TO CHR15.3; EXPRESSED IN HEART, SIGNAL = 0.96; EXPRESSED IN FETAL LIVER, SIGNAL = 1.1; EXPRESSED IN ADULT LIVER, SIGNAL = 1.2; EXPRESSED IN BRAIN, SIGNAL = 0.82; EST_HUMAN HIT: BI869409.1, EVALUE 2.00e-72; NT HIT: AF191215.1, EVALUE 0.00e+00; SWISSPROT HIT: P26440, EVALUE 2.00e-21
ggcttgagcaaatagccaacatcctgcccttaggaaatcactacatcctgaatggcaacaagttctggatcactaatggccctgatgctgacgtcctgattgtctatgccaagacagatctggctgctgtgccagcttctcggggcatcacagccttcattgtggagaaggtgagtataggtgggtgcagggccaggaggcttctgcctcctgacagtggtaccagagatagcccgttcactgatctcaaatggaatcagtgttgtgtgctctgcaaggcccccagaggtgggggtgaggcagagagcagactgcaaggagggtgaccaaaagtccaggaagtccagggcagatgggtcacttctgaagacggtggagccgtcctcagcgccaggccacacaaagaggtctagaaaggggaggactaaaaggaggtcaggacatgacggtcagggtaccattggtggatctgatgaatgtggccatgggagactgaggtgtgggtgggatgcaagtggagactgcccctgcaacagccttgacaacaga

SEQ ID NO: 12966 - DNA, 509 bp, Homo sapiens
  MAP TO CHR1.3; EXPRESSED IN HEART, SIGNAL = 0.56; EXPRESSED IN ADULT LIVER, SIGNAL = 0.5; EXPRESSED IN BRAIN, SIGNAL = 0.58; EST_HUMAN HIT: AU123990.1, EVALUE 0.00e+00; NT HIT: gi11422912, EVALUE 0.00e+00; SWISSPROT HIT: P26374, EVALUE 2.00e-63
aggtccaaaacagcatttcgagattgctcttttctaattttgaaggtgcttctctgggctttctaggtttttgctttcctcagaggattctagtttggccattactacattattggttccaggagcctctggctgcttatcatcaccatcaaagataatgtcttctggatttggaggtggagggcagaattcttcagttggaaagatctcctggaaaagtgtttcagcttgcttgacagcatgctcatttcccaggccacagtcaggcccagagcagacataaacattggaaggcaagccattatacgagcttctgctgattcccgaggaatctctcatattaaaataaagagcccacaagagtcttggctttgtaagttcttcctcgtttatttctgtttcagtatacggagtgaataatttcttcaccactgattctaagtcttctcttgctgttttagaagatgaacatgtcaaatgtaccagataggtgtccttcatgcatgtca

SEQ ID NO: 12967 - DNA, 592 bp, Homo sapiens
  MAP TO CHR17.3; EXPRESSED IN BRAIN, SIGNAL = 2.7; EXPRESSED IN ADULT LIVER, SIGNAL = 2.3; EXPRESSED IN LUNG, SIGNAL = 4.5; EXPRESSED IN HEART, SIGNAL = 2.3; NT HIT: gi14775969, EVALUE 3.00e-52; SWISSPROT HIT: P49213, EVALUE 9.80e+00; EST_HUMAN HIT: AU138848.1, EVALUE 0.00e+00
ccctaccaaccaccaaacagaatggatttttcttttcttctatatacattccagatctcactatttattttttcagtgtgagatgctacaacgaatgttgaaaatactcaaaaagctaggttaaaaaattttttttaaatggctgtgcttatgattcaaaaagacctaattctgaaggcatttctggtcaattccagttgtttgccggatgctgtaatagttgattctcctaccgtgacccggctgttggtgcccgggttccctcccagcctgtagttgttgtaggcgagatgactgtatggattgtatcccacaaaccctggtgtgctgggcatttgctgatggaaacaaatgagacaaaaacacgaatgagaaatgagctcaaacgaggaaaacacagaaatgaaaaatgatctgcatatggcatgcaaaagcaacctgaatttaaacaagcaatgatgtgttgtaattgttctttttttccactgaggaaattaaatatttttctttcattgagaaacctgtctgcagtgtcttttggttgtttttctctttcttttttgcaggggctgggggtgtttgtgtgactgtg

SEQ ID NO: 12968 - DNA, 598 bp, Homo sapiens
  MAP TO CHRX.3; EXPRESSED IN LUNG, SIGNAL = 1.2; EXPRESSED IN HEART, SIGNAL = 2.1; EXPRESSED IN BRAIN, SIGNAL = 1.3; SWISSPROT HIT: Q13613, EVALUE 3.00e-24; NT HIT: gi15309058, EVALUE 4.00e-82; EST_HUMAN HIT: BI092461.1, EVALUE 6.00e-82
tgtaaagtcatgcatttcaccctcttcttctttctccaacaccttacagggcttgccaaatgagagttggaaaatatccaaaataaacagtaattatgagttctgtgacacctaccctgccatcattgttgtgccaactagtgtaaaagatgatgacctttcaaaagtggcagcttttcgagcaaaaggcagagtccctgtaagtaataaacattgtcatttatataggaatatatattgcgttagatctaatatggagagatttaagacaaaaaagaaactagtgaacaaaaatggaaagcagaaaaataagcttataaacctgaacatacctttgattctcaacaaatacctaattatataaacaatctgtttgctatgactccctcttttacgatttcctataactaagtataaggggaacttcagtcataccctcaaaaagtagtagagaatgacaaaggagtagcaacaacaagttatcatgctattgtattaccagttggcattgctggtttcactgaatcatcctagagaaaatgcttctttcttagatactgagcatgatgccatagctgcgtgggagggacatcattac

SEQ ID NO: 12969 - DNA, 584 bp, Homo sapiens
  MAP TO CHR11.3; EXPRESSED IN HEART, SIGNAL = 0.56; EXPRESSED IN ADULT LIVER, SIGNAL = 0.71; EXPRESSED IN BRAIN, SIGNAL = 0.52; EXPRESSED IN FETAL LIVER, SIGNAL = 0.55; EST_HUMAN HIT: AI208352.1, EVALUE 3.00e-59; SWISSPROT HIT: Q00193, EVALUE 2.00e-29; NT HIT: AJ289697.1, EVALUE 2.00e-10
cattcaggcatccattttcccacccccatcgcctgctcctatgacccagcccggccccctgcggcttgagctgcggattgccaaaggtatgctatgctatccctgctctcttctggcccccacttccctgatgcacagcccgccctggctcatgagtcactctccctgcagacgagaccttcagctcgtactatggggaggatgactatcccatcgtgaggctgctccgagaaccagtccatgtggaggtccggcttctgcagaggacagaccccaacctggtcctgctgctgcaccagtgctggggcgctcccagtgccaaccccttccagcagccccagtggcccatcctgtcagacgggtgagtgcccccacactccccccacctgctctgcctcctgtaaacagcctctctgacttctcttctcagatgccctttcaagggcgacagctacagaacccaaatggtagccttggacggggccacacctttccagtcgcactaccagcgattcactgttgctaccttcgccctcctggactcaggctcccagagagccctcagaggactggtaagaagcccc

SEQ ID NO: 12970 - DNA, 541 bp, Homo sapiens
  MAP TO CHR11.3; EXPRESSED IN FETAL LIVER, SIGNAL =   2; EXPRESSED IN ADULT LIVER, SIGNAL = 1.3; EXPRESSED IN BRAIN, SIGNAL = 1.1; EXPRESSED IN LUNG, SIGNAL = 1.7; EXPRESSED IN HEART, SIGNAL = 1.3; SWISSPROT HIT: O14773, EVALUE 4.00e-18; NT HIT: AF039704.1, EVALUE 0.00e+00; EST_HUMAN HIT: BE082612.1, EVALUE 4.00e-67
ggccctctacctcttcatccagacaggactcatggcagccacgggttacctagggaggaggctggcatcagatctgggcctactagtaccagtacttaaagagtatatctcctcaccctgtactcacatttcaaaggctattccacaccaccctaactgcccccaagtcccccttagcactccccatagttgtttgaaaacgtccacacccttcccttccatacttacatcaaagagtcctgccccatgctgctggtagagccttgggttgagaaagccaagaggggggcggccactaaggatcctgtgctcattgatcaaggataggatccccccaaacactggagtagaggcctacaagagtgaaggtgcaagtagaggtcaggggttctgagtgattggactttttgggagtgatgctttaaagtatcagacatctctaaggagtcaggggttctaggtgcaaggtgttcaaggtgttagggggtaagggtagttcctgagtgagagtttggagatgggctgattctcaccgaggttc

SEQ ID NO: 12971 - DNA, 598 bp, Homo sapiens
  MAP TO CHR11.3; EXPRESSED IN ADULT LIVER, SIGNAL = 6.9; EXPRESSED IN BRAIN, SIGNAL =  11; EXPRESSED IN LUNG, SIGNAL = 6.8; EXPRESSED IN HEART, SIGNAL =   8; EXPRESSED IN FETAL LIVER, SIGNAL = 3.5; SWISSPROT HIT: Q98996, EVALUE 1.30e-01; NT HIT: gi14763695, EVALUE 0.00e+00; EST_HUMAN HIT: AW601860.1, EVALUE 1.00e-49
tgtccaagaggcactgactgaacaggctgtttgatcccctaacagatcatgattctggaaggaggtggtgtaatgaatctcaaccccggcaacaacctccttcaccagccgccagcctggacagacagctactccacgtgcaatggtaagagggcctgtgggtgttggtgtcactgctgtgctgtgtgggctctttgctttaattcctctcacaacctaatgtttgaaaaatataggctttacagcagaagatgtgggacaagaaggaatggagaaaactcagttttggagttccctaccagcccccagcgttccagacaaaagctcgtttgagatattctattgcctcctcccaaaattcaaggttccagattgacagcctggcagtgaaggggggtagaagagatgcctaaaggaaagactctctgttggagcttttaatagtgttttgctgggatatcaagataggctaggagagaaagggtatgtgtgtgtgtgtgtgtgtgtgtgtgtgtatgtgcgcgtgcatggaggttaggaaggagagggttatagcagttcaatctttcttttttcgtcttccagtggcctctctttg

SEQ ID NO: 12972 - DNA, 573 bp, Homo sapiens
  MAP TO CHR12.3; EXPRESSED IN FETAL LIVER, SIGNAL = 0.38; EXPRESSED IN BRAIN, SIGNAL = 0.51; EXPRESSED IN LUNG, SIGNAL = 0.49; EXPRESSED IN HEART, SIGNAL = 0.64; EST_HUMAN HIT: BE386401.1, EVALUE 1.00e-52; SWISSPROT HIT: P43351, EVALUE 5.00e-14; NT HIT: gi14784425, EVALUE 7.00e-53
cagacttccgaatccctgaggacccagagagggaactggcaagaccatcggagtctgcggtatggatgcctgctttccaggcacatgaattctcctaccttctggcctccgccagccatgcggctacttatgtattctgggcccagcctctgcctcagggccttctggatggcctggtactcttctgctgtgtactggcactgcaaccccaaaaaagaaaattaaattcacacttccaccattcctcacatcattgagtctccatcctttatggagactttatactcttaaaaagaccccccagaacctttgtttatgtgggttctatgtatcctattaggaatcaaaactgagaaacttttaaggcatgcatgccattaggcatcatagcagtgacatcaccacatatcatgcactctctgaaaactctaccattcactcatgagacaatgagtgtgaaagaggcaaatagtattattatgaagataattttgaccttctggactctgaaagatcttcagaaaccccagggtttttgagaactgcattttgagaactgctgccttagctgct

SEQ ID NO: 12973 - DNA, 568 bp, Homo sapiens
  MAP TO CHR2.3; EXPRESSED IN LUNG, SIGNAL = 0.75; EXPRESSED IN HEART, SIGNAL = 1.4; EXPRESSED IN FETAL LIVER, SIGNAL = 0.89; EXPRESSED IN ADULT LIVER, SIGNAL = 1.4; SWISSPROT HIT: Q07889, EVALUE 7.00e-24; NT HIT: gi15529995, EVALUE 3.00e-86; EST_HUMAN HIT: BE005296.1, EVALUE 4.00e-86
ctagcttaggctgggacctgtgaatacattttaataggaatgcttaaattttaaaaagcaaccaattcattacaaaacttagataattcagtcttttaatctactactgaaaagacaaatgagacatttaaaaattaaagataataattgttaaaaatctaatttttctaatagggaatgaaagttcattttaaaaacacatgtagaaacctacctcaaatgtgtggtctagtctgtaaacaggtgatgaattcatagcactgacaacctcaaggacaccattaaagttgttcaactcttgaaagacttgtagaatctcaataattcgactcaccacagctactctttcttctaaattttcagtttctacaatacatctgggaataaaaaaaaagtgaactaaaggttttagagtttttccaataaagttatagcttaaagaatttagtaaataaaataatgtagagagtaggggggtggcgatagtataactactatagagaagacacattcagggtgactgatagaaggaaggcagtgcctccagtcaggcatactgctctttccc

SEQ ID NO: 12974 - DNA, 530 bp, Homo sapiens
  MAP TO CHR17.3; EXPRESSED IN HEART, SIGNAL = 2.3; EXPRESSED IN FETAL LIVER, SIGNAL = 4.6; EXPRESSED IN LUNG, SIGNAL = 2.1; EST_HUMAN HIT: AW069179.1, EVALUE 0.00e+00; NT HIT: gi14769515, EVALUE 0.00e+00; SWISSPROT HIT: Q02597, EVALUE 8.50e+00
caggaaagaggcatcaaagctagaatgtgaatataacttttgtggaccaatactaagaataacaagaagcccagtggtgaggaaagtgcgttctcccagcactgcctcctgttttctccctctcatgtccctccagggaaaatgactttattgcttaatttctgcctttcccccctcacacatgcacttttgggcctttttttatagctggaaaaaacaaaataccaccctacaaacctgtatttaaaaagaaacagaaatgaccacgtgaaatttgcctctgtccaaacatttcatccgtgtgtatgtgtatgtgtgtgagtgtgtgaagccgccagttcatctttttatatggggttgttgtctcattttggtctgttttggtcccctccctcgtgggcttgtgctcgggatcaaacctttctggcctgttatgattctgaacatttgacttgaaccacaagtgaatctttctcctggtgactcaaataaaagtataatttttacctgcggacttggtttcctctctg

SEQ ID NO: 12975 - DNA, 513 bp, Homo sapiens
  MAP TO CHR14.3; EXPRESSED IN LUNG, SIGNAL = 0.85; EXPRESSED IN HEART, SIGNAL = 1.5; NT HIT: AF361796.1, EVALUE 0.00e+00; SWISSPROT HIT: P05154, EVALUE 8.00e-51; EST_HUMAN HIT: AI056629.1, EVALUE 0.00e+00
acagaggctttcagcagctccttcaggaactcaaccagcccagagatggcttccagctgagcctcggcaatgcccttttcaccgacctggtggtagacctgcaggacaccttcgtaagtgccatgaagacgctgtacctggcagacactttccctaccaactttagggactctgcaggggccatgaagcagatcaatgattatgtggcaaagcaaacgaagggcaagattgtggacttgcttaagaacctcgatagcaatgcggtcgtgatcatggtgaattacatcttctttaaaggtaaggcccttgggcccaaacctgcactttctttggcttttctgctgcttttatctaaagaatacccaattccctcacatacataaaagacggggagtacgttaagttcttttgggtgcctgttgagaaaaattaagtaaacaagcagccagagaaggtaagatgaatgccttcttgctgtggatgggattagtgaggctgagatgctgtttcctc

SEQ ID NO: 12976 - DNA, 573 bp, Homo sapiens
  MAP TO CHR3.3; EXPRESSED IN HEART, SIGNAL = 0.69; EXPRESSED IN BRAIN, SIGNAL = 0.68; SWISSPROT HIT: P30415, EVALUE 2.00e-05; EST_HUMAN HIT: AA446988.1, EVALUE 6.00e-57; NT HIT: AF184110.1, EVALUE 0.00e+00
ccaaaaacattccagaacaaaagcaatcagacagtactttggcattcattgtaaaggaattcactaagtaactataatattaataaaataaactgcataaaaacaaaataaaatgtcttacgtggtactttgctttttcatacattctggacctataatattcactcatccaacaagtattcactgaccacattttatatcatactgtaactgacacaatatttagaactaaaagtaataatgaaatactttaaaaactgatagatggagttattaggaacacaacttttagctctaccttcactgaagtccccaccctgaatcataaagtttttaaccacacgatggaacgtagaacctttataacataacttcttcccagttgttttcccaaggcctttctctcctggaaaaaaaaaaaaaaaaaagaaatgaagtttaattatttatacatccttccatggaaagaacaaaccaattaatcctgtgtcaaatctttcctgtgtgctaggcactggaagagatataagaaatagatgacatgataatttaacatacacacatgcacgcaaa

SEQ ID NO: 12977 - DNA, 574 bp, Homo sapiens
  MAP TO CHR22.3; EXPRESSED IN HEART, SIGNAL = 1.3; EXPRESSED IN ADULT LIVER, SIGNAL = 1.4; EXPRESSED IN BRAIN, SIGNAL = 4.2; EXPRESSED IN FETAL LIVER, SIGNAL = 2.3; NT HIT: gi4506086, EVALUE 7.00e-99; SWISSPROT HIT: P46196, EVALUE 3.00e-29; EST_HUMAN HIT: AV686595.1, EVALUE 2.00e-97
acaaaccatcccttggacagaagaaacatgactgcaaacagagttaaccaagattttccatgactagacttagggagtaaatagcaaacagattacgattttccctttagcatgtttaatgcacttttcctttaagttcaggaaatttcaagttctatttactcaacaaggttaccaagcagtggaattggccagttgcctaaaaaggatacacatctttcatttgctcgatggttggtgctcgaataatgtcattgattccaatgatgttctcatgtctgaagcgcagtaagatttttatctccctcagggttctctggcagtaggtctggtgctcaaaggggctgattttcttgatagctactcgaactttgttgacattatcataagcagagcttaaaaaagagagagagagatggcattaaaaacagccctcagaatatttgaagaaggcaagttggtaaagtattatatttttaacactgtgtaaacacctgtttcatacccgtgaaggcagcatgtatattatccacaaaaaggcctcaagctagggaggatggatgcaactgacatg

SEQ ID NO: 12978 - DNA, 600 bp, Homo sapiens
  MAP TO CHR3.3; EXPRESSED IN FETAL LIVER, SIGNAL = 3.4; EXPRESSED IN LUNG, SIGNAL = 4.8; EXPRESSED IN HEART, SIGNAL = 4.2; EXPRESSED IN BRAIN, SIGNAL = 2.4; NT HIT: AF191627.1, EVALUE 0.00e+00; SWISSPROT HIT: P21333, EVALUE 3.00e-36; EST_HUMAN HIT: BG749746.1, EVALUE 0.00e+00
gaaagatgctctggaaaccgtattactctgctccccaattagagactcaggtgcacactaataagatacgggctccaaggaggctcccagtaagaaacctgtttggctttacgtaagtgagcaaagcttagttacaaactgtgccagacttagtcatgatgccttgttttaaataatgcccttaatgccacctatcagaagtcttctctttcaaatggggcaaaaaagtatgtgggtgcccacactgcctgggctcaactctattcttcccaagtgaaaatcctgcccgcaatgctcacctgggactcccgcttctcctctctccaggccagggcctcctgcccgcaccttgtgggcgcctccttcaccaagtggccccacggtgaactggaaggggctgccggtgacgtgctgcccacggtacttgacgctgaccgtgtgcacgcccatctcctggggcacaaaccggacgcagtgtgagttcttccccatgggcacaatctctgcctcagtcacacggccagaggggctggtgacgtgggccgacatatcactgctgttgatttctgaaagagggagggaggttgggggagagaagag

SEQ ID NO: 12979 - DNA, 600 bp, Homo sapiens
  MAP TO CHR17.3; EXPRESSED IN HEART, SIGNAL = 1.2; EXPRESSED IN BRAIN, SIGNAL = 1.2; EST_HUMAN HIT: BF745292.1, EVALUE 0.00e+00; NT HIT: gi13651401, EVALUE 0.00e+00; SWISSPROT HIT: P34810, EVALUE 9.00e-45
ccacagaggaaggagtagcgtgtgggattgggaggggaggggcgccgggaggctgagtgaggggtgagactgaggacatggctatacctgcatgaatccaaagctgaggtgtccataggggaatgagagaagcaggtggggatgggcaccctcacagcttccctggaccttggttttgttggggttcagtacagagatgccccaggcctgcggaagttaaagactggaaggtcacaagactgcatgcgatgccggccaaggttccctgtcccctcttccttcttccctctgagcctatatccagtcctgcctccctcccctctcatcccccagttttagctttacctctcctccaccctgggttgtgtacatgactcgaatctgaatctgggcttggaggtggacacagggctgggaaccattggtccacgtgtagtctccaatggtctccttggaggttgggctaggactcggagagggtggaggtggttctgggtgggcagaactggtgaatcctgggctggtggcagtgctgttgcttgttggatgaaccgtggcatttccatgactagtggtggcaggactgtgagtggcagttga

SEQ ID NO: 12980 - DNA, 527 bp, Homo sapiens
  MAP TO CHR9.3; EXPRESSED IN BRAIN, SIGNAL = 1.5; EXPRESSED IN LUNG, SIGNAL = 2.8; EXPRESSED IN HEART, SIGNAL = 0.64; SWISSPROT HIT: P35030, EVALUE 4.00e-22; NT HIT: AF029308.1, EVALUE 0.00e+00; EST_HUMAN HIT: AL538916.1, EVALUE 6.00e-94
ctctccagaggcagtgttcctcttcaatgttccatcccagattattgtctccttctctggcctcacccacatttctactttctttgatctcttcctgatcctcacagctgactacccagacgagctgaagtgcctggatgctccggtgctgacccaggctgagtgtaaagcctcctaccctggaaagattaccaacagcatgttctgtgtgggcttccttgagggaggcaaggattcctgccaggtgatttgaccctttcccatgctgaggctcccaccgatacccaggccccaccggggaaaaagatttgaactcccaaggtggcagggctgaggcggctccctgcagtgctcccatggagaaatgaggaaggtggcggggctgaggcggctccctgcattgcccccatggagaaacgaggaaggtggcggggctgaggaggctccctgcagtgcccccattgggaaatgagggaggctcccttgtgctgcacgctgcctgcttaggaagaacagagaatgggcca

SEQ ID NO: 12981 - DNA, 513 bp, Homo sapiens
  MAP TO CHR5.3; EXPRESSED IN BRAIN, SIGNAL = 0.29; EXPRESSED IN HEART, SIGNAL = 0.75; SWISSPROT HIT: P02805, EVALUE 4.20e-01; NT HIT: gi15295132, EVALUE 2.00e-74; EST_HUMAN HIT: N31868.1, EVALUE 1.00e-105
ctcaaccacctcaaaaagggtaactttataaattaccaagctattataaaatgtgaatatgctctgtatatctttcaggaaagaccatgccagtatgataaggatgctctgagatgggaaagacagccttaatgcaaagcaatcaacaactataccatcagaaaaaaaagggagtgtgtgtatatatatatatgtttaggggttattatttccaaagaaaacaatgaatttaaaattatatatttatacatattcaagtcatcttcacctccacatcgtgtgttagtgaacctacctgtgtatattatcctggccagaagggactgcacctacattggctacatttacaaccttctgaaagatcacagagggagtgaaattctgtggtgcagcaatgattacagcagaagtttcattcattcctgttagcactcctgtaaaagcaaaagaaggctcccttttattaatttctttttgaaaattacatttacagaattttaagctcatggccaa

SEQ ID NO: 12982 - DNA, 545 bp, Homo sapiens
  MAP TO CHR1.3; EXPRESSED IN LUNG, SIGNAL =  17; EXPRESSED IN HEART, SIGNAL = 5.2; EXPRESSED IN BRAIN, SIGNAL = 2.6; SWISSPROT HIT: P20796, EVALUE 2.60e-01; NT HIT: AB051901.1, EVALUE 0.00e+00; EST_HUMAN HIT: AV752858.1, EVALUE 0.00e+00
tcccctttaggacacagcaccataaaaaattgtacaaatcacccttttttttggggggggaggagaatgtctgcaaattaaaacagaaaaaaggaagcaacaacacgtaattcaaaccactcaaactgagcaacttaaaacatttcgtacaggttttgtgtattcaattctcttctctaatcagctttcaccctccaacaatgaattgggccgcttacctgttggctggtcttccagaagaagcgtgtcttcatagcgcaggtactccgaagtctgtttgcactgctgggatccctgcatccaaagcactttagccactccgcaagccaggatcctaacggctttgacacgagtaacttcacacacctccactatcacccggccagccaccttctcgccactgccgtacaccttttcagggtcgttaaagaccacctcaaaagacttgatcttcttgaacatcaccatgatggaactgagttggttttaagagttagaaatgacggtggaagaaaaaaaaagctccaaatcgaggaaaccccttt

SEQ ID NO: 12983 - DNA, 553 bp, Homo sapiens
  MAP TO CHR12.3; EXPRESSED IN HEART, SIGNAL =   1; EXPRESSED IN ADULT LIVER, SIGNAL = 0.75; EXPRESSED IN BRAIN, SIGNAL = 0.58; SWISSPROT HIT: P41970, EVALUE 6.00e-12; NT HIT: gi11435887, EVALUE 1.00e-108; EST_HUMAN HIT: N42617.1, EVALUE 0.00e+00
gttcttcccaatggatttgcaataattattgtaaaaatcttttgtcccctacagttccccacactgcttaatggccacatgccagtgccaatccccagtctggacagagctgcttctccagtactgctttcttcaaactctcagaaatcctgatgacgtctggccacaattaaggactcattaactgatgaaacaaatttgtccccacgggctagtttacctgtgtcgtgagaaggacattgtgaaactcttgttaatttggtttgcacttttcataacatggatagtctagatttatgttagcattttaaaaactgtttttgatatattcaagtatatatgaaaatctgtttggcattaagtgaattttaatgtttttgtttttatatccttttagctcttaagtgttgaacactgttgacagtgaagaacttttcttaatggttttcagtataactaataaggatgtgaagcttttttctctttagttctgagtatgctaaactgtgtgcttatatagactataaccagttgtgccttccttcgcatttaa

SEQ ID NO: 12984 - DNA, 521 bp, Homo sapiens
  MAP TO CHRX.3; EXPRESSED IN HEART, SIGNAL = 0.57; EXPRESSED IN ADULT LIVER, SIGNAL = 0.66; EXPRESSED IN FETAL LIVER, SIGNAL = 0.45; SWISSPROT HIT: P27918, EVALUE 3.00e-34; NT HIT: X70872.1, EVALUE 0.00e+00; EST_HUMAN HIT: BI770026.1, EVALUE 1.00e-95
accccagtcagatcacgttcctcctctgcccacagtccaaattactcagatgaaaagccaacgtcctctctgtggcccccaggcaatggaccctcctcacctctctgacctcacctcccaccactctcctccttaggtccttacaaacactggggacgggcccactctgaggacctctgtaccgatcgttcccaccagtgctgggtgacagggagtgcttgcccgccttgctcatcctcctcaccaggacagcactgctggtcctcacaggcctggagctgccactccagggtcccaggtgccacctttccagagcactgcccattccagcccacacagcgccggtaccgcagctgggagccctcagagcacgtcaccgaacagggggcccatgtggaccacagggaccatcgtggggacctgtggagaagagcacacacatcccatcctggcatgagctaacaagaatggcatgtgggactccagagtgtgggcagacacgaagggttgctaggcaagtg

SEQ ID NO: 12985 - DNA, 564 bp, Homo sapiens
  MAP TO CHR3.3; EXPRESSED IN HEART, SIGNAL = 1.1; EST_HUMAN HIT: AV705749.1, EVALUE 0.00e+00; NT HIT: gi15294716, EVALUE 1.00e-111; SWISSPROT HIT: P51114, EVALUE 3.00e-09
gttttgaagaagtgagcggccttctgcacatcagtttattttttaatctgtattaactagtagatactatactagtatattaatagtataataattgattattccttagtacgtttcagattgattttaactttcatggatctttctttgaagcagccaaacagtattgcttatttaaacaataatttgtaggacataattttgaacattttaaaaggctttttatagaaatctaagtggtttatgttcttttcttttccaaggtacaaattctgagctgtctaacccctctgaaacggaatctgagcgtaaagacgagctgagtgattggtcattggcaggagaagatgatcgagacagccgacatcagcgtgacagcaggagacgcccaggaggaagaggcagaagtgtttcagggggtcgaggtcgtggtggaccacgtggtggcaaatcctccatcagttctggtagtcttttctatactctgtcagcatccattatttgtaaacagtttaattttacaaaagttaattcatctcccagggccacccatttttggaagtt

SEQ ID NO: 12986 - DNA, 501 bp, Homo sapiens
  MAP TO CHR6.3; EXPRESSED IN HEART, SIGNAL = 0.56; EXPRESSED IN BRAIN, SIGNAL = 0.27; SWISSPROT HIT: Q16552, EVALUE 2.00e-43; NT HIT: gi4504650, EVALUE 0.00e+00; EST_HUMAN HIT: Z21181.1, EVALUE 7.00e-01
ccaatttgtccccaaagttcttcttcaaactaacatcatttaaagaatttgcaatgcctataatttgtcatcctgtgaacttgcctctcttcatgtattcctgttttatttctttcccactttaccaggaattcactttcctcctgatttttctcccctctgcagccgcaatgaggaccctgagagatatccctctgtgatctgggaggcaaagtgccgccacttgggctgcatcaacgctgatgggaacgtggactaccacatgaactctgtccccatccagcaagagatcctggtcctgcgcagggagcctccacactgccccaactccttccggctggagaagatactggtgtccgtgggctgcacctgtgtcaccccgattgtccaccatgtggcctaagagctctggggagcccacactccccaaagcagttagactatggagagccgacccagcccctcaggaaccctcatccttcaaagacagcctcatttcgg

SEQ ID NO: 12987 - DNA, 536 bp, Homo sapiens
  MAP TO CHR17.3; EXPRESSED IN LUNG, SIGNAL = 0.94; EXPRESSED IN HEART, SIGNAL = 0.96; EXPRESSED IN BRAIN, SIGNAL = 0.72; EXPRESSED IN ADULT LIVER, SIGNAL = 0.87; SWISSPROT HIT: P11678, EVALUE 1.00e-42; NT HIT: M29912.1, EVALUE 0.00e+00; EST_HUMAN HIT: W92863.1, EVALUE 2.00e-87
cttctgccagcaggatcttctggttctgcccaatattgactggccacagcttccccccagaggactggtggagaaaaacagaagctaatgggagatcagcaagactgaagctgcttctccccgttcccctgcagggtacaatgcttggaggcgcttctgtgggctctcccagccccggaatttggcacagcttagccgggtgctgaaaaaccaggacttggcaaggaagttcctgaatttgtatggaacacctgacaacattgacatctggattggggccatcgctgagcctcttttgccgggggctcgagtggggcctcttctggcttgtctgttcgagaaccagttcagaagagcccgagacggagacaggtaagtgaccctatcataaaagacatcagcaccagaggcagagcagaaaaacactagcatttcaagactaaacattgaagaacactgctctttttagtatcatttcttccaagttcacaggatctgaaatcaggaggctcctctctgaaaagctgggtcaaagg

SEQ ID NO: 12988 - DNA, 545 bp, Homo sapiens
  MAP TO CHR17.3; EXPRESSED IN LUNG, SIGNAL = 0.75; EXPRESSED IN HEART, SIGNAL = 2.3; EXPRESSED IN FETAL LIVER, SIGNAL = 1.5; EXPRESSED IN BRAIN, SIGNAL = 0.68; SWISSPROT HIT: P14672, EVALUE 1.00e-28; NT HIT: M91463.1, EVALUE 0.00e+00; EST_HUMAN HIT: BG996402.1, EVALUE 0.00e+00
aatctgctgggattgtggtctgctcctgagggatttgggctgcactgggaggcagctgtggcacaactctggcagccaggagggagagcccctgtcaagcctcaggaacaatcattcctaaggacccagctttagagtccagggagagctgaccgtcataagaactgagaggccataacatttcctctgccttgaacccacttgggatagccagcagaatgccagtcaagggcctgctctaacccgggacagcaggccccctacaagctgctgcggagggggttaggtttcacttctctgagttgagggcaagggaagatcagaaaggcctcaactggattctccaccctccctgtctggcccctaggagcgagttccagccatgagctacgtctccattgtggccatctttggcttcgtggcattttttgagattggccctggccccattccttggttcatcgtggccgagctcttcagccagggaccccgcccggcagccatggctgtggctggtttctccaactggacgagcaacttcatca

SEQ ID NO: 12989 - DNA, 531 bp, Homo sapiens
  MAP TO CHR19.3; EXPRESSED IN BRAIN, SIGNAL = 2.9; EXPRESSED IN HEART, SIGNAL = 2.3; EST_HUMAN HIT: BF222920.1, EVALUE 1.00e-104; SWISSPROT HIT: P12660, EVALUE 2.00e-15; NT HIT: S40022.1, EVALUE 4.00e-26
gcttctccacccctagcttcaagagatagaggaattcaaagagaggttacggaagcggcgggaggagaagctccttcgcgacgcccagcagaactcctgaggcctccaagtgggagtcctagcccctcccctgatgaaatatacatatactcagttccttgttattcatttaagtgttttattcttttatcagtttttgggggccgagtgagacccaggatgcctcaggccctcagggggcttgtgtcgggggctgggggctgctgttccgacggaagccgagagcggtcgggtcctgaggggtgagcaggggttggggactgagggtcccagctcgtttctgtgctccgtcctgtggatgaagaggggtcagccagggggagggctcaagggcagtgccggccacaggtggcgaacaatggagagagggtgcaggtagccaccgtgtcccacctcattgtgagcactggtctatgtttaccctcaatatctgccatttagggtggcatttgagtgtgaggtggcaggtct

SEQ ID NO: 12990 - DNA, 565 bp, Homo sapiens
  MAP TO CHR9.3; EXPRESSED IN HEART, SIGNAL = 0.78; EST_HUMAN HIT: BG824773.1, EVALUE 0.00e+00; SWISSPROT HIT: O08770, EVALUE 1.00e-03; NT HIT: AF172171.1, EVALUE 0.00e+00
ctgtggggcttcttatttgcttattccatcatcatctgtcctgcttgatgtctttgcctatgcacaatcatatgacccatcacatctgtatgaagagctggatgactaggattaatattctattttaggttcttattcagcagaaatattagataatcaatgtctttttattcctgtaggtgtgaaatccagacaattgaagatggggcatatcagagcctaagccacctctctaccttaatattgacaggaaaccccatccagagtttagccctgggagccttttctggactatcaagtttacagaagctggtggctgtggagacaaatctagcatctctagagaacttccccattggacatctcaaaactttgaaagaacttaatgtggctcacaatcttatccaatctttcaaattacctgagtatttttctaatctgaccaatctagagcacttggacctttccagcaacaagattcaaagtatttattgcacagacttgcgggttctacatcaaatgcccctactcaatctctctttagacctgtccctgaaccctatga

SEQ ID NO: 12991 - DNA, 539 bp, Homo sapiens
  MAP TO CHR14.3; EXPRESSED IN ADULT LIVER, SIGNAL = 0.6; EXPRESSED IN BRAIN, SIGNAL = 0.86; EXPRESSED IN HEART, SIGNAL = 0.59; SWISSPROT HIT: P49699, EVALUE 8.00e-03; NT HIT: gi9845292, EVALUE 3.00e-61; EST_HUMAN HIT: BF087964.1, EVALUE 0.00e+00
ctcagtccttcacggcctacattctctcccagacccagcctgctgcttcctaaccacctggccatgatggagaccctagaagatgctccagatcccttttttgggatgatgtctgtggatcccagacttcctagtcctttcgatatccctcaggtagggctcattccccaagactcgtgaattggcaatgcagaaggggagtgctgtccctgtgtcactctgacattggggttggggaaggaagcttaccacagctctctcccacaggagatggtgcagggggactgccaaggtggacccatccaggcgaagccccctgtacttacctactcagggccaatctgatcagacggtttccccactggaggcagctcttgtccccacttgtctccacactgttttcactgccaaggccctaatccaggctctcatctctctgcactgggctttcttacccctgtcctcctccatctattcccaatactcctacagcttaatgtcacccccttccttggttccccatttgaacagtggctcct

SEQ ID NO: 12992 - DNA, 590 bp, Homo sapiens
  MAP TO CHR21.3; EXPRESSED IN BRAIN, SIGNAL = 1.5; EXPRESSED IN LUNG, SIGNAL = 1.6; EXPRESSED IN HEART, SIGNAL = 1.4; EST_HUMAN HIT: AI954742.1, EVALUE 0.00e+00; SWISSPROT HIT: Q06546, EVALUE 3.00e-35; NT HIT: gi13646481, EVALUE 0.00e+00
aattgctattgtggcggatgcagtactctactaggcttctgcttatggaatagtctgtaaattattgtaagaagtctcattttttctgaagtctctaatttttttttctctttttgaagatattattacgatggggacatgatttgtaaagttcaaggcaagagatttgtgtacaagtttgtctgtgacttgaagactcttattggatacagtgcagcggagttgaaccgtttggtcacagaatgtgaacagaagaaacttgcaaagatgcagctccatggaattgcccagccagtcacagcagtagctctggctactgcttctctgcaaacggaaaaggataattgagccccaggacattctgagactccaaagtctttcttaaaatgtttagagcaagtatagctcttacctttattactgaatttgaatcttcttttatttctaggctgtacagtctgatgcatgatttttttataaatatttcatactcttgtgaatttggatctttttactttgagcatatattttagaatatgtgtatgttaaaggatctccacaatgtctgcagtgtgaaggcaggttcattg

SEQ ID NO: 12993 - DNA, 506 bp, Homo sapiens
  MAP TO CHR8.3; EXPRESSED IN HEART, SIGNAL = 2.6; EXPRESSED IN BRAIN, SIGNAL = 1.6; EXPRESSED IN ADULT LIVER, SIGNAL =   2; SWISSPROT HIT: P00540, EVALUE 4.00e-82; NT HIT: J00119.1, EVALUE 0.00e+00; EST_HUMAN HIT: BG472166.1, EVALUE 7.10e-01
ctcagagctacctgcgaagctgcttctgggggccatcttcctcgggccccgcggctgccgcgccggctggcctggtgctccattgactgggagcaggtgtgcttgctgcagaggctgggagctggagggtttggctcggtgtacaaggcgacttaccgcggtgttcctgtggccataaagcaagtgaacaagtgcaccaagaaccgactagcatctcggcggagtttctgggctgagctcaacgtagcaaggctgcgccacgataacatcgtgcgcgtggtggctgccagcacgcgcacgcccgcagggtccaatagcctagggaccatcatcatggagttcggtggcaacgtcactttacaccaagtcatctatggcgccgccggccaccctgagggggacgcaggggagcctcactgccgcactggaggacagttaagtttgggaaagtgtctcaagtactcactagatgttgtgaacggcctgctcttcctccactcgcaaag

SEQ ID NO: 12994 - DNA, 580 bp, Homo sapiens
  MAP TO CHR18.3; EXPRESSED IN LUNG, SIGNAL = 1.2; EXPRESSED IN HEART, SIGNAL = 0.68; EXPRESSED IN FETAL LIVER, SIGNAL = 1.3; EXPRESSED IN BRAIN, SIGNAL = 0.88; SWISSPROT HIT: P36907, EVALUE 3.20e+00; NT HIT: AF120981.1, EVALUE 0.00e+00; EST_HUMAN HIT: BG772219.1, EVALUE 2.00e-91
tccaggctgcctcctatatcctgccagccctgtcaaaaggttgtatgagtgaaatggcattggctccacctgggtgctaacccatcatggcccatccctagccccacaggagacaggatccgaagcaaagttgagctgactcgatacctgggccctgcgtgtgatctcaccctcttcgacttcaaacaaggcatcttgtgctatccagcccccaaggtacttcacaacatgagatacctaggtaggggtggatgtgccacccaacacccaaccactgacccatattcctccttcccttactttccaggcccatcccgtggcggttgccagcaagaagcgaaagaagccttcaaggccagccaagactcggaaacgtcaggttggaccccagagtggtgaggtcaggaaggaggccccgagggatgagaccaaggctgacactgacacagccccagcttcattccctgctcctgggtgagtgttggtctaaggtgagccagatgggtgagggttgtgattgggggtgctcttggagccccacacctgcctttcccatcccaggtgctgtgagaactgtgga

SEQ ID NO: 12995 - DNA, 544 bp, Homo sapiens
  MAP TO CHR6.3; EXPRESSED IN HEART, SIGNAL =   2; EST_HUMAN HIT: BF845207.1, EVALUE 0.00e+00; SWISSPROT HIT: P01028, EVALUE 2.00e-38; NT HIT: gi15208634, EVALUE 0.00e+00
caatatgatccctgatggggactttaacagctacgtcagggttacaggtgggagtgccctttagtcccttcccagtggccaccttcggattcatgtgggacctgtggatccctgcttggtcccactccccgtgagcctctgacacagagtcctcagacctccaccctctccctcccatgtagcctcagatccattggacactttaggctctgagggggccttgtcaccaggaggcgtggcctccctcttgaggcttcctcgaggctgtggggagcaaaccatgatctacttggctccgacactggctgcttcccgctacctggacaagacagagcagtggagcacactgcctcccgagaccaaggaccacgccgtggatctgatccagaaaggttctgggtgcaagggcaagcaggaggggggccaggaaaggacagttactggaagatggacagcccaggaggctacagagggaaagaaagggggcccctgatgaggatggggagcatggccttgggctcaaacagcagaagggtgagtgtca

SEQ ID NO: 12996 - DNA, 510 bp, Homo sapiens
  MAP TO CHR8.3; EXPRESSED IN ADULT LIVER, SIGNAL = 0.7; EXPRESSED IN BRAIN, SIGNAL = 7.1; EXPRESSED IN LUNG, SIGNAL = 0.64; EXPRESSED IN HEART, SIGNAL = 0.77; SWISSPROT HIT: Q93045, EVALUE 2.00e-03; NT HIT: AF306458.1, EVALUE 2.00e-89; EST_HUMAN HIT: D45352.1, EVALUE 1.00e-120
ctagtcaagcgcatggtacgcaaaggaccagacaaaaagggcctgtgacatttcttcttccttttgtgttttttaggagaggcatgctgcggaggtgcgcaggaacaaggaactccaggttgaactgtctggctgaagcaagggagggtctggcacgccccaccaatagtaaatccccctgcctatattataatggatcatgcgatatcaggatggggaatgtatgacatggtttaaaaagaactcattataaaaaaaaaaaaacaaaaaaaatcaaaaattaaaaaaaatcaatgcggtctctttgcagaatgttttgcttgatgtttaaaaaataccttggatcttattttgtaaatacttacatttttgttaaaaaatacaagtattgcattatgcaagttatttcataatcttacatgtcctgtaacaggcttttgatgttgtgtctttccactcaaatgaatttgctaggtctgttctttttgaagctccccatgtctaactcca

SEQ ID NO: 12997 - DNA, 557 bp, Homo sapiens
  MAP TO CHR9.3; EXPRESSED IN LUNG, SIGNAL = 0.85; EXPRESSED IN HEART, SIGNAL = 1.4; EXPRESSED IN FETAL LIVER, SIGNAL = 0.74; EXPRESSED IN BRAIN, SIGNAL = 0.84; EST_HUMAN HIT: W44326.1, EVALUE 9.00e-10; NT HIT: X02958.1, EVALUE 0.00e+00; SWISSPROT HIT: P05013, EVALUE 2.00e-94
tgcaagctggtgtagtcgtcaatgggagtcgtttctgtgttggatcaggtcttattccttcctccttaacctttcttgcaagtttcttgatgaagagaaggatctcatgatttctgctctgacaacctcccaggcacaagggctgtactttttctctgtcaggtagagagtgattctttggaagtattttctcacagccaggatggagtcctcattcatcaggggagtccctcccacccacacctcctgcatcacacaggcttccaggtcattcagctgctggtaaagttcagtatagagtttgtctagaagcctctcatcccaagcaacagatgagtcctttgtgctgaagaggttgaaggtctgctgaatcacctcatggaggacagagatggcttcagccttctggaactggttgccatcaaactcctcctggggaaatctgaagtcatgtctgtccttcagacaggagaaaagagagattctcctcatttgtgccaggagcatcatggtcctcctgtgacccaggctgtgggtctgaggcagatcacagtcca

SEQ ID NO: 12998 - DNA, 518 bp, Homo sapiens
  MAP TO CHR11.3; EXPRESSED IN HEART, SIGNAL = 0.52; EXPRESSED IN BRAIN, SIGNAL = 0.53; SWISSPROT HIT: Q13606, EVALUE 9.00e-28; EST_HUMAN HIT: BF972452.1, EVALUE 7.30e-01; NT HIT: gi7305340, EVALUE 3.00e-39
tggggatcactgctgtgtagaacagggaaaccactttattgatgttgatagagaaactagagcttggacatacacagataaagaagagtgtcccatacaggatggagacagccatcaggtgtgaagagcaagtggagaagtctttgcgtctcgcgtcagcagagcgaattctcaggatggcaatgacaatgtaaatgtaggagaccaagatgatcacaccactgagtactcccagggcacccaccaagataaaaagtaaacatttattaatatgggtatctgcatatgccagggagaggacagggagaaggtcacagaagaagtgattgatgatgtttggaccacagtagagtaggcgaaaggtgaaagtcatatgggtcatggtgcttataaggcccacagcataaggcccaccaccagctgcacacagacctgttgggacataatgagtgtatacaacaaaggcttatagatagcctataccggtcatatgccatggcagccagaaggaaacattc

SEQ ID NO: 12999 - DNA, 528 bp, Homo sapiens
  MAP TO CHR6.3; EXPRESSED IN ADULT LIVER, SIGNAL = 1.1; EXPRESSED IN HEART, SIGNAL = 1.1; SWISSPROT HIT: O95865, EVALUE 4.00e-24; EST_HUMAN HIT: BF732807.1, EVALUE 1.00e-79; NT HIT: AJ012008.1, EVALUE 0.00e+00
acagggaagacatggagtggggagaggggagtgagacctcaggctgagccaggccactcttccagccagctcagagtggccccacccaggcttctagagaaggtacccttccttcctcccactaggaaagcctgaaactcttttctctgatggtgcttggtgttggagttcctgccctctctcacctcctggctgttgggcagatccccacctccacggtgcaggaggaaagggggcacaccaggcaacccaggacgaagaaagagacagtcagcagctgcgtcatctgggagggtcagggaggcatatgggtgatctgtcagcactgccattgcctagaggaaagaggaagtgttcgagtctcagaacctctccacagctgtgtctgcctgctcaaccaccactaagggctggggacggactgacatttgtggaaaataatgacagcaagcacatagagcttacgatatgtcagacactaagtactttagttacctttgctaatttccaccttggaatcacatgcag

SEQ ID NO: 13000 - DNA, 587 bp, Homo sapiens
  MAP TO CHR4.3; EXPRESSED IN HEART, SIGNAL = 0.79; EXPRESSED IN ADULT LIVER, SIGNAL =   1; EXPRESSED IN FETAL LIVER, SIGNAL = 0.94; EXPRESSED IN BRAIN, SIGNAL = 0.63; SWISSPROT HIT: Q13257, EVALUE 1.00e-17; EST_HUMAN HIT: T56843.1, EVALUE 3.00e-62; NT HIT: AB056160.1, EVALUE 0.00e+00
tggcattaaaggaagtacagcagagctacatcttaaattgtgtgagtctaatatcattccttatagttaaaaatatcttagaacaattattaaatggttcatctagtatatcatgtgtagttttgtatatatcaccataaatactgtttgaaaactactgatttagactaaaggcaattatgttaaaattatattatatatacaaatcaatgatatgctaaactgagcacaattcttttccataggtgactgaggatatcttagaaaatataaattagaaacaaactatattttatataaaactagttcaatacaattagaactcaattagtaataaaaacaagttttgaaaaaaaatatatcaaagtagaaataatgtaattcctatttacctgtcatcttttgcagtcttgtcacactcaatatcaaactgccatctttccaggacctcaccactttcaatatttgagataactacaaccagtttctgaactgaacacttgtataaccaatctgcaacatataaaaaggaaggcatctttcttggtccactgcatcataaagtagctctcttctcgggtcccact

SEQ ID NO: 13001 - DNA, 597 bp, Homo sapiens
  MAP TO CHR1.3; EXPRESSED IN LUNG, SIGNAL = 0.72; EXPRESSED IN HEART, SIGNAL = 0.88; EXPRESSED IN ADULT LIVER, SIGNAL = 0.73; EXPRESSED IN FETAL LIVER, SIGNAL =   1; SWISSPROT HIT: Q9ULJ3, EVALUE 1.50e+00; NT HIT: gi14743552, EVALUE 1.00e-103; EST_HUMAN HIT: BG981186.1, EVALUE 1.00e-103
tgggtttgagtcttggcttcattatctactagctatgtaagtgagtaagccacttaacctttccgggcctcagttttccccatctttaacacagaaataataataatagctttctcatgaggctattgtgaggaatgtggtaaatgagtcgtaaatgagctccaaaatctaaagcatttagaacagtatgtagtgcacgggtaagtaccattactcttctcatctctatttcacatctgcacaaactgaactcagggagcatcagtaacctgcccaaggctagcaagtggcagaacaggacctgactcccaagcttgccctactgcctctattctattgcttcccttgaaacctcccaggatcaaagtggtgctcccagcacctgcccccactgcctcatgtacctgtgagtttccacttccagccaaaagctggatcatctgctgcatgagttgctgctgggcgctggaagcccctgttggagaagatgtggctggcgtggctggtgaggaagtgggggcctcgggcgtagaccctgcgttgctgcctgctgagggtgctggggtccgggatatcccaaaggagccaaggctgtag

SEQ ID NO: 13002 - DNA, 567 bp, Homo sapiens
  MAP TO CHR11.3; EXPRESSED IN HEART, SIGNAL =  13; EXPRESSED IN FETAL LIVER, SIGNAL =  32; NT HIT: M63138.1, EVALUE 0.00e+00; SWISSPROT HIT: P07339, EVALUE 1.00e-23; EST_HUMAN HIT: AV706497.1, EVALUE 0.00e+00
gctacaagctgtccccagaggactacacgctcaaggtgagcgggcaatggggtgccgcacgccccaggtgagcgggcggtgagggggcgcacgctccaggtgagcgggcaacaggtgggggggcgggtggtgctaggcctgggtactgaccaccagggccgtcccaggtgtcgcaggccgggaagaccctctgcctgagcggcttcatgggcatggacatcccgccacccagcgggccactctggatcctgggcgacgtcttcatcggccgctactacactgtgtttgaccgtgacaacaacagggtgggcttcgccgaggctgcccgcctctagttcccaaggcgtccgcgcgccagcacagaaacagaggagagtcccagagcaggaggcccctggcccagcggcccctcccacacacacccacacactcgcccgcccactgtcctgggcgccctggaagccggcggcccaagcccgacttgctgttttgttctgtggttttcccctccctgggttcagaaatgctgcctgcctgtctgtctctccatctgtttggtgggggtag

SEQ ID NO: 13003 - DNA, 535 bp, Homo sapiens
  MAP TO CHR6.3; EXPRESSED IN HEART, SIGNAL = 3.3; EXPRESSED IN ADULT LIVER, SIGNAL = 4.7; EXPRESSED IN BRAIN, SIGNAL = 6.1; NT HIT: X57138.1, EVALUE 0.00e+00; SWISSPROT HIT: P02262, EVALUE 2.00e-55; EST_HUMAN HIT: BG109927.1, EVALUE 0.00e+00
tcttccgtagaaatggtgggtggctctgaaaagagccttttgtcttgtaagtttacatttttaaagttcagcccttacttgcccttagctttgtggtggctctcagtcttcttggggagcagtacggcctggatgttaggcagaacaccgccctgagcgatggtaactttaccaagcagcttgttgagctcctcgtcgttgcggatggccagctgcaagtggcgcgggatgatgcgggtctttttgttgtcgcgggctgcgttgcccgccagctccaggatctcggcagttaggtactccagcaccgccgccaggtaaaccggcgcgccggccccgacccgctcagcgtagttgcccttgcggagcaggcggtgcactcgtcctacaggaaattggagcccagctctagaggagcgggttttggccttggcgcgagccttgccgccctgcttgccacgtccagacatggtaaaacgacctgtggcctaagtcagaaagtgagtgaaaggaacctacagggacgcgcattttatag

SEQ ID NO: 13004 - DNA, 535 bp, Homo sapiens
  MAP TO CHR4.3; EXPRESSED IN HEART, SIGNAL =   1; EXPRESSED IN BRAIN, SIGNAL = 0.52; NT HIT: gi14723386, EVALUE 1.00e-106; SWISSPROT HIT: O14967, EVALUE 4.00e-35; EST_HUMAN HIT: BE881542.1, EVALUE 1.00e-104
agcttctgtcccacatcgtcaggaagtagtgtgtacttaaaaaaatctatattgaagtaaaatttgtcattttcccatgtcctttattgtcacttgtattaaatagctagctctctggtgaattaccatttaatatatttttgtaaactctacccattggataaaatacagaaatgcattaaatagtctgtgattctggactaatgccaacactcatctctctttgaaggaaaacttttatgataaaacatcctatatcattatgtttggaccagataaatgtggagaagattataaacttcattttatcttcagacataaacatcccaaaactggagttttcgaagagaaacatgccaaacctccagatgtagaccttaaaaagttctttacagacaggaagactcatctttatacccttggtatacccttttaattcattcatgtattcaaaaatatttgctgactattgatgtattcatggcaagtgctttacaagaaaacaaatgtgtaccccatcctgaaggagcttatc

SEQ ID NO: 13005 - DNA, 540 bp, Homo sapiens
  MAP TO CHR22.3; EXPRESSED IN HEART, SIGNAL = 1.6; EXPRESSED IN ADULT LIVER, SIGNAL = 1.4; SWISSPROT HIT: P53261, EVALUE 9.00e-08; NT HIT: gi13648038, EVALUE 2.00e-93; EST_HUMAN HIT: BE395026.1, EVALUE 2.00e-93
aaatgcctttgatggacaggaagacctaggggagaggaggagacatctgggtgaagaccatggggtggcaggagagggggcagggtgggatgccagccgggcagtcccaggctcaccttgcgcagggcacgggcagcgataatgtagtgcatgaactccacagtgagccggcggcacagctgaatggtctgcacgtggcacttgccagtccgcgggaaggtggaaaacaggaagcacatggagagggcatcgtccaggtcccgcagggcatcgatgaacgtgggatacctgcatggccagtgaggcagcacatggggcctgttcagcgtgggtgccaagggggaccctgatctccttatcccaccccagatgccccgttcctcaagccaggcctcaccactgccacctcctgacctggcaggagcagcttccccacagctgaccacagcccctaggaggaaccacttaaccaggatgcgcccactaggctctgaggaccagagaagtcccgatgggggtcctcaagacaccgaatgctca

SEQ ID NO: 13006 - DNA, 513 bp, Homo sapiens
  MAP TO CHR4.3; EXPRESSED IN HEART, SIGNAL = 0.59; EXPRESSED IN ADULT LIVER, SIGNAL = 0.57; EXPRESSED IN BRAIN, SIGNAL = 0.55; SWISSPROT HIT: P12104, EVALUE 6.00e-26; NT HIT: M18079.1, EVALUE 0.00e+00; EST_HUMAN HIT: AW605378.1, EVALUE 3.00e-86
ttcagattcttcacagatgcgtataaaaataaaaacatatttaaatatcctgccaatttgtgcaatatataatgtagacaaacttcattggcttcttcagttagtgaaggagacctgcattaattaaaccatccaatgaaatagagcagaaatcattttaatattgggtagaaaaatcaagaatgcattgctcataaaaaaaaaaattcttaccctgagttcagttccgtctgctagattgtaattaaaggtgacaccaagttcaaaaacaacttcaatgtttcgaaaagtgcttgattctttgactgtgaatttatttccttcttgtgtaattgtcagcttcaaattgtcatgagctgcaagcttccttttcactatattaacacctgtaaaaggtaagacaatggagaaaataaagtcaaatcccataggaagtgtttatttttccaagttatgttttgtttgtttattttgagggtgggaagaaaactcggtagcattgcctttgcacaa

SEQ ID NO: 13007 - DNA, 588 bp, Homo sapiens
  MAP TO CHR5.3; EXPRESSED IN HEART, SIGNAL = 1.9; EXPRESSED IN FETAL LIVER, SIGNAL = 3.4; SWISSPROT HIT: P34991, EVALUE 4.00e-13; NT HIT: Z47087.1, EVALUE 9.00e-77; EST_HUMAN HIT: BF573888.1, EVALUE 1.00e-108
ccagctttcttttgattcgtgttagtgtaccgtatcttcttccattctttaaacctagttctgtctatatatttaaagcgggtttcttacagacagcacagctaagcttgcttttctgatctggtaatttctgccttttaactgtgtttagaccatttacatttagtgtgttactgatatgtggatttaaatatggcgttacatttgaatttagagagtattaaaattcagtgtcaatgaagttagcaaatttaaatctataagaagtgtttaaaggctctagagtagagctatcttacacattaaaaacttaccagaatgagttcaaaaagtgttccttggtcaactttcaggaattcttggtcccaaacagggatatcatctgttcgcttttctttgttctcatcatcttcaggaggaggagggtcatccttgtggtgggtgcaccactgaatgacctacaacaacaaaagttcattcctctgtggcactttgtcacaaggtactcattccactgctgggacaacttatccctatattggaataataactagctagaggttgacttgagccattaacagccaagct

SEQ ID NO: 13008 - DNA, 588 bp, Homo sapiens
  MAP TO CHR17.3; EXPRESSED IN LUNG, SIGNAL = 0.57; EXPRESSED IN HEART, SIGNAL = 0.67; EST_HUMAN HIT: BE182730.1, EVALUE 5.30e-02; SWISSPROT HIT: Q92764, EVALUE 4.00e-11; NT HIT: gi15431313, EVALUE 0.00e+00
ggtctccttctcattgccagtgaggatgccctccccaaaccagcccccacccccactgtagctggtagcgaagcctccagcagggaggcagagagcagggaggcagctggtggccctgtagctgcttctgcccagacccactgagcaggcagagaaacttctggccacaggggagagacttggaagcttgcaagagctgctggagtacattgcggacacacgagtggagcccccactggcccctcctgggctcttgagagacccagaagagaagccggccttgaggcatttggaagccatggcccctgcaactcagatgcaattgataggtctctgaggccagacaccccaaagcagagaagcagctccttaccccagatttatatctctgccccagtgggcattggttggcctttacaaagtgttttctcctcattaaagttaacaccactttctattaaaacccctcattaacctgttatttagtttcctgtgaaaatttaccagtctcataaaataggagccccattactatgtcaagactcatctccaccaccccacatcactgggaagaccaagtccctgtca

SEQ ID NO: 13009 - DNA, 562 bp, Homo sapiens
  MAP TO CHR6.3; EXPRESSED IN BRAIN, SIGNAL = 1.6; EXPRESSED IN LUNG, SIGNAL = 0.95; EXPRESSED IN HEART, SIGNAL = 1.4; NT HIT: gi13645061, EVALUE 0.00e+00; EST_HUMAN HIT: BE841771.1, EVALUE 1.00e-109; SWISSPROT HIT: Q15776, EVALUE 1.00e-116
caggtcagcccttctttcacatcaggatatccacaacaaagtaaaacgctatcactgtaaggagtgtggcaaagccttcagtcagaacacaggcctgattctgcaccagagaatccacactggggagaagccatatcagtgcaatcagtgtgggaaggctttcagtcagagtgcgggccttattctgcaccagagaatccacagtggagagagaccctatgaatgtaatgagtgtgggaaagctttcagtcatagctcacacctcattggacatcagagaatccacactggggagaagccctatgagtgtgatgagtgtgggaaaaccttcaggcggagctcacatcttattggtcatcagaggagccacactggggagaaaccctacaaatgcaatgagtgtgggagggccttcagtcagaagtcaggccttattgaacatcagagaatccacactggagaaagaccctataaatgtaaagaatgtgggaaagctttcaatgggaacactggtctcattcaacacctgagaattcacacaggggagaagccctaccaatgt

SEQ ID NO: 13010 - DNA, 512 bp, Homo sapiens
  MAP TO CHR21.3; EXPRESSED IN FETAL LIVER, SIGNAL = 1.2; EXPRESSED IN ADULT LIVER, SIGNAL = 1.3; EXPRESSED IN HEART, SIGNAL = 0.88; SWISSPROT HIT: O60318, EVALUE 2.00e-63; NT HIT: gi16166502, EVALUE 0.00e+00; EST_HUMAN HIT: BG679482.1, EVALUE 0.00e+00
acccaaaggaccaaaggaaggtgcaggcgagcacagcatggagacacacggaggtggacgtgcagccctcacactggtgcccaacacctgccagacggttactacagtgagaaggaagcctgagacttggctgcagccacccaccagacctccccaggtcaagcacgtaccccccaggggtggaaggtccatctgcggaagctggaacccgagcacagcctgcttcagccaggccaggtgctctggggcattccagtgcaggtgaggaagcagccggctgccccctgcctcagcaaactcagtgacaggccaggacaggtcacacagctgttcagaggacaccacagaagccaggaactgcagcacactgttaaacagctcaatgatggcgccaggctcctgagaagcaagaccgcccagacgcctctctcttctgtcatggaaaaagcggccactaaactcatggccaatcccgtcttcgacgtactgaatgagagtctggcagcagaggt

SEQ ID NO: 13011 - DNA, 596 bp, Homo sapiens
  MAP TO CHR6.3; EXPRESSED IN HEART, SIGNAL = 2.7; EXPRESSED IN BRAIN, SIGNAL = 0.91; EXPRESSED IN LUNG, SIGNAL = 6.8; SWISSPROT HIT: O00299, EVALUE 2.00e-25; NT HIT: AJ012008.1, EVALUE 0.00e+00; EST_HUMAN HIT: AI191234.1, EVALUE 0.00e+00
ccccatttctttccctcatcccctcttccaccacaccatcccggaacaagtgctccaggattccctgcccactggccattttggagtgtgtccattgggtagcaatgtggaaaccaccagggcctttgtggagaaaatggagggggttgagggagtcccaggaggggcttatttgagggcctttgccacttgctcataggcgagctcgatctcctcatcatctggacaggtggaagcgaattcttcccgggcgtaggcattgctcaagtaccgatgcactccccggaaggcctcggggatggtgaatccccggtacttcttacacaccacctgaggatggggagaggagagggaccaacatgttagacccagggaagccaccttggctttcccttctccccaggccgacatgataaaaccagctcaactcctcactgtcttgtactgtcgttagccttccttctcacttactgaaatcctggcttttaataaccagccatttttcctgagtttttaaaacttgagatataatttacttataaaattctcctcttgaatttccacagtgactttttccccctataccacttcaggca

SEQ ID NO: 13012 - DNA, 571 bp, Homo sapiens
  MAP TO CHR2.3; EXPRESSED IN HEART, SIGNAL = 5.7; EXPRESSED IN FETAL LIVER, SIGNAL =   1; EXPRESSED IN ADULT LIVER, SIGNAL = 1.9; SWISSPROT HIT: Q28985, EVALUE 5.00e-20; NT HIT: L27558.1, EVALUE 1.00e-120; EST_HUMAN HIT: BF933728.1, EVALUE 3.00e-62
gtgccatttttggagcagtctgagcctggagctcagggcaggggacgtacctgctttctcttgtagaatcctttgcggtcacaattgggcaggtacacagcacggggcaccatgcgtgggctggctttgagctcctgcagggaagcctccatgtgtctgcggcaggggccctgtgtggacaggagggtgagaggcgtggcgagaccaagggaaaaccacccagctgcgctgacgaatggcccagggggtgggggctgaagggtctctggaggaaagtcaccacctttggttctaatcatctgctaccaaagatctttcctccctgtcacctgtcacgtgcgctgggatcatacaaagcctgcctttggccaggtacggagtcatactttctcttttgtgttccagtccaccccctcccctgcagcttttctcttctgctgagtaacaatgtccagaggtgcccatttctagatgctctaggagaatattcagtctctgccttggactggacacagctgcagggcccaggtacctggtacgtggccgctgggctggcacacactctcctcaa

SEQ ID NO: 13013 - DNA, 555 bp, Homo sapiens
  MAP TO CHR6.3; EXPRESSED IN BRAIN, SIGNAL = 2.1; EXPRESSED IN LUNG, SIGNAL = 2.2; EXPRESSED IN HEART, SIGNAL = 2.1; EXPRESSED IN ADULT LIVER, SIGNAL = 2.1; NT HIT: gi7661777, EVALUE 1.00e-102; EST_HUMAN HIT: BF797811.1, EVALUE 1.00e-103; SWISSPROT HIT: Q12968, EVALUE 1.40e+00
tccgtcatttttaagccctgtgcggtttttcccgttgcccagggtgcaggttcgcagccctgtcaaccagctccgagccggcagcgaaacctgaagtggaccctgtggaaaatgaagctgtcgccccagaattcaccaaccggaacccccggaacctggagcttttatctgtagccaggaaagagcggggctggcggacggtgtttccctcccgtgagttctggcacaggtaattaaatctgcttgtgattgacaagggcagtgcaccctacagactattttcattcattcaactccaggcactctcccaggtagctgccatgcggcgggtagaggcagggttcgcggaggggctggaacaaacaacaaataggtgtgatgggggctatttaaagaggatgttacagtagcggacaggatacctgcctgtctgaggtgacatttaagaaggtgagatctgaaagaggaagaagcctagtcatctgccagaaagagcagtcctagcaaaggaaactgctggggtgaggaactgaagggcttgtggatctgaagctc

SEQ ID NO: 13014 - DNA, 594 bp, Homo sapiens
  MAP TO CHR1.3; EXPRESSED IN BRAIN, SIGNAL =   2; EXPRESSED IN HEART, SIGNAL = 0.66; SWISSPROT HIT: Q04637, EVALUE 5.00e-35; NT HIT: gi14733851, EVALUE 1.00e-130; EST_HUMAN HIT: AW241316.1, EVALUE 1.00e-130
agcacgatggttgaacactgacaatgagacgggcaaaagaagaaaaataaacagcccagacctttgggaaaagatagaactattctgttgacagtctaagttcttttgcaactgacaaggagcctttgcgaaggtttctgagcttttggatttttacctttgctttttcaaagtccaagtctttgccaatggtggtgagcaggcgacacaggcactccagggattcttcatcatggttctttagcagcttcaccacacagtcatgcatgatggcttcagtcagcattttgagtttaaagagttctccaataaacttgatgttgccaatggatctccgccgggctttgtccttggcttcttccagttcatcatgaagccttgtcctctcctctggctgttgtgtaaggaggaataatagcatcttgatgatgaaagttgtactgcacaataaacactgagattcatggggtcagaatccccgtgagaatctgatagcaagtgtagaatctactgctcagaaaactgaactatacccatccatttcagatttttggaactcagtgacctgactcaggcttagattgaatggctggc

SEQ ID NO: 13015 - DNA, 598 bp, Homo sapiens
  MAP TO CHR3.3; EXPRESSED IN FETAL LIVER, SIGNAL = 1.3; EXPRESSED IN HEART, SIGNAL = 1.4; NT HIT: AF017306.1, EVALUE 1.00e-94; EST_HUMAN HIT: AL042366.1, EVALUE 2.00e-94; SWISSPROT HIT: Q13107, EVALUE 4.00e-29
ctcattttgttggcgttgtccctcagtgaccctttagaacttgatttatcttgtatctctggtactgtctagaaggtgtgtaaagccctcatcatgttctgtttcagtgtttgagcaacactgcaccactgactgactactttctcaaagatgagtatgaagccgaaatcaacagagacaaccctctggggatgaaaggggaaattgcagaagcctatgctgaactcattaagcagatgtggtctggaagggacgcccatgtggcacctcgcatgttcaaagtaggtagacatatatatatatgggttgggtatccctgtatatagatgcctgggaccagaaatgtttcgggacttcaggttttttaggatttttttttatggtatttacattatgcttactagttcagcatccccattccaaaatctaaaatgtttcagtgagcatttcctttgaatatcatgtcagtgttaggttatggatctttaagcatttggatttcagatttttggataagggatactctcccgtacttcctttttcccactttggggagagtggtttagtgttgttatgaggcattcctttcgttgcattt

SEQ ID NO: 13016 - DNA, 522 bp, Homo sapiens
  MAP TO CHR10.3; EXPRESSED IN ADULT LIVER, SIGNAL = 0.62; EXPRESSED IN BRAIN, SIGNAL = 2.7; EXPRESSED IN HEART, SIGNAL = 0.78; SWISSPROT HIT: Q16352, EVALUE 1.00e-07; NT HIT: gi14249341, EVALUE 1.00e-84; EST_HUMAN HIT: AL514360.1, EVALUE 2.00e-84
caaaaatgggtgtgatgtggccaagtggagttgcaggttttcctcctggaatatatttgtgaacaggataggttttcctttgacaatgctttaaacatagctggtgctgaaggggggtgtgtgtgtgcgcatgcgtatgcacgtggtccaaccctttgagctttgaaattaaatatttattggtttcaatctcatgaagaaactccaaagtcctttggaatctctctcaaatgaatcaggattggagggttgagttctgggggggaaaagttattgacttcctaagagtttttctctgttgaatttacaggaaactgctggaaggcgaggagacacgttttagcaccagtgggttaagcatttcggggctgaatccacttcccaatccaagttacctgctcccacctagaatcctcagtgctacaacctccaaagtctcatccactgggctatcacttaagaaagaggaggaggaggaggaggcatctaaggtagcctctaagaaaacctcccagatagggg

SEQ ID NO: 13017 - DNA, 597 bp, Homo sapiens
  MAP TO CHRX.3; EXPRESSED IN BRAIN, SIGNAL = 1.5; EXPRESSED IN LUNG, SIGNAL = 4.5; EXPRESSED IN HEART, SIGNAL = 2.9; EST_HUMAN HIT: AW960621.1, EVALUE 0.00e+00; SWISSPROT HIT: P51571, EVALUE 2.00e-13; NT HIT: U52111.2, EVALUE 0.00e+00
tcccgcctctgtttacagtcagcgtggaccatcgggtgagtggcctggtccctcctcctttttggggttgttgggctgagtgaaggttatcctctccacagccccagctctgctgctgggccgtgattggccagcatgtcttggttcccctggcggaaggtgaccagggctggctggtctgctcacctgtactcccctgagctggcttgtgatctcctttttttcagggcacttggaacgggccctgggtgtccactgaggtgctggctgcggcgatcggccttgtgatctactacttggccttcagtgcgaagagccacatccaggcctgagggcggcaccccagccctgcccttgcttccttcaataaacatcacaggacctgggactgcacaggacctggggctgctggcttgcgttattgtgccttcccccgactgggagagctgggggcccagcgtcctcttgtctgcctggccagcagaggcaccaggcaggaaaggggtgggctttggtctagaactcccgtccctcctcccaatgaagccccccgtctggtccccacaaaaccctgtatccaccttcccagtgactctc

SEQ ID NO: 13018 - DNA, 562 bp, Homo sapiens
  MAP TO CHR10.3; EXPRESSED IN HEART, SIGNAL = 2.2; EXPRESSED IN ADULT LIVER, SIGNAL = 2.6; EXPRESSED IN BRAIN, SIGNAL = 4.3; SWISSPROT HIT: Q91998, EVALUE 9.20e+00; NT HIT: AJ277073.1, EVALUE 0.00e+00; EST_HUMAN HIT: AV703330.1, EVALUE 0.00e+00
aaatcatcttggttggtaaggcagtttaaaaggctgagaaacattggattagatgttctttatagttctaaatttctacaattaggttattttccttcacatcaactcaatgactgtaccttacctttctcaatataattcttgggggcccaagcaggatccccatctgcatatggatcattatactgaactactgcagcctcctcatcttcataatccactggtggtggtggtgggggaggtggagagtcatcaaacatgggaatgtcatctggtggaggtggtggcggtggagttggactatcagcaactaaaaagattcatatgattgatttgaatcaaaaataagtctagatggaaacttataagttaacagaatttaagaaagctctaacttaagtacagcatgcactataataaaacatgcaatgattagaaataaaagcttggtgtgttaaagtttatgctactcaagaatcatttaaaaataacaaaatgagctaaaaataagggtatctggaagtactacaaattaatgaatgcagggtgttaggagacaatg

SEQ ID NO: 13019 - DNA, 522 bp, Homo sapiens
  MAP TO CHR4.3; EXPRESSED IN FETAL LIVER, SIGNAL =  21; EXPRESSED IN LUNG, SIGNAL =  24; EXPRESSED IN HEART, SIGNAL =  18; SWISSPROT HIT: P97351, EVALUE 9.00e-35; NT HIT: X87373.1, EVALUE 0.00e+00; EST_HUMAN HIT: AI819328.1, EVALUE 0.00e+00
tcaaggttgtgttgtgtgaggaagcaaagaaacacttacaatttattgaccacttctttcaagtcatttgtctgcacctctcgggtcatgatttccatcatcttcttccggatttggcggacctgttggtgctgagcataagaggtcttccgtatctgattgttgcgttttttagtaaaaccaacacagaacagacgaagcaagtaaccatcggtagtcttgacatcaacgtgagcttcaatcattgtctggagaaaaaagataccgtcagatttaacaggttttacgttatccatttatccctcaagttctaattttaaaaagctggattgtcaaacactcattattaaatataaagtatcctaacataagtaacatctctttaagtttacagaattaacttccttgaacttaccaagttacccccaaattcttacccaattaaataaccaggtcctctcaactgccctccctcctcctttctaccctccattaacactaccactatcttgacggcatcca

SEQ ID NO: 13020 - DNA, 566 bp, Homo sapiens
  MAP TO CHR21.3; EXPRESSED IN BRAIN, SIGNAL = 3.1; EXPRESSED IN LUNG, SIGNAL = 3.8; EXPRESSED IN HEART, SIGNAL = 2.1; SWISSPROT HIT: P22102, EVALUE 1.00e-44; NT HIT: gi14780243, EVALUE 0.00e+00; EST_HUMAN HIT: BE746599.1, EVALUE 0.00e+00
ttgctcaggcatttccaagcaggacagtttaaacatgagggagtttacctaaagtctggtcaccacaaccatcaggtgctggagaggagtactggagggaagattttgccacgattttcctcacaaggctaaatccattgctatgaagaccagatgaagctattccaacaacaacatcaccctcagtgattctttccaggtgagggagtttctgatctcgctccatggcaccaacggcaaacccagctaggtcatactctccagggggatacatgtcaggcatttctgctgtttcacctcctggtgggataagacaagaacaaagaaatcagagtatttataaatctgtctaggaaacagtggcacaggctactcttaacatgaacaactaacacatggctatgtcctgcaaatatttaagaaaatgtactctaccagctgtctaacagaactttccaccaagcatgatttcaggagaaatagcacttgtttccacaaagggtgagattaggtagcacctctacaagtatatatgcagccgccaaacaccactgcttgcacagaat

SEQ ID NO: 13021 - DNA, 505 bp, Homo sapiens
  MAP TO CHR9.3; EXPRESSED IN LUNG, SIGNAL = 1.5; EXPRESSED IN HEART, SIGNAL =   2; EXPRESSED IN ADULT LIVER, SIGNAL = 1.8; EXPRESSED IN BRAIN, SIGNAL =   2; SWISSPROT HIT: Q15528, EVALUE 2.00e-22; NT HIT: AJ224639.1, EVALUE 0.00e+00; EST_HUMAN HIT: AL560564.1, EVALUE 0.00e+00
cacacatgaacctgtggaggtcaggggtagagtcccactttgcagatgaggaagctgaggctcctagagaggccatcccttgcccagcatcagctacttgtaggcaaggccgctgtcccccctcaccctgtgcccgccctggttctgatggccacaggtccgagccggcgagtccctgatgaagctggtgtccgacctcaagcagttcctgatcctcaatgacttcccctccgtgaacgaggccattgaccagcgcaaccagcagctgcgcacactgcaggaggagtgcgaccggaagctcatcacgctgcgagacgagatctccattgacctctacgagctggaggaggagtattactcgtccaggtataaatagcgctggactccccatgcagagcgggagcctgcctacctgggcctggccagcaggcagggctgccttctgctttttcaaattcttgctggtcttagcagtggagccatgcctgggtttcagagcagagct

SEQ ID NO: 13022 - DNA, 593 bp, Homo sapiens
  MAP TO CHR19.3; EXPRESSED IN BRAIN, SIGNAL = 1.5; EXPRESSED IN FETAL LIVER, SIGNAL = 1.2; EXPRESSED IN LUNG, SIGNAL = 0.86; EXPRESSED IN HEART, SIGNAL = 1.3; SWISSPROT HIT: P52741, EVALUE 1.00e-122; NT HIT: U09412.1, EVALUE 0.00e+00; EST_HUMAN HIT: BG766884.1, EVALUE 0.00e+00
ggatttcccacaatcactgcaatcataaggattttctccagtgtgaatactctcatgctgaacaagtgtagatttgtgtctgaagactttcccacaatcactgcacttataaggccttgctccattgtgaactctctggtgtacaattagattggagtgatggctaaaatatttcccacattcattgcacttataaggcatttctccagtgtggattctcttgtgctgagtaaggttgtcttttcgactgaaggtttttccacattcgctgcattcataaggcctttctccagtatggattctctgatgctggacaagtgtagctttgcggctgaaggctttcccacattcgctgcactcataaggcttctctccactatgaattctctggtgctggacaagtgtgtctttgcggctgaaagctttcccacattcactgcacttgtaatgcatttgttcaccatgaaatgcatccccactctcagtgctcctgtgtgtcttcctcttactgtggatggccttttgttggcagccacccaaagtagcctggaagtttttctgctcctccttacacgtaaagggcttctctgacg

SEQ ID NO: 13023 - DNA, 549 bp, Homo sapiens
  MAP TO CHR1.3; EXPRESSED IN LUNG, SIGNAL = 3.3; EXPRESSED IN HEART, SIGNAL = 3.4; EXPRESSED IN ADULT LIVER, SIGNAL =   4; EXPRESSED IN BRAIN, SIGNAL = 4.4; EST_HUMAN HIT: AV682290.1, EVALUE 0.00e+00; SWISSPROT HIT: P28070, EVALUE 1.00e-15; NT HIT: gi16165125, EVALUE 4.00e-60
gattgcaagtagccagagcccgccaattaggttcccagcacatccctcacccggttgtaagaacgggcatctcggtagtacagcactcgcatgcagcgttctactaagtcgcgggcctcggtctggcttagcactggctgcttctccagaacttctcgcagcagaggctagggagattgggggaaaaccatggggggatattgggctgaataacaggctagttgtctcaaatctatggtataaaaagcattagagtgaaagatgacattctacttcttgcctcaccagaatgaactctgcttagaaaataagctaagagccacttcaggaagaagttctagggtgtcctctctttgcatgtctactgactcccagtcatgtcatcttgtcactggaatcagtgtcaacacctacagcccccagactacaaagaaaaccatctgcccagtaatagcgatcccagcccatccctcatatcagaatttcaggagaaaagcagacaaccactaatccatttccttttgtcttccctttcccccacctctagac

SEQ ID NO: 13024 - DNA, 567 bp, Homo sapiens
  MAP TO CHR14.3; EXPRESSED IN HEART, SIGNAL = 0.55; EXPRESSED IN ADULT LIVER, SIGNAL = 0.77; EXPRESSED IN BRAIN, SIGNAL = 0.61; SWISSPROT HIT: P22735, EVALUE 3.00e-28; NT HIT: gi14750768, EVALUE 0.00e+00; EST_HUMAN HIT: BI256170.1, EVALUE 0.00e+00
tgatacaggaaggccatgtgcagccctgggacaaaccatggctccatccgtcttggtgtggcatggactgaaagatggacagagcagcagcttcattaaaaaacagtttattagcatctgttcccccagtgcaagtgaagactgactccctctccgggagccctggactccccctccgggagccctggactccccacctgagctcctggggagctgctctgtagtgtgcccctatcttggggcaatgtccttgctcatctgactccagtcccattgctcctggcacggggctaagctccacctcgagatgccatagggatggtctctcctaagtgactgtcacctccagcgtctgagaagaagcccccatccccaggggctggggccacatccacctggatgacaccgtgcacctgggagagctgtgggctgtccaagctggcaatgagctggcgggggcctggtcgcacaggcacaaacgactggcgcagtgtcactgtttcattgcctccaatgtccctgtgggcagagacaaggtcatgggcctggagtaattgggggtggagt

SEQ ID NO: 13025 - DNA, 521 bp, Homo sapiens
  MAP TO CHR3.3; EXPRESSED IN LUNG, SIGNAL = 1.6; EXPRESSED IN HEART, SIGNAL = 2.1; EXPRESSED IN BRAIN, SIGNAL = 1.9; SWISSPROT HIT: P09110, EVALUE 5.00e-23; NT HIT: AB026898.1, EVALUE 0.00e+00; EST_HUMAN HIT: AA305893.1, EVALUE 5.00e-79
ctacctctggaccagccaagaccttagggactttgatcttttgggatttcaacatttgggattatggtgctcaggactgtgtctgtcgagattatgatccaaagcccacctacctctatcccctgcccttcaggtgccctaacttggatatccccctatgaccccaccgccaggagcaaagccttacctcttcccacggcgcttcagctcattgagcagcgtgatgacctgtcgtgccccagtgcagcccagtgggtgccctaaggccactgcaccccccagggggttcaccttctcaggggggagtcgtagcttctccacacagtaggcagcctggaaggaggcagatcatcacctatagccctcttacccctcccctgcaccacctgcccgctcactccacctcggctgtccagggcaaaggcaacattgagaaacaagggctcacctggcttgcaaaggcctcattgatctcgaagatgtccacgtcactcactgtcagccctgcagacaaggtaaag

SEQ ID NO: 13026 - DNA, 567 bp, Homo sapiens
  MAP TO CHR11.3; EXPRESSED IN LUNG, SIGNAL = 1.4; EXPRESSED IN HEART, SIGNAL = 1.3; EXPRESSED IN ADULT LIVER, SIGNAL = 1.3; EXPRESSED IN BRAIN, SIGNAL =   2; EXPRESSED IN FETAL LIVER, SIGNAL = 2.6; NT HIT: AF148460.1, EVALUE 1.00e-125; EST_HUMAN HIT: AU143440.1, EVALUE 1.00e-114; SWISSPROT HIT: P54105, EVALUE 2.00e-17
gccggagaaaacagagaatggaagactccggaggagtactagaaaaatcgagccttccacccgctacaggtatccctgaggcgtcgggcacgagaccccgctcccagcaggcctccaggccgccccttgcccggctccttcgcaccgcctgctccagcaaggaggagggcggcgcgcaggaggccagcgctggggaccaggaaccctacctctcagcgatgtaaagggtaccagtgccgaggcccttcccgttcagcacagcctcagtgtctggctgctgccgcaggagcccctccgctggcccaggcggcgggaaacttttgaggaagctcatagcagcagagtgcggcaacacaggccctgagggagttggagcacagcaatgcgtgcaccacaccgcccgccctggaagaggcagtcaccccggaagaacaacttagtctgccccggaatctgaacgccgtcgaccatagagatgagacattctaggaaaagcggcggaggtcggctaagaacgtgtggagtttgaccgcgcaacacccttccccttcttcctcgccatttctg

SEQ ID NO: 13027 - DNA, 506 bp, Homo sapiens
  MAP TO CHR6.3; EXPRESSED IN FETAL LIVER, SIGNAL = 0.91; EXPRESSED IN ADULT LIVER, SIGNAL = 0.67; EXPRESSED IN BRAIN, SIGNAL = 0.86; EXPRESSED IN HEART, SIGNAL = 0.68; SWISSPROT HIT: O15211, EVALUE 7.00e-27; NT HIT: gi14782814, EVALUE 0.00e+00; EST_HUMAN HIT: BG979391.1, EVALUE 0.00e+00
ctgtgggggtcaaagaagagagctaaggctatgggaggcctctccattccatggccacaaaccgtagggcaatcttctctctcacctctgccacgcggatccacttctccaggagccgggccctctgtgggggacggagtggccgtatggtcacctccccaggtccctctccagtggaagtagcccccaggacagaactaaccactgcccctgccaccttgttaaactgtgtgacagtagctcggacagatgggcagaggtgagaatgtcctggccggtctctgtgaccccacaggcctcccaggcactgagaggggatcaaattgagaaaaagttcctgcagggtagaggtcagaggttaaagttcatagtcaagtgaggtcagccttccaatatcagggatctgaggatctcaggtggccaaggaaccagaggggcacagggtttgaagggtaacgaccaaagggaaaaggggagaatcaaaatggtaggtggaggaggctagg

SEQ ID NO: 13028 - DNA, 543 bp, Homo sapiens
  MAP TO CHR1.3; EXPRESSED IN HEART, SIGNAL = 2.4; EXPRESSED IN BRAIN, SIGNAL = 1.8; SWISSPROT HIT: P35590, EVALUE 2.00e-21; NT HIT: gi14742457, EVALUE 1.00e-104; EST_HUMAN HIT: AI124668.1, EVALUE 1.00e-101
gaaacataaacacgggctgcaagcatgcacccaggggcggggcgggtcactgaccgagcctgactggtaggtgaaggtgcgtctccgatgcaggcagcttctgcggatgcacaccagggttaaaagggcagccaggatggtgaggcaggtggcagacacggagcccaccaccgccaggatcagctgctgatccaggccctcttcagctgcccggctctcttggactgggccctcagcctgcagccctggacacagtgagaggggcagattgtggggacacctgggtcagggaacccagaggccaccatggggttacacagagggagaggtgaaagatcccagtgccaggactgtcaggaaatcacttgggccacatgaaggaagggatgaggggtgtcagaggggcgacatgattttcccagccctgggacagtggatcatgagaatggaaggctgagtccccaggactggggctgactctttgtcaggaggggcctgggatgccctagctccacagtagggggtgatgtggaaggagagcgt

SEQ ID NO: 13029 - DNA, 558 bp, Homo sapiens
  MAP TO CHRX.3; EXPRESSED IN FETAL LIVER, SIGNAL = 9.9; EXPRESSED IN BRAIN, SIGNAL =  10; EXPRESSED IN HEART, SIGNAL = 2.8; EST_HUMAN HIT: BI861884.1, EVALUE 0.00e+00; SWISSPROT HIT: P00558, EVALUE 2.00e-26; NT HIT: K03201.1, EVALUE 0.00e+00
atggatgaggtggtgaaagccacttctaggggctgcattaccatcataggtggtggaaacactgccacttgctgtgccaaatggaacacagaggataaaatcagacatgtgagcactacgggtggtgccagtttagagctcctggacagtaaagtccttcctggggtggatgctctcggcaatatttagtacttttctgccttttagttcctgtgcacagcccctaagtcaacttagcattttctgcatctccacttggcattagctaaaaccttccatgtcaagattcagctagtggccaagagatgcagtgccaggaacccttaaacagttgcacagcatctcagctcatctttactgcaccctggatttgcctacattcttcaagatcccatttgaatttcttagtgactaaaccattgtgcattctagaatgcatatatgcatattttgcctgttaaaaaaaaagtgagctgtgttagcttagttctcttttgatgtagcttatcctgattagctttgtcactgtttcactactcagcgtggaaacaagatgaa

SEQ ID NO: 13030 - DNA, 519 bp, Homo sapiens
  MAP TO CHR12.3; EXPRESSED IN ADULT LIVER, SIGNAL = 0.73; EXPRESSED IN BRAIN, SIGNAL = 1.5; EXPRESSED IN HEART, SIGNAL =   1; NT HIT: D43704.1, EVALUE 0.00e+00; EST_HUMAN HIT: AW965615.1, EVALUE 5.00e-79; SWISSPROT HIT: P54284, EVALUE 2.00e-28
cttggctggcttagcttgagcatctctgcccactggaaatggttacctgaagtccggggatggcactgggaggacccagaagtccggggccaggggctgggtggtgcgtggcccgccagtaaacctccaggtactcagccaggtgctcacaggcatcctccagctggttctcatccagaatcacatcaaatgactcctggggagggggaggaaggcgcaacgttggtttcccctcagtagcagccccccacccatctctatcactgccgcagccctgggggagtgggcacaggagcagctgacccaggcactcaccggtgggcactgaaccagcttatcatatgccatcatctgtacggtcaggtgcttcatctgtgacttcccccgggagcgaatgagacgctggagtacctgagcggggagggcagagctaggcctggagtctctcaggactctgggcagagctgagcccgggcagagctaggcatttcttccacttgtggcatcagtagcaggtga

SEQ ID NO: 13031 - DNA, 593 bp, Homo sapiens
  MAP TO CHR12.3; EXPRESSED IN HEART, SIGNAL = 0.88; EXPRESSED IN BRAIN, SIGNAL = 2.1; SWISSPROT HIT: Q03386, EVALUE 6.70e-01; NT HIT: AF304052.1, EVALUE 0.00e+00; EST_HUMAN HIT: BI766981.1, EVALUE 0.00e+00
tgcactgagggtgacacttctgagtgtgggggccctggctagggagtgggactggcaggcttgggtggggttcccaagctttaatcttcctaccccacagaatgttttctctgcccttcaggcagcctgagccgggcagggcccctgcctctgctacggcagcccccgatcatgcagcccccactggacctcaagcagatcctgcccttcccactcgagccagcccctacccttggcctcttcagcaactacagcaccgtaagtagcagcctgcctgccttctccatcctcttgtgacccgacctttctctctcagacccacctctgccctcttcttctgtttctaattccttatctcctcttatgaccccatcttccttaattctagttaattttgagtattgtgggccatctggtacagtgttaacaacaataataatagctaatatttgctgaggtcttgctacgggccagacactgtgctaagtgttttatatgaattatctcatttagtcctacagtgaatcgccctaccatctagagaagtaatgagacttaaattggtggtagtaacagtagggaggtaggagggg

SEQ ID NO: 13032 - DNA, 528 bp, Homo sapiens
  MAP TO CHR9.3; EXPRESSED IN HEART, SIGNAL = 0.95; EXPRESSED IN BRAIN, SIGNAL = 1.6; SWISSPROT HIT: O15260, EVALUE 1.00e-32; NT HIT: AF078866.1, EVALUE 1.00e-102; EST_HUMAN HIT: BE396641.1, EVALUE 0.00e+00
cggtagcagagtgttagggctgctgccctataggatctgccccagagggcctaacgtcaagtcatgcatctccgggactgatccttggattgttgcatgtgtccagactcacagggtagcgctcaggagcaagcactgagagccccctagtctgccctgggaaggcaccggggctgacaagagctcttgccttccacagcgtctgttcctcacacaccccgcccaaggacgtgcctggcagcggcctggtgctccccgccgcagccacctcacccttgggtttctgtggccctgcagttcctccgtgtcacaaagcagtacctgccccacgtggcgcgcctctgtctgatcagcaccttcctggaggacggcatccgtatgtggttccagtggagcgagcagcgcgactacatcgacaccacctggaactgcggctacctgctggcctcgtccttcgtcttcctcaacttgctgggacagctgagtgagtggctctgcgggtggtcaggattcactgggcgtcttgtt

SEQ ID NO: 13033 - DNA, 507 bp, Homo sapiens
  MAP TO CHRX.3; EXPRESSED IN HEART, SIGNAL = 5.1; EXPRESSED IN FETAL LIVER, SIGNAL = 8.4; EXPRESSED IN ADULT LIVER, SIGNAL = 9.9; NT HIT: gi14762358, EVALUE 0.00e+00; EST_HUMAN HIT: BG575048.1, EVALUE 0.00e+00; SWISSPROT HIT: O95916, EVALUE 4.00e-87
ctgcaggcattttctcttcctcttcttcacgggaggtgggcagaggacagctcggatcgcttcgtcaaacactgtcttgaggcctcgccttgtgagggccaagcactccaggtattttacagcacccatctccttagccatggctagaccctgcggataggtgatgggagttagcttcttctccttcagtttctggatcctgtctttatcatccctaagatcaagtttagttcccactaggataatgggagtgttgggacagtggtgctgcacctcaggataccactttgcaaggacattttcaaatgatgcaggactcacaagcgaaaagcaaattaagaacacatctgcttgcggataggatagggggcgtaatctgtcataatcttcttgtccagctgtattccataagcccagattcaccagttttccatctaccataacattggcagaataattgtcaaaggcagtagggatatcttctccaggaaatgcgttggttgtgta

SEQ ID NO: 13034 - DNA, 567 bp, Homo sapiens
  MAP TO CHR6.3; EXPRESSED IN HEART, SIGNAL = 0.67; EXPRESSED IN ADULT LIVER, SIGNAL = 0.64; EXPRESSED IN BRAIN, SIGNAL = 0.5; SWISSPROT HIT: Q99956, EVALUE 6.00e-06; NT HIT: gi9910431, EVALUE 3.00e-92; EST_HUMAN HIT: BE174102.1, EVALUE 3.00e-96
tgaacccggagatctgaaactgccctcacacgtgtgcttctcttggccccgcagcctggccggggtctccaggagcgtgacactggtgatcgcatacatcatgaccgtcactgactttggctgggaggatgccctgcacaccgtgcgtgctgggagatcctgtgccaaccccaacgtgggcttccagagacagctccaggagtttgagaagcatgaggtccatcaggtaagcagttcttaggggacatcagagatgcaggcaggtgcccctgaacggtgcccacagtctttccgtacacagccagcatcatggcgtttggagttgaaaggcccacagaggacatcggctcccagggcgcccagctgcaccccttcagaagtcgtcacgatcccttgtgcacctgttgaagccacaggcgcctaccctttgtcactctccttgtgcctggtactccctactagtttgtttctctccctttgggtgacgtaccatttccttggtctggcctattttcatgtcctaggccagcaccttgaaggagcagttccttctcttgcttgaccctg

SEQ ID NO: 13035 - DNA, 590 bp, Homo sapiens
  MAP TO CHR1.3; EXPRESSED IN BRAIN, SIGNAL = 1.5; EXPRESSED IN HEART, SIGNAL = 0.63; SWISSPROT HIT: P36006, EVALUE 3.30e+00; NT HIT: X82877.1, EVALUE 0.00e+00; EST_HUMAN HIT: AL598343.1, EVALUE 0.00e+00
actaaccccgccattatgtgaatgcatattaatggatacttaatcacattgaattacagtatgcagattttattaagaacatgtctacctcttattctgatgctgtgaatgtctaccacaatgagaaagtaattttaaaatcatttctatttgtgtaagagaaacccgagtttgaggaccttattttattctacgctgtttagatttgtatcctctggtaatttagtggcattagtcacctgctaattaatctttttcctttcccctgtgttccatatagagaaaagtggtaaagaatctacctcactgggaatgtcatcattaccaacttcagatgggtttaaccatcccgcccgttcttcaggacagagtcctgatgttggtaatcctatgagtcttgctcgctctgtctctgcttcagtctgccctatcaagcccagtgactcagatcgcattgaacctaaagctgtgaaggctttgaaggcttcagctgaattccagctaaactctgaaaagaaagaacatctttctttacaagatctttctgatcatgcttcctcagcagaccatgctccaacagaccagagtcc

SEQ ID NO: 13036 - DNA, 521 bp, Homo sapiens
  MAP TO CHR17.3; EXPRESSED IN HEART, SIGNAL = 0.95; EXPRESSED IN LUNG, SIGNAL = 1.4; EXPRESSED IN BRAIN, SIGNAL = 0.92; EST_HUMAN HIT: BI772489.1, EVALUE 0.00e+00; SWISSPROT HIT: P16619, EVALUE 1.00e-06; NT HIT: D90145.1, EVALUE 0.00e+00
aagaccaaggtgtttggcagcgctttaagaacttccttcttttctcttcggggctctcaggccgcaaaaaaagactgatgtggtctaaccatggccagagagtggtgatacccacaacaacaacatggactcacgtggtgcagagaggacctggttgcagagagccatggtgcagaggaggacggcaagggcagcagtggagacctgcatgattgggagcaggtgatggaatgtgggctcgagtgtcagcagagccaagaagggactgactactctttgctgcctgcgtccttctgatgtctgaagccatctctcctctttataggcagccctggcggatggggaaatggaatctgggggtgaggagggaaatttttaagtgtagtgatgctgtcatgctgagtgttgcacaactcagggtccctggtgaccacaggggctcaggatatccaagaatagcatctctgagctactctctaactctcagctctcaactcatgactggttctagcttcatgggg

SEQ ID NO: 13037 - DNA, 568 bp, Homo sapiens
  MAP TO CHR6.3; EXPRESSED IN LUNG, SIGNAL = 3.8; EXPRESSED IN BRAIN, SIGNAL = 3.2; EXPRESSED IN HEART, SIGNAL = 3.8; EST_HUMAN HIT: AA700882.1, EVALUE 2.00e-90; SWISSPROT HIT: P01028, EVALUE 3.00e-15; NT HIT: gi15208634, EVALUE 0.00e+00
tcacagcctttgtgaccatcgcccttcatcatgggctggccgtcttccaggatgagggtgcagagccattgaagcagagagtggtaagttcagtggcgtttctgccctctgctggcccccagctctctccctttttcctcaggaacccaggggtccaggcccaagaccctcctcccgttttcttccaggaagcctccatctcaaaggcaagctcatttttgggggagaaagcaagtgctgggctcctgggtgcccacgcagctgccatcacggcctatgccctgacactgaccaaggcccctgcggacctgcggggtgttgcccacaacaacctcatggcaatggcccaggagactggaggtgaggggtgaggcgctcctggcagtgagcctgaggcccaggggaccttaggatccctgagtgtgcccagagggagaggctggatgaagactcagaggaggaatgaagttataagcaggggtgggttgggggagactcaggagagcccagcagggggtggctaagggccaggggaccaggctcttctccctgccttcctgtttactcg

SEQ ID NO: 13038 - DNA, 547 bp, Homo sapiens
  MAP TO CHR14.3; EXPRESSED IN FETAL LIVER, SIGNAL = 0.89; EXPRESSED IN ADULT LIVER, SIGNAL = 1.3; EXPRESSED IN HEART, SIGNAL = 1.1; SWISSPROT HIT: Q19720, EVALUE 5.10e+00; NT HIT: gi14750873, EVALUE 0.00e+00; EST_HUMAN HIT: AW088366.1, EVALUE 0.00e+00
ggctgaagcctctgctaatggttcttgatccctatagggcagtggcactggagctgcaggctaacagggagcccgacttcagcagcctggtgtcacctctcagcccccgcaggatggctgcccgggtcttctacctgctcctgggtgagtgtatgcatgtgtgtgtgtgtatgtggggcagggacacagagaccagaggcccgtacagggactcccccgacctgccctctcctcgcctcttgaccagtgctctcagcgcaacagattcttcacgtgaaacaagaaaagccatatggtcgcctcctgatccagccggggcccagattccactgaggttagagtccatttacaaagctgccaggaaaccggccacttctagtaaaccacgtcgtgcctcactgggtcctgcttacctcatttctgaatgtgcatttccagccttcttgctctcagagctattgttcaagcagaaaacaagctgcttttattacagtatgatgtcatgactcatttgtaacagatccagcctcagggacagccctgtaag

SEQ ID NO: 13039 - DNA, 587 bp, Homo sapiens
  MAP TO CHR19.3; EXPRESSED IN HEART, SIGNAL = 0.63; EST_HUMAN HIT: AU123765.1, EVALUE 0.00e+00; SWISSPROT HIT: Q15717, EVALUE 4.00e-60; NT HIT: gi14757941, EVALUE 0.00e+00
gaaaattggcgcaaaatgagttgtacactaacaagaaaagtttcaactccttcactcttaattatctattccgtacaaaaaaaagcatgagcgagttatttgtgggacttgttggttttgaaggaaacctgtaagattttgtcccccaggcggtagccgttcaggctggctatggccatcgcggcttcttcatagtttgtcatggtcacaaagccaaaccctttgcacttgttggtgttgaagtcgcggatcactttcacattggtgacggcaccaaacggcccaaacatctgccagaggatcccctcgtcggcatcctgccccaggttgtagatgaaaatgcaccagccggaggaggcgtttcctggcacgttgacgccagagagcccgctcatgtgatcgacgcccatgggggagaacctggcagacagagagcaagcgtcaggccacggtcagcgcaggcggcctggggatggggcaaggcctggacgcatgctgaccatggccgctgggccccatcccgctctgcgcagccacgaggtgctcacggttgagacacctgcatgggtcaaaaccctgggaggaat

SEQ ID NO: 13040 - DNA, 524 bp, Homo sapiens
  MAP TO CHR2.3; EXPRESSED IN HEART, SIGNAL = 0.75; EXPRESSED IN ADULT LIVER, SIGNAL = 1.6; EXPRESSED IN BRAIN, SIGNAL = 0.72; NT HIT: S37726.1, EVALUE 0.00e+00; EST_HUMAN HIT: BE262152.1, EVALUE 1.00e-73; SWISSPROT HIT: Q29400, EVALUE 3.00e-23
gactcgagacggccacttagatggatatttggaggcagagcccattctgacacatgaaagccacggtcacagaacaaggagaggagtgaacattcccatccatacaattttctttaggggctggggttgggcacccagcatggcagggagatccccgggcaggctgtcagaagtccctgtgccccctgctggctgtgtgaccatgggaaagtcccctccctgtgcagcagcttctcgctgagcttgcgtctggcgcgtgcttcgtgggcctgctgtcctcactccgggcgtcccctgctgtctgtgcgtgcagactccctgccaacaggaactggaccaggtcctggagcggatctccaccatgcgccttccggatgagcggggccctctggagcacctctactccctgcacatccccaactgtgacaagcatggcctgtacaacctcaaacaggtgagcatggtgccagcctgggccagagcagctcctcctcagccctgggccccagatgtgccttgtttct

SEQ ID NO: 13041 - DNA, 563 bp, Homo sapiens
  MAP TO CHR20.3; EXPRESSED IN FETAL LIVER, SIGNAL = 1.8; EXPRESSED IN LUNG, SIGNAL = 4.1; EXPRESSED IN HEART, SIGNAL = 1.3; EST_HUMAN HIT: AW379842.1, EVALUE 0.00e+00; SWISSPROT HIT: Q09895, EVALUE 9.40e-02; NT HIT: AF116614.1, EVALUE 1.00e-60
cttctcctcatcccgttctgccccaagacaggcccagtatccccttcccctccaaaacccacatccccttgtccctagggtcccagtaccttagcctgattttcctgcttccagatctgagtattgatgccatggatgtggccggagaacagcagctggatgtggaacacaacctgttcaagcaacgactagataaagatggcatccccgtgagctcagaggctgagcggcatggtaaccaggggagggggccgggtctcagatcccaaagctggatgtacccaagcctatctgctagcaagtgaactgtggcaggcatagtgatacattaaacaactaagagctagagaagtcaagtgacttgcctagggtcccccagctagtaagagtcagagtgagctaaaatcctctatacatatcgagtcaggtaatctacctggctattattctcagaggtcctcaatacctgcagatggtagtttgaataccagaggtttgaagataggtcttatgtgctcttgccttggtagaactgtctagatggacccaggcttctttgagtg

SEQ ID NO: 13042 - DNA, 519 bp, Homo sapiens
  MAP TO CHR3.3; EXPRESSED IN BRAIN, SIGNAL = 0.79; EXPRESSED IN HEART, SIGNAL = 0.77; NT HIT: gi16157576, EVALUE 1.00e-100; EST_HUMAN HIT: BG287668.1, EVALUE 1.00e-100; SWISSPROT HIT: P38318, EVALUE 1.70e-02
aaaacagaaatccgtgtgcctaccatatgaaagaagctgtatctaaacctgttaggaggttaaaaagataaaagtgcatataaataatattgaaaaaagatgcttttcaaatctttttccatatatataattctacgctcagatattagtggtattgatgaatgttcctcattttaccctttcttatttagtaaggttttatttcatttttacctgtagggcatggctttgtaaaatgtgtttaatggctggggacctgcagtgtatttgctgataatcagaggcagtattatctgcaaaggaaccattggaactgccaataaggctaaatgttctttgggtactccctcttctaccaatttcagtcctgttacagcatctgctgctgaaaaaccaatctgcaatataaaaacaaaaaagtattttaattcgtgacttatgaaatattttcctccatgcatatgtaagttcttcaagaacctcaattttattactgacccatgacagttacaagtgagc

SEQ ID NO: 13043 - DNA, 531 bp, Homo sapiens
  MAP TO CHR12.3; EXPRESSED IN ADULT LIVER, SIGNAL = 1.2; EXPRESSED IN HEART, SIGNAL =   1; EST_HUMAN HIT: BE799797.1, EVALUE 0.00e+00; SWISSPROT HIT: P22516, EVALUE 3.00e-05; NT HIT: U35241.1, EVALUE 0.00e+00
atgggtcttccccttcactcccagcccagagcccccggccaggcacccccagggaaggctctggtggagaacctgtgcatgaaggccgtcaaccagtccataggtgagcctggctgcctccagctgggtggacagatgggggctggagaaagggagaacaggaaagaggggttgcctgccctgtttcctatataagtctgaggaaggggagggggtcgccgtgggaatgtgctgtaggggggaggcaggtgttgctcggagccccagcctctgttcctatgcaggcagggccatcaggcaccagaaggattttgccagcgtagtgctcctggaccagcgatatgcccggccccctgtcctggccaagctgccggcctggatccgagcccgtgtggaggtcaaagctacctttggccccgccattgctgctgtgcagaaggtcagtcctacctttttctttctgagagcctccccaccccgagatcacatttctcactgccttctgtctgcccagtttcaccgggagaagtc

SEQ ID NO: 13044 - DNA, 543 bp, Homo sapiens
  MAP TO CHR17.3; EXPRESSED IN LUNG, SIGNAL = 0.78; EXPRESSED IN HEART, SIGNAL = 0.67; EXPRESSED IN ADULT LIVER, SIGNAL = 0.63; SWISSPROT HIT: P12895, EVALUE 1.00e-03; NT HIT: gi5729954, EVALUE 2.00e-49; EST_HUMAN HIT: AA983323.1, EVALUE 4.00e-49
tcccagaccctgattgagtcagttttggtagtttttttttttcttggaatttgtccattccatctagattatgtaaatggcatacatttgttcataatattcctttataatcttttatttctgtaaggtcaatagtaatatccctgcttttattcttgattatagttagtctagctaaaggcttgtgaaatgtggttgatcttttcaaagaacctttcggtttcactgattttctctatcatttttctattccaaactacttttctgaaatctattaaatctatttttcctctgaaatctattaaaagtgcagagagttagtaaactcacctgatccaagaaatttgtgaagtttatgaatccaagttagcccaacactatgtacaccagcttcatgagtacagtgatatcttgaaggacacttgggatctgcaaatggaatgattaatgatacaaaggtagccagtggataactaaaaaaatttacctcaaatttgttggctactccacattagcctacaaacgcatttgttgatggaaggt

SEQ ID NO: 13045 - DNA, 586 bp, Homo sapiens
  MAP TO CHR3.3; EXPRESSED IN FETAL LIVER, SIGNAL = 3.4; EXPRESSED IN HEART, SIGNAL = 2.3; EXPRESSED IN LUNG, SIGNAL = 6.9; NT HIT: gi14733260, EVALUE 0.00e+00; EST_HUMAN HIT: BF316163.1, EVALUE 0.00e+00; SWISSPROT HIT: Q04637, EVALUE 6.00e-55
ttgagcagttcctcaggttgggcagttggagcaatgggcacaggggattcggaggggcaagctgggggaggagcaagctctgggcttgactccacctctggttccagatcttcagatgggaccatgccattaggctcatgaatttccactgtgtgagatgccaaaggggtgggagcctggagaggactggaagaaaactcagattctggaaccggtttgctaagtgtcacttctacttccagtatgggttcggcgagaggagtgggttctggagagaggcgatatggctccccagtttcacgggagatgggggttgattcttctacagacatttgtatagttgtcatagtgtccccaggaatagagaggactgcgagattaggctcagaccccggttccaagactggggatggtgatggggtcggagaaggcgacgaaggctgggattctgaagggctatgctctgggccaggcagccctggccggtcagcaatgattgctccctgtgaccggtcatctgcaccataggaaggaagaatgagcaactaaaggcaagtgcttaactgctgttgttcctccccatcct

SEQ ID NO: 13046 - DNA, 578 bp, Homo sapiens
  MAP TO CHR11.3; EXPRESSED IN LUNG, SIGNAL = 2.9; EXPRESSED IN HEART, SIGNAL = 1.2; EXPRESSED IN BRAIN, SIGNAL = 1.2; EXPRESSED IN ADULT LIVER, SIGNAL = 1.2; NT HIT: U20391.1, EVALUE 0.00e+00; EST_HUMAN HIT: AA291206.1, EVALUE 1.00e-104; SWISSPROT HIT: P15328, EVALUE 4.00e-38
aatattctggctgtgctggctgtgctggctgtggactgagtcctctgtcttcccccatccagtgtcgaccctggaggaagaatgcctgctgttctaccaacaccagccaggaagcccataaggatgtttcctacctatatagattcaactggaaccactgtggagagatggcacctgcctgcaaacggcatttcatccaggacacctgcctctacgagtgctcccccaacttggggccctggatccagcaggtatgcatggcttcctgcaggtacaagacctagcggagcagctgagctttccaggcatctctgcaggctgcaaccccagctccagttctattcggggctgagttgctgggattcttgaacctgagcccttcttttgtatcaaaatcacccaggtggatcagagctggcgcaaagagcgggtactgaacgtgcccctgtgcaaagaggactgtgagcaatggtgggaagattgtcgcacctcctacacctgcaagagcaactggcacaagggctggaactggacttcaggtgagggctggggtgggcaggaatggagggatttggaag

SEQ ID NO: 13047 - DNA, 557 bp, Homo sapiens
  MAP TO CHR20.3; EXPRESSED IN HEART, SIGNAL = 1.4; EXPRESSED IN LUNG, SIGNAL = 3.9; EXPRESSED IN BRAIN, SIGNAL = 0.87; EXPRESSED IN FETAL LIVER, SIGNAL = 0.97; NT HIT: gi12742414, EVALUE 0.00e+00; EST_HUMAN HIT: BE243348.1, EVALUE 5.00e-73; SWISSPROT HIT: O35568, EVALUE 7.00e-21
gcacactcatccacatcctgacaggccccctctccaggaccgcccggctcatagccaacccagcattcgcagcggaagcccccaggggtgttgacacactcctgggcacagggggagtcctggcattcatccacgtccacacagtccagctgactcgagtccagctggtacccttgggggcagcggcacgtgtagtttttcccatggggtcccaggacgcacgtggcccccccacgacatgggctggagctgcaagggtttcgagaggcacaggtcaccaggtcatccagcagccggaatcctggtcggcagccgcagaggaaggagccatcccccccttcaaagcagtcctggtggcagcccccattgttgaagttgcagccatacttggggctgacacagagggggcccgagctgccccagtcgaacacatcgggggccttctccttgcacaggaaataatgactctgagtctcgtccttgtcaccttccccacaggctacattggccgcagaggcaaagggcacagcctccaaggaggaactggtggtctggaa

SEQ ID NO: 13048 - DNA, 501 bp, Homo sapiens
  MAP TO CHR12.3; EXPRESSED IN LUNG, SIGNAL = 1.3; EXPRESSED IN ADULT LIVER, SIGNAL = 0.64; EXPRESSED IN HEART, SIGNAL = 0.98; SWISSPROT HIT: P37139, EVALUE 2.00e-19; NT HIT: AB030256.1, EVALUE 0.00e+00; EST_HUMAN HIT: BI256304.1, EVALUE 4.00e-70
cagacctttcctcagctctccattcttagtttcatttttttcttttgcaatgtttattccttcagcaaaatattttttttaaaaatctgaagtacatctaagtaaactaagtccattagaggtatttattctaaagctactatttaacttacttttaagtagttccaagctattcgcaaacaggataatcattctgctagctaatacaaggtcatcaacatatccttgactcagttaatcaatcatgtaacaaaagataacctgtgtgccccaaacttaccacatattttgagtggtgcttcaagttctagtaggataggctgactgagaaagatttcacgagactttaagcacagtcctctgatttcattctcctgaagctggacattcttaccaggcttggaccctctcactgcaagagaaaaatcgcaattagtccaatgaagccaaaatacaaaatacaatacgagatttagataaaggggcaaaaacatggtttaa

SEQ ID NO: 13049 - DNA, 586 bp, Homo sapiens
  MAP TO CHR11.3; EXPRESSED IN HEART, SIGNAL = 0.63; EST_HUMAN HIT: AV725979.1, EVALUE 2.00e-44; SWISSPROT HIT: P48058, EVALUE 2.00e-57; NT HIT: gi13639643, EVALUE 0.00e+00
attgcccctctgacaatcactttggtacgagaggaggtcattgacttttctaagcccttcatgagtttgggcatatctatcatgatcaaaaagcctcagaaatccaaaccaggagtgttttccttcttggatcctctggcctatgagatttggatgtgcatagtctttgcctacattggtgtcagcgtggtcttattcctagttagtagatttagtccatatgagtggcacacagaagagccagaggacggaaaggaaggacccagcgaccagcctcccaatgagtttggcatctttaacagcctctggttttccctgggtgcttttatgcagcaaggatgtgacatttcacccaggttagtttcaaatctcttaagttcttcactgatttcccagtaattctaaatgttgtgcagattatctctctacatgttcttttcctgaagacagaggactatttgaaacacagaaaaagacttgcaattcccaaatagcaatttcttccaagttagcacaaaatatggatatatcataaatattaactttctcaatagcaaagaaactatgcaatccatcagagctctca

SEQ ID NO: 13050 - DNA, 582 bp, Homo sapiens
  MAP TO CHR3.3; EXPRESSED IN HEART, SIGNAL = 1.7; EXPRESSED IN ADULT LIVER, SIGNAL = 8.1; NT HIT: AB026898.1, EVALUE 0.00e+00; EST_HUMAN HIT: AA315440.1, EVALUE 0.00e+00; SWISSPROT HIT: P09110, EVALUE 2.00e-27
  unsure 477
  unsure 543
tgcctggtgtgtgtctcttccagaagggtgagccaatcccagctgtggggtcaggaagggcttgaagtatgggacactagcctgccccacctccactctgcagcacccacaggaccaccctcatgcccctggcaacagcatgcagggcagctgcaggatccaggtgggacccagatactatatgaaggagccaccttacctgctttttgcaaagctactgggatggcataggcaggtccaatgcccatgatgtcaggtgggaccccaaccactgcataagacctcaggaccccaaggatgggaaggcccaactcttctgccttggacctccgggccagcaggatggcagctgccccatcactcacctggctagagtttcctaggggcaaactgttggggtaagaaggcatcggggtggggatgaggagatcccagccctcccacttctactttgcagaggggcctggtctattccangttcccagagtacagcacccagcatggccatggcctgctttctcatacccctaccccggaccagtntcaccagctgtggtagaaccatctttcttgaaggcaggc

SEQ ID NO: 13051 - DNA, 543 bp, Homo sapiens
  MAP TO CHR2.3; EXPRESSED IN HEART, SIGNAL = 1.4; EXPRESSED IN ADULT LIVER, SIGNAL = 2.2; EXPRESSED IN BRAIN, SIGNAL = 1.6; EST_HUMAN HIT: AV691634.1, EVALUE 4.00e-64; SWISSPROT HIT: P09525, EVALUE 1.00e-16; NT HIT: gi15297899, EVALUE 3.00e-64
ggatttcatgtggtgaagggaaggggtgataaggctggggagggaaggataatactccatgagaaggaatcgtaggtgagccaggtggcagggtatgtctggacagcacaggttatggctctagaaaagcagggaacggcatcctgtggtcagaacatagagcattggaaaagtgagttgtggagagccttgaataccatgataaagagtgaggatattcctcaggcctgccaagtagtggagcaaaggacatcgtcagcacagtcatctctagtcttgctttgatagactaaagaagacactgaaaaacagctaggtttttgtatatgtttggatttcgttttcttccttagggcttgggcaccgatgataacaccctcatcagagtgatggtttctcgagcagaaattgacatgttggatatccgggcacacttcaagagactctatggaaagtctctgtactcgttcatcaaggtaggtcacagcagcctaagtccagagtaaaggatccagaaaaggacccctctgaccttggcattta

SEQ ID NO: 13052 - DNA, 591 bp, Homo sapiens
  MAP TO CHR2.3; EXPRESSED IN HEART, SIGNAL = 1.3; EXPRESSED IN ADULT LIVER, SIGNAL = 1.2; EST_HUMAN HIT: AA443018.1, EVALUE 0.00e+00; NT HIT: AF077038.1, EVALUE 3.00e-64; SWISSPROT HIT: Q10045, EVALUE 2.00e-10
gcaccatcactatccttgggtctttacccaaatgttactttatgaccctcatatgtacaattgcatctcaagtttgtattctccacatttctctgctgctttctctctttccataataccatctgacataggtgtatcattgtcagccttccttcctagatggaaggcagggatttttgtctgttttgtttactggtatatctccagaatttagaatgtctgccgcatagaaagtcgtcagtaaacatttacagaattcattttattatgaaagaaattttaattttgctcttaggttcatctctaacaagtatttagtgaaacgacagagcagagactatgatgtggaatggggctatgcttttgatgtgcatctcaatgctttttatccactcctggtcattttgcattttatccagctttttttcatcaaccgtaagtagcagttaattagagtattatccaagtcttcattgcatgcattggtaaagggactcatggtctgcgtctcttctggcagatgttatcctgacagacacatttattggatatttagttggaaataccttatggttggttgcagttggctat

SEQ ID NO: 13053 - DNA, 528 bp, Homo sapiens
  MAP TO CHR5.3; EXPRESSED IN LUNG, SIGNAL = 1.5; EXPRESSED IN HEART, SIGNAL = 1.2; NT HIT: gi14726895, EVALUE 2.00e-83; EST_HUMAN HIT: AA146681.1, EVALUE 8.00e-78; SWISSPROT HIT: Q09118, EVALUE 2.00e-12
tttggagaatctacaccccggagctagcccatgatttggaaagattgagggaagtgcatgtgaccatcaaggagagggcccaggaggaggaagaaagggagtgatttgcagaaacagcctgcaggggaccccaacactcacctaaacatgagaagccccacgatgaccagcagacagacagatgacagcaccacagccaccacggccaggatggttgtgtggtcataggtatataagcgattttccactgggaggctcagcccatgacacctctctccatggtaacccgggtggcagctagttcaagacagaacaagaaggagatggagttagtgctttggcctctcttggcaatggcccacctgcataagccaaaccccattcctcataccctcagcctgtcaatccctgaccacgatccctgcccatcctccatccttctcctctagtagaaaactctttaaagcccctctgaaagctctgtagcattcctctctcacttgacaccctccccttttccatttcctc

SEQ ID NO: 13054 - DNA, 569 bp, Homo sapiens
  MAP TO CHR1.3; EXPRESSED IN HEART, SIGNAL = 2.3; EXPRESSED IN ADULT LIVER, SIGNAL = 1.7; EXPRESSED IN BRAIN, SIGNAL = 2.7; NT HIT: gi7657147, EVALUE 0.00e+00; EST_HUMAN HIT: BE314627.1, EVALUE 0.00e+00; SWISSPROT HIT: P53453, EVALUE 6.30e-01
tttgtccttctcctgggatgtctttcttttatctaaagcaaaaagtccaaagtgcgtttctgctgaatgtagggcctgggacaggaaagggttgcccaggcaggatcaggttggcagccccagcctgccccacctaggtatgaggcctcaagatggcatgcactgcacccggtcagggccctcctcctcgtccgatgtgtctgaggagctgggagactcatcagagtccgcgtctgtggccccaaccccaggttctcgccagcgctgtggatgggaaaggcttgttagtaacttccctggatggaacaaggacaagcctgttaggtcttagccagaatttagatgctttaggccagagatcagcagaatttttcttaaagggccagagagtaaatactttagacttgtggtctatatggtctttattgcaactattcaactcattgtagcgtgaaggccgccacagacaatacacagaatgggtatggctgcaagccaatgaaactttatttacaaaaaccagcagcaggccaactgccagtttgccaacccctgaactaggcctcttt

SEQ ID NO: 13055 - DNA, 570 bp, Homo sapiens
  MAP TO CHR16.3; EXPRESSED IN LUNG, SIGNAL = 1.2; EXPRESSED IN HEART, SIGNAL = 0.88; EXPRESSED IN ADULT LIVER, SIGNAL = 0.94; NT HIT: gi14785385, EVALUE 0.00e+00; EST_HUMAN HIT: AA864604.1, EVALUE 0.00e+00
ttgaatagttggttctattccactgtttttaagtttgaaaataattatggatagaagagataagcttacttgtctcagatgactttagtttgaagaagtaatatcttggaatttatttttccagaagtataaaccgtgggcgacaccacagcgaaagatcacagaggactcaaggcccgtcactaccagcaactccagtctttgtacctgttccaccacctcctttgtatccgcctcctccccatacacttcctctccctccgggtgttcctcctccacagttttctcctcagtttcctcctggccagccaccacccgctgggtatagtgtccctcctccaggggtttcctccagctcctgccaatttatcaacacctgggtatcatcaggagtgcagacagctcattcaaataccatcccaacaacacaagcaccacctttgtccaggggaagaattctatagagagcagcgacgactaaaagaagagtatgtattctaatttgaaattattatacacttttttcattttctgataataacattaaataggtgtctggaaacgttttcc

SEQ ID NO: 13056 - DNA, 524 bp, Homo sapiens
  MAP TO CHR6.3; EXPRESSED IN ADULT LIVER, SIGNAL = 0.81; EXPRESSED IN HEART, SIGNAL = 1.1; NT HIT: gi12732534, EVALUE 0.00e+00; EST_HUMAN HIT: BF676393.1, EVALUE 3.00e-43; SWISSPROT HIT: O43309, EVALUE 2.00e-75
actcatgcccctttctgatgcaccaaactgtcaaaaacatgctttgtgaaaaaatggctgttcttcactctggcctagaaatccacaatttatgttttctcaagcagaagtcacatcttttttctcacctgctctcctggttcatccagttctctctctaaatcctccagcacagtcaccacctcctccccactctctggatgctgctcctgcacccaggcctggagctcctcaggtaggatggtcaggaactgctccagcaccagcagctccagaatctgttctttggtgtgggtctctggcctcagccactgatggcaaagttctcggagtcggctcaaagcctcacggggaccagatgtctcctggtagcagaactgtctgaagtactgacggaagacctctctgctatgggtgttgtttttacgcaggtcccaatcctgtctggtggtatatttctcttcctctatctttacttccaaaggttcatcctggtccatgtgggcctggatagcccaagtaga

SEQ ID NO: 13057 - DNA, 510 bp, Homo sapiens
  MAP TO CHR19.3; EXPRESSED IN HEART, SIGNAL = 0.96; EXPRESSED IN FETAL LIVER, SIGNAL = 2.1; EST_HUMAN HIT: BG992492.1, EVALUE 0.00e+00; NT HIT: AF112181.1, EVALUE 0.00e+00; SWISSPROT HIT: Q14653, EVALUE 8.00e-28
gcccactaggagtcctttccgcccagcgcgcagctccgggtttccagcgtcccaggtcgtcgcacgcacctggaagattccgaaatcctcctgctgtgcatcctgccgtaggccgtgcttccaagggatgcggaagcgcgtgcggctcttgttcacccaggccacgccctccagttgccccaggtccagctgcgacaccagccagggcaggatccgtggctttggggttcccatggtccggcctgcgcgtatagggcatttcctgggcgcgaccggcctcccccggacccacctggcctggagtttccgcacccagacctccttctcacgggccacggcacaggtccttcacccatattttcgggggtacaaacaggaaacctcctcttcccatcctcccatcctcccgagaggctctctaatcagctagggttccttcccatatccatggcacatccttccccagcgtcttcagtgcagaccctccactccctcaattccgccagtata

SEQ ID NO: 13058 - DNA, 570 bp, Homo sapiens
  MAP TO CHR2.3; EXPRESSED IN HEART, SIGNAL =   1; NT HIT: gi14731415, EVALUE 0.00e+00; EST_HUMAN HIT: BE707519.1, EVALUE 0.00e+00; SWISSPROT HIT: P49759, EVALUE 1.00e-37
ttttgcgcatcagaaaagtctaaatcatagtctgcaacaaagtacgttgttatatggtggatatcctacttgctgaatgaaatgtacactgctggatcaacagcctgtaatcaaatctcttcatacctattcttcctccccctttatttttaatcaaataaaaattgtacacacttaggatgcacattttgatatgtggaatggataaaaccagcaaattaacgaagatataccaagaacttacaattcacagacttgcatatctgatatgccatctttctgatatgatccagtcgaaatggtagaaaaccattttctttaatgaagtcgtaagtactaagtcccaatagttcaaaaacaatgcaaatgtgaccatgatgctcaaaccattccaacatctggacacagcggctacaaacacatgaaaaatagctaagtatagttgctcctaatttaaatatacctgataccacttcccaagttctaatctgatacttacaaagtactgttggggtctgttgtattcagatgttccagaacttgtatttctgagcgagcagcttcacagta

SEQ ID NO: 13059 - DNA, 525 bp, Homo sapiens
  MAP TO CHR8.3; EXPRESSED IN LUNG, SIGNAL = 0.53; EXPRESSED IN HEART, SIGNAL = 0.78; NT HIT: M29457.1, EVALUE 1.00e-105; EST_HUMAN HIT: BG828727.1, EVALUE 3.00e-83; SWISSPROT HIT: P07451, EVALUE 5.00e-29
actcactgcacctgcaacctgctcttacccagggcaaggaggcgcccttcacaaagtttgacccatcctgcctgttcccggcatgccgggactactggacctaccagggctcattcaccacgccgccctgcgaggaatgcattgtgtggctgctgctgaaggagcccatgaccgtgagctctgaccaggtgagcagccttgtgaacacgtgggcttatgttgctgtctgcctatgtaagatacagatgctaaatcaaaaatacatagctactaactggatactcactgaacagctctatggccagtaatttcatggtctgccctggttaattacaaccagcctgttcagctttctaaaacttggcccccaaagggtaccaggataaatgcaactcatttaaaagtagttttgataccgaacatgactgagtttatgctctataaacactttaaagggtttagattaatatgagtctttgttaatttggacgttgccaaatactgagcactggtaaggagatggga

SEQ ID NO: 13060 - DNA, 589 bp, Homo sapiens
  MAP TO CHR2.3; EXPRESSED IN HEART, SIGNAL = 1.3; EXPRESSED IN FETAL LIVER, SIGNAL = 5.6; NT HIT: Z48199.1, EVALUE 0.00e+00; EST_HUMAN HIT: AL524935.1, EVALUE 1.00e-123; SWISSPROT HIT: P18827, EVALUE 2.00e-20
ttcaaggaagaggcaagtgggggcctagtgagtggcagggcggagggggcgcatggctcccgcgtcaggcatagaattcctcctgtttggtgggcttctggtaggccccgccgttggcttgtttcggctcctccaaggagtagctgccttcgtccttcttcttcatgcggtacagcatgaaacccaccaggcacacagcaaagatgagccccacgaggcctccggcaatgacccctagggcaggtagacggggccagctcagctcagcggctccttgggctctgctgcagaccctccccaaagcagtggccttggctgtggtcagccccaccctgaccccacagcagcaattcaccccaaactacccccctgaaagaaaactcacctcccagcacctctttcctgtccaggaggccctgtgaggcccccgtggccccctgatccactggggactggttccggcggtcaggctccacggccactacagccgtattctcccccgaggtttcaaaggtgaagtcctgtgggagggcaggggcagattgggttggccaggtcaccgccagcagcagcaaccagctccactaca

SEQ ID NO: 13061 - DNA, 500 bp, Homo sapiens
  MAP TO CHR1.3; EXPRESSED IN LUNG, SIGNAL = 4.5; EXPRESSED IN HEART, SIGNAL = 4.8; EST_HUMAN HIT: BI766955.1, EVALUE 0.00e+00; NT HIT: gi16168172, EVALUE 1.00e-104; SWISSPROT HIT: Q03574, EVALUE 4.10e-01
acccttgatcctgtgacctgacctcatgtctgtagacccttcaaatgaagacccttcgaaccctgtgactcttcctgattcctttgacccttattcatagatccccggatccagggctaccctctgatggggtcccccttgctaatgacctccattctcctgacctacgtgtacttcgttctctcacttgggcctcgcatcatggctaatcggaagcccttccagctccgtggcttcatgattgtctacaacttctcactggtggcactctccctctacattgtctatgaggtgggcccctgggatgccgggctttaatttctgtcagcaggataaggagcaggccatagagccagagcatggcatttctcctttccagagaggttcagatccatgtcctcagctagcgaaggggagggatggctgggaagggagaactctggtggtctaatccacatcccttcccagttcctgatgtcgggctggctgagcacctatac

SEQ ID NO: 13062 - DNA, 544 bp, Homo sapiens
  MAP TO CHR3.3; EXPRESSED IN LUNG, SIGNAL = 0.45; EXPRESSED IN HEART, SIGNAL = 0.52; SWISSPROT HIT: O44252, EVALUE 3.90e+00; NT HIT: gi7661633, EVALUE 2.00e-50; EST_HUMAN HIT: AA604090.1, EVALUE 2.00e-50
ttgcctgctgttcagatgaggtttttcacactggtctttattatatagatgttaagcagatggtttccaaatgactatttcatttttttctagaatatttaacagtctatgtttgattacggcaggatggatatctttttaaagcctatctatatttgatgtgttcccttttgacttatttcatagtaaaattttcataattatggaagtaacatgaatcttgtaaatacatttaaagacaatgcaggcagttaacaagaagatggatccacaaaagacattacaaacaatgcagaatttccagaaggaaaacatgaaaatggaaatgactgaagaaatgagtaagtttaataaattataatgaaatttatagttttctcatctttgaattagccatttatttactatgtctcatattctcattcacgaaggcagaaatgatgaaaccaaacatgataggctcaaaattctatttgtatttaactgagggaaggtataaactatgttatgccacatcactgttacacattggcttcagcagttt

SEQ ID NO: 13063 - DNA, 534 bp, Homo sapiens
  MAP TO CHR16.3; EXPRESSED IN HEART, SIGNAL = 2.1; EXPRESSED IN LUNG, SIGNAL = 2.2; EXPRESSED IN FETAL LIVER, SIGNAL = 1.6; SWISSPROT HIT: Q25479, EVALUE 2.00e-05; NT HIT: AF047338.1, EVALUE 5.00e-78; EST_HUMAN HIT: AI143461.1, EVALUE 1.00e-118
ctctgatgctctactcgccccctccctttgtgttcgcataggcacccagcatgggcaccctcatgggggtgtacctgccctgcctgcagaatatctttggggttatcctcttcctgcggctgacctggatggtgggcacagcaggtgtgctacaggccctcctcatcgtgcttatctgctgctgttgtgtgagtgtcctggcgtgggagggttgggctgggcatgggccacggctgcccccacagagcccacccagctgagccgctcacccaggccctccttcccacagaccctgctgacggccatctccatgagtgccatcgccaccaacggtgtggttccaggtcagtgagcgccacccaaggcctggtggaagagaaaaggacccagtatctgccttgacctacctgggaacccccatagcacacccctgccccaagcagttctgtagtgggctcccaatccctgatgccaggacagtgcccacgtaggagctttcctgcttgacagagttggagagtgccattgtggttt

SEQ ID NO: 13064 - DNA, 577 bp, Homo sapiens
  MAP TO CHR5.3; EXPRESSED IN FETAL LIVER, SIGNAL =   2; EXPRESSED IN HEART, SIGNAL = 0.57; EST_HUMAN HIT: BG682578.1, EVALUE 0.00e+00; SWISSPROT HIT: P32499, EVALUE 1.90e+00; NT HIT: gi16157231, EVALUE 0.00e+00
cacctttgcattcaccactgtcaccttccgcttggccctccaatggtttagtgcgaaatggtgaagagactggtttactctggtaatatctttgccaaataaactggagtttccaggggagaatgaaaatccagtcagggggacagagcttaatgagcccaaaacagagctatcaactttcttgccgaaattaaatgaggcacttgtcgctcctagtgatgatgggtccgttttcttttcagatgtcagctccaccttcttgtcaggtgtatcttcagttttgttgccatgaaacaaaaacgctgactcttgctgtaattttgttgagccaacaagggaaggagaccgtgtttcagccgcagctttgttagattcactttcagaattcctgccactgttgccgtgttgctgttcaatgtttgctaaatatttctcatagtctttaaagataggtgtcagatcacagagggggtttgtattcacgtgcttcactatccaatcccgcacggagcagttcaaggcggccaactgcttgtgataggcatttctgacacaagctttactggaagcaaggcca

SEQ ID NO: 13065 - DNA, 509 bp, Homo sapiens
  MAP TO CHR11.3; EXPRESSED IN HEART, SIGNAL = 0.66; EST_HUMAN HIT: AW894126.1, EVALUE 4.00e-21; SWISSPROT HIT: P19492, EVALUE 6.00e-17; NT HIT: AF159275.1, EVALUE 5.00e-69
tttggtttggactccagaggaaggggctgcaggatggtaaaatgagaggtttatttagcgtctgggagaagcttataaagagcttaagtcctcattccttctaacatcttaacagctgtgcagtttcttacaaaatatgttttatcgtttcaagaaatgctgttaacctcgcagttttaaaactgaatgaacaaggcctcttggacaaattgaaaaacaaatggtggtacgacaaaggagaatgtggcagcgggggaggtgactccaaggttagcctcaatgtcaccaaaagcgggtaaacagtatgtaaagtaataggtgcatctgctgggagacttatggtttggacctcctaataccagtcgaattgctagtccagtcccttcgcaaacttacgtatgcaattactgtcaatgcaaaaatatttgcaaccattatcaatttagtgacacactaacaaacctaatgaaaatagtcactgaaaatctctgcctttgaagaagttgtgg

SEQ ID NO: 13066 - DNA, 515 bp, Homo sapiens
  MAP TO CHRX.3; EXPRESSED IN LUNG, SIGNAL = 0.53; EXPRESSED IN HEART, SIGNAL = 0.54; NT HIT: gi14764746, EVALUE 2.00e-68; SWISSPROT HIT: P33879, EVALUE 1.00e-04; EST_HUMAN HIT: AI338891.1, EVALUE 1.00e-98
cagggaggaagagcttgttggcaagcactgaccactctcatctgtgattgctctgcaggcctgatcttactcatttacttcttcttctatgcctccttggctgctgtgatcaccctctgcatgtacacactatttctgaccatcagtccctatataccaaccttcacggagcgggtaaagcctcctggtgagtgtgcccagatgccctgtgttgtcagaacttgctggacagaaatatgcttgcacagcatgttcagcctcaattaactttggctcttcctggtaatgacttagagattcaattattaggaggaaaagtaaaatggtacttggcaaattatggttcttttcattttgattgcctggggggaaatggtttcatgggaatcaatacaaaaaaattatcccaagaatgggttaatatatccaagacctgttttcattgccaggagttatgatcagacccttcgcccatagccttaacttcaacttcaacgtttctgaacccgacactt

SEQ ID NO: 13067 - DNA, 563 bp, Homo sapiens
  MAP TO CHR2.3; EXPRESSED IN HEART, SIGNAL = 4.8; EXPRESSED IN FETAL LIVER, SIGNAL = 3.7; EST_HUMAN HIT: BG387933.1, EVALUE 0.00e+00; SWISSPROT HIT: Q9TT14, EVALUE 1.00e-101; NT HIT: gi14736135, EVALUE 0.00e+00
tcaggagaccaccagattcccctcttcccgcggcctcgccatggcgacccacggacagacttgcgcgcgtccaatgtgtattcctccatcatatgctgaccttggcaaagctgccagagatattttcaacaaaggatttggttttgggttggtgaaactggatgtgaaaacaaagtcttgcagtggcgtggaattttcaacgtccggttcatctaatacagacactggtaaagttactgggaccctggagaccaaatacaagtggtgtgagtatggtctgactttcacagaaaagtggaacactgataacactctgggaacagaaatcgcaattgaagaccagatttgtcaaggtttgaaactgacatttgatactaccttctcaccaaacacaggaaagaaaagtggtaaaatcaagtcttacaagagggagtgtataaaccttggttgtgatgttgactttgattttgctggacctgcaatccatggttcagctgtctttggttatgagggctggcttgctggctaccagatgacctttgacagtgccaaatcaaagctga

SEQ ID NO: 13068 - DNA, 534 bp, Homo sapiens
  MAP TO CHR14.3; EXPRESSED IN FETAL LIVER, SIGNAL =   2; EXPRESSED IN ADULT LIVER, SIGNAL =   1; EXPRESSED IN LUNG, SIGNAL = 2.2; EXPRESSED IN HEART, SIGNAL = 1.8; EST_HUMAN HIT: AW379923.1, EVALUE 1.00e-64; SWISSPROT HIT: P32558, EVALUE 1.00e-03; NT HIT: gi14751618, EVALUE 6.00e-81
ttggatgaaacctgatgcactgaatgtcagtaccttgattgtggcaatgtgaaacggtgttgcaatgccaaacacgggcattattacagtctcatatttcttatcgatgtagatcttcatttcccgaatatgtggttccttaggcatcagagatgggtttttataggacacattagacttgcgagctctggagtgggataaaaaaacaactgagaaatttctgcagtcccacagaaccctcagatgatctcactgctcagtgaaaactcttacttctgaatctgctgttctcccttttgttcagtcaatcgcctctttgcttcttcattgagttgagccgctagttctttctgatgtgctcttcgcttctcttctgcagtcatttcattctggtgaatggaaaatccaatttatcacaacacgtgagccatatgacagccgagatcaatgtaatttaaaatagtaaacttactcttgttctttctgtaagtaatgctgcccgagaacctcttcccaaaaggtcctctgcctcat

SEQ ID NO: 13069 - DNA, 519 bp, Homo sapiens
  MAP TO CHR11.3; EXPRESSED IN HEART, SIGNAL = 0.79; EST_HUMAN HIT: BG386185.1, EVALUE 5.00e-73; SWISSPROT HIT: O27673, EVALUE 3.70e+00; NT HIT: AJ250393.1, EVALUE 5.00e-72
actgactggtgctcatagtgcatactctgaggcattattatttctattatttattgttctatctacatatgaaaattcctggttagtaggaatttcacattttaaaatcacagcagaattttagtgttaaacatcctattgcattctattcctatgaaaatagataagtgacataactcaaacatactactatatcatgaccatgccatttaacagatctggtcttgttttgtgaacaataaaaaaagaaagtcttactacctgtattttatctttgtatgagagggtaggtctctgcttgaatactgctttgaaagttggctcaaatcaccttctccttttccccttccacctctggcaggttcaaaggttggcctggctgctgttgtcatcttttatgctttgaagaaaaatataatcaagttatttccaacattacaaacactcattttatagagtattaatcaatatccatactggtaaaataagttctaaaactcattccccaaaacctgctta

SEQ ID NO: 13070 - DNA, 595 bp, Homo sapiens
  MAP TO CHR11.3; EXPRESSED IN HEART, SIGNAL = 1.8; EST_HUMAN HIT: BF091962.1, EVALUE 0.00e+00; SWISSPROT HIT: P38138, EVALUE 1.00e-10; NT HIT: gi14773525, EVALUE 4.00e-76
gtgctgggtgaggagagaagagacgggtagtgaggagcaaaagccagctgtcatctggtgcaagttccctaggccctcagtctctgggctgttttccctctttccaccaactctcctctctcaggcccttaccacataaaggccatagatgttatgcacatcccggtgctcccagcccccataatgctgggcatccttgagcatggtgacctcaggaccattgaacacagatggttcgttcatgtcattccagacaaagaggttgggagctgagccctgggaacgtgggcagaaaatggggacagaaggacagaggggaggaagaagacaaacagtgtcagagaagagagctcctaggaatctaaaaagatgcatttttcagggccctccccggatcatcaaggccccctgatatgttgcaggcaatcaaccatagaagggttggcaagccgagagagattcagggaggcaggtggaacagacagacgcaggtcatggggagaggccttccctacctcataattgtcatagctgaacatgttagcccaccaggccctcatcgtgggattagtgaagtcagggtaaccagctgagc

SEQ ID NO: 13071 - DNA, 587 bp, Homo sapiens
  MAP TO CHR1.3; EXPRESSED IN LUNG, SIGNAL = 0.5; EXPRESSED IN HEART, SIGNAL =   1; EST_HUMAN HIT: W92704.1, EVALUE 3.00e-34; NT HIT: gi14730483, EVALUE 0.00e+00; SWISSPROT HIT: P47179, EVALUE 7.60e-02
ttccctaaaacagcccaataagataggttgagtatttgccattttacaacaaattaaaggacatagtagagattagcaatttgcttagaaacacacaactagtcaatgataaagatgggatctttatgtcactattaaagaaaaaaaaatattctaaaataacaagatgtatattttttctccagtaaaagataacaagaagaacagaactaaaaagaaacctacccccaaaccaccagttgtagatgaagctggaagtggattggacaatggtgacttcaaggtcacaactcctgacacgtctaccacccaacacaataaagtcagcacatctcccaagatcacaacagcaaaaccaataaatcccagacccagtcttccacctaattctgatacatctaaagagacgtctttgacagtgaataaagagacaacagttgaaactaaagaaactactacaacaaataaacagacttcaactgatggaaaagagaagactacttccgctaaagagacacaaagtatagagaaaacatctgctaaagatttagcacccacatctaaagtgctggctaaacctacaccca

SEQ ID NO: 13072 - DNA, 516 bp, Homo sapiens
  MAP TO CHR17.3; EXPRESSED IN HEART, SIGNAL = 0.83; EST_HUMAN HIT: AL046893.1, EVALUE 1.80e-01; SWISSPROT HIT: Q09199, EVALUE 2.00e-18; NT HIT: gi6679930, EVALUE 7.00e-31
tgtgggtggaataagaagccaagaagaacggaaccctgcgagctgagagatgggaatgtttccagaaatgggtcctttcatccttggggccctaggacttgggggattgggggcgggggcgctagcacagtgactccctgcagagccagccctacactgtcaagggcaccctggtgcttctcccctcacccttatgtgctctgccctggctcctggcctgggtatgtatgtatctttccagggagatattttccaatccctgcattgagcatcattctacctcacccaccctaggtcaccctgacagcttctctggggacactgaacacccttgctgatgtcccagacagtgtggtgcagggcagaggccagaagcagctgatcatttctaccagtgaccggaagctgttgaagttcattcttcagcacgtgacatacaccagcacggggtaccagcaccagaaggtagacataggtgagagcctgtccttggagtgcaaaatgcttagggatcca

SEQ ID NO: 13073 - DNA, 531 bp, Homo sapiens
  MAP TO CHR15.3; EXPRESSED IN LUNG, SIGNAL = 8.2; EXPRESSED IN HEART, SIGNAL = 1.5; EST_HUMAN HIT: BI600653.1, EVALUE 0.00e+00; SWISSPROT HIT: P04798, EVALUE 4.00e-99; NT HIT: gi14754869, EVALUE 0.00e+00
tcatgcttttcccaatctccatgtcggccacggagtttcttctggcctctgtcatcttctgtctggtattctgggtaatcagggcctcaagacctcaggtccccaaaggcctgaagaatccaccagggccatggggctggcctctgattgggcacatgctgaccctgggaaagaacccgcacctggcactgtcaaggatgagccagcagtatggggacgtgctgcagatccgaattggctccacacccgtggtggtgctgagcggcctggacaccatccggcaggccctggtgcggcagggcgatgatttcaagggccggcccgacctctacaccttcaccctcatcagtaatggtcagagcatgtccttcagcccagactctggaccagtgtgggctgcccgccggcgcctggcccagaatggcctgaaaagtttctccattgcctctgacccagcctcctcaacctcctgctacctggaagagcatgtgagcaaggaggctgaggtcctgataagcacgttgcaggagc

SEQ ID NO: 13074 - DNA, 587 bp, Homo sapiens
  MAP TO CHR15.3; EXPRESSED IN HEART, SIGNAL = 0.8; EXPRESSED IN FETAL LIVER, SIGNAL = 1.1; EXPRESSED IN LUNG, SIGNAL = 2.1; EST_HUMAN HIT: AW896010.1, EVALUE 3.00e-65; NT HIT: gi14754094, EVALUE 2.00e-65; SWISSPROT HIT: P34664, EVALUE 1.00e-05
gctttaacgattgtcgcctcaggccaaaattattcatgctcccttcttgtgattattttgaaaccaggcgctgacatcatgtattagttcatccataagcattttagtacctatctctaaaaggtagactctttgtaaaaaaaaaataactacaatgtagtatgacatggctaggtgcagttttaagttcaggtttttattggtgaagaggaagatggatcaggtgatttctgttctgtcctagctttcagtgccaatggaaaagatatcattgtcgactttccccagcagtctcactggactgggttgctatcagaaatggagttggtacccagtattcatcctggggttacgtgagttatttttatggttgctagatttgctttgggacgaatggttttctgttgaattaagtttaataaatgacctttcttaactcagttgctattttacaaataggtgtgatggatgtcagatgtttcctatcaatggatccagattcaaatgcagaaactgtgatgactttgatttttgtgaaacgtgtttcaagaccaaaaaacacaataccaggcatacatttggcagaa

SEQ ID NO: 13075 - DNA, 512 bp, Homo sapiens
  MAP TO CHR4.3; EXPRESSED IN LUNG, SIGNAL = 1.7; EXPRESSED IN HEART, SIGNAL = 1.9; EXPRESSED IN FETAL LIVER, SIGNAL = 1.6; EST_HUMAN HIT: AW951558.1, EVALUE 1.00e-82; NT HIT: AF233749.1, EVALUE 0.00e+00; SWISSPROT HIT: P19687, EVALUE 1.00e-24
gtcatggatttatggctgggccacaaacacctcaggcaagtcattcttaggaggctaataagcagtgtaaaaaagttaaagtgaggatgataaaagttatcacgtttcttttttccttacgactaaggaagaaaaaagttatgaagaatgaatcaaatcagtggggcaaatggcaattgtatataaataaaaacaagagattttaggtgtttaacataattactacctgtaagttgttgggctgacattgatttttcgtggtacactgcaggactcaaatttgttagccagagtgacattgtttccaaaaagacagtaacggggcattttaactccaacgacgccagcaaaaactgatccagagtgcagtccaattcgcatctgaaagcaaaaaataacatgatgttcccagtcactggtaaaacacttcctactcgtcagtgtcgtttgaataccgtctaaattattttaccattcaccctcaggacaccacccctttcctcaaaaccttc

SEQ ID NO: 13076 - DNA, 564 bp, Homo sapiens
  MAP TO CHR4.3; EXPRESSED IN LUNG, SIGNAL = 0.59; EXPRESSED IN HEART, SIGNAL = 0.57; SWISSPROT HIT: P30968, EVALUE 4.00e-40; EST_HUMAN HIT: AA334939.1, EVALUE 2.00e-01; NT HIT: AF001952.1, EVALUE 0.00e+00
tgaggtcagaaaaggcagagattaatttagaagcttatgaggaagagaaaatattttagtatttttcctgaagacttttccttaataattgaggctctgaagactgagtttctaaaagaatgataacttaagtgtaaatcctactttgtttgtatgtaaacatgctccaacatttgtgttaatcattcccagatggagagattcattaccttacccttcttcatatgacttcttgtgtagtctatcaatcacagagaaaaatatccatagataagtggatcaaagcatgggtttaaaaaggcaaagagaaagaagaagtgatttactgggtctgacaacctgtttaacatttcaggatcaaaccaataccaaattcctaggacatagtagggagtccagcagacagtaaatgaagtggcaaatgcaaccgtcatttttagagtcttcagccgtgctcttggtatattgttcttggactgattcagttgtagttctgttggatagagaaaagagcaggtgtttaaagatcagttttcttacaaaaccaaagtggacaaaaaggaa

SEQ ID NO: 13077 - DNA, 547 bp, Homo sapiens
  MAP TO CHR18.3; EXPRESSED IN FETAL LIVER, SIGNAL =  31; EXPRESSED IN HEART, SIGNAL = 6.4; EST_HUMAN HIT: BG563016.1, EVALUE 0.00e+00; NT HIT: U02523.1, EVALUE 0.00e+00; SWISSPROT HIT: Q05474, EVALUE 3.00e-33
gcgtagcctgacctgtcttcttcttcctcttcttcttcttcttctcctgtttggccaccttaggagtctgacctctcacttttccagcacgggccagggaaccatggactttacctccaagcatgcggcctgctacttccagggcagtcaaggcctccacgccgcactggcccagagtggcctcatcctccagcggtgcacctgccaggagcacgacttgatcttccggggcaatgccctccagtgaggctacatgagccttgatctgggcgaccatttcctggccagtcacctcaagggtgtgtagctcctgggcgcggacaaagagctgcatattggtgactgaaccgcggtcccagctgccactactgcgaagatggagtcgagaaagaggaagaagcgagggcgcgtccgtacagaccgcgggctgcatgtcacgtcactgctcagtcatatttatacctacttttaattacatgtggactaagaggtggtttatggagaaatttccaggtaaaaggcagtaactttggggttgtcaggtcat

SEQ ID NO: 13078 - DNA, 520 bp, Homo sapiens
  MAP TO CHR4.3; EXPRESSED IN LUNG, SIGNAL =   1; EXPRESSED IN HEART, SIGNAL = 0.7; EXPRESSED IN FETAL LIVER, SIGNAL =   1; EXPRESSED IN ADULT LIVER, SIGNAL = 0.38; EST_HUMAN HIT: BI094196.1, EVALUE 0.00e+00; SWISSPROT HIT: Q16589, EVALUE 7.00e-37; NT HIT: gi16158918, EVALUE 1.00e-113
tgcttacctgaagagtgggggctttaattcttagctcttagtgtaggtgcttgctttctctgatgtcttacactattccagttttgagtataataaactcagtaatatttagtctagggaagtttaattagtcaaggaacctgcttacctttcactttcatcaaaacaacccccctcaggtatcgttggcagctcaggaacactatagtagctgttgtggaggttctgggctgtgcgccttgaaacgatccaaaccaacttcttaagatctggtttgcaacattcaggagaagaatactcggctaggcatttagaaaccaactctctccagtagaagaactcagtgtcattaatctgaaaaaaaaatattttaagaggttacggcaatgtctcccaaatcttgctgcaccttggaatcactaggtgagctatgaaaaatatatatatatagatgcctggctcccactacccgcttccacccctggtattctgatttaattgacaatgagtgcaacatggg

SEQ ID NO: 13079 - DNA, 559 bp, Homo sapiens
  MAP TO CHR19.3; EXPRESSED IN HEART, SIGNAL = 0.78; EST_HUMAN HIT: AV655744.1, EVALUE 1.00e-123; SWISSPROT HIT: Q62419, EVALUE 2.00e-26; NT HIT: gi15305902, EVALUE 6.00e-87
gtaggtgccgatctgtcctccagctcccttgaggcaccaccccggcctcccaagggcataggtcttctcaggatgtgacaccccgagctactcacgtcagtctccaggaggttgtgcatgctggtttctgccacctccttggactcctcgaacttctccagcgcctggcgtagctcctcatcggggatcttgccctgccgcttcttcttgtagtcaaagtccaggcggcggccctccagtttcttcaggtggtgctggagacgtgggggacatgggtcacaccagtagcggccagagggccgccccacgcatggctttgacccactgtccctgcaccactggggatcctgcctgcctgagacccagagggcagtgccgaggctggaggtgagggtggcaggaatggggctgccccatccggcagggggaagggacaggccccaggctggcgcaggagcagcacctggatctccttcaggtctttctcgcacaggttctggagggggtcaatgaagttctgcttgacctcgatgtccagggagtccttcacctctgccag

SEQ ID NO: 13080 - DNA, 524 bp, Homo sapiens
  MAP TO CHR14.3; EXPRESSED IN LUNG, SIGNAL = 2.2; EXPRESSED IN HEART, SIGNAL = 1.4; EXPRESSED IN ADULT LIVER, SIGNAL = 1.1; SWISSPROT HIT: Q07890, EVALUE 3.00e-22; EST_HUMAN HIT: BG696716.1, EVALUE 0.00e+00; NT HIT: L13858.1, EVALUE 0.00e+00
attctgccttggtggaacagggggagctggaggatgagcaagattattctgactagaactgagcacatagcatcgacgcggtacccttggagagggtgtgctaggaggagtgcttggcgaatttggacacgtactaatgtctctgagccagtctgaatctctgtgaagatgccccagtggaggtggctgaagattaaatggacagtttataaagtgttctggaggccgaaggggaactggtggaggggtatcaggaagaggatctcttggtggtggcggaggtggactatgcagaggcccatcaaatgcaccagtaggaacaggaactctgggttttacctttggaggaggaggctgtctcggtggaatagcaggaggatcatcatcagatttcatatttccctcaaaaaaaaaagtaattaaattatacctctattctgaaaaattaaaaaaaaaaatttttaagtctgaaaaattcttacttgtcaagttaaattcagaggctcaaaataaactaatctggg

SEQ ID NO: 13081 - DNA, 527 bp, Homo sapiens
  MAP TO CHR11.3; EXPRESSED IN HEART, SIGNAL = 0.94; SWISSPROT HIT: Q08262, EVALUE 4.90e+00; EST_HUMAN HIT: BE247170.1, EVALUE 0.00e+00; NT HIT: gi14773485, EVALUE 1.00e-100
agtgcatccccatcctacacatgccccgcactcacttctgggaccactcgaggttcatgccagactgggtagagaatgcttgcaacatttcctgctgctctggagagagggtgggcaccgggctggaggaaggcgtgggtgcaggcatagcgaaggctctttggatctcttcagaactggcattccgcacaaatagctcatcatttacaatacatagccttgaggacaaagagcacttaaaaagctagacagagataacatcatcctcccaacatcattcctattctctgattctttcaatatccacaaggtccccctcccactcttagctattgttaccttttatcatttatcccctcccatggaatcaatgtttggaaggattatctactaaacacactagggttctcccaacgcatggactttagctcttttaattcatcctcacaacaaacttaggaaatgaatattgttatatgaattttcagatgaggcagcagcctacttgctagaagtggtggagccag

SEQ ID NO: 13082 - DNA, 511 bp, Homo sapiens
  MAP TO CHR12.3; EXPRESSED IN HEART, SIGNAL = 0.67; EST_HUMAN HIT: AI123342.1, EVALUE 0.00e+00; NT HIT: gi14784175, EVALUE 0.00e+00
tcccagtttggtagctgaggaggagtctaagaaaacaagccattcctcagtatccctgggaaagaaggggtgagaggacacagatatcaccaggccctgggtgactgcattgctggggccatgcagggcctagctctccaccaagggaaagtgctgattttccttgtcatggtcctggccttgctcccatgctcgtcctccagttttcagaagtcgtccagttccaagaatggctccttcctttagttcactaacattttcacttaggggtgaaggccgcttaccctgaaaacggcagtgtatgagttggggggagttgctgttcagaagagggaagatctgggtaaaagggtctcccaccctctacgttggatatcctagtaacagcttgcactttctcttcctttacctgtcgtagtgtcagggtgccaggggagttgtcatcctgcaggatggtgaggggggatctccctagtaccttgctgctgtttggtttccatctattgcgcat

SEQ ID NO: 13083 - DNA, 592 bp, Homo sapiens
  MAP TO CHR5.3; EXPRESSED IN HEART, SIGNAL =   2; NT HIT: gi14728232, EVALUE 0.00e+00; EST_HUMAN HIT: AL551230.1, EVALUE 0.00e+00; SWISSPROT HIT: P08571, EVALUE 3.00e-98
cttggctggcagtcctttaggcacctgttccagcccagcgaacgacagattgagggagttcagggcgctggaccacatgcatctcggagcgctagggtttacggtggcgcgcagcgagttgtggctgaggtctaggctgtggggctgcacacctgccgccgccagtgcgcgcacgcctgtgggcgtctccattcctgtgttgcgcagcgctagattctggatggccgggaacttgtggggacagagagccgccatcagtccgcgttcgcccagtccaggattgtcagacaggtctaggctggtaagggccgggaaggcgcgaacctgttcgcaggaaaaggcaggcgagtgtgcttgggcaatgctcagtaccttgaggcctggcttgagccactgctgcagctcggcgagccaagaacgccctgtcgcccacgacacgttgcgtaggcgcaagctggaaagtgcaagtcctgtggcttccagaggcagcggaggcatggtgccggttatctttaggtcctcgagcgtcagttccttgaggcgggagtacgctagcacacgcagggcgcctaccagtagctgagcaggaacc

SEQ ID NO: 13084 - DNA, 531 bp, Homo sapiens
  MAP TO CHR6.3; EXPRESSED IN HEART, SIGNAL = 0.56; NT HIT: gi13642849, EVALUE 2.00e-74; EST_HUMAN HIT: BF951762.1, EVALUE 0.00e+00; SWISSPROT HIT: O95677, EVALUE 1.00e-22
ggcttgtagcagagcctgagctcctgacattcagactgttgctttttcctatattgttaaaattatattgtggataaagaggattacttcctggatattatagggtttcactgaatctaggctgtctaaattaatacacagtctttgttgccacagtaatgctatttttctgatatttaggccctatccacacattctttctacaccagcagctcaaacaatgtctgcctatgcaggccagactcagtattcggggatgcagcagccagccgtctacacagcctactcacagacaggacagccctacagcttgcccacttacggtatttcacatcttctgttttcttctttggttataggcaggtaatcctgctggctggtagctttgtattctattgtaggttacaacttagaaggaaaatcatcttactaattaaatggtttacacattcaattttctgaacagatttgggtgtgatgttgccagccatcaagacagagagtggactttcccaaactcagtccccatta

SEQ ID NO: 13085 - DNA, 523 bp, Homo sapiens
  MAP TO CHR16.3; EXPRESSED IN HEART, SIGNAL =  13; SWISSPROT HIT: P04075, EVALUE 2.00e-15; EST_HUMAN HIT: BI910362.1, EVALUE 1.00e-112; NT HIT: X12447.1, EVALUE 0.00e+00
atgggaattaggggatcagcctgccactcccaaccctgcaccctccacccattctgtctcctgcccgcaccagtggactcatctgcagccaggatgcccttgccaggtgccacgatgcggtgagcgatgtcagacagctccttcttctgctccggggtcagtgctggatattggtagggcatggtgctggtagtagcaagttcctggatacaggaaacagaggggaaggactagttagctagggtttcccatcatctcccgatgaccagggcccctctcctggaggtcagggaaatgttccctacctcccctgccccacacccagcaggccctggggcacttctggtccccagctctctcttacgcccaacttccctttgctaggcctgcccctgtacctttcctaactctgtctggtgctgggtgttgcccagctgagggtggagttgcccactggcaactgggggaaaggaaaaggccatagccatggacaggtgggtcatgttgaagctggacccttctg

SEQ ID NO: 13086 - DNA, 528 bp, Homo sapiens
  MAP TO CHR10.3; EXPRESSED IN FETAL LIVER, SIGNAL =   1; EXPRESSED IN ADULT LIVER, SIGNAL = 0.69; EXPRESSED IN BRAIN, SIGNAL = 0.54; EXPRESSED IN LUNG, SIGNAL = 0.68; NT HIT: AJ304804.1, EVALUE 0.00e+00; SWISSPROT HIT: P55201, EVALUE 2.90e-02; EST_HUMAN HIT: BF790486.1, EVALUE 5.00e-85
gcctggaaggagggatagaccttggttccttctttcttaagagggtcttcctgcccaccccaccctccccaccagcttagctcagaggtctcccaagccccccaaactctctgcccggcctggggggttgatgggccatcccgcgcagggccaagagcgcgtgcgcaagacgtccctggacctgcggcgggagatcatcgatgtgggcgggatccagaacctcatcgagctgcggaagaaacgcaagcagaagaagcgggacgctctggccgcctcgcatgagccgcccccagagcccgaggagatcgtaagggtcctggggaggacaccgcgagggggcggagggggagcccgggaggcttcggattgctgggacggcccgtgactgctgcgtccacatctgcagactggccctgtggatgaggagaccttcctgaaagctgcggtggaggggaaaatgaaggtcattgagaagttcctggctgacggggggtcagccgacacgtgcgaccaggtgatgctcctagc

SEQ ID NO: 13087 - DNA, 592 bp, Homo sapiens
  MAP TO CHR1.3; EXPRESSED IN LUNG, SIGNAL = 0.41; EXPRESSED IN BRAIN, SIGNAL = 0.55; EST_HUMAN HIT: W05330.1, EVALUE 0.00e+00; SWISSPROT HIT: P13789, EVALUE 3.90e-01; NT HIT: AY044273.1, EVALUE 0.00e+00
cccgtagctctcttcctgtgcagctgctgaaggcatttccagagcaacaggtcttccaggggcactcccagcttaaggggatgacgagacctcacatttgggaatcaggacctcattcaatcacgcagtcatttctcagtcagtggactcctgtgggccagcactgtgctgggagctaccctctcagaaagctccttgctgagcggagagaaagctgaactcacccataaagaccacaagcttcagcccagaatcagggtttccaatcctttcccctaatttgctttcttcctccctgctgtaaatcaggaagagagggctcgacgagaggaggaggagaacaggaggaaggctgaggatgaggcccggaagaagaaggctttgtccaacatgatgcattttgggggttacatccagaaggtaggtagggagcagcaggggttgccaggagatcctagtatagccctgaggaatgaggtgtccactgcagcaggtagactttaggtcaggtcccaggaagagattcccagctgctgtgggtggaagactgaggtctcctcatgcccagccctgagctggttttcagcctgac

SEQ ID NO: 13088 - DNA, 539 bp, Homo sapiens
  MAP TO CHRX.3; EXPRESSED IN BRAIN, SIGNAL = 0.36; EXPRESSED IN LUNG, SIGNAL = 0.51; SWISSPROT HIT: P04000, EVALUE 5.00e-30; NT HIT: AF158971.1, EVALUE 0.00e+00; EST_HUMAN HIT: W21948.1, EVALUE 2.00e-63
gctcaaagccctcatctgtctgctctccccatagggatcacaggtctctggtctctggccatcatttcctgggagaggtggctggtggtgtgcaagccctttggcaatgtgagatttgatgccaagctggccatcgtgggcattgccttctcctggatctggtctgctgtgtggacagccccgcccatctttggttggagcaggtaagggtgcgaggacgcaagatggagtgggcagggtcagactctgtgaccttaaggcaaatcacttcctttctctgggcccctctgagcgtgcaatgtctatcaatgtatgaatgtggctgcaacataggaaaggctctgtggtccccgaacctctggaaacatatttatcccaagcacgatcaggtcacaggcgcacacggagctcaggccatcagcacagctgtcagtgaacgcatagcgtgtttgcattccaggtctctttcttgcacacgctgccgcaccacgccccccacctttcagaggctgcttgggtcatagatccacctgggccta

SEQ ID NO: 13089 - DNA, 540 bp, Homo sapiens
  MAP TO CHR10.3; EXPRESSED IN BRAIN, SIGNAL = 8.8; EXPRESSED IN LUNG, SIGNAL =  21; SWISSPROT HIT: P16632, EVALUE 1.00e-31; EST_HUMAN HIT: BI821673.1, EVALUE 0.00e+00; NT HIT: U12202.1, EVALUE 0.00e+00
attttgaacccccgtactccacctgtgcattttatgaaataactttttctcttaatcctttcagagttgtatcccagattgcttggtcttgccctttttaccacactcacaacacaacgctattgaaaaaataggtcttcaggagctgatcaacaaatgaaaagacacctactcttgcaagtctatgtttgggttcatttttctttgcataatccagggaatcataaatcatgccaaagccagttgtcttgccaccaccaaaatgagttctgaatccaaatacaaagatgacatccggtgtggtcttgtacattttggctagtttttcccgaatttctgtcttaggcactgtcgccttcccggggtgaaggacatcaatgacctaaaaggagatatcaagtttagcattcagtatgataaaatacatctttagagtaaaggacaattaagcaaagattgatgtgcccttccttaccatttgtttcctctgaagtagtcggttggtcatgaactttctagtgcggatagttacggtgtcgt

SEQ ID NO: 13090 - DNA, 581 bp, Homo sapiens
  MAP TO CHR3.3; EXPRESSED IN ADULT LIVER, SIGNAL = 0.46; EXPRESSED IN BRAIN, SIGNAL = 0.38; EXPRESSED IN LUNG, SIGNAL = 0.74; EST_HUMAN HIT: BI517655.1, EVALUE 1.00e-30; SWISSPROT HIT: O76082, EVALUE 9.00e-03; NT HIT: AB026898.1, EVALUE 0.00e+00
accctacgtgagtgtctgggccctggagccttcagccatagggtgaggcccaggggcctgggagggccacagccccaaacggcctgtggaggtcttttcaggtaccccacatctgaagtggtcgcactggtgcttcctgtgttggcactgaggcccagcccccacagggtggcatctaggagtaatggggagtgaatggcagggattagccctgtctcaacctctccattgccacagtgacagaatgggtggggccctcatggaggacgcaggccgtggtcctggcccagtgcaacttctccctcgggcagatggtgcttgcgggactcgcctacggtttccgcaactggaggctccttcagatcaccggcactgcgcctggcttactgctcttcttctacttctggtgaggaaaatacatgccaggagcaagcccccccaggttagttgtgttgtggtggggttgcagtgcagcacccatgttcataggacagtcagaggtgagtctgggagagggagcctgtcacagctgggtgtggggttcagtttgcactggaacaagctggaaagctccctaggac

SEQ ID NO: 13091 - DNA, 597 bp, Homo sapiens
  MAP TO CHR19.3; EXPRESSED IN LUNG, SIGNAL = 3.5; EXPRESSED IN BRAIN, SIGNAL = 1.6; EST_HUMAN HIT: AI828447.1, EVALUE 0.00e+00; SWISSPROT HIT: P43330, EVALUE 9.00e-18; NT HIT: gi14761177, EVALUE 0.00e+00
gcagatggagaaagtgaggcctcgatggggcagagccagggcctctccacttgctcaggggtcctgctcccaccattcagtccgataccagctgcctcccccaagccctcctgaatccaccccactcccaaggctctggaaacagataccactagaaaaaaacacagagctttattattctcaacaccaatggcagcggtcttcataggacagaggagtgagttctgtcaacagacaggcggcccctacttgccggcgatgagcgggttccgcaggaccacgatgactgagtccccgcgcaggaacatcttggagatgtagcggtctttgttgactggcttggacttcttcttgcccttgccactcttgggtacctcagtccacatctccttcacgttctccagcaccatgttgcagtgcctggtggggaacagggaggggaggcactgggcgtgaggggcgtgcctctgacagtgccccctactgcctgctgctcgccccctccagcagcatggcttggggaagggtgcaggtgctaggccgggatgaccaagctgccaaagcaactctgccagtccttaggttgaggctgaggca

SEQ ID NO: 13092 - DNA, 562 bp, Homo sapiens
  MAP TO CHR3.3; EXPRESSED IN ADULT LIVER, SIGNAL =  15; EXPRESSED IN BRAIN, SIGNAL =  62; SWISSPROT HIT: P53475, EVALUE 6.00e-22; NT HIT: gi11038618, EVALUE 0.00e+00; EST_HUMAN HIT: BI253675.1, EVALUE 0.00e+00
accctgcacagatcggatactgctggccacacagactcaccaagccacagacttgtcttccacaagcacgttcttacaacagccacaaagtgaccaagccacttgtactaagaaatcaaagatatgtataggcattctacaaataccaaggggtaaaagttaacttgaatacaaggtcaaaatcagcaacaagttctacaatcaagtgctgatatcagatacaagcttcaaggacaatttctttttgaaggcttattccagtttcatgaggctagcatgaagtgtatgcatttgccaggggcaatttatacttctgaattaacccatgcagcaaatgctacacatctgcttacggtccatttagaagcatttgcggtggacgatggaggggccaacttgttgtactcctgcttgttaatccacatctgctggaagatggacagtgaggccaggatggagctgcagatccacacagagtacttgcgctctgggggcacgatgatcttgatcttcatggtgctgggtgccagggcagtgattgccttctgcatcctgttggtga

SEQ ID NO: 13093 - DNA, 583 bp, Homo sapiens
  MAP TO CHR19.3; EXPRESSED IN FETAL LIVER, SIGNAL = 5.1; EXPRESSED IN BRAIN, SIGNAL =  11; EXPRESSED IN LUNG, SIGNAL = 8.1; EST_HUMAN HIT: AV755078.1, EVALUE 0.00e+00; SWISSPROT HIT: Q05481, EVALUE 1.00e-118; NT HIT: gi14755315, EVALUE 0.00e+00
ctggtcctcagcccttactgaacataagagaattcataccagagagaaaacctacaaatgtgaagaatgtggcaaagcatttagccagccttcacaccttactacacataagaggatgcacactggagagaaaccctacaaatgtgaagaatgtggcaaagcttttagccaatcctcaacccttactacacataagataattcatactggagagaaaccctacaaatgtgaagaatgtggcaaagcttttaggaaatcttcaactcttactgaacataagataattcatactggagagaaaccctacaaatgtgaagaatgtggcaaagcatttagccaatcctcaaccctaactagacatacgaggatgcacactggagagaaaccatacaaatgtgaagaatgtggcaaagcttttaatcgatcctcaaagcttactacacataagataattcatactggagagaaaccttacaagtgtgaagaatgtggcaaagcatttatatcatcctcaaccctaaatggacataagagaattcatactagagagaaaccctacaaatgtgaagaatgtggcaaagca

SEQ ID NO: 13094 - DNA, 533 bp, Homo sapiens
  MAP TO CHR18.3; EXPRESSED IN BRAIN, SIGNAL = 0.35; SWISSPROT HIT: P36051, EVALUE 6.00e-13; NT HIT: gi6912499, EVALUE 7.00e-65; EST_HUMAN HIT: AW238622.1, EVALUE 1.00e-64
cttccatccaacccaaattctttcaataacacaggataatgaaatactaaagtttcaattctggagtcagtaccagtgggtattcatgtcagcaaagcatgctaaaacatttgtccaaaatatctcaaaacataccttcactttgtgacatgattaagtggtaaaggactaatatttacttgacaaatttttcatttcataagattgtccaaatagacaatacctttggcaactgcactgacatcttcataaaacccagctatcagagctacatgacctggccgagattctgttggcacacgtgtatgagatatgccccagctgccttcatgcattatgatattcctaaaagatattaaagacaaatagttaacacagactatgattagatactctcacataaagctttagaaacataagattattacagaaggaatcaaaagcaaaaaacttaagtcaaaacttaagaaggaaaggaatttttcaaattccaggtgagcccattcctagcatctaccagctgaatgcagcag

SEQ ID NO: 13095 - DNA, 564 bp, Homo sapiens
  MAP TO CHR19.3; EXPRESSED IN LUNG, SIGNAL = 5.6; EXPRESSED IN FETAL LIVER, SIGNAL = 2.8; EXPRESSED IN ADULT LIVER, SIGNAL = 3.3; EXPRESSED IN BRAIN, SIGNAL = 9.2; SWISSPROT HIT: Q14938, EVALUE 3.00e-95; EST_HUMAN HIT: BF058855.1, EVALUE 0.00e+00; NT HIT: gi16176317, EVALUE 0.00e+00
tccttctctctttccccctcatcccgtcttcccctcctcccgtcctccctcgccccgcatgctcccggcttgccgcctgcaggatgagttccacccgttcatcgaggcactgctgcctcacgtccgcgctttctcctacacctggttcaacctgcaggcgcggaagcgcaagtacttcaagaagcatgaaaagcggatgtcgaaggacgaggagcgggcggtgaaggacgagctgctgggcgagaagcccgagatcaagcagaagtgggcatcccggctgctggccaagctgcgcaaggacatccggcccgagttccgcgaggacttcgtgctgaccatcacgggcaagaagcccccctgctgcgtgctctccaaccccgaccagaagggcaagatccggcggattgactgcctgcgccaggctgacaaggtgtggcggctggacctggtcatggtgattttgtttaaggggatccccctggaaagtactgatggggagcggctctacaagtcgcctcagtgctcgaaccccggcctgtgcgtccagccacatcacattggagt

SEQ ID NO: 13096 - DNA, 556 bp, Homo sapiens
  MAP TO CHR17.3; EXPRESSED IN BRAIN, SIGNAL = 1.3; EXPRESSED IN LUNG, SIGNAL = 1.2; SWISSPROT HIT: P36007, EVALUE 1.00e-03; EST_HUMAN HIT: BE735164.1, EVALUE 0.00e+00; NT HIT: gi14770798, EVALUE 0.00e+00
taaggtgaggctccagcaagaaaagaaatagcaaagcatggtgtaacttcttaggcagaagaaacttcccttaggagtagcaagtgacccacgggaacctgactaggtaacttcatgacatgggagggtaccctagatgtattaatgacaaccctcttgacagaagcagagtcagaattaaagaaaagctttgggaagcgtgtgtacacagtgataagaaaattcaaactggacacgtattctcatctgaactttataggtaaaccaactagactcccctttcactaattcctactcccttccatatcaacagtgtgcaacccagctggtgtgggagaggatgaaactactcattgaacctacagctggtgttggagtggctgctgtgctgtctcaacattttcaaactgtttccccagaagtaaagaacatttgtattgtgctcagtggtggaaatgtagacttaacctcctccataacttgggtgaagcaggctgaaaggccagcttcttatcagtctgtttctgtttaatttacagaaaaggaaatggtggga

SEQ ID NO: 13097 - DNA, 599 bp, Homo sapiens
  MAP TO CHR6.3; EXPRESSED IN LUNG, SIGNAL = 0.47; EXPRESSED IN BRAIN, SIGNAL = 0.69; EST_HUMAN HIT: BE260488.1, EVALUE 2.00e-75; SWISSPROT HIT: P51870, EVALUE 1.50e+00; NT HIT: AB040292.1, EVALUE 1.00e-88
aggatgccgtcagatcaaaggccataacgttcacaaaagggttttaaaaagcaaaagacgtgacacaaaggtcaagaggtgatcactattagctggtctatcttctgacttcctgagccctagttgggtcactgcctcggagcagccttagataagctggggtctgtttctaaggcgcccagggacaagcattccattaattcctcccaggtctgggtactaatctggaatctcgcctcttgaggccgttctccccttagacaaagatgactccagggataatgagaggtcctctctcaccctcccggcctgatgctgagaatcccagaatccttgagtttgtcccagaccctgggcatcagcagcacacggaaagaaggacaagtccttgttccaaccaacctgggaacctggattctggtcgtttcccagcccccctggggtgtcactcacgctgtcatccaccaggtaggcattgatgaagtgggccagcaggttacagccccacaagaaaaccacatcgcccaggaggtgagggattaatccactaaaaaacaaggtaagcagagatgagcaggagagggagaggagcagttcct

SEQ ID NO: 13098 - DNA, 569 bp, Homo sapiens
  MAP TO CHR3.3; EXPRESSED IN LUNG, SIGNAL = 1.3; EXPRESSED IN ADULT LIVER, SIGNAL =   3; EXPRESSED IN FETAL LIVER, SIGNAL = 1.2; EXPRESSED IN BRAIN, SIGNAL =   6; NT HIT: M16649.1, EVALUE 0.00e+00; SWISSPROT HIT: P05090, EVALUE 3.00e-18; EST_HUMAN HIT: BI544751.1, EVALUE 7.00e-63
tttactcagcattcaccccctgcccgcacatcccatcctagtcacagattctcattgcaatcaatctcttgcccagttgccactgggaacaatgaggcccattttgtctggcttccccaggacagggctctgcgtctgcacgacaatggggaagaagttgcaggtccccagagaaccacagggttttgctctgcttgttgtctctgcagtatctcggaagatggtacgaaattgagaagatcccaacaacctttgagaatggacgctgcatccaggccaactactcactaatggaaaacggaaagatcaaagtgttaaaccaggagttgaggtgagtggctgtgggcgtccggggccaggcctgcggagtgctgatgcagagtgactgggtgtccggcagcctgggtcagggaggatgggaaccttgctggatcgggactgcctgctcctagcaggaattgagaggaaagcgtttggcaggcaaggatggcaaggactaggatccacttatgcatttccatgaccacctgcggggcacaaactgacagggttcctgcactcactgcaaa

SEQ ID NO: 13099 - DNA, 599 bp, Homo sapiens
  MAP TO CHR22.3; EXPRESSED IN LUNG, SIGNAL = 1.4; EXPRESSED IN ADULT LIVER, SIGNAL = 1.1; EXPRESSED IN FETAL LIVER, SIGNAL = 1.2; EXPRESSED IN BRAIN, SIGNAL = 1.5; SWISSPROT HIT: P51691, EVALUE 5.20e-01; EST_HUMAN HIT: BE883386.1, EVALUE 0.00e+00; NT HIT: gi14776852, EVALUE 0.00e+00
acatttacatcctgcccagcgacaactctggacaagtcagtcccccagagtctccaactgtgaccacttcctggcagtctgagagcttacctgtgtcactgtcagctagccagagttggcacacagaaagcctgccagtgtcactaggccctgagtcctggcagcagattgcaatggatcctgaagaagtgaaaagcttagacagcaacggagctggagagaagagtgagaacaactcctctaattctgacattgtgcacgtggagaaagaagaggtgcccgagggcatggaagaggctgctgtggcttctgtggtcttgccagcgcgggagctgcaagaggcacttcctgaagccccagctcccttgcttccacatatcactgccacctccctgctggggacaagggaacctgacacagaagtgatcacagttgagaaatccagccctgctacatctctgtttgtagaacttgatgaagaagaggtgaaagcagcaacaactgaacctactgaagtggaggaggtggtccccgcactggaacccacagaaacgctgctgagtgagaaggagataaacgcaagggaagagagccttgtg

SEQ ID NO: 13100 - DNA, 506 bp, Homo sapiens
  MAP TO CHR1.3; EXPRESSED IN BRAIN, SIGNAL = 0.78; NT HIT: M73255.1, EVALUE 0.00e+00; SWISSPROT HIT: P19320, EVALUE 5.00e-56; EST_HUMAN HIT: AL601445.1, EVALUE 0.00e+00
ttgacagtcattctatcccaggtgacttaaagctgtcatttttaggcctttacatttaataaagcttagctcaatttttccttgaatatcaagaataaaaatcgtttttgcttgcgatttgcagcattccctagagatccagaaatcgagatgagtggtggcctcgtgaatgggagctctgtcactgtaagctgcaaggttcctagcgtgtacccccttgaccggctggagattgaattacttaagggggagactattctggagaatatagagtttttggaggatacggatatgaaatctctagagaacaaaagtttggaaatgaccttcatccctaccattgaagatactggaaaagctcttgtttgtcaggctaagttacatattgatgacatggaattcgaacccaaacaaaggcagagtacgcaaacactttatgtcaatggtaagtacatatgtgaggtatctacagtttaatacctgtctctttatcgtgtttgccaggc

SEQ ID NO: 13101 - DNA, 535 bp, Homo sapiens
  MAP TO CHR11.3; EXPRESSED IN LUNG, SIGNAL = 0.48; EXPRESSED IN BRAIN, SIGNAL = 0.4; NT HIT: M54913.1, EVALUE 0.00e+00; SWISSPROT HIT: P01225, EVALUE 5.00e-29; EST_HUMAN HIT: BI033915.1, EVALUE 3.00e-86
ccctgacccaaaaattgaagaaggacaaggaaaaatgttgttccaagaaacaaagatgtaagtaaaaaggcataaggaaggaaaaaaatcttttgaagcaaaatgtgattgaggaggatgagcagaccaattatttttggtttggtcagcttacataatgattatcgttctttggtttctcagtttctagtgggcttcattgtttgcttcccagaccaggatgaagacactccagtttttcttccttttctgttgctggaaagcaatctgctgcaatagctgtgagctgaccaacatcaccattgcaatagagaaagaagaatgtcgtttctgcataagcatcaacaccacttggtgtgctggctactgctacaccagggtaggtaccatgttttgctggaagcaagggtgctgaaggtctgtattaggccggtttcattagtttctactttatcaatattttatgtattctaagtaacagccatgagtcctttagccaagactgtctgtgttgtgattggggttaatgaccacg

SEQ ID NO: 13102 - DNA, 594 bp, Homo sapiens
  MAP TO CHR15.3; EXPRESSED IN FETAL LIVER, SIGNAL = 2.1; EXPRESSED IN ADULT LIVER, SIGNAL = 1.7; EXPRESSED IN BRAIN, SIGNAL = 3.1; SWISSPROT HIT: P37108, EVALUE 4.00e-16; EST_HUMAN HIT: BI823349.1, EVALUE 0.00e+00; NT HIT: gi14749251, EVALUE 1.00e-60
  unsure 479
  unsure 515
  unsure 531
  unsure 562
  unsure 564
acagggcaaaagggaaaaacaaataaaagcctggttcagaaacgccccatcctctgttaagttcaagtctttacatttcaaaagacagccttagaaattaagctcaccacagtgctgatcttcttcttcccatcggtagctcttaacagacacttgttgtctgcgggctcaaagccctccacagtacccttctttggaatgggtttggttcgaccgtcatctgaaggaaaaaatgcatcctggtgaacacggccgcgtacgtggctgagcggcagacaaacagttaaaacagaggagtggggtaagtgatgacctaacccagccccgctgctctagttttgttaaacacctcatctgctatcacggtctggcgaaaccctggagaaactattatttccacgacggaaacatgtaatatcgaagcacgttaaattccactcaaagtggcggcgtctgggatccctgacaaagagccctgngctgcttggggcccattgttaccagaagcaacctangcggctcagtgctggngactgagccagctacaatccctactattttncnggcccgaagccccgaatgtgctcagtacaa

SEQ ID NO: 13103 - DNA, 521 bp, Homo sapiens
  MAP TO CHR8.3; EXPRESSED IN LUNG, SIGNAL = 6.3; EXPRESSED IN ADULT LIVER, SIGNAL = 0.87; EXPRESSED IN BRAIN, SIGNAL = 4.4; SWISSPROT HIT: Q92597, EVALUE 5.00e-38; EST_HUMAN HIT: AL527063.1, EVALUE 0.00e+00; NT HIT: D87953.1, EVALUE 0.00e+00
accgagttaggcgcagtatggcaggcagggggcgaaaaggggccggggaggagggggccactacagagatcagagtccgggggcggcagctgggcaggccgcctagcaggagacctccatggacttgggcccggcgctgttcccagcagcacccgagttgggggtgatgtccaggtgggccccctcgctggtgtgcgagcggctgcgggtgccctcgctggtgtgggagcggcttcgggtgccctcgctggtgtgggagcggctgcgggtgccatccagagaagtgacgctggaaccagaggctgtgcgggaccgcatcaggcgggtcatgctagccgagggcactaggggaacaagagacagccggttagagggcaggagactgccaggtgaggagccaggcatgcccgtccaccagccacatgcttttttacgtgccagccccagagaagacttgatccctgcagccatccagctgctgggcccccgtcctctccatgtccactcggagagagagatgg

SEQ ID NO: 13104 - DNA, 521 bp, Homo sapiens
  MAP TO CHR6.3; EXPRESSED IN FETAL LIVER, SIGNAL = 0.34; EXPRESSED IN BRAIN, SIGNAL = 0.27; SWISSPROT HIT: P81133, EVALUE 8.00e-15; NT HIT: gi4827001, EVALUE 6.00e-90
catcatggtcactcactgggtgggagggaaattcaggatcaatctcctcaaaatcacaaagaagttatagttctgacaacaaccagactctcatgacctttatattaatgcagtaaaccacaaaattatttcaaagttatactagcagttattttaaaaggaggcagatagtttagagaaccttccagatttatagaagttttagttattaaaactagataattcattccaaatagttttaatactttctcaacttcaagttcaaaccatgtcgccaaaaaaaagaaagttgcaaaacagcaatgcacttacctgagggtatggggaagtcctggattttgactttgagctggagagccgggatttggccccctttctgttgtcagtcatggtgggggtggagctgctggtataggagaaggctggtttggaggctgagatctgatccagggagagctgcagccctttgtattctgtgtctctgcagggtgggaggacaaagcccttaatcagccaccata

SEQ ID NO: 13105 - DNA, 554 bp, Homo sapiens
  MAP TO CHR17.3; EXPRESSED IN LUNG, SIGNAL = 1.1; EXPRESSED IN ADULT LIVER, SIGNAL = 0.51; EXPRESSED IN BRAIN, SIGNAL = 0.56; EST_HUMAN HIT: BE728812.1, EVALUE 2.00e-69; NT HIT: gi4505152, EVALUE 1.00e-69; SWISSPROT HIT: Q99759, EVALUE 2.00e-19
ttgcagttcagctttcaacgtcgcttatacttcaagttctgtggacaaacagcagttaccttaactaagcacccacggccccttctcccacctccctgcctccttccacccatgggagtgccaccatcccaaggcctgcccagcattgtggccaagagctagacagttaagagagtcccccttttctccaactgcagttcccaaggcagatccctgtgaggccactaactagggcaagctgagctgaacccaggcgggcagaactagggccctgagagctgaggcgaccactgacccctcccctaggaggtgagtgctctggagtgcgagatccagttgctaaagaacttgcagcatgagcgcatcgtgcagtactatggctgtctgcgggaccgcgctgagaagaccctgaccatcttcatggagtacatgccaggggtacgtgccccttgaatgcatgtgagacacacacaaaagagggcctgacctgggggctggggcctgcaggaggggggtcaccttggataggagtttgaacacctgaggctccagag

SEQ ID NO: 13106 - DNA, 562 bp, Homo sapiens
  MAP TO CHR3.3; EXPRESSED IN FETAL LIVER, SIGNAL = 0.69; EXPRESSED IN BRAIN, SIGNAL = 0.58; EXPRESSED IN LUNG, SIGNAL = 0.35; NT HIT: gi15295283, EVALUE 1.00e-119; SWISSPROT HIT: Q07494, EVALUE 2.00e-36; EST_HUMAN HIT: BG481991.1, EVALUE 5.00e-39
acaaaattgacagggcttggcaaggagaagagaacaaaacattcaaggagaagaatgggggatgggagtgggaagagaggaggacacagtgagtggcttggcctggagcagacagaagctgacaagcagcagggccacaacatctctccctctgcttaaccattgaagcccgtcttgatcccaatgccctctatgtcttattacagcaaaatgacgggcagttcaccgtgatccagcttgtgggtatgctcaggggcatcgctgctggcatgaagtacctggctgagatgaattatgtgcatcgggacctggctgctaggaacattctggtcaacagtaacctggtgtgcaaggtgtccgactttggcctctcccgctacctccaggatgacacctcagatcccacctacaccagctccttggtgagtccttcttggcattctcaagtagaagcatggcatgagttaaaggggactctacatggctgggaactgtgacagggcacactgggagggaatggaacctgaactgagctctccactgaaagaccaagatgccagga

SEQ ID NO: 13107 - DNA, 587 bp, Homo sapiens
  MAP TO CHR17.3; EXPRESSED IN FETAL LIVER, SIGNAL = 1.1; EXPRESSED IN BRAIN, SIGNAL = 0.38; NT HIT: AJ288089.1, EVALUE 0.00e+00; SWISSPROT HIT: O00182, EVALUE 2.00e-26; EST_HUMAN HIT: AW577283.1, EVALUE 0.00e+00
actgactgtgtgaccgcaagcaagtaacctgcacttgtgagtttctttcctcatctaaaaaagcagatcccaacgcttccttcatgcaggacagtaataattattaataataatgacaataattttttggccaccttttcttctgggccctcatcccagaggcatcagctcccatcctgttcaaggtaccccagacctcctttaccccctccccgtgtacccataggagcctcctcaagctccaggctgcggcgccttaccgagaagctctggcctcggacgaagggcatttttcggggcagacttcgctcctcagacccccaagagttgttgatctgggtgttacggaccacagcattctcatcaaaacgggggttcatgtggaaggcgatgtggctcccagagcacaggttgatgtggaacctggggtgggcagcctacctggacctttgtccactgagttctgagccccatttcctccccatcatccccagcctgccaaaagccaggggaatggctggaatgaccttgaagggctctctcttcccagaggtcactggagcctttggcttacctctgagcactgg

SEQ ID NO: 13108 - DNA, 512 bp, Homo sapiens
  MAP TO CHR14.3; EXPRESSED IN BRAIN, SIGNAL = 0.53; NT HIT: AF119833.1, EVALUE 8.00e-40
tttgcagcctaatccaaaccaactgctgaacgagacacgcgtctccgcagtctccgagtcttcatggctttggttgttaatcactctcagcaatagccaaatcccttcctccacgctggtctgttctccctaactgaaaatgcaagtgaaggtggacggtttgccgttctgaggagccccttatcagtaataatgtagcaacttcagaaaagttagctgagcagcctagagaaataagcaaaggccagaatgtagaaagccttgactccatgctgcttcatgagaacaggggttcttagacctatcagagcagcagcaccttttgacagcgaatgctttccatcttatcaaaggtggtgtcacctttcttcaaagcaatgcggctgaaactctcgaccaagttctccgcagcttcttcatcttgcggatcttctcgcccggctgcagctcaaagaggtggcacctctgggcaacgcagggccccggcaacgtccccaaactagtggagagca

SEQ ID NO: 13109 - DNA, 548 bp, Homo sapiens
  MAP TO CHR5.3; EXPRESSED IN LUNG, SIGNAL = 0.88; EXPRESSED IN BRAIN, SIGNAL = 1.9; NT HIT: gi14727831, EVALUE 0.00e+00; SWISSPROT HIT: Q9Y5I1, EVALUE 2.00e-05; EST_HUMAN HIT: BI753524.1, EVALUE 0.00e+00
cggcaggagcctactaacagccaaattgacaaaagtgacttcataaccttcggcaaaaaggaggagaccaagaaaaagaagaaaaagaagaagggtaacaagacccaggagaaaaaagagaaagggaacagcacgactgacaacagtgaccagtgaggtcctcaaatggaaacaagccacttagccagtttttgtaataatggcaaatctctcccatgtagcaattccctgctcctttttcctatctacatgagccctcttagagacctcagaaatctgcagaaagttccctgtgtctgtctagaacgcatttaacaggttttgtcgtaaaagctttactaagtctggtgttaactctttctctccactctggcttgttttcagaacctaaaaagcagacccaagtttcctttctcctccgccgcaaaggagaggcttcccagccccgccagtgagaggttggactctctgccctgtgctccggggatcctgtcttgatgacacttgcagggcaggctgaaaagttttgagattgagcagcttgggag

SEQ ID NO: 13110 - DNA, 531 bp, Homo sapiens
  MAP TO CHR12.3; EXPRESSED IN LUNG, SIGNAL = 5.9; EXPRESSED IN BRAIN, SIGNAL = 5.5; SWISSPROT HIT: P50502, EVALUE 4.00e-32; EST_HUMAN HIT: BE876665.1, EVALUE 0.00e+00; NT HIT: gi13652163, EVALUE 0.00e+00
aggctcgagaaaagcatgagagagcccagagggaggaagaagccagatgacagtcaggagctcagtatggctcttttctgggtggctttcctgggggaatgcctgctaattttcccagaggaatgcctggaatgggagggggcatgcctggaatggccggaatgcctggactcaatgaaattcttagtgatccagaggttcttgcagccatgcaggatccagaagttctggtggccttccaggatgtggctcagaacccagcaaatatgtcaaaataccagagcaacccaaaggttatgaatctcatcagtaaattgtcagtcaaatttggaggtcaagtgtaatgcccttctgataaataaagcccttgctgaaggaaaagcaacctagatcaccttatggatgtcgcaataatacaaaccaatgtatctttgaccttctcatcaagagagctggggtgctttgaagataatccctacccctctcccccaaatgcagctgaagcattttacagtggtttgcctttagggt

SEQ ID NO: 13111 - DNA, 557 bp, Homo sapiens
  MAP TO CHR6.3; EXPRESSED IN FETAL LIVER, SIGNAL = 1.5; EXPRESSED IN BRAIN, SIGNAL = 1.1; NT HIT: gi14782943, EVALUE 1.00e-111; SWISSPROT HIT: P36508, EVALUE 1.00e-32; EST_HUMAN HIT: BG831395.1, EVALUE 1.00e-110
aactagagggggtgaggagcgactggtcaggaggctattgtggtcatctaagccaaaatgatgatgggcccctgtcaggtcctcaaggagcttgtgagttcccatttagtgtaccataggagacctcatccttaggtgagacagctgcagaaggagggccagcaagagtgaatcacaaagtgaagggccatgagaaattggatgttgaaaccctccttggtatatgtatctctcattaacttaaagctagggtcccagctgtatctcttccccttgtgtggcatcagggctaaccgcgtgttccctgcagaaggctatgaccccagcaccctggaagccgtccaactggaagatggctccactgcctacattcaccaccctgtggctgtgccatcggagagcaccatcctggccgtacagacagaggtgggcttggaggacctggcagcagaggatgatgagggcttcagtgcagacgcagtggtggccctggagcagtatgccagcaaggtgagcacgcacagcgtgacacggtctgtcactctagacaaccgggc

SEQ ID NO: 13112 - DNA, 524 bp, Homo sapiens
  MAP TO CHR15.3; EXPRESSED IN BRAIN, SIGNAL = 0.39; NT HIT: L06515.1, EVALUE 0.00e+00; SWISSPROT HIT: P16452, EVALUE 7.00e-44; EST_HUMAN HIT: AA002010.1, EVALUE 3.00e-77
tcctctgagggtcaggaatgctgctaaatgtcctagggtgcacagcctgtacaacaaagacatatctgggcccaaatgtcaatggtgtcaaatggggttgagaaaccctgttttatatgatgcggaaaggacaagtctctttctggctgcatctaccaggcccatccctttccctcgcttgccgtttcaggtaccgagaagcctggggcccttccctggcccgtaccttcaggatacttgtagttctgagtgatgtcctcgcagcggtcactgcccacacccttggtgctgatgttgttgccaacatactttgtgttggagtcagtcaactccagtgtcccatcctcacagcacttccagaccacacatgaggcatttatggcagcaaaaaggtctgacactgctggggtcagccccagcgtcccctccttgactgctctgaccggcaccagatcacaggaccccaggactgagggagagaaaggttggtgagcatgggagctgcgcctagacctctgctcagt

SEQ ID NO: 13113 - DNA, 586 bp, Homo sapiens
  MAP TO CHR12.3; EXPRESSED IN LUNG, SIGNAL = 1.8; EXPRESSED IN ADULT LIVER, SIGNAL = 1.1; EXPRESSED IN BRAIN, SIGNAL = 2.4; SWISSPROT HIT: P55937, EVALUE 2.00e-19; NT HIT: gi14759301, EVALUE 1.00e-113; EST_HUMAN HIT: BF902971.1, EVALUE 3.00e-71
tcagctatggggaataaccggaactgactcattcttggtctcccctgagagtcccgccttgtgtcccgcacgcgcggagctgcggactcccccgttggccgtcgctggcctgagccgctgtgcttgccccatttcagtgcacgacctgcgacagcagatgacagccttgcagagccagcttcagcaggtgcagctggagcggacgacgctgaccagcaagctgaaggcgtcgcaggcggagatctcgtccctgcagagtgtccggcagtggtaccagcagcagctcgccctggcacaggaggcccgcgtcaggctgcagggtgagatggcccacatccaggtacggcccacatctaccttccagggcaggtcacgcttcttgtcttcatgtagaacggtgctttttcctgagatttttctgtttttagagttcacaggcatgtttttgtttttaacctgctgtccagcccaccccgtgtcccatgtaggacgtgtcgtatgcaggacgtgtcccgtgggcccccccccaaccttctgacatgggagtcccacggcagcctctgccagcattttcagttccaaagcc

SEQ ID NO: 13114 - DNA, 564 bp, Homo sapiens
  MAP TO CHR4.3; EXPRESSED IN FETAL LIVER, SIGNAL = 0.45; EXPRESSED IN BRAIN, SIGNAL = 0.53; EXPRESSED IN ADULT LIVER, SIGNAL = 0.57; SWISSPROT HIT: P21918, EVALUE 1.00e-90; NT HIT: gi15296881, EVALUE 0.00e+00; EST_HUMAN HIT: BE746231.1, EVALUE 0.00e+00
ggggcagttcgctctataccagcagctggcgcaggggaacgccgtggggggctcggcgggggcaccgccactggggccctcacaggtggtcaccgcctgcctgctgaccctactcatcatctggaccctgctgggcaacgtgctggtgtgcgcagccatcgtgcggagccgccacctgcgcgccaacatgaccaacgtcttcatcgtgtctctggccgtgtcagaccttttcgtggcgctgctggtcatgccctggaaggcagtcgccgaggtggccggttactggccctttggagcgttctgcgacgtctgggtggccttcgacatcatgtgctccactgcctccatcctgaacctgtgcgtcatcagcgtggaccgctactgggccatctccaggcccttccgctacaagcgcaagatgactcagcgcatggccttggtcatggtcggcctggcatggaccttgtccatcctcatctccttcattccggtccagctcaactggcacagggaccaggcggcctcttggggcgggctggacctgccaaacaacctggccaactg

SEQ ID NO: 13115 - DNA, 592 bp, Homo sapiens
  MAP TO CHR10.3; EXPRESSED IN BRAIN, SIGNAL = 0.64; EXPRESSED IN ADULT LIVER, SIGNAL = 0.56; EXPRESSED IN LUNG, SIGNAL = 0.39; EST_HUMAN HIT: AU120851.1, EVALUE 0.00e+00; SWISSPROT HIT: P05093, EVALUE 2.00e-37; NT HIT: M19489.1, EVALUE 0.00e+00
ctcccttcacatcatcccactagtctactttgggaagaattacaggttgttggagctggaagccccattctaggcatggtctgaagacctgaacaatcccagggggtggtgaagggggcagggaggagatgggcaccacttaccatttgaggccgcccagagaagtccttgcccttcttaataagcacctccttggccagctggtggtggccgacaatcactgtagtcttggtgcccatacgaaccgaatagatggggccatattttttctgcagcttgaagaagttgttatgcatatggccgtgtctggggaggaatggcaggctgcccaccaggggcagggacaggaggctcttggggtacttggcaccagggcaccttctcttgggccaaaacaaataagctagggtaagcagcaagagagccacgagctcccacatggtggctgggtgccggcaggcaagatagacagcagtggagtagaagagctgtggcaactctagggcacaaggaggccttttaaagggctaccctgatcttcaccttgactttgtgttatctcttgccttgtggaaagattctcctggagccc

SEQ ID NO: 13116 - DNA, 577 bp, Homo sapiens
  MAP TO CHR14.3; EXPRESSED IN ADULT LIVER, SIGNAL = 0.46; EXPRESSED IN BRAIN, SIGNAL = 0.69; SWISSPROT HIT: Q01101, EVALUE 2.00e-16; NT HIT: AB037912.1, EVALUE 0.00e+00; EST_HUMAN HIT: BG519620.1, EVALUE 7.00e-97
gagaacagccgaatagagcggactgcggatcagcacccgcaggccagggacagctccggggcggatcagcacccggacagcgccccgaggcagggcctccaggtgctgacgcatccagagccaccgctgcctcagggcccctacacggagggggtgttggggcgccgggtacctgtgccgggcagtaccagtggtggcaggggatccgagattttcgtgtgcccatattgccacaaaaagtttcgtcgccaagcctatctgcgcaagcacctgagcactcacgaggcgggctcggcccgtgcgctagcgccgggctttggctccgaacgcggtgccccacttgccttcgcttgcccattgtgcggagcgcacttccctacagcagatatcagggagaagcaccggctgtggcatgctgtccgcgaggagctgctcctgcccgctctggcgggggctcctcccgaaacgtcgggccctagcgggccatctgacgggagtgcccagcaaattttctcgtgcaagcactgcccgtccactttttttagctctccagggctgacccggcacatcaataagt

SEQ ID NO: 13117 - DNA, 590 bp, Homo sapiens
  MAP TO CHR11.3; EXPRESSED IN ADULT LIVER, SIGNAL = 4.5; EXPRESSED IN BRAIN, SIGNAL = 9.2; NT HIT: gi14773560, EVALUE 1.00e-75; EST_HUMAN HIT: AW606029.1, EVALUE 0.00e+00; SWISSPROT HIT: P26641, EVALUE 8.00e-23
attcccccagagttctgaccttcgtgttctgcctctgcagtgagcaatgaggagctgcggggaagtactccagaggcagcagcccaggtggtgcagtgggtgagctttgctgattccgatatagtgcccccagccagtacctgggtgttccccaccttgggcatcatgcaccacaacaaacaggtgagccttggaactttgagagaagccaggggcaggggtggcatcagctcctgggtgttgggagtaagaaataaaataggttgaaaaaaagatgccaaggatatgtaggcaatgagaagacgtaatctctagggtacgagtttgaagcagtgggcagttgatggaggaagtgtctgtcatgagtgatcagaagagggattgctgctgtgaagagattataccaaatggtaagggggtggctggaccagaggacctctgaagttcattgtttgtaatacatttagaatgaccctaggatctgcctccattgaaagagagtgagggtgagctcagacttctaggtgaaaatagccctcttagttctattaatgggggaggtgagggaaagggattggtacccactgatg

SEQ ID NO: 13118 - DNA, 566 bp, Homo sapiens
  MAP TO CHR19.3; EXPRESSED IN ADULT LIVER, SIGNAL = 0.79; EXPRESSED IN BRAIN, SIGNAL = 2.5; SWISSPROT HIT: P54775, EVALUE 1.00e-31; NT HIT: gi15306210, EVALUE 2.00e-56; EST_HUMAN HIT: BG703989.1, EVALUE 1.00e-104
tgctcacctcaggtaaagggggagcctgcagctgggagggccccatggggaccttgaggacctggccaggagccccagctctgctctcccaccagaccagaagccagatgtgatgtacgcggacatcggaggcatggacatccagaagcaggaggtgcgggaggccgtggagctcccgctcacgcatttcgagctctacaagcaggtgaggcggtgcaggtggcagggaagggagaggccccattgggtctggggttggaggtggaacccctgactcccacttctcttccttcctctgggtttcagatcggcatcgatcccccccgaggcgtcctcatgtatggcccacctggctgtgggaagaccatgttggcaaaggcggtggcacatcacacaacaggtgagccctttcgcccctgccccgagctctcatcttctggcctcttcgccttgctccctgctcgctcactggcactgcacagtaattagaaacagactctggggtcatagcccacgtgtgcatgttactggctgtgctgacttcacctccttgggcctctcctagt

SEQ ID NO: 13119 - DNA, 565 bp, Homo sapiens
  MAP TO CHR2.3; EXPRESSED IN ADULT LIVER, SIGNAL = 3.1; EXPRESSED IN BRAIN, SIGNAL = 3.1; EXPRESSED IN LUNG, SIGNAL = 3.6; EST_HUMAN HIT: N79583.1, EVALUE 0.00e+00; SWISSPROT HIT: Q9Y679, EVALUE 4.00e-19; NT HIT: gi14738465, EVALUE 7.00e-99
tccttccctttttaccacccacccatccagcctgttgtgagttgggtgagggctgcccccagtctccgtcctgcggctctgggtgccatcctgttcctttgagctcagtcagcctcctgggctcgtctctctgtgaatctcctgtgggacatagggagagatattattcaggctttgccgtagtagctccataattccattctccaatttgccacatcctattaattgtcctctaaccccctcaccttcttgcgtattcatatagtgcttgcttgcgctcctgcaggctctcctgccgggcccaggaagacttggcaaatgttagggctgttggctgaggggtcaccgggccagagctgggaaactgaggtgatcacaatgtcagagggcttgcggagtcatcatcattaaacacgcatcgaatgcctactttgcaagagaggcactatgctagggtctcaggatcaaaaaagaaaggtcagggataagggagtacatagcctgcccccaactcaccccaacacttggatctgaccatttcctgggtctcaccttggaggcagag

SEQ ID NO: 13120 - DNA, 600 bp, Homo sapiens
  MAP TO CHR6.3; EXPRESSED IN LUNG, SIGNAL = 0.63; EXPRESSED IN BRAIN, SIGNAL = 0.86; EXPRESSED IN FETAL LIVER, SIGNAL = 0.99; EST_HUMAN HIT: BG819986.1, EVALUE 2.00e-60; SWISSPROT HIT: Q13608, EVALUE 7.00e-18; NT HIT: AF108098.1, EVALUE 0.00e+00
tgtgatggcacttagaacgcgtagctgggaggcccggtcctcatttgcccccacaaacaccagcttgtcaaatctttagggagataggcaggtataagtttcagggagcccagccatgaggggtgaaggaggcacaaaatgagggtggagatgagcagtacaaggggcccacctgccaggccgcagaagggcagggtccaggagatctggtctgttggtggctccaatcacaaacacatcctgagtgctgtgcagcccatctagctcggcaaggagctgagacaccaccctggagagaagggagcaagggcaagagtccttggtgtcccccttagactctgcccctgcctgtggtacctctctttacaggcagtctcaacagggccctccactcagttgtgcccaatgtgccccaccaggtaggcccccattctcctcagtggaccctgcccaatttcatggcccctttcagcttccattatattatctcagaactgaaacagcaggaacttctatctctggactctgaagactgctgtgagctttctcatatccttcccaccctggacccctcagctttcattcccactcagaccccta

SEQ ID NO: 13121 - DNA, 596 bp, Homo sapiens
  MAP TO CHR21.3; EXPRESSED IN ADULT LIVER, SIGNAL = 0.71; EXPRESSED IN FETAL LIVER, SIGNAL = 0.53; EXPRESSED IN BRAIN, SIGNAL = 0.59; NT HIT: gi16170760, EVALUE 0.00e+00; EST_HUMAN HIT: AJ003597.1, EVALUE 0.00e+00; SWISSPROT HIT: Q9Y2C3, EVALUE 3.00e-59
gactcccgtaggttaagggctgcagagcctggaccaatgcccagaatctctgagctttttatcttacaccatgaagtgacagatgctggcagatgttagacctttgtgcttaactgtttaaccacacagcacccgacttctgtatgcagcgaggttctagagtttccaaaacacgggtctcctctcccacctcagcctcctagcataaaactagacacatcctcatgcttttgaggtctaatcattggattttgttcctttcagatggctttcccgaagatgagattgatgtatatttgccttctggttctgggggctctttgtttgtattttagcatgtacagtctaaatcctttcaaagaacagtcctttgtttacaagaaagacgggaacttccttaagctcccagatacagactgcaggcagacacctcccttcctcgtcctgctggtgacctcatcccacaaacagttggctgagcgcatggccatccggcagacgtgggggaaagagaggatggtgaagggaaagcagctgaagacattcttcctcctggggaccaccagcagtgcagcggaaacgaaagaggtggacca

SEQ ID NO: 13122 - DNA, 522 bp, Homo sapiens
  MAP TO CHR14.3; EXPRESSED IN BRAIN, SIGNAL = 2.1; EXPRESSED IN LUNG, SIGNAL = 7.4; NT HIT: X67921.1, EVALUE 0.00e+00; EST_HUMAN HIT: AU132616.1, EVALUE 1.00e-118; SWISSPROT HIT: P23381, EVALUE 3.00e-37
ttctgggaagaaagcagaggacgtaccaatgagcttatcgtagtctatgccttttgcactgcttgtctgtactgtccatgggtccacaaaatcctcttcagcttctgtggcatctgggccatgattactggtaggtgctgggttccctggaggacagtcagccttgtaatcctcccccgcggcagctttgtagctcatttttaatgacaccaacatctttactgcagaatcaatttcatcctgagagaggaaataaaagggatggctaaaagtattactaatagctgatatgtgctgaatgcctattctgtggcaggcactgtgttaaatgcttttacacgtgttaccttagttagtgtcacaaccctacaaggcaggtattgttgtcactgtccttttccagctcaagaatctgagactcagagaggtagaggagcttacccatagaatcacagcaagtcattggctcgaaaacacttcatttttatctgttattctagtgctaccatgaacactttggga

SEQ ID NO: 13123 - DNA, 521 bp, Homo sapiens
  MAP TO CHR1.3; EXPRESSED IN BRAIN, SIGNAL = 0.45; EXPRESSED IN FETAL LIVER, SIGNAL = 1.1; NT HIT: AB036706.1, EVALUE 4.00e-51; EST_HUMAN HIT: BG959235.1, EVALUE 5.00e-51
cgtacacacacaccccagtcataccacactcaacacactcacacataccaacacacacggacaaactcgaccttactcacaggtccctgcagtccccacagagactcacgtgctcagtgttacatccggtgaccctcattccagcacacaaggcgttggctgctctctcgttattaaataccctgaactgaacaaatcccgcagtgaattcccctgaaaacaagaggcagaaaacagcattcaaggaagatgctagaaattgctttccttaggccagcccagaggctctcgatgccaaagctcaggctacagcccaacactccagctgtactgggtggagcccagcacccctgtggccaatggctgctacatcctggcctcaaacttagctaagagggaccttttcccaaccccagagatgaagagctggtcctcagagagggctcctcatctgccagaggcttgtgaagagaaattcaactctgcaggaagatcaccactgaacatctccaagggctgag

SEQ ID NO: 13124 - DNA, 553 bp, Homo sapiens
  MAP TO CHR5.3; EXPRESSED IN LUNG, SIGNAL = 1.2; EXPRESSED IN ADULT LIVER, SIGNAL = 0.8; EXPRESSED IN BRAIN, SIGNAL = 1.1; NT HIT: gi5730052, EVALUE 2.00e-77; EST_HUMAN HIT: BE169671.1, EVALUE 1.00e-113; SWISSPROT HIT: P39062, EVALUE 5.20e+00
caagcccaattctctggttccaaatcttattccactattctataatcttaggtatctctagcaccttgattttgcaagccctaagaaagcagttcaatattactctcaatatccatgctgtggtcaatcagggctatcactatcttgaagatagatggctttataatatggagactacattgtttaccaggtaaagtagctccaaaaaaaagttagaaaaagttgggctttaaatctagcactgacaactgcttagtaacagtgaaactgaggtcagtcaatgtcaagttcaacacctttgaggttgataaaggaaaagtggtaacttacctgatgcagcaggggaggctgcaacagtattgggtgtttgctgtatctccccaccatgtatcatgggaaggaccccgcctacctccaggaggacacctgtactgttcaggtggccagaagccacagccatttcactctcattgacctaccagggaagaatagaggtgaaggctacactcaagctttccttcactaccatttcccaacaaagctccagcagttg

SEQ ID NO: 13125 - DNA, 557 bp, Homo sapiens
  MAP TO CHR20.3; EXPRESSED IN FETAL LIVER, SIGNAL = 0.68; EXPRESSED IN BRAIN, SIGNAL = 1.2; EST_HUMAN HIT: AA442566.1, EVALUE 5.00e-67; NT HIT: gi13654122, EVALUE 0.00e+00; SWISSPROT HIT: P01213, EVALUE 6.00e-37
tctggttccctggaattgaggagtcacgtgaacaggttggaaggacagatcacaaactgctgctgctgctgctgctgccgctgctgatagttttagagtctaggtgtctgagccaagcactaagcctattgtggggaagggacatccacccttccccatcacagaccccagagaaataacatactcccacgcagaagagagataggctgggcttggatattttgtacacaatgctgagctgagcatggggaaggggcacatataagaggatgaatgaatgcactccaacctgaaaaggtgtcaggggtttctcctgactctactccatgaaaagaggtgcttatgcatcaaaaagctctccagagtaagcattcggatcttcctgagaccgagtcaccaccttgaactggcgccggagaaaaccgccatagcgcttctggttgtcccacttgagcttgggacgaatgcgccgcaagaagcccccatagcgtttgtacaggtcctcatggcccatgctatccccgtccccctccccagccacctctgagctcctcttg

SEQ ID NO: 13126 - DNA, 580 bp, Homo sapiens
  MAP TO CHR1.3; EXPRESSED IN LUNG, SIGNAL = 2.1; EXPRESSED IN BRAIN, SIGNAL = 0.61; EST_HUMAN HIT: BG398445.1, EVALUE 1.00e-58; NT HIT: M23461.1, EVALUE 0.00e+00; SWISSPROT HIT: P08575, EVALUE 1.00e-06
catcttccttgatgggaaaatcttttaaaaggctttctaacttggtgtaattacttgaattaaggaagtgcaatgccattctactgacttagaacaacttttttgacttcctgcaaagaggacccttacagtatttttggagaagttagtaaaaccgaatctgacatcatcacctagcagttcatgcagctagcaagtggtttgttcttagggtaacagaggaggaaattgttcctcgtctgataagacaacagtggagagtatgcatttatttatttacttttacatttttgattcgtttttacagagaaaaacttctacagagataacaattattttgcttttcagaaggacgcatgctgtttcttagggacacggctgacttccagatatgaccatgtatttgtggcttaaactcttggcatttggctttgcctttctggacacagaagtatttgtgacaggtaagtacaaggatattaatattttttaaattattttttctcttttggaggaatgtttgaaatagacataaaaataatttaaatgtgttggtaactggaagtgagaagcctgctgt

SEQ ID NO: 13127 - DNA, 545 bp, Homo sapiens
  MAP TO CHRX.3; EXPRESSED IN BRAIN, SIGNAL = 0.5; EST_HUMAN HIT: AW880897.1, EVALUE 0.00e+00; NT HIT: gi4757867, EVALUE 0.00e+00; SWISSPROT HIT: P15056, EVALUE 7.00e-84
cccaagtcaccacaaaaacctattgttagagtcttcctgcccaacaagcagaggacagtggtacctgcaaggtgtggagttacagtcggagacagtctaaagaaagcactgatgatgagaggtctaatcccagagtgcggtgctgtttacagaattcaggatggagagaagaaaacaattgaccaggacactggtgtttcctggcttactggagaagaattgcatgtggaagtgttggagaatgttccacttacaacacacaactttgtacgaaaaacatttttcaccttagcattttgtgacttttgtcaaaagctgcttttccagggtttccgctgtcaaacatgtggttataaatttcaccagtgttgtagtacagttgttccactgatgtttgttaattatgaccatcttgatttgttgtttttctccaagttctttgaacgccactcaataccccaggaagaggcctccttagcagagactgcccttacatctggatcatctccttcggcacccccctcagattctactgggccccaaat

SEQ ID NO: 13128 - DNA, 513 bp, Homo sapiens
  MAP TO CHR19.3; EXPRESSED IN LUNG, SIGNAL = 4.4; EXPRESSED IN ADULT LIVER, SIGNAL = 3.8; EXPRESSED IN FETAL LIVER, SIGNAL =   4; EXPRESSED IN BRAIN, SIGNAL = 8.2; NT HIT: gi6005975, EVALUE 0.00e+00; EST_HUMAN HIT: AI566486.1, EVALUE 1.00e-118; SWISSPROT HIT: O43345, EVALUE 1.00e-105
ggctttgccacattcttcacatttgtagggtttctctccagtatgaattaccttatgtttagtaaggattgagaacttactaaaggctttgccacattctttacatttgtagggcttttctccagcatgaattgccttatgtgtagtaagggttgagaccttactaaaggttttgccacattcttcacatttgtagggtttctcatcagtatgaattctcttatgtttaataaggattgcagatcggttaaaagctttgccacattcttcacatttgtagggtttctctacagtatgaattttcttatgataactaagggttgaggaccacttataggctttgccacattcttcacatttgtagggtttctctccagtatgaattaccttatgtttagtaaggactgagaatgtactaaagcttttgccacattcttcacatttgtagggtttctctccagtatgaattctcttatgttccataaggtttgaggaccagttgaaagctttgcc

SEQ ID NO: 13129 - DNA, 563 bp, Homo sapiens
  MAP TO CHR1.3; EXPRESSED IN LUNG, SIGNAL = 5.9; EXPRESSED IN BRAIN, SIGNAL = 1.3; EST_HUMAN HIT: AW372987.1, EVALUE 0.00e+00; NT HIT: gi14780959, EVALUE 0.00e+00; SWISSPROT HIT: Q13228, EVALUE 7.00e-26
tctgcttcaccactgcattcccagaacatagcacagtgcctagcacagacattcactaagtagtttttgaatgaatgaataaatacggccagttagggttcaggcagaagttgccctagcactgagagaagagagacagggcatgcagcctcatttttttcgttcctggagacgcctgggagcaccgttacagaagcctgcttaggtagagctgctgacaagactactgggaggggagggccagagggcgtatgtcacctcgttcttgtagaagcgctggatggtggagctgagtgcgcagcccacaaagccttgggcagcgtctgggttgtgcaggaagcggatctccaagggaataagcccatcttttagagacagggtctgcacaatctcatggcgctgccagtcccatacatataagtggctcccgtacagtcctggggtgggagtggggccggaggataggctcagcatcagaggttggaaggcatgggcaaagactgggccaccaatcagggcagaaggttaagaaatggattggagggatcaggaagacgcttgag

SEQ ID NO: 13130 - DNA, 522 bp, Homo sapiens
  MAP TO CHR22.3; EXPRESSED IN BRAIN, SIGNAL = 1.2; NT HIT: gi14776943, EVALUE 5.00e-75; EST_HUMAN HIT: BF965591.1, EVALUE 7.00e-75; SWISSPROT HIT: Q14129, EVALUE 6.00e-20
accagagaccggcatgtaaccaacaagtcatggggcagggtgtgcctgcggagatgtgtgtgtggtcccaaggcagtcccaagtcaaagcattcgtggaagccccttggggcccccttcaggggttcacttggccgaggagaggcctgggtgtggtgaggatgcattggtggtgtcagagctggtgctgttggggacagcagcaggagcatgtgtttgagctgccctcacctcccccgccgcccccggccccacggcaggcggtggagcaccggatccgtgaggagcagcgggcgatggaccagaagatcgtcctggagctggaccggaaggtggctgaccagcagagcacactggagaaggcgggggtggctggcttctacgtgaccaccaacccacaggtcagtgcctgggcctgctctgtcctagcccgagtgcccctgggccccattccatctgggatttcactgctggtccctggggagccaggctcagggtatagggggtgaagtggaaggattga

SEQ ID NO: 13131 - DNA, 574 bp, Homo sapiens
  MAP TO CHR14.3; EXPRESSED IN LUNG, SIGNAL = 0.33; EXPRESSED IN BRAIN, SIGNAL = 0.52; NT HIT: gi14784368, EVALUE 0.00e+00; EST_HUMAN HIT: AA912173.1, EVALUE 6.00e-48; SWISSPROT HIT: Q9UKJ8, EVALUE 1.00e-105
catgcatgagtccaccagtcaccagcaaattttggttccagagctgagttctcagcctcttcaaattccaactgttggcgtgctacttccttctctgttaagctacatctcatagctgggaattgtgtctcattactgtttactttgtaaaccaggtgttcaaatgtggcagagtgcctgatgggttcaatttcatgagtgaggccgtttatttttaatactcctcaaaagcccccacaacaagcactgaacacaaccagagactcaggggcaccctccacgtaaccatgatagtaacagtcatctgggatgaagagctgatcctccaggagtgcacgctcatctgtgtaggtgaacactgggaggtgtctagaaaccaagagcttcttaaccctcatatgaacaacatgtttctggtccccaaaccgcagactataggagagccatccaggagcctttgcacttctgcccctgctgatcaccttcaaggggatcaccacttccagggaagtgaaatgctgggagggcccagcctgacagtagccagaaatagacaaaaataccccaagccaga

SEQ ID NO: 13132 - DNA, 509 bp, Homo sapiens
  MAP TO CHR16.3; EXPRESSED IN ADULT LIVER, SIGNAL = 2.8; EXPRESSED IN BRAIN, SIGNAL = 3.1; SWISSPROT HIT: P30519, EVALUE 2.00e-32; NT HIT: gi15319788, EVALUE 0.00e+00; EST_HUMAN HIT: AW275981.1, EVALUE 0.00e+00
tctggcttttattggttgcctttcttaaacccagcattttttaaaaagtcacctgaggtggtagtttagtcagggctggagaaaggggtaggccagtggtcagtcgggaggagggtaccggtgtggcatgatgggtgcttcacatgtagtaccaggccaagagtccagcagctagggccacaccagcggccaggatgaactggaggctgggcttcctcagcacagccatagctgttcggaagggacagctgctgccctccagggcacctgtgtggcagcaccaataggagacatggcatcagtggagtctcctgctacacctgccccaggaggggagctcaggacacacagacctacctttgtcttgttcagcagcgtagaaagggcatttacgcatgtctcctttcccatcgtgtacagggaacccatcctccaaggtctctctggccagtgtggagccggcctggtccagttcattgaatatctgcaggagcagaggatcgactgag

SEQ ID NO: 13133 - DNA, 545 bp, Homo sapiens
  MAP TO CHR3.3; EXPRESSED IN BRAIN, SIGNAL = 1.5; NT HIT: gi16159988, EVALUE 1.00e-118; EST_HUMAN HIT: AI792229.1, EVALUE 1.00e-118; SWISSPROT HIT: P38606, EVALUE 3.00e-35
ttgggaacttccgttttcacttcttgagtggcatttccttgttaaactgtggtatttcctgttaattgtgtctttaaaccttcatagtaggttttccttagctgctgtttttagctggtgtgtctgttggagatcctgtacttcgcactggtaaacccctctctgtagagcttggtcctggcattatgggagccatttttgatggtattcaaagacctttgtcggatatcagcagtcagacccaaagcatctacatccccagaggagtaaacgtgtctgctcttagcagagatatcaaatgggactttacaccttgcaaaaacctacgggtatgtctgtgtaaccaagaatttctgaagttattgaaagaatataaaatgaatgtttagtaaactacattgtactcttagtccaaataaaaatagactacagaaggatagtttaaagtttttcttaactctacttcatgggattttagaactaatgttttattgataagtcaggtaattgatttaaattatagcagcaggggcaagtctacttga

SEQ ID NO: 13134 - DNA, 556 bp, Homo sapiens
  MAP TO CHR2.3; EXPRESSED IN LUNG, SIGNAL = 1.2; EXPRESSED IN BRAIN, SIGNAL = 0.3; NT HIT: gi16160019, EVALUE 0.00e+00; EST_HUMAN HIT: AL531903.1, EVALUE 0.00e+00; SWISSPROT HIT: P25024, EVALUE 2.00e-85
agtgtacgcagggtgaatccatagcagaacagcatgacaaacagcggcacgatgaagccaaaggtgtgaggcaggatccgcaacaccatccgccattttgctgtgtcatttcccaggacctcatagcaaactggactggaattgtttggatggtaagcctggcggaaaaggaagaagggcagggacagattcatagacagtccccagcagccaagacaaacaaacttgaccaagtgacgcttctgggtcagtgtgcgtgtggcatggacaatggccaggtaacggtccacactgatgcaggccaacagcaggatgccactgtagaagttgacttccttcaggagtgagaccaccttgcacaggaatgtgccaaaaatccagccattcaccttggaggcggcccagatgggcaaggtcagggcaaagagtaggtcggccaaggccaggttcagcaggtagacatcagtgacggagcggccgaccctgctgtataagatgaccagcatcaccagggagtttcccagcaggctcagcaggaacactagggcataggcga

SEQ ID NO: 13135 - DNA, 571 bp, Homo sapiens
  MAP TO CHR19.3; EXPRESSED IN BRAIN, SIGNAL = 0.64; EXPRESSED IN ADULT LIVER, SIGNAL = 1.2; SWISSPROT HIT: Q9NXJ5, EVALUE 8.00e-42; EST_HUMAN HIT: BI755068.1, EVALUE 1.00e-129; NT HIT: gi14766091, EVALUE 1.00e-130
tgttaagtcctgcccctgtctgtgtgcagctggtggtgcatgtgggggtgtcaggcatggcgaccacagtcacactggagaaatgtggacacaacaagggctacaaggggctggacaactgccgcttttgccccggctcccagtgctgcgtggaggacgggcctgaaagcattgactccatcatcgacatggatgctgtgtgcaagcgagtcaccacgttgggcctggatgtgtcggtgaccatctcgcaggatgccggcaggtagggccctgtggggtgggagtgagtggggatttccctcctccacccactgagcctggtgtagaacaagccaagcgtgttgaccttggcctctttggaccaagcactcagtgtatactaggcacagagccaagtatttgtacgtagcaggtgccgttggttctgctcctgggactcatggatctgcccacttctccccaccatcacggtccccaccaaggcccccagcatctcccacctggacactgccccagcctccatctcagtcttcctccctgctgcctccaccccaacccaagcagtcagttt

SEQ ID NO: 13136 - DNA, 556 bp, Homo sapiens
  MAP TO CHR14.3; EXPRESSED IN LUNG, SIGNAL = 0.68; EXPRESSED IN FETAL LIVER, SIGNAL =   1; EXPRESSED IN BRAIN, SIGNAL = 0.48; EST_HUMAN HIT: BF663442.1, EVALUE 0.00e+00; NT HIT: gi14750850, EVALUE 0.00e+00; SWISSPROT HIT: Q9DBU0, EVALUE 7.00e-38
tcagtcctgcttggggataggaggaaccatttaatgatctctgaatggtaccactgaaccagggatcaacgggttgggttagggtactggatgagtagggacaggaaaaattgaggtcaggaacctgacagtaatagccatggaataaagggaggatacctgaaaggcaggaagcctccaacagtcatgtggatgacagtagacttgtaccagggctggggtggaatctcccgggcgatgttcttggtgcgacagggtgcatcaaaggggctggcgttgttcttcccaaagatgcctccaatgacagtgaggggaaagcccaccagcagccaaaccgtcagaagcagcaggatggttgtggctggcagagcctgtgtcgaaccattggcccaatgcactgagttcaccacactccacgtcaggaagaaaggcactgcagggatgggcccccggagggagggtcaacactaggagctacatctctaagggcacccacttacatccaggaccaaaaggggagggggctgaagcagcctgccactctaacggcagactc

SEQ ID NO: 13137 - DNA, 580 bp, Homo sapiens
  MAP TO CHR6.3; EXPRESSED IN BRAIN, SIGNAL = 0.23; SWISSPROT HIT: Q9GZK3, EVALUE 4.00e-54; NT HIT: AJ302633.1, EVALUE 0.00e+00
gggttgagtgagggagtcaccactccatagaagagggccatgaacttgggttgatcccttgagatggaggaggggggctgaaggtacatgctgatggctgggccataaaataagaaaactacaataagatgggaggagcatgtcccaaaggcctttttccttcccttggaagatttgatcttaaatacagcacttccaatactagcataggaagcaagaattaagcatagtgggacagctaacataaaaatgcataccacagagagtgtgagctcgttagaacccttttcaccacaggcaatctttatcagaacaggaatctcacacaccaagtggtccagtttattgagaccacacagtggcaattgtaatgtggcagtggcctctgagacagcatagattattccaattagccacacggtggaaactaaggatacagacgcgctgattcatgatgagggtgtagtgaagaggtctgcagatggccacatagcgatcaaaggacataatagccaaaagcaaacattctgttccccccattatgtgaaagaaataaagctgaaccgcacaccccatatag

SEQ ID NO: 13138 - DNA, 588 bp, Homo sapiens
  MAP TO CHR19.3; EXPRESSED IN LUNG, SIGNAL =  15; EXPRESSED IN BRAIN, SIGNAL =  16; NT HIT: M19997.1, EVALUE 2.00e-99; SWISSPROT HIT: P05197, EVALUE 5.00e-30; EST_HUMAN HIT: BF310766.1, EVALUE 3.00e-99
ccaagggtgtgcagtacctcaacgagatcaaggacagtgtggtggccggcttccagtgggccaccaaggaggtgaggcacggctcagcatgtgcagaccacacccgtttccaggctctagagggacctcatggtcctgcctcccgagacagagaccctaatggggccaaggcgggcaaggccccaggtccccctggtggagacctgcaggacttggcaggtggagggcaagcagccgaggtgtgtccggcccttgacggtggctctccccctcccccagggcgcactgtgtgaggagaacatgcggggtgtgcgcttcgacgtccacgacgtcaccctgcacgccgacgccatccaccgcggagggggccagatcatccccacagcacggcgctgcctctatgccagtgtgctgaccgcccagccacgcctcatggagcccatctaccttgtggagatccaggtgaggtctacccgcccaccgctgaccctgccaccgtcctgcccagcggccactgacaggttttctttcccttctggcagtgtccagagcaggtggtcggtggcatctacggggttttgaacagga

SEQ ID NO: 13139 - DNA, 506 bp, Homo sapiens
  MAP TO CHR1.3; EXPRESSED IN ADULT LIVER, SIGNAL = 0.52; EXPRESSED IN BRAIN, SIGNAL = 0.35; EST_HUMAN HIT: BI759718.1, EVALUE 6.00e-63; NT HIT: M10150.1, EVALUE 0.00e+00; SWISSPROT HIT: P00797, EVALUE 6.00e-19
tgccaggcacagagtaagtgctagtaagaggttgttgattaagactagggatggaagagttccgagtgcctgggatgggtttgagaattcagtcctgtctcaatctcaggaagactgggaagtggccttctgggtgctcaggggttcttggacatttttttgtttttaaccttggtggctgtatcagaaaaacgggagacatcttcccctctcccctacatgtcagtgggcacagaggcagagaggaagccactcccttggtggcaagagggatgggagctgggtgttgggcaggattgctcatgcacagtagggcagggggatggaggagaggcactgtgggtcttaggtctcaccacaggcagtgtagagacggctgcacttggaggagggcacccaaacattggacgaaccagtgtcaaagacgactttgaaggtctggggtggggtgccgatgccaatctcgccatagtactgggtctgtgggggtaaaaagagagggctgg

SEQ ID NO: 13140 - DNA, 588 bp, Homo sapiens
  MAP TO CHR17.3; EXPRESSED IN FETAL LIVER, SIGNAL = 3.5; EXPRESSED IN BRAIN, SIGNAL = 1.1; EST_HUMAN HIT: BG330950.1, EVALUE 4.00e-92; NT HIT: gi13651401, EVALUE 3.00e-92; SWISSPROT HIT: P34810, EVALUE 7.00e-29
gggaaactggcagagtcttgtagaggatggaaagaaagctgccctgtagccatgacaagctgggagagcgagatttggggggttaagaagagagatgagtggcttatgggcctggggaaggggttttcagtgcagtgggaggattctaggagggaaggagtaggtaggtcttactttgcccaaagacccctgtgtggggcagctgagcagcctggagcctcagggagagcaggtcgaggtggacagctggtgaaagaatgatgctcgagttgctgcaactgaagctctgccccaggggtgcttggagatctcgaagggatgcattctgagccgagaatgtccactctggaggagtgaggaagggtcagatcctatccacctccctggccccagcttagtcctttcaggaaccctggcgtctagtggtagcaatgagaaagggaaggaggttacttacgtgctgcgtgggggaaggacacattgtactccaccgccatgtagctcaggtagacaaccttctgctggaggtcctgtggggcgaagaggaaggcgcaggtggtatccctctccacagaggaaggagtagcg

SEQ ID NO: 13141 - DNA, 502 bp, Homo sapiens
  MAP TO CHR11.3; EXPRESSED IN LUNG, SIGNAL = 0.57; EXPRESSED IN BRAIN, SIGNAL = 0.44; NT HIT: gi13027805, EVALUE 2.00e-80; SWISSPROT HIT: O60882, EVALUE 2.00e-21; EST_HUMAN HIT: BG104527.1, EVALUE 1.00e-127
gggaaagcaaaatctgcaagaatttgtcccctagtggggcaaagtcataatgaaagtttgttacagtgaatctactctacagctgtgtctgatgatgacaagacatgctaagaactcctttggttctattttctggccagatgaagatcatggctttgccatggtcttggccttggcccatcacagcactgtgcgaaggaggagtgtgtgatcactcgaattaaagatgtagaaggaacagtattgggacaactctcctttgaattagtagatggaatccaagtaccacaatacctccattttcaaaagatatcataatatccgcttctcctgagtttattctgacaaagctcagagggacggcgctactccaggcctgcaaggccatctccactgctttgtccacctcgacagaactcatggaaggtgtgtatttagatattctgtgaaaacggaaggaacatgttttcttttcagtaactgctccgaagaaggcaagaat

SEQ ID NO: 13142 - DNA, 510 bp, Homo sapiens
  MAP TO CHR6.3; EXPRESSED IN ADULT LIVER, SIGNAL = 0.71; EXPRESSED IN BRAIN, SIGNAL = 1.6; EXPRESSED IN FETAL LIVER, SIGNAL = 1.1; EXPRESSED IN LUNG, SIGNAL = 1.2; EST_HUMAN HIT: AA481600.1, EVALUE 0.00e+00; NT HIT: gi9910349, EVALUE 0.00e+00; SWISSPROT HIT: P39918, EVALUE 3.00e-13
ggctgctgctattcctgaactcgaaagataaaaatgaggaaaaggaaggaagggatagccaacttacataggattctgcaggtggctgttgactggaatcacttttttctgttttcctcccatgattaggacactttccttcctcacgtggaatgtgggacgatcactctgattggggcaaccactgaaaacccttccttccaggtcaacgctgctcttctgagccgctgtcgagtgattgttcttgagaagcttccagtagaggcaatggtgactattttaatgcgagcgatcaactccctgggaatccacgtcctagactctagccgtcccactgaccctctgagccacagcagcaacagcagctcagagtaagttgacagtgtgcagcgtcctgggggcacacacctcccagagagtctcctggcagggggccagaaagggccgggcgtcagtgaggagagggtggggacagagaagaaatgttgatccgcccgtaatgaaaataaa

SEQ ID NO: 13143 - DNA, 516 bp, Homo sapiens
  MAP TO CHR1.3; EXPRESSED IN FETAL LIVER, SIGNAL = 0.37; EXPRESSED IN ADULT LIVER, SIGNAL = 0.37; EXPRESSED IN BRAIN, SIGNAL = 0.38; NT HIT: U59254.1, EVALUE 0.00e+00; SWISSPROT HIT: P48357, EVALUE 9.00e-54; EST_HUMAN HIT: BI913269.1, EVALUE 0.00e+00
aatgagagcactcgggacactagataactgtacacaaacaggtaatttcagcattatccagtttttaaattacactcattttatttttggcagtgtaactctggaatgtgttgtgaatatttttcgatgtggtacaaattacttacagaatgttttgtcttcatctgatatcctttcttccctcattacagatgtcatatactttccacctaaaattctgacaagtgttgggtctaatgtttcttttcactgcatctataagaaggaaaacaagattgttccctcaaaagagattgtttggtggatgaatttagctgagaaaattcctcaaagccagtatgatgttgtgagtgatcatgttagcaaagttacttttttcaatctgaatgaaaccaaacctcgaggaaagtttacctatgatgcagtgtactgctgcaatgaacatgaatgccatcatcgctatgctgaattatatgtgattggtaagaaaacagaggttttgttcattttgttcca

SEQ ID NO: 13144 - DNA, 510 bp, Homo sapiens
  MAP TO CHR21.3; EXPRESSED IN ADULT LIVER, SIGNAL = 3.8; EXPRESSED IN BRAIN, SIGNAL =  16; EST_HUMAN HIT: BE612698.1, EVALUE 2.00e-90; NT HIT: M34868.1, EVALUE 0.00e+00; SWISSPROT HIT: P08592, EVALUE 2.00e-31
aaacagccactccagctttgtttaaaagagaagcactcaaaagtccctctggattgcaagacatatgtgctacagctaggaagagaacacatccatggccatgctttatcagggaaagacggagaggtgtgctcatgattgaacatactgcggagactctgagcaattagagaagtggacagaaatgtggttagtggtagcaacaggcccattcccaagaaccaggaaaatcaatctgttacaaaaagcagagtcagtggcgagagagacgaaaggtggccaggctcgaagaagggtccacttactggcgctgccacacacggccatgcagtactcttctgtgtcaaagttgttccggttgccgccacatccgccgtaaaagaatggggcacacttcccttcagtcacatcaaagtaccagcgggagatcattgctcggcacggccccgtctcggcttgttcagagcacacctctaatcagaggagatgtggggaaccacatttagcatg

SEQ ID NO: 13145 - DNA, 515 bp, Homo sapiens
  MAP TO CHR6.3; EXPRESSED IN LUNG, SIGNAL = 1.8e+02; EXPRESSED IN BRAIN, SIGNAL =   9; EXPRESSED IN FETAL LIVER, SIGNAL =  24; NT HIT: AF338354.1, EVALUE 0.00e+00; EST_HUMAN HIT: AV730970.1, EVALUE 1.00e-104; SWISSPROT HIT: P16190, EVALUE 1.00e-28
tgtatgctgctggagtgtcctacgaggaatgcaaagtgcctgaattttctgactcttcccctcagatcccccaaaggcacatgtgacccagcaccccgtctctgaccatgaggccacccttgaggtgctgggccctgggcctctaccctgcggagatcacactgacctggcagcaggatggggaggaccagacccaggacacggagcttgtggagaccaggcctgcaggggacggaaccttccagaagtgggtggctgtagtggtgccttccggagaggagcagagatacatgtgccatgtgcagcatgaggggctgccagagcccctcaccctgagatggggtaaggaggggtgtaagttgtctattctcagggaaagcaggagaccttcggcagggcagggctgaggcctgggggtcagaacccctcacctccctctcctttcccagagccgtcttctcagcccaccatccccatcgtgggcatcgttgctggcctgtttctccttggagctg

SEQ ID NO: 13146 - DNA, 572 bp, Homo sapiens
  MAP TO CHR11.3; EXPRESSED IN ADULT LIVER, SIGNAL =  11; EXPRESSED IN BRAIN, SIGNAL = 6.3; EXPRESSED IN LUNG, SIGNAL =  17; EST_HUMAN HIT: AL564930.1, EVALUE 0.00e+00; SWISSPROT HIT: P26641, EVALUE 6.00e-53; NT HIT: gi14773572, EVALUE 4.00e-94
ttgacccctgtgctttcttcctcttagtacctttgtgttggatgaatttaagcgcaagtactccaatgaggacacactctctgtggcactgccatatttctgggagcactttgataaggacggctggtccctgtggtactcagagtatcgcttccctgaagaactcactcagaccttcatgagctgcaatctcatcactggtaagagagtgggtctgagaaggaaggagaacaaggtgtagcaagtgctgtgattccaaaggctgaatgttctcccttgccgcttcaggaatgttccagcgactggacaagctgaggaagaatgccttcgccagtgtcatcctttttggaaccaacaatagcagctccatttctggagtctgggtcttccgaggccaggagcttgcctttccggtgaggaaggtggaggagaggagtctctttagggtggggcagggatataagaagcactgtgttttatttctgagttgatggatgtttaggagggttcaggaatgcttataggaaggagcagttcatgttcacaggagacctggggtctgatgacatgtg

SEQ ID NO: 13147 - DNA, 550 bp, Homo sapiens
  MAP TO CHR13.3; EXPRESSED IN ADULT LIVER, SIGNAL = 1.4; EXPRESSED IN BRAIN, SIGNAL =   1; EXPRESSED IN FETAL LIVER, SIGNAL = 1.5; EST_HUMAN HIT: AV730824.1, EVALUE 2.00e-01; NT HIT: gi9506634, EVALUE 6.00e-90
aagttctgtttgggggactggtttttaattatactactgaagaaatgaagttattaaattgacaaatgatagggaattttccttaatgctttctatctttaatactttttttcagaatttgagctaataaaaatgacaaatgaaattcaaagtaatttaaaatgccttggtcttttggagccttatttctggaaaaaaggagaagcatgtgcagtaagaggatccgatactctgtggtatcgtggcaaggtgatggaggttgtaggtggcgctgtcagagtgagtctgatattcttttgtgacaattctaaagctaaatgctatagcattaaatagtcttgtgcatttgaacacgagaaagttggattaaaacatcttttgatgaaaattgtgtaggaagatcagttatattgtacttttatttgtaataatttttcgttttatttgcaaatatatttagtaacctgaataagcaaaaaatagggagggatttgatcattggttaatggatagacctcttagttgtaattggtagccctgtttccacaca

SEQ ID NO: 13148 - DNA, 572 bp, Homo sapiens
  MAP TO CHR12.3; EXPRESSED IN FETAL LIVER, SIGNAL = 1.1; EXPRESSED IN ADULT LIVER, SIGNAL = 1.1; EXPRESSED IN BRAIN, SIGNAL = 0.67; EXPRESSED IN LUNG, SIGNAL = 1.1; SWISSPROT HIT: Q13258, EVALUE 4.20e+00; EST_HUMAN HIT: BE156272.1, EVALUE 0.00e+00; NT HIT: U48363.1, EVALUE 9.00e-77
aacccaagcagattcactggagaaagcggcgcatcacagggttagtattggtgggtagcgcccaagaggggtgtggacgacagacacaccatgcacacggcaaaccaaggcaaatacccttgttgttcttcgtaacaggttgcttggcagagggggttgggacagggattccagcagatttaggggtgggcatgttgacgaggaccgactggaaaggcactcccccagagattggttccgggggaatcagaggcagcagctcatcctcatcagcaggggcaaggggtttagagggtgattccaacaccagcccaggagaggacggcagaaattgctgtttaggaggcagagtgggaactggggagggagcaagaggcagagagactggtggggagggtgctgcatagacagatgctgattcaagtttaagaaggaccttctcaaaggcagctgctgttagaggggtggacgccttagactcaggaggagccaaggggccctttggggaatgagaagcatctttgccttttgctgtctttgaagagtctttctgaacagggagtagaggggct

SEQ ID NO: 13149 - DNA, 590 bp, Homo sapiens
  MAP TO CHR2.3; EXPRESSED IN BRAIN, SIGNAL = 1.7; EXPRESSED IN LUNG, SIGNAL = 2.1; SWISSPROT HIT: Q13618, EVALUE 2.00e-37; EST_HUMAN HIT: BI333322.1, EVALUE 1.00e-127; NT HIT: gi14728236, EVALUE 1.00e-127
tgaatgaggagctcactgggctcaccaatactattacaccttttatcttctggattaaatgtaaaatgagacttaaagacaggaaatgctcaattcattagaaatatctaaaatcttcgttagtaagacagaatcaagcttggaaatcccattaaagttaacaatggagacaaattaacaatacacaccaaaacttcttgaaagctgatattatctgctttaattgtaggaaaattttaaaaatatcgataaggcagagtaaggatttaattatttttcaatcggtaacacttaccttctgtctttccatttttcaacatatgtactagcccagaattctccatttctactatagtcttcatgtgcttggaaatgagttccctttcaaccacctttacaattggttcttccgttgatttgtcaaggcagtgcatcactcgttctatttcttcattaattctagcttctactttctttatatatactgaagcactattttctgctaaaaatttctggctttccatctgccatttaaaaatatatatattttttaaacatagaagaaaagagtgtttttgcttttagctggg

SEQ ID NO: 13150 - DNA, 538 bp, Homo sapiens
  MAP TO CHR8.3; EXPRESSED IN BRAIN, SIGNAL = 0.65; EXPRESSED IN LUNG, SIGNAL = 2.4; NT HIT: gi11424035, EVALUE 1.00e-51; SWISSPROT HIT: P15090, EVALUE 5.00e-13; EST_HUMAN HIT: AI194006.1, EVALUE 1.00e-51
aaaagcatgaagggcaaatgccagagtggaagcataattccaataaaatcctctttttgtttcagataatcaaaaggaaaatctgtttccttaagtggaatagtgatcatgagataacctagcagtaagatccagaattaagtagctagaagatactcaccaccaccagtttatcatcctctcgttttctctttatggtggttgattttccatcccatttctgcacatgtaccaggacacccccatctaaggttatggtgctctgtaggcataagaaaatgtaatgacaatgtgcagagggaggcagaaaaaaatttaaaatagagtgcctttgttcaaaggaatattttgaggtcattagtaattctaaatgacaagaatatattgcaacaagaaaaaaaatgagtctcaaaaacaacaacataaccacttatggatacgttatgtccagagtgttatacaaattacataattggaaaaattactgtgaaggaatatgaaaaagaaatttacattgcgatggtagtagtatgggtgg

SEQ ID NO: 13151 - DNA, 537 bp, Homo sapiens
  MAP TO CHR11.3; EXPRESSED IN LUNG, SIGNAL = 3.7; EXPRESSED IN ADULT LIVER, SIGNAL = 2.2; EXPRESSED IN BRAIN, SIGNAL = 2.3; SWISSPROT HIT: P35301, EVALUE 9.90e-01; EST_HUMAN HIT: AW362810.1, EVALUE 0.00e+00; NT HIT: gi7656933, EVALUE 3.00e-55
aataaggccataacctgcccctgggcatcaccagccctcctctcctccttaccttctctcagccccaatccaatgtacaaaaccggcggggtccatgtacctagcgtggtttctccctgagcttcccacatcactaatgctggtcctctggctgctcagtgaaaggatacacgaagaaccaggcggtgaagaacatgccaatggccaaaagcaccacggtcagatgggggaagacagctgggttcactgggctggtatatctgctcatggcctcgagctcctagaggagggaaagagatcagagctatcaaagaatcccacgatttcagcctggagagaacatgcggttatcaaggagcctggtgctgccgtgaaacagaggctgattttagcccggaaatgtagctgcagatcaatggcccttattagcattttctgaggccaataatctgaccactatgaaaacgtgactaaaggtacgaactctctgcctgagaaaaaccacatacaagaaaaagtttgcctacaatttccgga

SEQ ID NO: 13152 - DNA, 568 bp, Homo sapiens
  MAP TO CHR9.3; EXPRESSED IN LUNG, SIGNAL =   3; EXPRESSED IN ADULT LIVER, SIGNAL = 2.2; EXPRESSED IN BRAIN, SIGNAL = 3.3; SWISSPROT HIT: P52292, EVALUE 2.00e-50; NT HIT: gi4504896, EVALUE 0.00e+00; EST_HUMAN HIT: AL571747.1, EVALUE 0.00e+00
aagttcccaggagtcccatcctgaacttggaaggtatagccttcagaggtagtttctggcaccatgttttcatcttcctcttcctctacagagaaatacttaattaagcttaacaaagccttatacacactcattttcatgattttggagagcttcaattttgtctaagcctccacattcttcaatcattatactaagtttctcagtttcacctagtttctcagcagcctgaaagatacttgaaatggcatccaggataaccagaataaccttggtatctttacagttaagaagttcatcaatggttctattatgccacaatgaatgagctacacaatctgttcaactgtttcgccactggtatagttggtcacggcccatacagcttccttttgtgtcttaagatctgacttagaacattggcaaggaataggactaatccatgattcacaacttgctgtatctggtcctgacggccagctgtgatgtttgacattgtccacatagcttccttccaagtgttagttttggggtcggtgagcaggctgggaaagacagcaagtgcctc

SEQ ID NO: 13153 - DNA, 538 bp, Homo sapiens
  MAP TO CHR2.3; EXPRESSED IN ADULT LIVER, SIGNAL = 0.6; EXPRESSED IN BRAIN, SIGNAL = 0.4; EST_HUMAN HIT: BE867724.1, EVALUE 2.00e-81; NT HIT: gi16157991, EVALUE 1.00e-81
cctggatgactttctttcccattttatatatgtgtgtctatttggtcatatgtttctatttgtcttttttttgtctttttcgtttgtttgttttaccagagtgatgttagaactccaaaaagcactaaacatgtccattcgattcagtggagtagaacaaaacctcaggatgaagtgaaagcagtccaacttgccattcagacattattcaccaattcagatggcaaccctggaagcaggtccgactcaagtaagttagtgttcccgtattagatgtgtgctagattccagaaacttaattatgacatttccagatgatctaaagactcagaggataccacctcaatcagttaagatctatctttgagcttcgagtagcagaaaacccagttgcaactggcttactccaataattccccaagtgtggccccaggaccaggagcatcgggatcacctgtgaacttgctagaaatccagatgctcaggcccaaacccagacttactgaatcagaactctggggataggagctgcagtctg

SEQ ID NO: 13154 - DNA, 537 bp, Homo sapiens
  MAP TO CHR9.3; EXPRESSED IN LUNG, SIGNAL = 0.82; EXPRESSED IN BRAIN, SIGNAL = 0.9; EXPRESSED IN FETAL LIVER, SIGNAL = 0.83; SWISSPROT HIT: P53331, EVALUE 3.00e-06; EST_HUMAN HIT: BE208472.1, EVALUE 1.00e-106; NT HIT: gi9966856, EVALUE 1.00e-106
accacacagagcttgtcacgtgggtgcaaatgagtgaggggcagagagcttttctctgctgacacttagtccatggatccctggggctctgacctggagccctgtggcctgccgtgtttattaaactacagcctttggttacccttcagcctgacaagagccttagccttggactgtgagatggtgggcgtgggccctaagggggaggagagcatggccgcccgtgtgtccatcgtgaaccagtatgggaagtgcgtttatgacaagtacgtcaaaccaaccgagcccgtgacggactataggacagcggtcagtgggattcggcctgagaacctcaagcagggtatgtcatccacagctcaggaacttagaagggaaagtagtaactggattcgttttctcccttttgttcccttttctgtctgagaccactcactgcagctggttttgatgcgtcttgtctccttttggggcgatgggttttaaaatacaaaaggcatccttagacggctttacacccatttatgccttgcactt

SEQ ID NO: 13155 - DNA, 555 bp, Homo sapiens
  MAP TO CHR1.3; EXPRESSED IN BRAIN, SIGNAL = 0.6; SWISSPROT HIT: P26439, EVALUE 1.00e-99; EST_HUMAN HIT: AL569984.1, EVALUE 0.00e+00; NT HIT: gi12719842, EVALUE 0.00e+00
tgccagtataaatgaggccctgaacaacaatgggatcctgtcaagtgttggaaagttctctacagtcaacccagtctatgttggcaacgtggcctgggcccacattctggccttgagggctctgcgggaccccaagaaggccccaagtgtccgaggtcaattctattacatctcagatgacacgcctcaccaaagctatgataaccttaattacatcctgagcaaagagtttggcctccgccttgattccagatggagccttcctttaaccctgatgtactggattggcttcctgctggaagtagtgagcttcctactcagcccaatttactcctatcaaccccccttcaaccgccacacagtcacattatcaaatagtgtgttcaccttctcttacaagaaggctcagcgagatctggcgtataagccactctacagctgggaggaagccaagcagaaaaccgtggagtgggttggttcccttgtggaccggcacaaggagaccctgaagtccaagactcagtgatttaaggatgacagagatgtgcatgtggg

SEQ ID NO: 13156 - DNA, 576 bp, Homo sapiens
  MAP TO CHR16.3; EXPRESSED IN LUNG, SIGNAL = 1.9; EXPRESSED IN BRAIN, SIGNAL = 2.1; SWISSPROT HIT: P49815, EVALUE 1.00e-57; EST_HUMAN HIT: AL519820.1, EVALUE 0.00e+00; NT HIT: L48542.1, EVALUE 0.00e+00
ctggcactttctctgcattggaggctgtggctctgctctttaaggcgtccctctctactctcttgcccctgcgtgatggggccgagtcggagatggtgtaacctcggggccggaggccactgggcgagcggggggagctggaaggcaagggaccctcgggctggccccgactgtcttcgcccgaggccgaccaggcagcactttccccgtccagggtccctgactgtgaccgggccttaacctcagggctcagccggcccacgtcggccttgtccccagggtccccgaggatgtcctgcagagtctgcagctcgggagaggagctggacttgctcaggggctgcgagggctggaaggagaggtccacagagggccggccaccctccgaggagacgactcgctcgatggggatgcccctgccaaccagctcctccgcgtggagcgacttctcctcctggctggagactgaggacgactagaaaggaccatcccaaagagaacccctgtcagcaggcaccctcgagcccacctggggttgacctggaggtggtgaggccctatctgtcctccatccca

SEQ ID NO: 13157 - DNA, 527 bp, Homo sapiens
  MAP TO CHR19.3; EXPRESSED IN LUNG, SIGNAL = 1.9; EXPRESSED IN ADULT LIVER, SIGNAL =   1; EXPRESSED IN BRAIN, SIGNAL = 0.81; NT HIT: gi13651410, EVALUE 5.00e-69; SWISSPROT HIT: P35550, EVALUE 4.00e-19; EST_HUMAN HIT: BG718652.1, EVALUE 7.00e-69
ggttggcccattgttacatcatctctgtgccttggcttcctggttttaagcctctgttgggaacctgggctctcaggcagatgggattgggtacttttgctacttgctgaataactcttggccagtgactttatgtctggacctcagtttattcatgtgaaaaatggacatgatagcaatagtcattagatggtagggttttgatttgggggttggaagagatgctgtgtatagtgtatgggcctaaagtaggcactccatgcatgagaactagcatcactgttcattaatttttaatttattttaggatggtctagtctatgcagtcgagttctcccaccgctctggccgtgacctcattaacttggccaagaagaggaccaacatcattcctgtgatcgaggatgctcgacacccacacaaataccgcatgctcatcggtgaggggtctgggggtggccccggtggggtaggacaggccaccgcaggcttctggaagaagccagtggatctctgattcggatgga

SEQ ID NO: 13158 - DNA, 540 bp, Homo sapiens
  MAP TO CHR12.3; EXPRESSED IN BRAIN, SIGNAL =   2; NT HIT: U86077.1, EVALUE 0.00e+00; SWISSPROT HIT: Q01064, EVALUE 1.00e-23; EST_HUMAN HIT: BG696525.1, EVALUE 4.00e-67
aatgcagccaggtttctcagctcctgaaatggccaaggaccttcctccatccgaacctgcaacactcccactgcatcccagcacatgtccctagcactgtccaacgagttttagtctacctgggaattctctagagtgagttaatccagtttggctctgtcaaggctttggagtgcccaagaagaaccaacgaggagaaatggaaatgggagtacagtctagacctcccagttctgtagccataggccctgaatcacagaagaatcatctccagggcacctaccaccatccctgtgcggagcaagaagcaatggactgtctgggtaacatcggctgcgtggatctggttgtggtaaggattcttgtacttcccatagcctgtctccaaggcatccaggaaactcatcaaaaacacagtgggaatctgcggggagttaggggaaatggagatatatcaaggatccacaggaatggtggtgattacggaccgagatcaacaactttctttagaaggcagtgtggcatagggagagagcacag

SEQ ID NO: 13159 - DNA, 595 bp, Homo sapiens
  MAP TO CHR19.3; EXPRESSED IN BRAIN, SIGNAL = 1.2; EXPRESSED IN FETAL LIVER, SIGNAL = 1.9; EXPRESSED IN ADULT LIVER, SIGNAL = 1.3; SWISSPROT HIT: Q15717, EVALUE 2.00e-38; EST_HUMAN HIT: AI793329.1, EVALUE 0.00e+00; NT HIT: gi14757935, EVALUE 1.00e-126
tccccgtggtttctattctgtggctgtgccgtcgcctgccagcggggctaagtatggctttcaggagcgcgcaccctcccgacccacctgaatctctgcgcctggtggtgaacggggcctccgaaccgtcgcgctggcgagtggtacagctgcgagaggagtgccacgtttttgttctggttggggttggctgcaaacttcactgtgatgggctcagaggaacctgggggtttatgaccattgaaactggtaattgcctcttctgcctccgaccgtttgtcaaaccggataaacgcaacccctctggacaaaccttttcaacaaatcaacaaaaacggagttagggggaaaaacgctaggactttcaaaactgaaaagcaaaagtcaggtcagtctactgtgggccaggctagaagtctggttaaggaaataaacaaaaattaaacctaaaagtgaaaacaaatggatggagtaaagaaaaccaatgactaacagaagattaaagcttcagactttcttcccggctgaagccatgactccacagtgttggcgcccaaagatattttggtgacagacatccccaatagacacccag

SEQ ID NO: 13160 - DNA, 593 bp, Homo sapiens
  MAP TO CHR5.3; EXPRESSED IN ADULT LIVER, SIGNAL = 0.75; EXPRESSED IN BRAIN, SIGNAL = 0.51; NT HIT: L05072.1, EVALUE 0.00e+00; SWISSPROT HIT: P10914, EVALUE 3.00e-22; EST_HUMAN HIT: AA377066.1, EVALUE 1.00e-129
aggtggcatccatgttcttcagatctgtgaagacacgctgtagactcagcccaatatcccctagaagatgtgaagaaggttgtatgagggtaggggacggtggcatcaggtgtgcttccccctacccctgaaggccatagacatggcctctgctcttcccagcacagcagtaaacatccactcagcttcaggcaaaccttaaggcatggcagccgtagctaattcacaatgtgtcagtaccccagatgctttaccgccctgctccctggccctgcccccaagctttctccatccctacgtggttctccctcatctaagaagccataaggatccagggccttcttaccccctgggctgtcaatttctggctcctccttacagctaaagtctccatagacagaggtgggctggactccaggttcattgagtaggtaccccttcccatccacgtttgttggctgccactccgactgctccaagagctggggacagaagagcaagaggctatcaactcccttccagtgcagactcaccctgtggccctgccctcaatgagccagctcctctcagccagtatcacacccttggccatt

SEQ ID NO: 13161 - DNA, 568 bp, Homo sapiens
  MAP TO CHR17.3; EXPRESSED IN LUNG, SIGNAL = 1.4; EXPRESSED IN BRAIN, SIGNAL = 1.3; EXPRESSED IN FETAL LIVER, SIGNAL = 0.65; NT HIT: gi14774044, EVALUE 4.00e-54; SWISSPROT HIT: P29531, EVALUE 5.40e+00; EST_HUMAN HIT: BI918218.1, EVALUE 0.00e+00
tcctagacctgcctcaaagctgccgtctagttcttgaggcactttgtgatcagtaggttaatccttctgacttaacccaaaagctttggggctccactttcttttcctctctgaagactgacacagctcccagataacccctccccactttgaggacttgatgctgtagatggttttaatgaagccatggccttctctggcaatactgtaggccatcggtgctcggaacttgctcaaatctatagcaaagcagagagaagctcaacagcagcaacttcaagccctaatagcagaaaagaaaatgcagctagaaaggtaagaagtcatgatgtaaagcaagttctttacacagctgaatttccactcttccttctggaatgatcacttcttgtccttattcttcatcattgttttcccaggaatagcatctcacttgtcatcctgatttgaagattttaaaaaataaaattacatttgatgggaaggaaatagaaaacttgttaatatcaaaccacctctagtagtttgagcatgaaagggtccacgaagttggctggctctctgaaag

SEQ ID NO: 13162 - DNA, 592 bp, Homo sapiens
  MAP TO CHR19.3; EXPRESSED IN LUNG, SIGNAL = 1.5; EXPRESSED IN ADULT LIVER, SIGNAL = 0.97; EXPRESSED IN BRAIN, SIGNAL = 1.3; NT HIT: gi14758021, EVALUE 0.00e+00; SWISSPROT HIT: Q14585, EVALUE 1.00e-48; EST_HUMAN HIT: BE742835.1, EVALUE 0.00e+00
ttcccagatttggagtcagcatatgaaaataagagtttacctacagaaaaaaacattcatgaaataagggcttccaaaaggaattcagatagaagaagtaaatcccttggccgtaactggatatgtgaaggtacgcttgaaagaccacagcgctccagagggaggtatgtcaatcagatgatcatcaattatgtcaaaagacctgctactagagaaggcacccctcctagaacacatcagagacatcataaggagaattcctttgaatgtaaggactgtgggaaggcctttagtcgtggctatcaacttagtcaacatcagaaaatccatactggtgagaaaccttatgaatgtaaagaatgtaagaaggccttccgttggggcaatcagcttactcaacatcaaaaaattcatactggggagaagccctacgaatgtaaagactgtgggaaggcttttcgatggggctcaagcctcgttattcataagaggattcatactggtgaaaaaccctatgaatgtaaagactgtggaaaggcctttcggcgtggtgatgagctcactcagcaccagagattccacactggggaga

SEQ ID NO: 13163 - DNA, 569 bp, Homo sapiens
  MAP TO CHR19.3; EXPRESSED IN ADULT LIVER, SIGNAL = 1.2; EXPRESSED IN BRAIN, SIGNAL = 1.1; EST_HUMAN HIT: BI765510.1, EVALUE 4.00e-89; NT HIT: gi15307371, EVALUE 3.00e-89; SWISSPROT HIT: P55199, EVALUE 5.00e-26
ctttgtccacctcaggcttcacaagccagcagctgccataacccaaccccctatccctcacatagcccccaggcccatgtggccatacctctcttcccaacccagactctggtccaggcacgtcctgctcagggaccgactcctcggttgacccatcatttctgtgcagggcacagccagtgcccagcctggacaggccccaaatgtctcccgacactggcagctgcccggctgccctacagccctgccaaacccactgctcacccaggtagcggcctccagccttgatgacaatggcacttcggctccgcgtctcctcctccgcctgggccatgctctgccgcgccttctggtaggagtcgtcggtggcacacaccgtgatcttgtcctgtatgctgcccaggcagtccaggtgaacttccccatgactgcaagacaaggccaggagctggggtcagcagctgggacaatgcagggaggatccgttgagggcccaagcccccagcccaccacctggcctggaaaatggactctgtcaacaccatctcaggcaatatggtttcaatggg

SEQ ID NO: 13164 - DNA, 599 bp, Homo sapiens
  MAP TO CHR2.3; EXPRESSED IN LUNG, SIGNAL = 0.67; EXPRESSED IN ADULT LIVER, SIGNAL = 1.1; EXPRESSED IN BRAIN, SIGNAL = 0.54; NT HIT: U13729.1, EVALUE 0.00e+00; SWISSPROT HIT: P27487, EVALUE 4.00e-32; EST_HUMAN HIT: AW971631.1, EVALUE 1.00e-105
gtttgtccccgagtctgatgaattttgattttctgttcttagaatgtggtaggacatatgccaactccctttctagagtctcatacagagaggaatttaggaaatgctttttttttgaacttcatatcaatctataatgtaatatattgttatttaaacataacatcttcactaaaacctaccgtaaggataaaagattacaaattcatcccagaacactttaaattatttacactttacagctttaaaatgtaaattttaaaggggaaaaaaaatcagatgacctttgacttcatctcctagtcactcacctggctgcttcaatttgatcttcaacttcaaatgttcccagtcttctgttgattgcatgcatgatcttatctccttggtaaccacttcctctgccatcaaagctagctactataatgttttctgtgcttgcaaggtaagtggcccagttcagtctgaagacagtgtctgctttttgactacatgggcctgcatacctatgaaaaataccaaattgttagctttcatggttttctggaatcaaatgaggaatgcttacatttctcttctccgtggagaagtatgcatcc

SEQ ID NO: 13165 - DNA, 553 bp, Homo sapiens
  MAP TO CHR5.3; EXPRESSED IN FETAL LIVER, SIGNAL = 1.1; EXPRESSED IN BRAIN, SIGNAL = 0.93; NT HIT: gi11417364, EVALUE 0.00e+00; SWISSPROT HIT: O60383, EVALUE 1.00e-100; EST_HUMAN HIT: BE789106.1, EVALUE 3.10e+00
ctcggcagagctccatactcatttacctttaactcacagtttgaatttggaaagaaacacaaatggattcagattgatgtgaccagcctccttcaacctttagtggcctccaacaagagaagtattcacatgtctataaattttacttgcatgaaagaccagctggagcatccttcagcacagaatggtttgtttaacatgactctggtgtccccctcactgatcttatatttgaatgacacaagtgctcaggcttatcacagctggtattcccttcactataaaaggaggccttcccagggtcctgaccaggagagaagtctgtctgcctatcctgtgggagaagaggctgctgaggatgggagatcttcccatcaccgtcaccgcagaggtcaggaaactgtcagttctgaattgaagaagcccttgggcccagcttccttcaatctgagtgaatacttcagacaatttcttcttccccaaaatgagtgtgagctccatgactttagacttagctttagtcagctgaagtgggacaactggattgtggctc

SEQ ID NO: 13166 - DNA, 585 bp, Homo sapiens
  MAP TO CHR17.3; EXPRESSED IN LUNG, SIGNAL = 4.3; EXPRESSED IN BRAIN, SIGNAL = 1.9; NT HIT: AF017178.2, EVALUE 0.00e+00; SWISSPROT HIT: P02452, EVALUE 2.00e-41; EST_HUMAN HIT: T49549.1, EVALUE 0.00e+00
ctagcccagtgctcagaagggacatgaagtcctggagtaggtctctgctaagggtgatggacagagctgggctgggaggcaggggtctcaggtccctgatagtggttcagacacaggctgccgatgggcaggtggtgcctcctctcgatataacggtgcattgggcagctctctgaggaccctggacagggaggccaggcaggactagaggttcccgcatagcggctcactcttccctctctcccctcccctgcagttcgagtatggcggccagggctccgaccctgccgatgtggccatccagctgaccttcctgcgcctgatgtccaccgaggcctcccagaacatcacctaccactgcaagaacagcgtggcctacatggaccagcagactggcaacctcaagaaggccctgctcctccagggctccaacgagatcgagatccgcgccgagggcaacagccgcttcacctacagcgtcactgtcgatggctgcacggtgagtgcccagaatccccaggcagggccccacctctccggccttgggctttttggccaggccatagtgccctctctccatcactc

SEQ ID NO: 13167 - DNA, 587 bp, Homo sapiens
  MAP TO CHR22.3; EXPRESSED IN LUNG, SIGNAL = 0.83; EXPRESSED IN BRAIN, SIGNAL = 0.79; SWISSPROT HIT: Q29488, EVALUE 3.00e-14; EST_HUMAN HIT: BG775066.1, EVALUE 2.00e-57; NT HIT: X58468.1, EVALUE 0.00e+00
gagggtcgtcgtactcgaagcggcacccgcaggtgagggaggcgatcacgttgctcgccgctttgttcaggaggccgttggggtgaaaggggcgtcctgggggcgggagatgcgggtcaggggtcgccttcccagtcctccaccttcccagttcccgctttgtgcccctctgcccatcacccactggcttggtcggcgaaggcggcacagaggcaggcggcctcctcggtcacccaccgctccagggacttcttgcccaggcccaagttgcgcaaggtggacacggagaagcgcctctgctcgcgccacgcgtgtccgtagtgtgccagaaacacccctgggggcgggacggacacatgggcgtggtcatggaggccttggccccgccctccgccgcccactccaaccctgtgcttttcctggtctcccgcagtccctggccctgtccagctgggcacagggcctgctctttgctcactcaccttgcttgggtcttggccccaccttggctcttccgaccctgactgcctttccactcagggaagatcccgcccgtcccgccccgcccatactgagcccacagcaga

SEQ ID NO: 13168 - DNA, 502 bp, Homo sapiens
  MAP TO CHR1.3; EXPRESSED IN LUNG, SIGNAL = 0.44; EXPRESSED IN BRAIN, SIGNAL = 0.3; NT HIT: gi4505956, EVALUE 9.00e-52; SWISSPROT HIT: Q29076, EVALUE 9.00e-14; EST_HUMAN HIT: BE783305.1, EVALUE 1.00e-51
gcctcagggtgtctttgaactctgttcctgtgctagctgctccagttgctgcattcacatctgaattttcacataccatcttatgattgtaatttattatttatatttttgtttctgtttcttaagctttatcagtgtttgtgtacttgtcatgcagtcctgcttttagaagataaaccagtttactgtttcctttcttttgaatcccttctccttggaggtacttagaaaagtacttatgcaaaataggtgcctgatgaatgttggtaactgaaatctagtgctttatttcatttatttcttttaatagttgaaattattttgcttgctttctaggcacacaaaccaatggtctggactttcagaagcagcctgtgcctgtaggaggagcaatctcaacagcccaggcgcaggctttccttggacatctccatcaggtaggaatgttctgctcaaccatcagtgagagtgaaagatagaggcgtaaagtactggggcctga

SEQ ID NO: 13169 - DNA, 553 bp, Homo sapiens
  MAP TO CHR14.3; EXPRESSED IN LUNG, SIGNAL = 0.63; EXPRESSED IN ADULT LIVER, SIGNAL = 0.68; EXPRESSED IN BRAIN, SIGNAL =   1; SWISSPROT HIT: O12976, EVALUE 4.00e-23; NT HIT: AF109907.1, EVALUE 0.00e+00; EST_HUMAN HIT: BE709757.1, EVALUE 1.00e-121
aatcacagaggccaacacatcatttaagatagaaatttctgtatcttttaatttttttcaaagtagttttacttattttcagattctatttctttactagaattaagggataaaataacaatgtgtgcataatgaaccctatgaaacaaacaaaagctaggtttttttcatagctcttcttccagattgaatgaacgtctgttctaaaatttaaccccaaaaggaaaatattcagttaactatgttaaaaaccaagacttgtgattgagttttgcctgaaaatgctttcataattatgtgtgaatgtgtgtctttcccatcttctccacagggtttgtgccttacattattactccttgccattttcaagaaagcattgccagctcttccaatctccatcacctttgggcttgttttctactttgccacagattatcttgtacagccttttatggaccaattagcattccatcaattttatatctagcatatttgcggttagaatcccatggatgtttcttctttgactataacaaaatctggggaggacaaa

SEQ ID NO: 13170 - DNA, 523 bp, Homo sapiens
  MAP TO CHR16.3; EXPRESSED IN BRAIN, SIGNAL = 0.64; EXPRESSED IN FETAL LIVER, SIGNAL = 2.2; SWISSPROT HIT: Q9NZV6, EVALUE 5.00e-17; EST_HUMAN HIT: AW856109.1, EVALUE 6.00e-60; NT HIT: AF187272.1, EVALUE 2.00e-59
cactgtggctgtatcatggccagaagctcacccagctgccttgtgatctttccaggtgtcctgtggcaagtgtggcaatgggttgggccacgagttcctgaacgacggccccaagccggggcagtcccgattctgaatattcagcagctcgctgaagtttgtccctaaaggtgagcttgctttgcacagctggggccaggcctgttggcctttgagcccaggctggggggcccagtgtttgtgcttgtccacttaccatgacaaggtatggggccaccaagtcacgctgcctgggaactgtccaggatcccccagaaaggtggctgcagcgcaggggcaaaggagctggtgttccgcttcctcgcttggttgatcatgactgtcccaaaaaggggcttcagcgtgagaatgtggcaaatggttttcctcagaggcctggcctttcccagaggctagagtcaggggcggggcaggcagagcctgaggccccagtctgtgcggctgtgtctcccactggctagga

SEQ ID NO: 13171 - DNA, 593 bp, Homo sapiens
  MAP TO CHR19.3; EXPRESSED IN LUNG, SIGNAL = 3.8; EXPRESSED IN FETAL LIVER, SIGNAL = 4.2; EXPRESSED IN BRAIN, SIGNAL = 0.95; SWISSPROT HIT: P55899, EVALUE 3.00e-89; NT HIT: AF220542.1, EVALUE 0.00e+00; EST_HUMAN HIT: BF338211.1, EVALUE 0.00e+00
gaaggtgagctccttgttggccgccttgtcctgctgctgccaccgctgactgatagccagggcctcgggccagtccccaccccaggtgccctgcttgaggtcgaaattcatgaactcctcgccgttcagggcgaacttggcggtgggcaccgaggtgttgtcagggcccagttcacagcccagcaggccctgcagagtgtagggacctggggcgcccaaacacaggtaagcggggccccggagcatggacccggccccttgcccctccagaccggaatctcaccttttccccccaaagctttgaaagcttccagaaagagcttctccttgatcctcagatctgtggtctctttctcccaataccaggacacctggttttcccagacccaagctccacagggctccgcctcgccccgcaggctattgtagctcaggtactgctgcgggcccagccagccggacacccagaaggcaggagtccccggggcaggcgaggacaccgcggtaaggtggtacaggagggagaggtggctttctgcagacagaaacagagctgaagggagcacacgggcggggaactagactgcagtggg

SEQ ID NO: 13172 - DNA, 556 bp, Homo sapiens
  MAP TO CHR1.3; EXPRESSED IN ADULT LIVER, SIGNAL = 1.5; EXPRESSED IN BRAIN, SIGNAL = 2.9; EST_HUMAN HIT: BF905603.1, EVALUE 1.00e-45; SWISSPROT HIT: P24506, EVALUE 3.00e-16; NT HIT: AF257303.1, EVALUE 8.00e-34
agagccagcagagcctacagcctcttctggaaacatgtctcgattgtggtgtcatgctttgggctaagccctgctcatttccctgggagaagtaaaatcctaagtcacaaacttatctggggatgaaatttctctgatccttttctctgtagcccacagtgcatggccagagagcgctgggaaggcagctctgatggggacaaggggcccttggagaaaaggagggcctgggaagctaaggctcccccgctcctcgaggagacatctcagtcccagggcagcaaagtgttcctcttcactggagtgtgcaaactctgggacttggtgctgactggctcgctggtgccacccaatggcagccagaagctctccacgtacctgaaaggccgcccacgtccatcttcttgaggttcttagcctccaggatgcagacagtgagcttcccggccgtgggcacatagcgcagggaggtgcagatgtcgcccagcttctccggctgtccaggggaagagcaggacttgggtcatctcacccatcctagtgcctctctcatggc

SEQ ID NO: 13173 - DNA, 596 bp, Homo sapiens
  MAP TO CHR13.3; EXPRESSED IN BRAIN, SIGNAL = 1.1; EST_HUMAN HIT: BF574409.1, EVALUE 1.00e-127; SWISSPROT HIT: P05413, EVALUE 1.00e-55; NT HIT: U72237.1, EVALUE 0.00e+00
tagtgccactgcctcaactggtcctaaggcaccaaaaattgcatccaatatcggcagtccaactccttgcacacctgctctctcacagcttctttctcagtctaggccagcatcaccatggtagatgccttcctgtgcacctggaagctctcagacagcaagaattttgatgactacatgaagttaatcggtgcaagttttgctatcaggcaggtggctagcatgacaaagcctaccacaatcatcaaaaagaatggggacattatcaccttaaaaacacagagcatgttcaagaacacagagatcagctttaagctggggatggggttcgatgagacaacagcagatgacaaaaaggtcaagtccattgtgacactggatggaagcaaactttttcacctgcagaagtgtaacgggcaagagaggacacttgtgccagagctaagtgatgggaaactcatcctgacactcacccagggcactgcggtttacactcgcacttatgagaaagaggtatcgtctgcctgcgctgtcactgactgttcctctgttaccctttgactcagcaccacattgcctcatttatttcccctgca

SEQ ID NO: 13174 - DNA, 520 bp, Homo sapiens
  MAP TO CHR2.3; EXPRESSED IN FETAL LIVER, SIGNAL = 1.2; EXPRESSED IN BRAIN, SIGNAL = 0.8; EXPRESSED IN ADULT LIVER, SIGNAL = 0.89; EXPRESSED IN LUNG, SIGNAL = 1.1; SWISSPROT HIT: P05451, EVALUE 2.00e-20; NT HIT: J05412.1, EVALUE 0.00e+00; EST_HUMAN HIT: BI439110.1, EVALUE 3.00e-71
tggctgcaatgagatgagactgaaccccttgctatactatcatcagccccaaactttccaatctactttatcccattattcagcacattcccagcacaaagaacctggtggtcagtgacagcatcatcacggacattactctgctgtcctttttctgacccgtcctcttggaggactcagtatatccgtcacaacttcctcctccactgagtgctccattttcttctgcaacagctctattgccagaacatgaattcgggcaacctggtgtctgtgctcacccaggccgagggtgcctttgtggcctcactgattaaggagagtggcactgatgacttcaatgtctggattggcctccatgaccccaaaaaggtaggctgcagccttctttatctcctaatgatcaggtttgagaagtaagaaggaggttcaagttctggtctcttaagtaccagcttttatcgctttccagaaatcaggctgtttacagatcctctaatgtcctgtgtagcaaggtgca

SEQ ID NO: 13175 - DNA, 505 bp, Homo sapiens
  MAP TO CHR21.3; EXPRESSED IN ADULT LIVER, SIGNAL = 0.44; EXPRESSED IN BRAIN, SIGNAL = 0.67; NT HIT: gi14780599, EVALUE 5.00e-81; SWISSPROT HIT: P55347, EVALUE 7.00e-29; EST_HUMAN HIT: AJ003428.1, EVALUE 0.00e+00
acaggctctgtgtttctgggcatttagagaattcagaagagctgttgagtcctcttaagtagttactatagtggagaacttgagtcattctttgtagcgtgcttcgtagagcagcgtgtttgttagaaggatttgttaatcctgtatagggtctttacgaaggctgttttcatggaagcttctctttgttgactccaggttcatcaatgccagaagacgaattcttcagccaatgttggattcaagttgttcagagacccccaaaacaaagaaaaaaactgctcagaaccggccagttcagaggttttggcctgattctattgcatcaggagtcgcacagccaccgccgagcgagctcaccatgtcggaaggtacaggtggccggccaaggccagacatggtggaccatggggtggggattatgaacaagaggcctggatcaggcctgttagctgtgagcctcaggtaatgtggtgaacgagagtgcgtggttctctttctctgc

SEQ ID NO: 13176 - DNA, 514 bp, Homo sapiens
  MAP TO CHR17.3; EXPRESSED IN ADULT LIVER, SIGNAL = 4.4; EXPRESSED IN BRAIN, SIGNAL = 7.8; NT HIT: AF015812.1, EVALUE 0.00e+00; SWISSPROT HIT: Q61656, EVALUE 3.00e-38; EST_HUMAN HIT: AV645538.1, EVALUE 0.00e+00
ttgctattttgccacactgcaacaccttacagatgtggaagatgtgaaatttgtcatcaattatgactaccctaactcctcagaggattatattcatcgaattggaagaactgctcgcagtaccaaaacaggcacagcatacactttctttacacctaataacataaagcaagtgagcgaccttatctctgtgcttcgtgaagctaatcaagcaattaatcccaagttgcttcagttggtcgaagacagaggttcaggtaaggatgactgataggaaatgttggtagttacgagtcacatcgttgtctacaaatccatttaaatggtattggagggtgagtaaaaccttgaatgtgaaaacttaagctgaaaaattgtaaaaacatttcacgcctaccatgaatagatctgtttctttctgtccacaatgatttgtgtcatagacataattgatcaatttgcaattgttttcttgacaggtcgttccaggggtagaggaggcatgaaggatgac

SEQ ID NO: 13177 - DNA, 545 bp, Homo sapiens
  MAP TO CHR21.3; EXPRESSED IN FETAL LIVER, SIGNAL = 0.61; EXPRESSED IN BRAIN, SIGNAL = 0.4; SWISSPROT HIT: P08131, EVALUE 5.00e-06; NT HIT: gi13386207, EVALUE 2.00e-22; EST_HUMAN HIT: W76571.1, EVALUE 0.00e+00
aatgcatttcattgacgcagagctgtaaaaacaaaaggagttcttccataaatataagatgaagggtgttagttaactgcaatgacaaagaagattactaagttgcttatatgaaatgtgggagcttaaatgtgtgaaggatgaccctgtaaggtgccacacccacggctgaacgtatataaatggtcctgtccagatgtggcatgcaaactcagaatcttctcagtgtaactcagctgaactcacatctcccatcaacatgtcctacaactgctgctctggaaacttctcctcccgctcctgtggtggctacctgcactacccagcctcctcctgtggcttttcctaccccagcaaccaggtctacagcactgacctctgctctcccagcacgtgccagctgggttcctctctctataggggctgtcagcagacctgctgggagcccaccagctgccagacatcctatgtggagtccagcccctgccagacctcctgctaccgtcccagaacctccttgctctgcagtccctgccagacaactt

SEQ ID NO: 13178 - DNA, 591 bp, Homo sapiens
  MAP TO CHR5.3; EXPRESSED IN LUNG, SIGNAL = 0.7; EXPRESSED IN BRAIN, SIGNAL = 0.72; NT HIT: gi15295804, EVALUE 0.00e+00; SWISSPROT HIT: Q9Y5E7, EVALUE 1.00e-110; EST_HUMAN HIT: BI000150.1, EVALUE 0.00e+00
tgcatttgcagttcgataggcagaccggggatttgttgttaaatgagaaattggaccgggaggagctgtgcggccccacagagccctgtgtcctacctttccaggtgttactagaaaatcccttgcagttttttcaggcggagctacggattagggacgtaaatgatcattccccagttttcctagacaaagaaatacttttgaaaattccagaaagtatcactcctggaactactttcttaatagaacgtgcccaggacttggatgtaggaaccaacagtctccaaaattacacaatcagtcccaatttccactttcatcttaatttacaagacagtctcgatggcataatattaccacagctggtgctgaacagagccctggatcgcgaggagcagcctgagatcaggttaaccctcacagcgctagatggcgggagtccacccaggtccggcacggccctggtacggattgaagttgtggacatcaatgacaacgtcccagagtttgcaaagctgctctatgaggtgcagatcccggaggacagccccgttggatcccaggttgccatcgtctctgccagggatttag

SEQ ID NO: 13179 - DNA, 553 bp, Homo sapiens
  MAP TO CHR2.3; EXPRESSED IN ADULT LIVER, SIGNAL = 0.71; EXPRESSED IN BRAIN, SIGNAL = 0.46; SWISSPROT HIT: P45887, EVALUE 3.00e-20; NT HIT: D00649.1, EVALUE 0.00e+00; EST_HUMAN HIT: BI046776.1, EVALUE 0.00e+00
aggccaccacacaagaaatcctccaccttctcttcctgacaccttcatactcactggcatctgctccatcctgtctcctgctatcctgtttctgggggaagaaaggctgtttttcccatccttatccttcttcagagaccttccagtgcctgaatccctctgtgtggagccctcagccattcatttctcttttcttctttttgcattgcagggtgtgatggtgggaatgggccagaaagacagctatgtgggggatgaggctcagagcaagcgagggatcctaactctcaaataccccattgaacacggcatcatcaccaactgggatgacatggagaaggtatctgtagacttccccttaatgagcctgctttaatgatcacccatcatcatgaccctcgtattcataggccactgtgctctgtcaactctccctctaaaatgcttctcacttctgtctttcctttcttttcagccccacgaccatttctccaacctaggctgccaacatctctccctggactattgcaatggcttcctggctgatttcttg

SEQ ID NO: 13180 - DNA, 553 bp, Homo sapiens
  MAP TO CHR14.3; EXPRESSED IN ADULT LIVER, SIGNAL = 2.5; EXPRESSED IN FETAL LIVER, SIGNAL = 2.5; EXPRESSED IN BRAIN, SIGNAL = 2.5; EST_HUMAN HIT: BF854275.1, EVALUE 0.00e+00; SWISSPROT HIT: O13712, EVALUE 1.40e+00; NT HIT: gi14750893, EVALUE 2.00e-93
ttgaggttgttaaccctgcccagttgttaattagaccctgatttcttagtggacacctggccactgcctcttccctagcctggcagctgtggcttctgaccccctcccctccaacccctcaccctccagatgcaggccctgacttcctgtgagtgcaccatctgtcctgactgcttccgccagcacttcaccatcgccttgaaggagaagcacatcacagacatggtgtgccctgcctgtggccgccccgacctcaccgatgacacacagttgctcagctacttctctacccttgacatccaggtactgcagcccctctaggactcaggtaccctgagctttgaacagggaccctcccacccaccacctctgcatcctgtccccagcttcgcgagagcctagagccagatgcctatgcgttgttccataagaagctgaccgagggtgtgctgatgcgggaccccaagttcttgtggtgtgcccaggtaagtggcctgcccagggcagctactgtggaggggcaggggatggttccaggtcaggcctttgataa

SEQ ID NO: 13181 - DNA, 518 bp, Homo sapiens
  MAP TO CHR11.3; EXPRESSED IN BRAIN, SIGNAL =   2; EXPRESSED IN FETAL LIVER, SIGNAL = 1.3; EXPRESSED IN ADULT LIVER, SIGNAL = 1.3; EXPRESSED IN LUNG, SIGNAL = 0.74; SWISSPROT HIT: P00489, EVALUE 1.00e-30; NT HIT: U94777.1, EVALUE 0.00e+00; EST_HUMAN HIT: BG181248.1, EVALUE 0.00e+00
actgggacattgagagtggggaaaatgagggttccaggaggggcttagagatctaactccagtaccccaccctctgcatgaggtgctggggctggcccaagagagtgtgacagactcaagggctggtttggggtctggtctggaggctcagatggcctcatccggggctggcaggcgctggcgggaaggctccacaccccagatctcccgggcatactgggcaatggtgcggtcactggagaacttgccagaggtggctatgttccggatcaccatccgcgtccactctcttgggttctgcaggtcaaagggaagctctggttcactctgctggcaggatctccaccttctgcctcatcccaaccagggccaccaaagccctgccaacccctggcccaggacccctcaccttgtacaaggcgctgactttctcctggcatttaatgtagtcttcataatctgcgaagactttaaacctggaggggaaaggataggcatgtgctattcctttagggggc

SEQ ID NO: 13182 - DNA, 503 bp, Homo sapiens
  MAP TO CHR19.3; EXPRESSED IN LUNG, SIGNAL = 0.7; EXPRESSED IN BRAIN, SIGNAL =   2; EXPRESSED IN FETAL LIVER, SIGNAL = 0.74; SWISSPROT HIT: P51522, EVALUE 1.00e-72; NT HIT: gi12741394, EVALUE 0.00e+00; EST_HUMAN HIT: BG291884.1, EVALUE 0.00e+00
tgcacactaaaggctttcccacactcattacacttgtaaggtttctctccagtatgaactctccgatgactcgcaaggtgtgaattgtaactgaaaaccttaccacattcattgcatttgtaaggtttctctccagtatgaattctccaatgccttgcaaggcttgaagtctgactgaagactttaccacattcattacacttgtatggtttctccccagtgtgaattctctgatgagttgcaaggcttgaagtctgactgaacaccttgccacattcattgcatttgtaaggtttcttgccactatgaattacctgatggttggtaagtgttgacctcacactaaaggctttgccacactctttacatgtgtaaggtttctctccaatatgagttttctgatgtagtgcaaggcatgaatttcgactgaagaccttgtcacactcataacatttgtaaggtttctctccagtgtgaactctccgatgtagtgcaaggcatga

SEQ ID NO: 13183 - DNA, 539 bp, Homo sapiens
  MAP TO CHR1.3; EXPRESSED IN ADULT LIVER, SIGNAL = 4.3; EXPRESSED IN LUNG, SIGNAL = 4.6; EXPRESSED IN BRAIN, SIGNAL = 3.1; EST_HUMAN HIT: AV751940.1, EVALUE 0.00e+00; NT HIT: gi14722057, EVALUE 2.00e-83; SWISSPROT HIT: O08709, EVALUE 4.00e-25
aagcataggcttctctggaggtaagtagattgaaaagcactcctcaacagaaaagcttaaaagtaaatatcatcataagcattcatttaaaaaagaaagcctgtttttgatccagaagttgtgacttttcattctctgtgatgttggtgataactcttaattcaattgtgaccttgtttttcttcctttcagatggggcattctcttctcccaccctcgggactttaccccagtgtgcaccacagagcttggcagagctgcaaagctggcaccagaatttgccaagaggaatgttaagttgattgccctttcaatagacagtgttgaggaccatcttgcctggagcaaggttagtatcaattggcatgtgctttgagcctgagattataggtcaagttataaattatggagtacttggttttgaggttaaggtacaagtaagccttaggttcaaagttcactaattatttgaaaatttcagttgaaccacacagtgatcacattgctaaatccattggtcagtcaattctcagccctcc

SEQ ID NO: 13184 - DNA, 545 bp, Homo sapiens
  MAP TO CHR17.3; EXPRESSED IN FETAL LIVER, SIGNAL = 1.6; EXPRESSED IN BRAIN, SIGNAL = 2.4; EXPRESSED IN ADULT LIVER, SIGNAL = 1.2; EST_HUMAN HIT: BE545849.1, EVALUE 9.00e-84; NT HIT: gi14786064, EVALUE 6.00e-84; SWISSPROT HIT: Q95115, EVALUE 6.00e-27
accagcagatccacttcctgcctctcatccctcccaactccatctccagttgctgtggcccttgcccagtttctcctgtggacactgcaagagatgcccttgggctgcagcccatgccagcttctgtgttatctcactcccctctccatcctctccctggactctcacggcttccccaggaacagaggctgtgcccgagctcttcacctcctgagcccctcgggaggcagccccacccccaccacagagggactgagagccctttcccctgcaccagcccctcatcatgcatctgtccctgtgtcccctgcagcacgttcatcattgagaagcagcctcctcaggtcctgaagacccagaccaagtttgcagccactgtgcgcctgctggtgggcgggaagctgaacgtgcacatgaaccccccccaggtgaaggccaccatcatcagtgagcagcaggccaagtctctgctcaagaacgagaacacccgcaagtaattgtgcagcttcctctcattccctgctacttgtctcatgtcctggcaa

SEQ ID NO: 13185 - DNA, 546 bp, Homo sapiens
  MAP TO CHR1.3; EXPRESSED IN ADULT LIVER, SIGNAL = 0.43; EXPRESSED IN BRAIN, SIGNAL = 0.39; NT HIT: X14975.1, EVALUE 0.00e+00; SWISSPROT HIT: P15812, EVALUE 3.00e-54; EST_HUMAN HIT: AA311140.1, EVALUE 0.00e+00
agcccaactctctctctcccctcttgttcctagtactataactctcatatttgaatttgcctctcatcatcattttgaaagacatagtgagagactagagaatgagatgtgtgggttcaggactgtttcttagacaagagaaagaagtgattactaaatcactcttagtattattacaaaggcacctgagtctctgagctctggcctggggtgcccttcaaaattccattttttttctatcttcttcttcctagtgaagccagaggcctggctgtcctgtggccccagtcctggccctggccgtctgcagcttgtgtgccatgtctcaggattctacccaaagcccgtgtgggtgatgtggatgcggggtgagcaggagcagcggggcactcagcgaggggacgtcctgcctaatgctgacgagacatggtatctccgagcaaccctggatgtggcggctggggaggcagctggcctgtcctgtcgggtgaaacacagcagtctagggggccatgatctaatcatccattggggtgagaaacagct

SEQ ID NO: 13186 - DNA, 585 bp, Homo sapiens
  MAP TO CHR3.3; EXPRESSED IN LUNG, SIGNAL = 1.2; EXPRESSED IN BRAIN, SIGNAL = 1.3; NT HIT: gi14737669, EVALUE 1.00e-124; SWISSPROT HIT: P51178, EVALUE 6.00e-12; EST_HUMAN HIT: AL046616.1, EVALUE 1.00e-100
  unsure 42
  unsure 67
  unsure 96
  unsure 161
  unsure 313
  unsure 465
ccagagccctgtctctcatctgccggctttcataggaccagnaagtgtgtgagcagggccccggggntgtgctgaggcagctcttttccctccggntcccttctttctggctgcagtctccccagggtctcccagcccagtgcggccctgcgactgcgttnagcaggccctggtcaggctctcaccagtctcgctgggctcgtagtgctcaatgagggagagggccagcgcaggctgccgccctcctcccgctgctggtgctgcaggaacgtcactaactgatccaccgacagagtctcccctgagcccgcgnctcggcgaaggtgcggtcgatctccacccgctggtcagcatcttgtagaaggcctcaatctcctcgtcctccagggagtctgtctgggagtggtcacactcttggcagagccaggacagccgagtgggctcagagcaggccttggggggtgntcaagggcccatggacaggcagccccagcccccacttcctgcctcaccctgaagatcttccgggcatagctgtcgtccacctggatgttgagctccttcaggaagttctgcagctccttg

SEQ ID NO: 13187 - DNA, 558 bp, Homo sapiens
  MAP TO CHR4.3; EXPRESSED IN BRAIN, SIGNAL = 0.64; EXPRESSED IN ADULT LIVER, SIGNAL = 0.6; NT HIT: AF001951.1, EVALUE 0.00e+00; SWISSPROT HIT: P30968, EVALUE 2.00e-40; EST_HUMAN HIT: BG189454.1, EVALUE 1.30e-02
catgccactctgttttgagcattgctatttaaaaactgcccacaaatgacactaactctaaggaatacataccgtgggggtcctgatgaaggacccgtgtcagggtgaagatgatttttgcattgcagatcagcatgatgaaaagagggatgatgaagaggcagctgaaggtgaaaaagttataaaatgcttgatgccaccattgtgaaaaactgcagtgtgttacacattgagagaaaacttttgtctgtccagagctgtctgctagatgaatcatcctgaagatgtataactgtatgagacaataaaaagctatgttacttttttccatatggtatttgaaagttttctctttggtactctgctagccttctaacatgttacctaaagcaatttctaagctccttagtgttatacttctgacgtttctatgaaaagtcatgtgaatatttacttaaaatatgtttgggtaagtgtcaatagatctgtaagattttggattttttagaaattatttcaaccttgaagaataatcatccctcaaggatttaaacgttg

SEQ ID NO: 13188 - DNA, 600 bp, Homo sapiens
  MAP TO CHR14.3; EXPRESSED IN BRAIN, SIGNAL = 0.88; EXPRESSED IN LUNG, SIGNAL =   1; NT HIT: gi13649630, EVALUE 0.00e+00; SWISSPROT HIT: P30958, EVALUE 6.70e-01; EST_HUMAN HIT: BE940121.1, EVALUE 1.00e-86
atcagcttgcgtcatgtgagatatctgtagactctggaacaaggggctggcagacacagtgctctttagactagagagggtggccaggcaccggttctccaaggagaggatgtctgggtgggcagaaacatgtccatgtggtttctccatggtcttcaggtcagaaagtgtggccaggcactggttctccaaggagaggatgtctgggtgggcagacacatatccatgtggtttttccatggtcttcaggtcaggaagcgtggctaggcactggttcttcaaggagaggatatctgagtgggtagatacatgctgatgtagtttctccaagggctgtaagtcagggagcatagccaggcaccggttctccaaggagaggatgtctggatgggcagacacatgcccatggagtttttccatggctgaaactcagcttgtatatgcctagaaggagagaaagacaggagatgagcacctggctgcactgagcgtgtatttgcatgagagcatatcttccccacagccctcctgataatgccaatgatttgtgggtagaaaacaaccaatgttgtttttcccaggactgggttcatccagaga

SEQ ID NO: 13189 - DNA, 526 bp, Homo sapiens
  MAP TO CHRX.3; EXPRESSED IN BRAIN, SIGNAL = 0.52; NT HIT: gi14774775, EVALUE 6.00e-19; SWISSPROT HIT: Q14974, EVALUE 2.00e-29; EST_HUMAN HIT: BE744080.1, EVALUE 4.00e-18
cgtcaaagtttgctctggtgaactccagtagttcaggagtgccttagtagccactaacttcacattactattaggacctccaatctctttagatttatcccttagctgctccctgtaaatttcttggcagatgtaataaattgcatccaatgttgacttttccatgtactctaggctgctggggtttgtgacattggctaccagctaaagaatgagttctgacgactagtttactgggatctctgcacaaacagtatcagccatcatagtgaggaagaactaagcccaaagtcctcaaaacagttctcagcttgtttgtcaaacagtagcattaacggcaaccctttctactgatgttgtgccttgaagttaagattcttagatgtcaaagaattcttgatttgtagaccagctacaaccctgcaagtctggctgttttctgaattttctggcactctggagagttccagaaggactcttggtaagttcaaccatcgcacactcaaggaacttctaggcggcttct

SEQ ID NO: 13190 - DNA, 596 bp, Homo sapiens
  MAP TO CHR2.3; EXPRESSED IN LUNG, SIGNAL = 0.57; EXPRESSED IN BRAIN, SIGNAL = 0.33; EXPRESSED IN FETAL LIVER, SIGNAL = 0.42; SWISSPROT HIT: P28330, EVALUE 7.00e-24; EST_HUMAN HIT: AL550019.1, EVALUE 1.00e-79; NT HIT: gi11429262, EVALUE 1.00e-79
acctggcacactgaagacacttatgaaataaccagcaaataactgaatatgtgatcttattcattcctattgtatcaactcttataaatgaaagacttttaaaacctattgctactccatccttgtctccagaattccaaatatacctctgtaacaaactgcttggcatttacatgtgaatctcatcctacacctaaaattcattatggtgaaaattcaacttacacactaccattttctttgcataaaactatgttaatatctcaaacatagcttacattataatccgctttattgttattttccgacttgaggtcatgaattatcccgtgttcatctttgccttcctcctagcatatagctcagtctatgtattaaccaagtactaagaaaatgttaaggcactgcttccaagaatccaaagccaactaaatattaacttaccttccagctccaggctctgtcattgctattgcaccaatacatttgcctgcagtcatctggggaataaagtgcttaatctgttcttctgagccatggtttgtaatataggacatgacaatacctgaatgaatactaaaacctgggcctgaaca

SEQ ID NO: 13191 - DNA, 519 bp, Homo sapiens
  MAP TO CHRX.3; EXPRESSED IN ADULT LIVER, SIGNAL = 1.2; EXPRESSED IN BRAIN, SIGNAL = 1.4; SWISSPROT HIT: P49184, EVALUE 5.00e-13; NT HIT: L40817.1, EVALUE 0.00e+00; EST_HUMAN HIT: BE812848.1, EVALUE 1.00e-57
cagtcagcattgaagtccccaagcaggatcacgtcctagagacacagcagccatcaggctggccgctgggccaccctatccttgtccctcctgtacaaactgcccaggcctaccttgctctgccagtgctgggagacctccagaaacacatcgtagagggcgttcagctccttctctacggccttaggagtggtgtgcagcgggaccaacaccaggctgggaaggactgcaaggcccagggaccgagggctgccatccactcctggaccttctccccctagcccgtctgggtgaggaagcccccagtggagccagccagaactccccttctgctcccacataccaagcccacccttcccttcctaccattgctgggcaaagagaactgggccacaaatggctcccgggcaaagacgtcatcctcatcgttgtacacgtaggaactcaggacctgtgttttgtgtgacctgggaggacaaagggatgggcagcagtggccccacgtctttgattttggct

SEQ ID NO: 13192 - DNA, 502 bp, Homo sapiens
  MAP TO CHR9.3; EXPRESSED IN BRAIN, SIGNAL = 0.39; EXPRESSED IN LUNG, SIGNAL = 0.49; SWISSPROT HIT: P01567, EVALUE 4.00e-37; NT HIT: V00531.1, EVALUE 0.00e+00; EST_HUMAN HIT: AI860608.1, EVALUE 7.00e-04
tttgagtgcaggggaaaaacaggcaatgatgaaaaaaaaaatgaaaaacgtctttaaacacatggagagagtacataaagaaagcaaaaacagagatagaaagtaaaactagggcatttagaaaatggaaattagtatgttcactatttaagacctatgcacagagcaaagtctccagaaaacctagaggccacggttcaagttacccacctcaggtagcctagtgatatttgcaaaatcccaatggcccggtccttttctttactgatggtcgtgctggtactcagctacaaatccatctgctctctgggctgtgatctgcctcagacccacagcctgcgtaataggagggccttgatactcctggcacaaatgggaagaatctctcctttctcctgcttgaaggacagacatgaattcagattcccagaggaggagtttgatggccaccagttccagaagactcaagccatctctgtcctccatgagatgatccagcaga

SEQ ID NO: 13193 - DNA, 500 bp, Homo sapiens
  MAP TO CHR14.3; EXPRESSED IN LUNG, SIGNAL = 0.53; EXPRESSED IN BRAIN, SIGNAL = 0.67; NT HIT: gi14751733, EVALUE 0.00e+00; SWISSPROT HIT: P24938, EVALUE 1.80e-01; EST_HUMAN HIT: BE673491.1, EVALUE 1.00e-120
gcctacccttcctttccatctcacagcccttctttttgtttctagatggagtatccctatggagagctcatcatctccctgggcttcttttttgtcttctttttggagtcgctggcattgcagtgctgtcctggggctgctggaggatcgacagtgcaggacgaagaatggggtggggctcatatcttcgaactccacagccatggacatttaccctcaccctcaaagggtcccctccgagcccttgtcctcttgctgtcactctcctttcactcagtgtttgaagggctagctgtggggctgcagccgacagtagcagctaccgtgcagctctgccttgctgtcctggctcataaggggcttgtggtgtttggtgtaggaatgcggctagtgcatttaggtaccagctcacgatgggcagtgttctccatactattattagctctcatgtcccccctgggcctagccgtagggctggctgtgactggaggggactctga

SEQ ID NO: 13194 - DNA, 509 bp, Homo sapiens
  MAP TO CHR8.3; EXPRESSED IN BRAIN, SIGNAL = 0.3; EXPRESSED IN FETAL LIVER, SIGNAL = 0.34; NT HIT: gi7657078, EVALUE 4.00e-57; EST_HUMAN HIT: AL560247.1, EVALUE 1.00e-114; SWISSPROT HIT: P87053, EVALUE 8.00e-06
tctgtgtgcgcacttaggtcatgcacatgctcccatataaatgtgagagaagataggtggcaaagcatggaatttgctgattagggaaataaatactagaaataaattactaaactccctttctatgccattgtcatgtcttactcgtaatgaatctgctatcagactaaacctggagctttttacattttgctttgttttgtgtttccagtttgacaaatggacagactctcaaagaagaagaatcctcacaggcctgttggagcgctgctcgctgtcccagcaaaagttctgctgtcgaaagcttcaagagaaaattccagcagaagccctggactttacaaccaagcttccaagggtgttatctttatacatcttttctttcctggaccctcggagcctttgtcgttgtgcacaggtaaaggcaaggaaggggtatgtggtgttttgtgaggacagccttaggaaacttgaaacttgaaactagaagttaaggggaaacacaggca

SEQ ID NO: 13195 - DNA, 594 bp, Homo sapiens
  MAP TO CHR14.3; EXPRESSED IN BRAIN, SIGNAL = 0.68; EXPRESSED IN LUNG, SIGNAL = 2.2; SWISSPROT HIT: P03950, EVALUE 3.00e-76; NT HIT: gi14751803, EVALUE 0.00e+00; EST_HUMAN HIT: BG564488.1, EVALUE 0.00e+00
tttggtgatgctgttcttgggtctaccacacctccttttgccctccgcaggagcctgtgttggaagagatggtgatgggcctgggcgttttgttgttggtcttcgtgctgggtctgggtctgaccccaccgaccctggctcaggataactccaggtacacacacttcctgacccagcactatgatgccaaaccacagggccgggatgacagatactgtgaaagcatcatgaggagacggggcctgacctcaccctgcaaagacatcaacacatttattcatggcaacaagcgcagcatcaaggccatctgtgaaaacaagaatggaaaccctcacagagaaaacctaagaataagcaagtcttctttccaggtcaccacttgcaagctacatggaggttccccctggcctccatgccagtaccgagccacagcggggttcagaaacgttgttgttgcttgtgaaaatggcttacctgtccacttggatcagtcaattttccgtcgtccgtaaccagcgggcccctggtcaagtgctggctctgctgtccttgccttccatttcccctctgcacccagaacagtggtggcaacat

SEQ ID NO: 13196 - DNA, 557 bp, Homo sapiens
  MAP TO CHR10.3; EXPRESSED IN ADULT LIVER, SIGNAL = 0.94; EXPRESSED IN BRAIN, SIGNAL = 0.84; EXPRESSED IN FETAL LIVER, SIGNAL = 0.35; EST_HUMAN HIT: AA194057.1, EVALUE 0.00e+00; SWISSPROT HIT: Q9ZCF2, EVALUE 1.40e+00; NT HIT: AF006516.1, EVALUE 0.00e+00
aagtgcatgtgttgcattttgattatgtcaaaagacaatccaagtctgttggttaggtaaatctctgttcactgattaatacatgacccaccttctttcccaattattttattttaaaattctaatgttgctagtgccaggtaatggattaaagagtgcctactcacaaatcaactgtatccacttttacaatatgtaaaaggtacttttaacttcctttcattgaaccagtgtacaacagttcactgtacaactgaaggactgacatggcaatccttaagaattttacctacagaatgaatgcacacaatttgacacattttcttagtttcaaaagattatttaaaaaaggaattcagtagattgacttgtaaataaccattgcagattttgaatctgcaaaaatccgtcacattgctgttgggacagattaagataaggctaaaatttttttccaagttaacatattgagaaaatagaatcataattctgcaataaatcattatcttttattttttttaaagcaaatcagtgaaggaaaggacaaaaacctttgg

SEQ ID NO: 13197 - DNA, 553 bp, Homo sapiens
  MAP TO CHRX.3; EXPRESSED IN BRAIN, SIGNAL =   3; EXPRESSED IN ADULT LIVER, SIGNAL = 2.4; EST_HUMAN HIT: BI522565.1, EVALUE 0.00e+00; SWISSPROT HIT: P32512, EVALUE 1.40e-02; NT HIT: gi16172300, EVALUE 0.00e+00
tcccacttgctgtctctgtggctcctctctacggccatcagggtacatatgcttgtaaaaacagttctctccaaatgggcagctcccacgtccttcatcaaaatacttgcatgccttgttgctcattgcctccttgtatttctgaatgagtttctgcttctcttctttctcctccacccagtactcacttggaatgacaaagttagatgtgattcggcattgtgggcaggacttgacgatcctgctctcaaattccttagcactcctccacttgcgaatgcacttgagacagaaggtgtggttgcagttggagaggatcccgaagcggtgctcgttggggttggctttctcatagaccacctccatgcagatcccacacaccttgtccttgctgcgctgcacagcaaatgagaactccatgtctttctcatgggcttcaatgcacgcttgtatatgctgtgatctctgggcagcatccatcggatgcaggacctgcagcccacacatgtcacataaatctccgtggagatacacacagttctccccatatcgg

SEQ ID NO: 13198 - DNA, 581 bp, Homo sapiens
  MAP TO CHR12.3; EXPRESSED IN LUNG, SIGNAL = 0.73; EXPRESSED IN ADULT LIVER, SIGNAL = 0.52; EXPRESSED IN BRAIN, SIGNAL = 0.42; NT HIT: gi11436313, EVALUE 5.00e-72; EST_HUMAN HIT: BF525988.1, EVALUE 0.00e+00; SWISSPROT HIT: P51890, EVALUE 2.50e-02
gatggcagcttctcctgaacttctttactttctatactgatctctactcacccccactcctttcttccactcctccctctctacctcttggatttcctcttttgctttatctcattctgacttctctttcttccctatccctgctccctctcaatcaatccactgtgccctgggggtctaggcccaaaacatgctgaagaaggtggaaggcttggaggatctgagcaatctcaccaccttgcatcttcgagacaaccagattgacaccctgagtggcttctccagagaaatgaaatcattgcagtacctcaacctgaggtatgcaccctctccaagccccaccttgcccctacccctgaccaggtgcagcttttgagtctgtgttcttccctggcccaatcccccagtcctagcccacagctggattctcaaggaaagcccggctttccttcctttcttctgcactgagttgcaacactaaatcccttatagcttgtgacccctgaatttttattcattcaatccacaattattgagaatgtgctatgtgccaggccttgtgctgtgttttggggacattt

SEQ ID NO: 13199 - DNA, 534 bp, Homo sapiens
  MAP TO CHR11.3; EXPRESSED IN LUNG, SIGNAL = 1.7; EXPRESSED IN FETAL LIVER, SIGNAL = 0.64; EXPRESSED IN BRAIN, SIGNAL =  12; SWISSPROT HIT: P23927, EVALUE 4.00e-17; NT HIT: M28638.1, EVALUE 0.00e+00; EST_HUMAN HIT: H21465.1, EVALUE 0.00e+00
gcctccaaagctgatagcactacctggactattacagtatgcactgaatgaatgagcagaaaacaaaaaaacaagctacatacctggcgctcttcatgttttccatgcacctcaatcacatctcccaacaccttaactttgagttcctctggggagaagtgcttcacatccaggttgacagagaacctgtccttctccaggcgcatctagaaatagcaaggtaagggaatgggatgggagaaagagggcaaaaatactgattacacaggtgctgtcttattctgcagagctgctttctgtccgggtaattcatccttctcttctctgcttaaaaaatctcctttttaaataaacatagctgtctgcttcagggagccaccacagtgatacctaaggctcatggtgatcagacccaaactttatttacagggacagagaagaagacagatcacccaggggaccagtcgcaaggatgggtgcaagcctggcatctgctgcctctctgactccaatgcctggctttgtggtttgtct

SEQ ID NO: 13200 - DNA, 557 bp, Homo sapiens
  MAP TO CHR3.3; EXPRESSED IN LUNG, SIGNAL =   2; EXPRESSED IN BRAIN, SIGNAL = 1.5; SWISSPROT HIT: Q03112, EVALUE 2.00e-30; NT HIT: S82592.1, EVALUE 0.00e+00; EST_HUMAN HIT: AA234461.1, EVALUE 1.00e-100
agtgtaggatggggcttgtcataaaatttctatacagaatgcagctaaattaattgctttcttgcttaactattttggatttggtcataaatacagtaaagatatgaacatttttagaaaggcatctgaccccatttggattctaaaatatttcaaagatagaatatttgctttttggtaatcaaaggaaatgtacgtttcatgcataatgtaaccatgatgctgtactatgggaaaatctgtacctgcgatttggactttctgtgtaacggctgcttaagttcctctggcacatgggaagtactaaaagaagacagctcagcttcagaatattgattatcttccattttcctcattttgaggctatctgtgaagtgccttatatgatctagagcagaaagtccacttttatattcttcctctttatacctaaaatgaaccaacgaaaaacacagaaattttcttttcatttgttatctaatcaaatcactttcatttgaatctatctatacaactgacaaacttcatattgtatctgcaaggtaaagtagcatgca

SEQ ID NO: 13201 - DNA, 577 bp, Homo sapiens
  MAP TO CHR1.3; EXPRESSED IN LUNG, SIGNAL = 0.68; EXPRESSED IN ADULT LIVER, SIGNAL = 0.73; EXPRESSED IN FETAL LIVER, SIGNAL = 0.61; EXPRESSED IN BRAIN, SIGNAL = 0.88; SWISSPROT HIT: P34820, EVALUE 4.00e-22; NT HIT: gi4502428, EVALUE 1.00e-103; EST_HUMAN HIT: BE893005.1, EVALUE 1.00e-73
actccaggcttcagatgtggaaactgaggctcagcaggaccccttgggtcctcagcctccacgctcctggacctgcccaggccccggcagagagaccgctgctgtgtctgctgcagggccactgcccgtgagtgacccctctctcctttctgtctcagggcacagcgtggatcctggcctggccggcctgctgggtcaacgggccccacgctcccaacagcctttcgtggtcactttcttcagggccagtccgagtcccatccgcacccctcgggcagtgaggccactgaggaggaggcagccgaagaaaaccaacgagctgccgcaggccaaccgactcccagggatctttggtgagggtcgggcaggctggggccgaggccctgtgggcttctggctgagagaggcagggcgagaaccaagtggtggcccagagccctcaggctcaggtcggttcaagctgacggccactctccagccacctttcctgacaccatcttggccctgatgcaccctggtgaccggcactccggaggcctgtcctggctgtccctgctgcccagaagtctccctctct

SEQ ID NO: 13202 - DNA, 561 bp, Homo sapiens
  MAP TO CHR8.3; EXPRESSED IN BRAIN, SIGNAL =  23; SWISSPROT HIT: P04406, EVALUE 3.00e-59; NT HIT: AF017079.1, EVALUE 0.00e+00; EST_HUMAN HIT: BE875050.1, EVALUE 0.00e+00
gagtcttctgggcaggagtggcagcatggattgtggtcacaagtccttccacaatgccaaagttgtcatggatgggcttggccgggggattaagcagttggtggtacagaaggcattgctgatgatcttgaggctgttttcagacttctcagggatcatgcccattatgaatatgggggcatcagcagagggggtagagatgatgacccttttggctcccccattaagtgagccccagccttctctatggtcatgaagatgccagtggactccacggcatactcagcttcagcatcatcccatttgattttggtaggatcttgctcctggaagatggtgatgggatttccattgatgacaagcttcccattctcagccttgacggtgtggtggaatttgtcatgggtagaaatactggaacatgtagaccatgtagttgaggtcaatgaagggtcattgatggtgacaatatccactttactagagttaaaagcagccctggtgaccaggtgcccaatatggcccaaatctatttactctggccttcaccttcaccatgat

SEQ ID NO: 13203 - DNA, 580 bp, Homo sapiens
  MAP TO CHR2.3; EXPRESSED IN LUNG, SIGNAL = 0.46; EXPRESSED IN BRAIN, SIGNAL = 0.85; EST_HUMAN HIT: AW662905.1, EVALUE 1.00e-101; SWISSPROT HIT: Q99743, EVALUE 9.00e-22; NT HIT: gi4505428, EVALUE 6.00e-78
agccagcctgagaaagactggtgcaggggcccccaggatgcccagacctcatctgcagcccctgttcactgcccaggacccagccgtgggctccttagggatgctgggaaagacggctaagggacggaaatgaagtgtacagaccgagcagcagcaagatctgcctgcaaggctgaaataactctttcatctgattatgtttttcggctccaccttgaagttttcggcacagttcagcatgttccagaccatcaaagaccagctagagcagcggacgcggatcctgcaggccaatatccggtggcaacaggaagagctccacaagatccaggagcagctctgcctggtccaggactccaacgtccaggtgatccccttcccgggctggcctctgtccctgctgctgtgtgggaaggggtcctgccgccatttccgggcagccaggacttcctcccaagccctgtgaactgccctgccaagccccatttgcttatgaaagcatattgcagtctctgcaaaggacaaggaacaaatcccggtccccatccctgcctccaggccacacccctgatgtcctctt

SEQ ID NO: 13204 - DNA, 536 bp, Homo sapiens
  MAP TO CHR1.3; EXPRESSED IN BRAIN, SIGNAL = 0.46; SWISSPROT HIT: O00311, EVALUE 7.00e-23; NT HIT: AF015592.1, EVALUE 6.00e-81; EST_HUMAN HIT: AL044123.2, EVALUE 5.00e-79
tttttggattccttttgatcctataaaatgtgcgtttacttagtgtttcctagtgattaaatatccttttaaatttaccaacacgttgctcaagaaagaaaacatattttgcagtgaggattctcagtcctggttgtacattaaaatcacctgaggaacttttttaaaacattgatgcctgagccctacttcagaactgttcaatcaaaatctttgggtctgggcatctgaaatttttaaggctcccaaggtgattctaatgcataataaatgttgaggactattgatttagatgataaaattatagatttgaaatttatttttaaaatttgtcttctgttgcagcaattgacatgtggtctgcaggtgtcatatttctttctttgcttagtggacgatatccattttataaagcaagtgatgatttaactgctttggcccaaattatgacaattaggggatccagagaaactatccaagctgctaaaacttttggtaagcagttttgtattatagaaccaaacaaaatgcctttg

SEQ ID NO: 13205 - DNA, 530 bp, Homo sapiens
  MAP TO CHR14.3; EXPRESSED IN FETAL LIVER, SIGNAL = 1.7; EXPRESSED IN BRAIN, SIGNAL = 1.5; SWISSPROT HIT: P12883, EVALUE 1.00e-22; NT HIT: AJ238393.1, EVALUE 0.00e+00; EST_HUMAN HIT: BF855580.1, EVALUE 2.00e-69
tctgagtaatgccagtccccagagtgttggaattgaaccaaggatgttgggacgaggttagagtgtaaccctgcctagacacaaacagaagacactcttggctcctggggtggacatggatggagcaagaacagagatcccaacgtagggccaggtgcagcactcacgtagatcatccaggagccgtagcgatccttgaggttgtagagcaccgcgggctcatgcaggaaggtcagcatggccatgtcctcgattttgtcgaacttgggtgggttctgctgcatcacctggtcctccttcacggtcactgtctgcaagagcccccacccaagccctcctgtcagcctgggctttccctccttcctcaagagggttaggagttggtgagtgacagggcaatagtgctcaagagagaaggaaccaggatctcacagggaagacagaagggatattgggaaggagagggctctttggagggtctggattcttccccaaagggaaggagaatgggaccatcctcaggtctgcat

SEQ ID NO: 13206 - DNA, 516 bp, Homo sapiens
  MAP TO CHR1.3; EXPRESSED IN BRAIN, SIGNAL = 0.4; SWISSPROT HIT: P16581, EVALUE 4.00e-68; NT HIT: M61887.1, EVALUE 0.00e+00; EST_HUMAN HIT: AL047443.1, EVALUE 2.00e-41
tgcccacattcacacaaaacagcaaaagagagaaactttagcagttaaacagaatcttttggaacataaaatgaccacaatagagagcagtttttgcatgctgtaaatttgccaagatgcccacacactgaaactacctcccactgctgccgcaaactccctacctgtgtagcatagggcaagcttcttcttgctgcacctctcatcattccacatgcccacatctttttctctcttgatgtagatctccacgcagtcctcatctttttgcctattgttgggttcacctggagcccagttcttggcttcttctgtcagaggtttctgggttcctacccagacccacacattgttgacttttctgattccaatccagtaataacttggtgaatagctcaatatggagtttaggtactcaatctcttctttgttttgaattgcaaccaggtgtgtgtacctttgctgacaataagcactggcctcatcataagtcatagcttccgtggaggtgttgta

SEQ ID NO: 13207 - DNA, 561 bp, Homo sapiens
  MAP TO CHR21.3; EXPRESSED IN FETAL LIVER, SIGNAL = 0.51; EXPRESSED IN BRAIN, SIGNAL = 0.4; EST_HUMAN HIT: W76571.1, EVALUE 1.00e-105; SWISSPROT HIT: O75690, EVALUE 1.40e-02; NT HIT: gi13386207, EVALUE 1.00e-26
aagccagatccacaagttggtctgtaacaggaagactggaatgtcctaaagagaacatatgttgggtggcagaatccagatccatagcccagggaagggaagccacagcctccataacccagggatctgacgccactggacccacggcccactgagtagcagctcctagatccatagcccagggagcggcagctgctggatccaaagcctagagactcagagtaagtcgactggcagggactgcagagcacggagcttctggggcggtagcaggaggtctggcaggggctggactccacacaggacatctggcagctaggggtttcccagcaagtctcctgaaagcccttgcagagagaggaacccagctggcaggtgctgggagatcaaaggttcagtgctgtagaccaggttgctggggtacgaggagccaccacgggagtagcctgagtagcacaggtagccctcacaggaatgggaggagaagtttccacagcagcagttgtaggacatgttgacaggagatgtgagttcagctgagctgcattgagaagatgccct

SEQ ID NO: 13208 - DNA, 597 bp, Homo sapiens
  MAP TO CHR4.3; EXPRESSED IN LUNG, SIGNAL = 0.41; EXPRESSED IN ADULT LIVER, SIGNAL = 0.65; EXPRESSED IN BRAIN, SIGNAL = 0.4; SWISSPROT HIT: Q13257, EVALUE 1.00e-20; NT HIT: AB056160.1, EVALUE 0.00e+00; EST_HUMAN HIT: BF701297.1, EVALUE 3.00e-77
gtgcagagcggaaaaatgactgcttaagatgctagaaaatctgcaagactcaaattgtttccaatgattaaaatacctttcagttgttccaccacattatttaggtattttatgagctcaagatcagtagttacaagcaaggtgagtccgtatttctgcactcgagtaaaggtttcagatggatatatgccacgctgatataaaatgctgttgatgccgaatgctgcaagcaaaagaaatgttacagaaaattcattatccctgcataactctggaaaataaaatatatttagatgttgctatattttcattaggctatacagctataaatgactgaacacacgtgtatcttgctgaaagcagagtaggtacaaagtggcattaaaaatccttaaaagtcttgcttctaagtaaaacagataattgctttcacgtggcaaaaaaaaaaagccaaagtgtatcaacttattattgccaaatttcacctcattgtaatccaagtccaaattcagattatgaggctagaggatgtcaaaataggctgttgcattcgagttagcaactgactgaatagtcactgtgctccagacaagcctt

SEQ ID NO: 13209 - DNA, 542 bp, Homo sapiens
  MAP TO CHR2.3; EXPRESSED IN ADULT LIVER, SIGNAL = 0.49; EXPRESSED IN BRAIN, SIGNAL = 0.61; SWISSPROT HIT: Q07917, EVALUE 4.00e-11; NT HIT: AB019433.1, EVALUE 0.00e+00; EST_HUMAN HIT: F06564.1, EVALUE 6.00e-88
ccccagctacatggattgtctgaagatctgaatcttgaggccctggccagagctgcgaggcatatacagccttgcttgccttctttacccccgttgaatctgagagttaatgacggatgtggggaggggtcctgcccatctgtcggtttgtccacatgatatcccccccgccagcttcttaccctggaatagtccaggctggtcatagccgggttggagtcgacatgggccctgacgagggcactgatcagactcaccgggggcgaagggggagagggctcctgtgggctcttcggtttcgagggcaaacgacctctccggccttttaaactgtctgtgcgaaccactgcaaaggaagagccctgttagcgccgcttttccgagcccaggcccagctgctgcctcggtccctccccggggaaggccgcagccgcggggcaccaggctgagcggctgagggccccagtgcttgtaaagccttcactgactagaagcattaaaaaatgcggggttattttatgtcttcctccaaatgggtcgta

SEQ ID NO: 13210 - DNA, 550 bp, Homo sapiens
  MAP TO CHR2.3; EXPRESSED IN LUNG, SIGNAL = 0.75; EXPRESSED IN BRAIN, SIGNAL = 0.61; EXPRESSED IN ADULT LIVER, SIGNAL = 0.62; NT HIT: gi14724166, EVALUE 0.00e+00; SWISSPROT HIT: Q13342, EVALUE 3.00e-21; EST_HUMAN HIT: AA399980.1, EVALUE 0.00e+00
tcactgcagaccaggatttgttctgaaatctccatgccatgtttttccttcatatcccagggagaagcatttgcctgtccatgcaggttcacacaaaggcagtgtgttctagttgcccagagggttggccttcctgaatcttgcggttcccagtgacgtggacactgttttatcttctagatgagaaacctggatgagtgtgaggtgtgccgggacggaggggagctgttctgttgcgacacttgttcaagagtcttccatgaggactgtcacatcccgcctgtggaagctgagaggtaagtgacatgcaggcgtctctctttttgtcctttaagggatcttccacctgccatgcgcactctccagcagagtgccggcttgtgtctagatggggaaagagcaggttcatcgggtactgggacccagcagtgtgatccagagagcagtgggagacgctggcagcaggaggttaatgtcctctgtgctctcagggacacctcctctgatatgctgagggcagtgttggggacctttgcctacataccggcat

SEQ ID NO: 13211 - DNA, 523 bp, Homo sapiens
  MAP TO CHR20.3; EXPRESSED IN BRAIN, SIGNAL = 3.1; EXPRESSED IN LUNG, SIGNAL = 5.1; SWISSPROT HIT: P56381, EVALUE 5.00e-10; NT HIT: gi13630362, EVALUE 1.00e-66; EST_HUMAN HIT: AL536892.1, EVALUE 0.00e+00
aagtggggagttcatcctccaaattatttgatttgtgcagacaaatgaaacaggtttaattcaaatacgatggctctctacctaagcattgctaaatgaactgaaaatcaatgtgccaattacttctgcttgtcagggcccaagaagactttctttttattaggccaggggacttctataacctgcatgctttaaattataccatcccaataactaacttccaaatacactgactaaaaaatgaatagaacccaaaactaaaattattttgatctttatggtgctccaaaaacttaagatgcaactgttcttctaaataaatccataacttacagattattccttctttactttcacaatttttacgttgctgccagaagtcttctcagcatttgctttgaattctgtcttcagtgcatctctcactgcttttgcacagatctgggagtatcggatgtagctgggagaaaatgagagaaggtatatggttaattatcaatattccagccagacagctgttact

SEQ ID NO: 13212 - DNA, 588 bp, Homo sapiens
  MAP TO CHR1.3; EXPRESSED IN LUNG, SIGNAL =  31; EXPRESSED IN BRAIN, SIGNAL = 3.1; NT HIT: AB051901.1, EVALUE 0.00e+00; SWISSPROT HIT: Q60879, EVALUE 7.50e+00; EST_HUMAN HIT: AV653802.1, EVALUE 0.00e+00
ttggatccaggaacgctaacatagatctagaaaggaagatggcagtttattacaccagaggtctggagaaacaagacagctgtggtaacagatgaacaatttctctgctgaagccaccctgcatctacccaccagtaaggaatattcaactcgaaggatgttgcagcccaggatagaaggcctgatcttctgaacccgaaggctcttgccacgccatgatgcgcatgtccctgagataatatgattgcctctgactgatgacaacttctgagtcagcaccttggtctggccattggcaaggtaagtgtggcgggccacaatggcagctttggggaccacaattcgggaacatgtattctcaaagtcagcatggatggaaatctcatcacctagcaatgagaaagatgaaaacttactgatactcagtatagttaatgacacttcctctaccccagtcccatgcccttgcccctaaacccagttcctgttttaactgccataagcactaggattttaccttcacagaatccttttctgtcaattcgagcagagacagacacccgcccatcaggaatgaacatgcaggaa

SEQ ID NO: 13213 - DNA, 593 bp, Homo sapiens
  MAP TO CHR18.3; EXPRESSED IN LUNG, SIGNAL = 1.8; EXPRESSED IN ADULT LIVER, SIGNAL = 1.9; EXPRESSED IN BRAIN, SIGNAL = 1.8; SWISSPROT HIT: Q03177, EVALUE 5.10e-01; NT HIT: gi16163654, EVALUE 7.00e-59; EST_HUMAN HIT: R07637.1, EVALUE 7.00e-63
acccagctttctctgctttgtgaatagtgtatacatatttctttcagagccagtttttagtctttttgccttcaccaacaaaattacttctgtgcacagtagaattatttggtcttgtgattggagtcctgacagcaagtatttcttcactgggagtcgagacaaaaaggtaattatttaaaaatttaatattttttcaaatgtaaaaataatatttttataggtatgtttgaataaaaaatgcataatcctgcctttctgttacagcttttaaaaatcagctatgtattcctttctgtttttcgtatatgtacatataaaaaaagacttttcttgttaaattctataagtaaatttctctgaaatgtcaaaaatatgaggagaagacctttcagacatatgaccttcatcaaatggtcccagtggaagaagagtaataaatgaaattaatcaagaccaagaaactaggagggcagcgggaggtaggggaataagggaaaaactattttctagttttcttacttttatgaatttaacatttttctgtaataaatgattgttaccttttcatttggtgctagaagtgggtggag

SEQ ID NO: 13214 - DNA, 529 bp, Homo sapiens
  MAP TO CHR10.3; EXPRESSED IN LUNG, SIGNAL = 0.87; EXPRESSED IN FETAL LIVER, SIGNAL = 1.2; EXPRESSED IN BRAIN, SIGNAL = 1.1; EST_HUMAN HIT: AA448944.1, EVALUE 4.00e-61; SWISSPROT HIT: O75607, EVALUE 6.00e-18; NT HIT: AF079325.1, EVALUE 0.00e+00
cttcaggcggaaggttacaggtggttggagctggaagtcatccagactgagctgggaggaagacaaggatgaaggcctggcccactcctagcccaccccacactgtaatgagtgctaacgtcctcaatcccctcaccaccaccaccaccaccaccaaggcagagctggggaactcaccatgggttggcaggacagcttgaggttggccacagggactgcgatctcctgatggtcatggttccgggccacaacttctaccacattacactcgtctttggctccctcggtgaggcagagctgggaacggtacacagggcctcagggtctcctcaagtgagggttgacaccacaactaaaggcatctaccctagcacctgcccagcctcagaggtcccggttcacctggccaggggagccgcccatgccggggggttaggctgaggatgtgtctccaagtaaaggggatccggaggttgggtagagacctatattgcctgcctgggcttattcattaaaaccccactcccct

SEQ ID NO: 13215 - DNA, 536 bp, Homo sapiens
  MAP TO CHR2.3; EXPRESSED IN BRAIN, SIGNAL = 2.1; EXPRESSED IN ADULT LIVER, SIGNAL = 1.6; EST_HUMAN HIT: BG483059.1, EVALUE 0.00e+00; SWISSPROT HIT: P49279, EVALUE 4.00e-14; NT HIT: AF229163.1, EVALUE 0.00e+00
tgagtgaaggagcgtgtcaggacctgaggtagccagggacctcaaaggccagccttgcttcacccacacagtggcttacagtggtaaggcctctgtggcaagaacagagatgtaggaaaccatcggctgacctgaacctgccccagactgccacgcaggggacttaagaaggtactgggctttggggagaacatagaagtgtgagggtgggggacactgtggtggctctgagggactttggcacttccctctccctttgatcttcgtagtctcgagagatagaccgggcccgccgagcagacatcagagaagccaacatgtacttcctgattgaggccaccatcgccctgtccgtctcctttatcatcaacctctttgtcatggctgtctttgggcaggccttctaccagaaaaccaaccaggctgcggtgagacacactttcccccgcacctgaggccacacacgtactcatgtcctgtaagccttgccgaggaccctaggcaatgcagctgagcccttctgagtctctgccctg

SEQ ID NO: 13216 - DNA, 500 bp, Homo sapiens
  MAP TO CHR17.3; EXPRESSED IN FETAL LIVER, SIGNAL =   2; EXPRESSED IN ADULT LIVER, SIGNAL = 3.3; EXPRESSED IN BRAIN, SIGNAL = 0.33; SWISSPROT HIT: P35575, EVALUE 2.00e-14; NT HIT: gi4557598, EVALUE 9.00e-55; EST_HUMAN HIT: AW611950.1, EVALUE 4.00e-61
tgcactgtctcccagatgaggaccttttcacctttactccattctctttcctgccctttagggagcccctctggccatgccatgggcacagcaggtgtatactacgtgatggtcacatctactctttccatctttcagggaaagataaagccgacctacagatttcggtaagaactcaccactggggtgtaggtggtggagggcaggaggcagctctctctgtagctgacacaccacgtattcttcctcacatccccctagcccgctcccacacctgggcagccgctgattaagagttgtggcactttggatagggataaacctcagagtcagggaatgtttgggctgaaagggatccagtagtgcaatccgttgttttacagataaggaaacaaagcccaacaccatgaagggacttataaaaataaggtagtgaagtagcagcagggcttaaataaaaacccatgtctgtaccaaccacagagtcacccatccaggtt

SEQ ID NO: 13217 - DNA, 500 bp, Homo sapiens
  MAP TO CHR2.3; EXPRESSED IN ADULT LIVER, SIGNAL = 1.1; EXPRESSED IN FETAL LIVER, SIGNAL = 2.7; EXPRESSED IN BRAIN, SIGNAL = 0.88; SWISSPROT HIT: P02461, EVALUE 1.00e-39; NT HIT: AY016295.1, EVALUE 0.00e+00; EST_HUMAN HIT: AI751240.1, EVALUE 1.00e-111
tttttcagctgttgaaggaggatgttcccatcttggtcagtcctatgcggatagagatgtctggaagccagaaccatgccaaatatgtgtctgtgactcaggatccgttctctgcgatgacataatatgtgacgatcaagaattagactgccccaacccagaaattccatttggagaatgttgtgcagtttgcccacagcctccaactgctgtgagtttaaagataaactgtacatcttcaatattcatatttagacacatgaatagctcctatatcataggagcctaaaagggaatgaaagtcatgttcatcaaatagccatgtttgtattacgagtaaaaagtgaccgtttcaatttaaagataaggattggttagaatctgggttactaaataatatgcaaattctgtgtcttgtttaacttgtttcttttccatttattagcctactcgccctcctaatggtcaaggacctcaaggccccaagggagatccagtaa

SEQ ID NO: 13218 - DNA, 555 bp, Homo sapiens
  MAP TO CHRX.3; EXPRESSED IN ADULT LIVER, SIGNAL = 0.78; EXPRESSED IN LUNG, SIGNAL = 0.83; EXPRESSED IN FETAL LIVER, SIGNAL = 0.85; EXPRESSED IN BRAIN, SIGNAL = 0.6; SWISSPROT HIT: Q61967, EVALUE 2.00e-12; NT HIT: gi14758278, EVALUE 3.00e-64; EST_HUMAN HIT: BI545533.1, EVALUE 1.00e-33
catgggtcctttccatgttccaacttaaagattacatctggttttatacctgaacaccctgttaagagaaaattgtagtggctttggccttggcagctcagaaattcatgaagagaagcacttgcaggggcctcccagcaaagttggatccttaactcacaccataacataaaaataaattctagatataacaaaagtataaacatgaaaaaccaaaactataaaagaacacactctattaaaggaatatcataaaggtcatggtattgacagcactaaaggaaggatgaggaggatttgattcattggtacacagggaatctgcccttacccacggagaccaggtgattataggtctccagcatcacatccctatgcagggtcttctgagcaggattcaactgctgccactcttcctgcgtgaagtccacagccacatcctcaaatgtcactggttcctataacagcacattcctgtacaatctgctcattctggtcatttttaccatagcagtacatgtaggatgcctactttgcactttgcccagcatactt

SEQ ID NO: 13219 - DNA, 536 bp, Homo sapiens
  MAP TO CHR19.3; EXPRESSED IN FETAL LIVER, SIGNAL = 0.8; EXPRESSED IN BRAIN, SIGNAL = 0.6; EXPRESSED IN LUNG, SIGNAL = 0.73; SWISSPROT HIT: P41233, EVALUE 1.00e-19; NT HIT: AB055390.1, EVALUE 3.00e-95; EST_HUMAN HIT: AI733552.1, EVALUE 4.00e-95
cctgacctccttgctttttgagtaggaaggcacaaagtctcccacaatcctcaagactttacccaggccatcttggacaagcccctgcctacaaggggccagacagggcagtggcaagcagtggctgggcccccacccgtccaagcagcccccgcaccatgtcccagagaaagttgccaagccagtagagggtgggggacaggccccccatgagctgcaggtgcttggctcgggtgactcgctcctcaatgaggacaagagtgaagctggccgggacaaaggacatggcaaagaccacacagatggagacgaggacgtccaccgaggaggccatcctggaggtgaagacatgagagctgttgtagggtgagggtgcatgggttgctcagagcagagctgaacacgccattgatgggacaaaggtctatggggcagtcagcagtggcagagatggcaggggcaatttagggatgagggtgcctgggatttggcagcagaggttgtacaggtctcaggcaggataaaggttggtggga

SEQ ID NO: 13220 - DNA, 593 bp, Homo sapiens
  MAP TO CHR19.3; EXPRESSED IN LUNG, SIGNAL = 0.86; EXPRESSED IN ADULT LIVER, SIGNAL = 0.88; EXPRESSED IN BRAIN, SIGNAL = 1.2; NT HIT: gi15301660, EVALUE 0.00e+00; SWISSPROT HIT: Q61116, EVALUE 2.00e-79; EST_HUMAN HIT: AV745182.1, EVALUE 2.00e-94
tctcctgtgtggactcgttgatgactatgaagattaaagctcaaactaaagcacttaccacactcatcacatttgtatggtttttcttcagtgtggactctctgatgggtatgaagatttgagctacaactaaagcgtttaccacaatccccacatttatatggtttctctccagtgtgaattctttcatgggcctgaagatgtgatctctgagtgaagcccttcccacacacctcacatttataaggtttctctccagtgtgaactctgcaatgaatgttaagatctgtgctacgactgaagcccttcccacaactgtcacatctatagggcttctctcctgtgtgaataggcaaatgagcataaagatgtgagctctgattaaagctcttaccacactcgtggcatgtatagggtttctcccctgtgtggactctctgatgagtttgcagatttgagctctgactgaaacctttaccacattcatgacaccaatagcgttttttcccagtacgaacactttgttgaacaggaatacctgagctataactggtgtccttctcatgtgtactacacgctggagacttctttcc

SEQ ID NO: 13221 - DNA, 574 bp, Homo sapiens
  MAP TO CHR9.3; EXPRESSED IN BRAIN, SIGNAL = 0.59; EXPRESSED IN LUNG, SIGNAL = 0.52; EXPRESSED IN ADULT LIVER, SIGNAL = 0.51; NT HIT: gi14745666, EVALUE 4.00e-82; SWISSPROT HIT: P50517, EVALUE 4.00e-27; EST_HUMAN HIT: AL554798.1, EVALUE 6.00e-82
  unsure 26
  unsure 176
ccagatttgaagaaccaggcagtttnccatgtttacatccttagcagcaaatacaattggaaaattttcctcagtgtagtctacgtctttggattcatttagcaaaccagtctggtggcagatttgagctgcaatctttgtgtagtaacccagcagcagagaagataaaaattttnctgccccggcaatactgttcataccaactatggctgaaatgctggtccgaatcatgtcctctgggtagatttgacgttgaggattggttggccatcgcatgatatcaaagaaatcttcagccagtacaagaggacctctgtcaatgggtttttcccgatccaactaatacccaacaaagcatatcctcagacactgatgtttggagaatatccccagtcccttgaaatacctgaaccactgccttggagccaccaacttctagaacttgcccatgtctctgtgccatctagtaatgtccagtggacaatatcagcgtctatgggaaacttaacgtgatctaagatcactagtagaccatggactcttgatactgtgatgtatgtaaggcaaggctggg

SEQ ID NO: 13222 - DNA, 594 bp, Homo sapiens
  MAP TO CHR10.3; EXPRESSED IN LUNG, SIGNAL = 1.7; EXPRESSED IN BRAIN, SIGNAL = 0.6; EXPRESSED IN FETAL LIVER, SIGNAL = 1.2; EXPRESSED IN ADULT LIVER, SIGNAL = 0.6; SWISSPROT HIT: O14879, EVALUE 1.00e-116; EST_HUMAN HIT: AL549455.1, EVALUE 0.00e+00; NT HIT: gi14783293, EVALUE 0.00e+00
tgaggtcaccaagaattccctggagaaaatccttccacagctgaaatgccatttcacctggaacttattcaaggaagacagtgtctcaagggatctagaagatagagtgtgtaaccagattgaatttttaaacactgagttcaaagctacaatgtacaacttgttggcctacataaaacacctagatggtaacaacgaggcagccctggaatgcttacggcaagctgaagagttaatccagcaagaacatgctgaccaagcagaaatcagaagtctagtcacttggggaaactacgcctgggtctactatcacttgggcagactctcagatgctcagatttatgtagataaggtgaaacaaacctgcaagaaattttcaaatccatacagtattgagtattctgaacttgactgtgaggaagggtggacacaactgaagtgtggaagaaatgaaagggcgaaggtgtgttttgagaaggctctggaagaaaagcccaacaacccagaattctcctctggactggcaattgcgatgtaccatctggataatcacccagagaaacagttctctactgatgttttgaagcaggccat

SEQ ID NO: 13223 - DNA, 554 bp, Homo sapiens
  MAP TO CHR19.3; EXPRESSED IN BRAIN, SIGNAL = 4.4; EST_HUMAN HIT: F31321.1, EVALUE 0.00e+00; SWISSPROT HIT: P14793, EVALUE 4.00e-14; NT HIT: X56997.1, EVALUE 0.00e+00
tgaccacacttcttcttgcggcagttgacagcacgagggtgaaggcgagcatagcacctgcacagagacaggaggggtgggtgagggcataccccgactccggcagcccccacagccccccaagcatcggagcacacatacttgcggcagatcatcttgtcgcagttgtatttctgggcaagctggcggagagaaggctcaataatgccacctcgcaggcgcaacaccaggtgcagggtggactctgcaggagacagccagaaggacggcgactgagcccagccctggctcctcagtcacaggggcaggaccctccagggcctatagtctgctgctttctcaagtgtgatggggacaccaagtcgggatcccccgagtgttctacgtgtggaagatacactgtcccagccagcctgccccaggaaatctccatctcagcactgaccacgagccctggggggagtctgagactgacacatgccaactgaggcatccatctgggtttctaacatggaagccgacctctaagtggttcaggcaaggtcagacactga

SEQ ID NO: 13224 - DNA, 539 bp, Homo sapiens
  MAP TO CHR9.3; EXPRESSED IN LUNG, SIGNAL =  13; EXPRESSED IN BRAIN, SIGNAL = 6.9; EST_HUMAN HIT: AA484108.1, EVALUE 0.00e+00; SWISSPROT HIT: P47838, EVALUE 9.00e-17; NT HIT: M77232.1, EVALUE 0.00e+00
ttttcaggacttggtttcccttatatttttataatatttaaccaatcttctagatttctgtggaggggcaaaaagcattttagaatagttctgatttgattttaaaggcctcattataggttttcatagatgctgttaagcttacgtttatttctgatgtttttaaagtagatgtggattctaacaaaacaaatattgaaatgattgagtcctttgaatttttaggtaagaaacctaggaccaaagcacccaagattcagcgtcttgttactccacgtgtcctgcagcacaaacggcggcgtattgctctgaagaagcagcgtaccaagaaaaataaagaagaggctgcagaatatgctaaacttttggccaagagaatgaaggttagtctaagatgatttgagggggtgggaggagttcgacctggctttggatttgcgtctttaacccagaaaggccttaactgtttgctgttttgttttgtttaggaggctaaggagaagcgccaggaacaaattgcgaagagacgcagactttcc

SEQ ID NO: 13225 - DNA, 591 bp, Homo sapiens
  MAP TO CHR6.3; EXPRESSED IN FETAL LIVER, SIGNAL = 0.6; EXPRESSED IN BRAIN, SIGNAL = 0.43; SWISSPROT HIT: O43196, EVALUE 4.00e-22; NT HIT: AF048991.1, EVALUE 0.00e+00; EST_HUMAN HIT: BI439178.1, EVALUE 4.00e-80
gccttgagcctcactttcacctcagcccacggcaccaggccccaggccctgtctccttccctattcaggtaggcttgatcacattcatggccctggtaggcagctttgtgccagcagaggaggccgaaattggggcagtagacgccatcttcacacgaattcatagctgcgaatccatctcccttggcctctccaccttcatgatcgacctcaaccaggtcaaagggaacaaagggaggtgggattgaggaaggggataatgggaaaggaacccctgaaaatgctcataacaggaaagcatgccctctgctgcatgccctttatactaaaagtggggagcactaaggtcagagataagaagaatcaataccataaacatttcttgaacccttgtttcatgtgagtcactgttggcaaagaggatgaacaaagcgtgcacctcaccattcaagaacttgcagtgcagtagggagggcatgtatacagctttattcacaggccaactgtggtcagtgcgttacgggcttccaatactaactttcccttgtccaccttatacccagcaggtggcgaaagcagtgaacaatgcca

SEQ ID NO: 13226 - DNA, 529 bp, Homo sapiens
  MAP TO CHR19.3; EXPRESSED IN LUNG, SIGNAL = 2.6; EXPRESSED IN ADULT LIVER, SIGNAL =   2; EXPRESSED IN BRAIN, SIGNAL =   5; NT HIT: gi14755986, EVALUE 4.00e-54; EST_HUMAN HIT: AL539626.1, EVALUE 0.00e+00; SWISSPROT HIT: P81125, EVALUE 1.00e-15
ctgacctctccaagctggtccctggctccctgcccttggggtcctgggttaacagggcctcacctcgggacatgaaccagctcccagctggccccccagtgcctggcagtggctctggccctctggctgcttgccctgagctcaccagtgccacttctccatggctacaggtggggaccaatgccatggacagccccctcctcaagtacagcgccaaagactacttcttcaaggcggccctctgccacttctgcatcgacatgctcaacgccaaggtagcacaccccacgcccgcaggaccaccgcaccaggccaccatgtgcttatctccaggccaggtcccgttgcccccgaagagggacgtgctcctccctcacgtctggcccctgccagccagcctttggatgagaagtgtggttctcacagctgtgtttctgtgctggcatcacctgcccacccagccctggaggcttttgcgggtccagctcctgcctcacttagtgctctttccttcatgggtgcacttttt

SEQ ID NO: 13227 - DNA, 547 bp, Homo sapiens
  MAP TO CHR19.3; EXPRESSED IN ADULT LIVER, SIGNAL = 1.5; EXPRESSED IN BRAIN, SIGNAL = 1.8; EXPRESSED IN LUNG, SIGNAL = 1.8; EST_HUMAN HIT: AI203861.1, EVALUE 0.00e+00; SWISSPROT HIT: P53355, EVALUE 1.00e-19; NT HIT: gi4557510, EVALUE 6.00e-81
gcgtctgcacagatacttcgagtctccaaggagacttctgcctgttcatttctgctgctgtcagtggcggggtgggggggtggattttgaatgcctcttgggtggtgtctgggatcgttgcaggaaggttctaagggctcaggagtgtgagtggcccaggcacctgccgtcagcctgtcttctgtgctccgcctgtcgtgggcagccggagaggcggcgcggccgtggtgggagcccaggaccccactgagcccccacgcctgtctcgcagcctgagcggtgcatccccgttcctgggcgagaccaagcaggagacgctcaccaacatctcagccgtgaactacgacttcgacgaggagtacttcagcaacaccagcgagctggccaaggacttcattcgccggctgctcgtcaaagatcccaagtacgaggggccggcagggggcacggggtgggacatgggacacaggcccactccacccacggaggctccagaggactctcctcccagcgccacctccctgcggctggggatcagacattgctt

SEQ ID NO: 13228 - DNA, 576 bp, Homo sapiens
  MAP TO CHR9.3; EXPRESSED IN FETAL LIVER, SIGNAL = 0.58; EXPRESSED IN BRAIN, SIGNAL = 0.45; SWISSPROT HIT: P01563, EVALUE 5.00e-96; NT HIT: gi15298729, EVALUE 0.00e+00; EST_HUMAN HIT: AI860608.1, EVALUE 3.20e+00
aaaaggtgagctggcatacgaatcaatgaaaatcatttccatgttgaaccagttttcattccttacttcttaaactttcttgcaagtttgttgacaaagaaaaagatctcatgatttctgctctgacaacctcccaggcacaagggctgtatttcttctctttcagatagagagtgattctttggaagtatttcctcacagccagaatggagtcctccttcatcaggggagtctctgtcacccccaccccctgtatcacacaggcttccaggtcattcagctgctggtagagttcagtgtagaatttgtctaggagggtctcatcccaagcagcagatgagtcctttgtgctgaagagattgaagatctgctggatcatctcatggaggacagggatggtttcagccttttggaactggttgccaaactcctcctggggaaatccaaagtcatgtctgtccttcaagcaggagaaaagagagattctcctcatctgtgccaggagcatcaaggtcctcctgctacccaggctgtgggtttgaggcagatcacagcccacagagcagcttgacttgc

SEQ ID NO: 13229 - DNA, 580 bp, Homo sapiens
  MAP TO CHR11.3; EXPRESSED IN LUNG, SIGNAL = 2.3; EXPRESSED IN ADULT LIVER, SIGNAL = 2.6; EXPRESSED IN BRAIN, SIGNAL = 3.3; SWISSPROT HIT: Q63569, EVALUE 4.00e-17; NT HIT: gi4506210, EVALUE 2.00e-65; EST_HUMAN HIT: BG337044.1, EVALUE 3.00e-65
gagagcctcagagctggatgaatggatgcgggagggtcccctgggcaccctggacctcactagttacagggctctagcataagctgtgccagggtttatatttgcttctcctcccctcctgatctcagatcatgaagagtgaagtgttgagagtcacccatgagctccaagccatgaaggacaagataaaagagaacagtgagaaaatcaaagtgaacaagaccctgccgtaccttgtctccaacgtcatcgaggtgtgtgtgtatgtggaggggaagagagggagtcagcagggaatggggacagcctggggtggggccactagggaaagagtgggtggaggtattgaggccaaactgcatgtcagagctacacctcctggggcactttcatggggaagacggggcctgcaaagtcctgggaggtctcacgtgtctccttttctgttggttatgtctcctccggggtagatgagccctgtgcagaggagcagcacctacacagagatcaatccctgggcttagcaggggcacccacgtttggtgggctcagggctattggaggagggaggtaaggatgg

SEQ ID NO: 13230 - DNA, 547 bp, Homo sapiens
  MAP TO CHR19.3; EXPRESSED IN FETAL LIVER, SIGNAL = 0.61; EXPRESSED IN BRAIN, SIGNAL = 0.68; EXPRESSED IN LUNG, SIGNAL = 1.3; NT HIT: gi16163194, EVALUE 8.00e-71; EST_HUMAN HIT: BE733694.1, EVALUE 1.00e-70; SWISSPROT HIT: Q13625, EVALUE 7.00e-13
taacaatccctccaagtcgctgacctctgcgccctgtcccccaggagatgcgctctgtgctgcggaaggcgggctccccgcgcaaggcccgccgcgcgcgcctcaaccctctggtgctcctcctggacgcggcgctgaccggggagctggaggtggtgcagcaggcggtgaaggaggtgagcgctgctgagcgggaggtgggcacggcgggggcatcgcagatgccagccgcgggactgagtcttccccctcccccggtgcactcagatgaacgacccgagccagcccaacgaggagggcatcactgccttgcacaacgccatctgcggcgccaactactctatcgtggatttcctcatcaccgcgggtgccaatgtcaactcccccgacagccacggctggtgagccccgacccgcgcggtgggctgggtcccccgtgggcggacgcgcagcctctcacgcatcgttccccgcaaccccccacccccacgcctaggacacccttgcactgcgcggcgtcgtgcaacgacacagtcatctgcatggc

SEQ ID NO: 13231 - DNA, 543 bp, Homo sapiens
  MAP TO CHR9.3; EXPRESSED IN LUNG, SIGNAL = 1.5; EXPRESSED IN BRAIN, SIGNAL = 1.1; EXPRESSED IN ADULT LIVER, SIGNAL = 1.2; SWISSPROT HIT: O95477, EVALUE 2.00e-28; NT HIT: AF287262.1, EVALUE 0.00e+00; EST_HUMAN HIT: Z19133.1, EVALUE 8.00e-07
tcattcacagccagcaagtcctggctgcccagacccaacaccagcccagcaccaagactgcagctcacctttttcaggtatgacacagtgctactactgtttctgcaggaactgagggaggattccacatctttcttgaccaaggtcaggtagtagcctgttcccagctggttcttcagaaacagggaggagcccacacagcacagcttcccatgggagatgatggcaatcctgtcccccaggacgtccgcttcatccatgtggtgtgtagagagaataatggtgcggcctgccaggcacaaacacaaggatgtgggacaggtgaggcctctcagttctgatttgtcacagtgacagggactagagagatattagcaggggtaagcactggaagagacctggaagccacctttcaccctgtatggctatgacccctagaatggcaaagctttgtatatataggtaccacatcctcacagaggtaagaacagtagcattttatttgggaacttgctatatgccaggcattgtgctaggtggttt

SEQ ID NO: 13232 - DNA, 577 bp, Homo sapiens
  MAP TO CHR2.3; EXPRESSED IN BRAIN, SIGNAL = 0.3; SWISSPROT HIT: P35504, EVALUE 4.00e-37; NT HIT: M84123.1, EVALUE 0.00e+00; EST_HUMAN HIT: BG747143.1, EVALUE 1.00e-121
taagtggctaccccaaaacgatctgcttggtatgttgggcggattggatgtataggtcaaaccagggtcaaattaagaaaatggcttaagcacagctattctaaaggattgttgagcttgaaaatattatggccaacatatcctacattgctttttatctagtggggtatctcaacccacattttcttctgcaaatttctgcaagggcatgtgagtaacactgagtctttggagtgttttcagaacctagatgtgtccagctgtgaaactcagagatgtaactgctgacatcctccctattttgcatctcaggtcacccgatgacccgtgcctttatcacccatgctggttcccatggtgtttatgaaagcatatgcaatggcgttcccatggtgatgatgcccttgtttggtgatcagatggacaatgcaaagcgcatggagactaagggagctggagtgaccctgaatgttctggaaatgacttctgaagatttagaaaatgctctaaaagcagtcatcaatgacaaaaggtaagaaagaagatacagaagaatactttggtcatggcattcatg

SEQ ID NO: 13233 - DNA, 589 bp, Homo sapiens
  MAP TO CHR17.3; EXPRESSED IN BRAIN, SIGNAL = 0.94; SWISSPROT HIT: Q15323, EVALUE 2.00e-47; NT HIT: gi15208635, EVALUE 0.00e+00; EST_HUMAN HIT: BF569905.1, EVALUE 0.00e+00
gcttggagatgacagcaatgccgctcaccttctgctggagctcctcaatggtcttaaaataggactggtaactggggcacagcaagggctcctgctgctgagaccgctcccggatgaggttctccagctccgcgttgtcccgctccagctgacgcactttctccaggtagctggccaggcggtcgttcaggaactgcatagtctccttctcgctaccattgaaggagccctcgcagaaccagttgcagttgctcacattggcggggatgttgcaggccccgggcagggtgcagctgtggcagctggggggcacgcagggccgggaggagcagctggtgcggcagctcaggctgggcaggcagaagttgtagggcatagtgctgggagggagggagggagtgcctggctgaagacagagtctaaattctccaagccacagagctgtgggtctccttcctctagggagcatttatatcccactgcagagggtgtggacacagtatgtaatgtcttttttctttttatttcttcacttcttttcaaacgccctttccttcagtctgttatttgccttcctctgaagagtccc

SEQ ID NO: 13234 - DNA, 565 bp, Homo sapiens
  MAP TO CHRX.3; EXPRESSED IN BRAIN, SIGNAL = 0.36; NT HIT: U78027.1, EVALUE 0.00e+00; EST_HUMAN HIT: BE783762.1, EVALUE 0.00e+00; SWISSPROT HIT: P06280, EVALUE 1.00e-31
ccgattgacaacctggactcccctaaatgatgttatagagagttacaattactaattaactcttagagccctcttgaattataagtgcacaatattagctatggttaggtatgcatggattttacatgaattaattaattaattaatgaactgaaagagaagagatgggagctctggcacatggagaataattatttccagtattgtgacagggtatttaaaattctgaagattggttctttggctcagctaccatggcctcaaagttctttcctttgtggctaaatctctggaatgaaacattaccatctgccaaattttccaaactgtcacagtaacaaccatcaaattttagcagatctactccccagtcagcaaaggtctgggcatcaatgtcgtagtatccaaaactcccagggaagcctgcgcaggttttatttccaacatctgcataaatccctagcttcagtcctttgctgtgaacctgaaatgagagggaggaaaagagtcaccattgtagaagcacaatcgtgaggtagcagaaagagagaaccattccaggctg

SEQ ID NO: 13235 - DNA, 514 bp, Homo sapiens
  MAP TO CHRX.3; EXPRESSED IN ADULT LIVER, SIGNAL = 0.71; EXPRESSED IN BRAIN, SIGNAL = 0.63; EXPRESSED IN LUNG, SIGNAL = 0.66; SWISSPROT HIT: P43363, EVALUE 5.00e-86; NT HIT: gi14762534, EVALUE 0.00e+00; EST_HUMAN HIT: BG282169.1, EVALUE 1.00e-123
agccccatcatattcagtgcttcccagatgacctcctcaggggtgcagtagccctctatgaagattatgcttaggataagtatgagaatgccagtcttgggcatgctctggacatcactcagcatcccatcataggtgaggcccagggaggtgacaaggacaaaggagtggccagtgggatccacttcctttacatcaatgccaaagaccagcagcatgcactcggaggcttcactaaacaacaaagggaagtggtcttcataattttttatgacactctccagtatttctgcctttgtgatcggctccttcatttgatacttgaagagcagaaactgcaccaaatcagtcaccttttcatctatctcacttctgggtaaagactcactgtctggcaggacctgtagggtgcttggactctcctccttttggctgctggagccctcatcagattgatctaatggaagggaagcaacgaccgagggggaggagcaggctatctgagcactctggg

SEQ ID NO: 13236 - DNA, 554 bp, Homo sapiens
  MAP TO CHR2.3; EXPRESSED IN FETAL LIVER, SIGNAL = 1.3; EXPRESSED IN BRAIN, SIGNAL = 1.2; NT HIT: AF077038.1, EVALUE 0.00e+00; EST_HUMAN HIT: BG032797.1, EVALUE 0.00e+00; SWISSPROT HIT: Q10045, EVALUE 6.00e-16
tgacctccctgccaaataactcagaagaggagtgtcggtagccaaatgtttcttcagaatacgtgtaaaagaaatgtttttcttccatctaggaagatgttaccgagtacttcagtgaattccttagtgcaggggaacggagtcttgaattccagggatgcggcaagacacacagccggagcgaaacgctacaaatatctgagaaggcttttccgctttcggcaaatggactttgaatttgctgcctggcagatgctctacctgttcacatccccacagagagtttacagaaattttcattatcgaaaacagacgaaggaccagtgggccagagatgaccctgctttcttggtcctgttaagtatctggctctgtggtaagtgtgtttatctgagatagaattgaacgctgagtgtttctgattagattttttgttataaatgtgttgtgggtcagaatctggaaatattggaaactatttctcctttttactgaagcctcaaaaaatctcacaggaaagaaagttgtagtcttggttctacaggtcccaagca

SEQ ID NO: 13237 - DNA, 539 bp, Homo sapiens
  MAP TO CHR17.3; EXPRESSED IN BRAIN, SIGNAL = 0.54; SWISSPROT HIT: P08138, EVALUE 4.00e-27; NT HIT: gi4505392, EVALUE 2.00e-86; EST_HUMAN HIT: BE905269.1, EVALUE 3.00e-86
ttttgctgcactgctcattccaggaacatttactgaacacttacagagggcccctctgccctcatggagctttcagggtaggtgggggcagatgtgcaaagaggagccttagatggtggggtggcggttataattgggcacccgccatgcccctggccctcacacggcagagcacagatactcagctgcatcggccactacagcccctcgccccctgaaacctggcctgtcctctggctccaggtggaacagctgcaagcagaacaagcaaggagccaacagccggccagtgaaccagacgcccccaccagagggagaaaaactccacagcgacagtggcatctccgtggacagccagagcctgcatgaccagcagccccacacgcagacagcctcgggccagggtgagcagcggcccgctggggagctgaggcggagctgaggctgaggaaacagaagcaattaagattagactccaggaaggactgtcgggggggcggcagggctggctcagcggtgcccctgtagatggatggaga

SEQ ID NO: 13238 - DNA, 543 bp, Homo sapiens
  MAP TO CHR19.3; EXPRESSED IN BRAIN, SIGNAL = 1.3; NT HIT: AJ001703.1, EVALUE 0.00e+00; EST_HUMAN HIT: BI755795.1, EVALUE 0.00e+00; SWISSPROT HIT: P49366, EVALUE 1.00e-17
tccattcctacaagaacccgggcctggtcctggacatcgttgagggtgaggcgctagggccacagaggagaggggaaggagggctggctgagtccaaggcctgacttcggcgctcttcccccagacctgaggctcatcaacacacaggccatctttgccaagtgcactgggatgatcattctgggcgggggcgtggtcaagcaccacattgccaatgccaacctcatggtgagtgggggtggcgcttcggcccactctgcagacatgctgtgtggtgggcctatgccatgtgctgggtagacagcatgaactagacaggccaggatccctgctccccgggactgatgttctagtaggggagatagcaaacaagtgacatccacgtcagggggcagtcattgctacggggaatactaaatgatggcatgagaagagaaaggggtgctgtccaacaagaggttttggaaggaggcttctggaagtgtgagctgggagcaggggtttggggaggcatctcccaggagctatgtggttgtctcccgt

SEQ ID NO: 13239 - DNA, 560 bp, Homo sapiens
  MAP TO CHR16.3; EXPRESSED IN LUNG, SIGNAL = 1.5; EXPRESSED IN FETAL LIVER, SIGNAL = 0.93; EXPRESSED IN BRAIN, SIGNAL = 1.1; SWISSPROT HIT: P50226, EVALUE 3.00e-20; NT HIT: U33886.1, EVALUE 0.00e+00; EST_HUMAN HIT: H75320.1, EVALUE 0.00e+00
ggactgtctgccttttgctctgatgaccaaaaacatgagactcttccgggtagacctaagaaaggtagagggtgggtcctcacaggcccacaaaatttggtggtggtgggaacatgcctggtggagcatgccttgctccagatcggggtgtgacgcattgatgcagattatattactatagaatatgatggtctcagggaccaggcaggactttggcttttgagcagggttcagatcctgacttggccctacctgtgccgtgagatctcaaacaagtcagcctctaagcctcagcttcctcctttgccaaaccaagagatgagctggcctggggcaggctgtgtggtgatggtgctggggttgagtcttctgcccctgcaggtggtctatgttgcccgcaacgcaaaggatgtggcggtttcctactaccacttctaccacatggccaaagtgtaccctcaccctgggacctgggaaagcttcctggagaagttcatggctggagaaggtgggcttgatgggaggaaggaaggtgtggagctaaggggtggtggctacaa

SEQ ID NO: 13240 - DNA, 515 bp, Homo sapiens
  MAP TO CHR14.3; EXPRESSED IN LUNG, SIGNAL = 5.6; EXPRESSED IN BRAIN, SIGNAL =   3; SWISSPROT HIT: Q90515, EVALUE 1.00e-16; NT HIT: gi14784589, EVALUE 0.00e+00; EST_HUMAN HIT: BE879425.1, EVALUE 0.00e+00
aacccaggacaaatgctgactttggcattatctaggtaacccctattttttgtcataggtgactctaataatagacctattgttgcaaaaccagtcaaaatcctaccaaattaaaaagaagtccctcattgacttgttgggtgtaggtggtaccccatgtcctcccacaccaaaagagatcagttctggcaagaaagctccaacgtgccttgatggtgctgttggtaggatgccttaggccaggcacgtcccagcgatgttctgctggctgaggtacaaggtgggaggagaatatgcctcattcattactcaatcaatttcttggccttgaagaagcgtcgcaggtagaagacctgccaggtagctagtccaatgagacagaacattgaaaagatgctgaagtataggacccgagtgtttgttgactctaaaaaaaaacaaaagcattgtaaacataatgaagtgagcctcctcagctggctaaacaatggcaggggaggtgggtaaaggcaatt

SEQ ID NO: 13241 - DNA, 514 bp, Homo sapiens
  MAP TO CHR16.3; EXPRESSED IN FETAL LIVER, SIGNAL = 0.55; EXPRESSED IN BRAIN, SIGNAL = 0.42; EXPRESSED IN LUNG, SIGNAL = 0.92; SWISSPROT HIT: Q01466, EVALUE 1.20e+00; NT HIT: gi16165918, EVALUE 1.00e-109; EST_HUMAN HIT: AW867077.1, EVALUE 0.00e+00
tctccccaagtgacctgaaggccccggcaccctggtctgttcttaccatcgcactttgttgcacatctgggttgtcctgagaggggagccggcaaccatgggaacctggatggggctgtgctgcttgttcgtgaccagatccagcttttcttctaaggatttacaagtagcctccagggcttgcaatttggcttcaatgctatccaaccgcaagcagattgtctggttgatggaatacaggaatgactggaagtgagaaaagaccggctttaggaagggtctcctgaactgtaagaagacaaccccaagaaacaccaaacagctatttcctgatctcaactctatctattcagacagaacaatccccacactggaactagcttctgagctatgagccagaaacatgtgagtaacaagttcacattttacacacaagtcacacgtcctgtttcaaatgtgatgatttagtcatggtttcacttctatgtgcagttgcaattcttggttaagccca

SEQ ID NO: 13242 - DNA, 600 bp, Homo sapiens
  MAP TO CHR10.3; EXPRESSED IN ADULT LIVER, SIGNAL = 0.58; EXPRESSED IN BRAIN, SIGNAL = 0.66; SWISSPROT HIT: Q9LCJ1, EVALUE 3.40e+00; NT HIT: gi14736338, EVALUE 1.00e-72; EST_HUMAN HIT: BE767769.1, EVALUE 8.00e-72
ctgaatgaaggaatggagggtaagttgagtttaatcactaacataaatgttaatttaggcatttaatgttaaaatacaggctaaatagctctaaaattatgatgaaactagtaaaatgttttgacattttatttcacaattctatatttgcctgtatttattaagaaccatttttgctttttgattaatttagctgtcacttaggtgattaaaatttgagtaattcttgagtaataaaggttcttgcattttaatgtgctatttcctttttataagttttttgttttaaaattctgctcttgttaaccttttagacttttacaaaatgctaatagacctaaaacttaatgtatctctaggtcgttcaagagcgaaatgacgctcagaggcaactttctcgagaacagaatgccagaatgttacaagatggaattctgaccaatcacctttccaaacaaaaggagattgaaatggctcaaaagaaaatgaattctgaggtatttctatttcctttagtcattttcaaatatgtgtgtatatgtatttatatgtgtatatattttaaaaaccaactatatatgcatcttggaaagtgtcgag

SEQ ID NO: 13243 - DNA, 550 bp, Homo sapiens
  MAP TO CHR2.3; EXPRESSED IN BRAIN, SIGNAL = 0.96; EST_HUMAN HIT: BG715946.1, EVALUE 1.00e-106; SWISSPROT HIT: P43304, EVALUE 2.00e-24; NT HIT: U40365.1, EVALUE 0.00e+00
cagtcagtgtttgcctgtggctagagatcatgggaagggatcagctgcaaatggacatgaggaaagttttagggtgatggagatgctgtagatcttaatcatggtagtaggtacattttattcaatataaattatacttcaatgaaactggaagaaataaaaaaattgtgctggttagataagtaaggatcaacttcattttctgaagatcaacagtaaaaaaaggaggaaaaaaatcaatatttccatgtgtctttgaactttgtgtgtatctctgttttaggaacaacttgaaacagccaggaagtttctatattatgaaatgggctataaatctcgatcagaacagttaacagatcgctctgaaattagcctactgccttcagacattgacaggtacttataataagtgtctatctatctctctttttttttggcctatgtaagtatatttttccattatttaatcttgtgttccaggtataagaagagatttcataagtttgatgcagaccagaaaggctttattaccattgttgatgttcagcgt

SEQ ID NO: 13244 - DNA, 567 bp, Homo sapiens
  MAP TO CHR1.3; EXPRESSED IN BRAIN, SIGNAL = 0.51; EXPRESSED IN LUNG, SIGNAL = 0.43; NT HIT: gi14739381, EVALUE 0.00e+00; EST_HUMAN HIT: BG426977.1, EVALUE 0.00e+00; SWISSPROT HIT: P33765, EVALUE 2.00e-85
tgatggggaatctgaaggtcaatgagacagagtcatctctgatggataactactcagaattcttctcaatgcttgtgtccaaagaatcagagggatggcagaccacacaagctttgaggatcaaaaggtaggtttccttgaacttctttattttataggcatagacgatagggttcatcatggagttggcatgggacagcaggatgcccatgtacagcacaagctgtggtacctcaccattaaagtagatgatgcagttgatgatagataaaggcagccatgacagagcaaacaagaaaagaaccagaaacaaggacttagccgtcttgaactcccgtccataaaatgcacctgtctctttggagttagataagttcagactgagtttgttccgaatgatgtaaaagatgtcaagatagatggcgcacatgacaaccagggggatgaaaatccaggtgaggaagctgaagtataccatgtagtccattctcatgacggaaacaaattggcatgaaaggaaggtgacatttctgtggtactctgaggtcagtttcatgttccagccaa

SEQ ID NO: 13245 - DNA, 570 bp, Homo sapiens
  MAP TO CHR2.3; EXPRESSED IN BRAIN, SIGNAL = 0.39; EXPRESSED IN LUNG, SIGNAL = 0.29; NT HIT: M84125.1, EVALUE 0.00e+00; EST_HUMAN HIT: AV650286.1, EVALUE 0.00e+00; SWISSPROT HIT: P22309, EVALUE 1.00e-94
ttttgtctggctgttcccacttactgcacaacaaggagctcatggcctccctggcagaaagcagctttgatgtcatgctgacggaccctttccttccttgcagccccatcgtggcccagtacctgtctctgcccactgtattcttcttgcatgcactgccatgcagcctggaatttgaggctacccagtgccccaacccattctcctacgtgcccaggcctctctcctctcattcagatcacatgaccttcctgcagcgggtgaagaacatgctcattgccttttcacagaactttctgtgcgacgtggtttattccccgtatgcaacccttgcctcagaattccttcagagagaggtgactgtccaggacctattgagctctgcatctgtctggctgtttagaagtgactttgtgaaggattaccctaggcccatcatgcccaatatggtttttgttggtggaatcaactgccttcaccaaaatccactatcccaggtgtgtattggagtgggacttttacatgcgtatattctttcagatgtattactttggatcgattaactagccc

SEQ ID NO: 13246 - DNA, 589 bp, Homo sapiens
  MAP TO CHR4.3; EXPRESSED IN ADULT LIVER, SIGNAL = 1.1; EXPRESSED IN BRAIN, SIGNAL = 1.2; SWISSPROT HIT: P32238, EVALUE 6.00e-69; NT HIT: D85606.1, EVALUE 0.00e+00; EST_HUMAN HIT: BE718747.1, EVALUE 2.10e-01
cgagaacctggacagagaggctcctgtggtcccgccttcctcctcctcccccacctctcccctcgcccctgggggaccaggattggggcagcaggggaaggtggccatgaagccgaggcggaagcgtttgttcatgaagcagtagatgatggggttgacgcaggaggaggtgtaggacaggaggaggatgaaggaaatgggggttcctgagaggcggcgctctgcggaggcggtgtcgtaggcccgccaggcgttggcgctgaagatgggcatccagcacaggaagaagaggaccacgatgacgatgagcatgcggatcacccttttcttggccatcaggttggctgcggagctgttactccggatgcggttggccctgctgctgctgccggtggacagctgccggagctccagcttcctcgggggcctggtcttttgcaggtaacacccatcgctgtcctcatatttgccgctgctggtggtgctaggtttcctttctgggtgggcaagagacatcactcattgctggggatgggtcatgcccggtagaaggcatggagcccccactcccctccatcaagaagtccaa

SEQ ID NO: 13247 - DNA, 518 bp, Homo sapiens
  MAP TO CHR5.3; EXPRESSED IN ADULT LIVER, SIGNAL = 2.1; EXPRESSED IN BRAIN, SIGNAL = 1.6; EXPRESSED IN LUNG, SIGNAL = 1.1; SWISSPROT HIT: P49419, EVALUE 1.00e-14; NT HIT: gi14735831, EVALUE 4.00e-54; EST_HUMAN HIT: AV731534.1, EVALUE 1.00e-113
gaaggatgtcaaatggggtggcttttccaatatgcccagagccctgcttgtgtctcagggaaaagaaggttaaaaagctgtcacaattgatctcagagcatcccttaccttgcccccatagaccactgtgccaccttctttctttgcttcttccactgctccaagaaacatgctcactgcctgcttggtgtggagtggcccatagagaacattagctggagagagaaaaggaaggctggctcatcattttgccctttatggcatcgttttattattagaacagctttctcaatgaacagaccaatcccttcctatatgctctcaattgagaacataagtcagcatcctttttccataaagaaccagatggtaaatattttatgctttggaggacatacgtgatctccatcccaatactcaactccgtaattgtagtgcaaaagcagccataaatgacatgcaaatgagtgggtatgtgccgagaaacttttttttacagaaacaggcagagccaagtc

SEQ ID NO: 13248 - DNA, 576 bp, Homo sapiens
  MAP TO CHR12.3; EXPRESSED IN FETAL LIVER, SIGNAL = 0.41; EXPRESSED IN BRAIN, SIGNAL = 0.39; NT HIT: gi13651933, EVALUE 0.00e+00; EST_HUMAN HIT: BI493224.1, EVALUE 7.00e-66; SWISSPROT HIT: P94132, EVALUE 1.40e+00
tctccaggctgatggtcttcctctaggaagtttgtaggaagaagttgcagggtggggaagctgactaagccactgaatttgcatgtgagattaaaatctcctcaaagactgagattccctgaaacatagtcaaaacaattatggaagatttcagtgatctttaatgacacagttaaaaagacaatgcaagaatgcagtgcaatgaaacagatcttcaaggatttattcactggattcctttcgtggaacatccatctcttcccaaggtgtctatgtgactctgagatttttccttttctcacagcacttcaattgctgcagtaccctcaaagaggcttgctttagcttgctgtttcctagaattaagataaatgagtgaccccagggatagatggctgtggttgtcattccaaacataagcagcagtttgttttctcgcacagtaaaacatgatatttctatggccatgcctataaaatacaagataaagaggatgatgaaagatatcaaaactttcattgccttcacatgagcttctgtgttggagtctctcaatcctgtcacattcgattgcat

SEQ ID NO: 13249 - DNA, 578 bp, Homo sapiens
  MAP TO CHR19.3; EXPRESSED IN FETAL LIVER, SIGNAL = 0.98; EXPRESSED IN BRAIN, SIGNAL =   2; EST_HUMAN HIT: AI199756.1, EVALUE 1.00e-121; NT HIT: gi7019370, EVALUE 1.00e-121
tattccgttggtggcttctccccctgagcaggttcctcatgagagtgctggactcctacggggatgactaccgggccagccagttcaccattgtgctggaggtgagtgttgggcctccaggagggtcaggaactgggagctcaggacccacccatcacctacctccccctcctgcctgccaggatgagggcagccagggcacggatgcccccaccccaggcaatgcggagaatgagcctccagagaaagagacactgtccccgcccagaaggactcctgcacccccagaacccggcagcccagcccccggtgaggggcccagtgggcggaagaggcggcgagtgccacgggatggacgccgagcaggaaatgcgctgactccagagctggccccggtgcaggtgaggaaggcgggaactcaaggggagggactggggctccagagccggcgccagtgcaggtaaggaggggggactcaaggggaggggccagggctggggctgagttaggttcagggctcttgggttttggttctgcaccccgaggggcccagggctggggaaagttggagaagggag

SEQ ID NO: 13250 - DNA, 546 bp, Homo sapiens
  MAP TO CHRX.3; EXPRESSED IN BRAIN, SIGNAL = 0.46; NT HIT: AF020671.1, EVALUE 0.00e+00; EST_HUMAN HIT: AV763090.1, EVALUE 1.00e-102; SWISSPROT HIT: Q13496, EVALUE 3.00e-31
ttgtttgcttggagatttgctttcttgatagcttaaactttctgacttaaccataggtgctgtcatggattcatccagaaaataagacggtcattgtgcgttgcagtcagcctcttgtcggtatgagtgggaaacgaaataaagatgatgagaaatatctcgatgttatcagggagactaataaacaaatttctaaactcaccatttatgatgcaagacccagcgtaaatgcagtggccaacaaggtgagtggacttaatgatgtgctggacacttagcttacatatggagtgcagtgttttctgtgaatgtttttgccatgatatagaaacacgtgggtttaaattaatagttaagaaaaccagttctcttagacagaaagtagttttaatcacaaaacttaaacaaaattgaatatatcaaaatcaaatgcaaataaactttaggtaaataggcatgtctagactgtaatgaaattgggttttggccaggaccttggcaggaaaaagttagattctctttaaagccctttcagctgtggatgat

SEQ ID NO: 13251 - DNA, 580 bp, Homo sapiens
  MAP TO CHR17.3; EXPRESSED IN LUNG, SIGNAL =   4; EXPRESSED IN BRAIN, SIGNAL = 1.3; SWISSPROT HIT: P20839, EVALUE 3.00e-92; NT HIT: gi14752972, EVALUE 0.00e+00; EST_HUMAN HIT: AL518728.1, EVALUE 0.00e+00
catggcaatctgatacaccgagttcccttgggacgagtccaagactatgacatcgacgcccgcctgggtgagcaggcccaggcggaatttgtcatcttcacaggtgcccacaactgccccgcacagcagctgcttgtgggaatccttggaggccagagggtagtctcggttcttcttcaggtccgtgcgggcgatgatggccaccagctcatcatgatcattgacaacaggcagcttccctttcttgctacgctgcaggatctcatttgcctctttgaacgtcacgcctgctggagccaccactagctccatccttggcgtcatcacctcactgaggagggtgtgtggtccttctcagcaaggaagtcgatgtctcgggaggtgaggatgcccaccagcttgctgccgatggtgccggtctcagtaatggggatgccagagaagccatgccgcatcttggcctccagcacatcacccacagtgtgcaaggggctcagtaccacagggtctgtgatgaagccctgttcaaacttcttgaccttctgcaccttgttggcctggaactctggggtgcagttgt

SEQ ID NO: 13252 - DNA, 535 bp, Homo sapiens
  MAP TO CHR8.3; EXPRESSED IN LUNG, SIGNAL = 2.1; EXPRESSED IN ADULT LIVER, SIGNAL = 1.1; EXPRESSED IN BRAIN, SIGNAL = 3.9; NT HIT: gi14745666, EVALUE 0.00e+00; EST_HUMAN HIT: BG537962.1, EVALUE 0.00e+00; SWISSPROT HIT: P21281, EVALUE 3.00e-21
gcaagactgctccctgtctcagcccagccgcctcttccctcttctctggttccttatgatactcactgtctgtgccttcttttcctcagtccttctcatttagtcttgggagtcccaacttttttttttcaatatctatttaatacactgctagtcatataacaatacatactggataacactgctaagttggaagtcatttgcatttattaattcaatctcaattttttaaggtccttacgaaaatcgcactgtctttgagactttggacattggctggcagctactccgaatcttccccaaagaaatgctgaagagaatccctcagagcaccctcagcgaattttaccctcgagactctgcaaagcattagctgctgcttctgcattgctccgcgctcttgtgaaatactggttctgttttctttattccttttgcactctcggttcccacctttgtgttggagtttaccatgttaccctgtaattaaaaacaaagaataggtaacatattgtgccagtgttgcaacgtttta

SEQ ID NO: 13253 - DNA, 523 bp, Homo sapiens
  MAP TO CHR4.3; EXPRESSED IN ADULT LIVER, SIGNAL = 0.86; EXPRESSED IN BRAIN, SIGNAL = 3.1; SWISSPROT HIT: P52408, EVALUE 3.20e-01; EST_HUMAN HIT: BF439282.1, EVALUE 0.00e+00; NT HIT: gi7657260, EVALUE 0.00e+00
tctttgtcttccttggtgggttaaaggccccaagtagttcaatggctagcttttctcattatcccaatgagatcaagtgctaggactggattgaaatctaaaaggaagattaaaaaaaatccttccaggcattgagaagtgcagccagagtgaatcatcttgttgtgatgatcttggaatttggaatgatactgtgtgatgtggcaggcagcaacagtgggagctcgaagattgctgcactgtgcatttcaagcaacaaagtctgaaaagtgccagggcaatttcttcacagtatttcacatgcaaaggggaaaggaagaaggggagaagaagccccatgctgcttttaaggcagggaaggaggcaaactggtccaccgtcctcagaatgtgagttccaaggctccaatgctcaggacgtcttcttgtgctctcctttcaggtggctcgctctgcttccagaaaagtctgtgcctcaaacagcagaaacttgttcatcttctgcaaatacagcagggaagaaa

SEQ ID NO: 13254 - DNA, 536 bp, Homo sapiens
  MAP TO CHR5.3; EXPRESSED IN ADULT LIVER, SIGNAL =   2; EXPRESSED IN BRAIN, SIGNAL =  10; NT HIT: gi14726420, EVALUE 0.00e+00; EST_HUMAN HIT: AA010045.1, EVALUE 0.00e+00; SWISSPROT HIT: P28679, EVALUE 5.00e+00
aagagggaaagcccaaaatgccacttatagagaacccacagttcagttttattcagagcaaagaaaaaagaaactttccatcatactagaagaaacttggccgtaaggtttgggatctgtgctcaaactacacatgcaatgaggacaatattctgctaatacaattgacttgctgctgcatttgtctactgtttgtctaatattaacaattataaacagagcagtgcaactagtatttggaacaatccttacagtgttacagtgtcaggcacaacatttcacttctcttcacaccactggttctctttgcgtacctaaaagagatggatatagggaagtaccttaacttgagtagtctttcctaagacttataaatactacctactgattcatcgatagccagtgagttgagtcagaagaacagatggaaaattagaacaacaccaggttaagactatatttccggatttcctttctttgcctcccatggtttttattctgccctgctgaaattatgaacaaagcaaaggcaatgg

SEQ ID NO: 13255 - DNA, 578 bp, Homo sapiens
  MAP TO CHR19.3; EXPRESSED IN BRAIN, SIGNAL = 1.1; NT HIT: gi15305980, EVALUE 0.00e+00; SWISSPROT HIT: Q9ZLW1, EVALUE 6.40e-01; EST_HUMAN HIT: BG760649.1, EVALUE 0.00e+00
atgctggggaaagtttgatgaggaggagggagggggcagggctttgctgggagggggcaccgtaggggcagggcactccaccagccccagccaaggctggcgcttcctggcgagtgggtgtctttcacggcccccacatcggggcctggcctccatggagtcccctgcctcgcagctgtgtcctctgagtgtgtgtgtgcttgctcctcctcagaacatggtgatgagttttcgagtctccgaccttcagatgctcctgggtttcgtgggccggagtaagagtggactgaagcacgagctcgtcaccagggccctccagctggtgcagtttgactgtagccctgagctgttcaagaagatcaaggagctgtacgagacccgctacgccaagaagaactcggagcctgccccacagccgcaccggcccctggaccccctgaccatgcactccacctacgaccgggccggcgctgtgcccaggactccgctggcaggccccaatattgactaccccgtgctctacggaaagtacttaaacggactgggacggttgcccgccaagaccctcaagccagaag

SEQ ID NO: 13256 - DNA, 522 bp, Homo sapiens
  MAP TO CHR20.3; EXPRESSED IN FETAL LIVER, SIGNAL = 2.8; EXPRESSED IN ADULT LIVER, SIGNAL = 2.5; EXPRESSED IN BRAIN, SIGNAL = 2.3; NT HIT: J04718.1, EVALUE 0.00e+00; SWISSPROT HIT: P04961, EVALUE 2.00e-32; EST_HUMAN HIT: AA742384.1, EVALUE 0.00e+00
tacccttaagagccggtgtggacttgatccataaaccactgttctgtggtatgtacacgtgctgaatttgtattcccttcttgcaaatataattctaaattggatgacacttataaatcattcgcagatttcaacagtatctcaattttcagaaattacttgggatccaattctgtctacttttaattttagcaattaacctaataagcagtattataattctcttcaaactattttctttttacttaaaaactacttacagcttcctcctctttatcgacattacttgtctgtgacaatttaatgtttccatttccaagttctccacttgcagaaaatttcactccgtcttttgcacaggaaattacaacagcatctccaatatggctgagatctcggcatatacgtgcaaattcaccagaaggcatctttactacacagctgtactcctgttcctattaagaacaaaaattttccaaaagttaattgttagaaatttaatgatttggcaccctcactttc

SEQ ID NO: 13257 - DNA, 580 bp, Homo sapiens
  MAP TO CHR18.3; EXPRESSED IN LUNG, SIGNAL = 2.1; EXPRESSED IN BRAIN, SIGNAL =   3; EXPRESSED IN FETAL LIVER, SIGNAL = 2.4; NT HIT: X06705.1, EVALUE 3.00e-61; EST_HUMAN HIT: BG706088.1, EVALUE 1.00e-58; SWISSPROT HIT: P12970, EVALUE 7.00e-22
taaccctgctggaaggacaggtgacctcttagtggagacatcccctttgctggcagctgtcttcccagcccacgacaacagcctctgcttctcttgctttgtctctggtctgtacttgtgggccagcccgagttaattaaggagcttgttggcagtctgaagtctgggtaaactagttaatcacaggaggcattttctgctgctcataggggatagccctttgctgctgcaatcagatatagctgggccatttgacaaagcaagtgaggtccctttggggctgaatgtcctgtccaatgccaaaattcttaggccttttctcaaacaagggatttaccaccttcttagcctcctgctactttcagacagcaggggctggggtcgtcttcttccccttggccttcttttccttgggcatcttgggcagctggaggagaaagaaaggaaagggaattctctcctccatcttctgagcactcctgactgttcctcttgttctgcaaccttacatattattagtgttctccattgttctgccttttgttcccgcacttttcatgccgtaggctctctctggcta

SEQ ID NO: 13258 - DNA, 562 bp, Homo sapiens
  MAP TO CHR6.3; EXPRESSED IN LUNG, SIGNAL = 1.6; EXPRESSED IN BRAIN, SIGNAL = 0.79; EST_HUMAN HIT: AW376705.1, EVALUE 0.00e+00; NT HIT: gi15208634, EVALUE 0.00e+00; SWISSPROT HIT: P00751, EVALUE 1.00e-35
tgagagggaggtgcaataggaagagataatgcctggcccagaacctagctctagaagggcttaggggacatctactgagtgacgaaggcaatgggtagatgacagtggtgggagcagctgaagtgacgcagtctattcgtccagagaaagagctgctccctgcacaggatatcaaagctctgtttgtgtctgaggaggagaaaaagctgactcggaaggaggtctacatcaagaatggggataaggtgagaaacgggcatcctaaggaggcactctaggccccaatccttcctaagccacttctgttcattacttctccatgcttcccacctcccctacagaaaggcagctgtgagagagatgctcaatatgccccaggctatgacaaagtcaaggacatctcagaggtggtcacccctcggttcctttgtactggaggagtgagtccctatgctgaccccaatacttgcagaggtgagagaatgctctttggttgtgctacaagtgcccaaggcccaacagtccttttctctacagcttctcctctccttgcaggtgattc

SEQ ID NO: 13259 - DNA, 569 bp, Homo sapiens
  MAP TO CHR14.3; EXPRESSED IN BRAIN, SIGNAL = 0.61; EST_HUMAN HIT: BI518795.1, EVALUE 0.00e+00; NT HIT: U94831.1, EVALUE 0.00e+00; SWISSPROT HIT: O15321, EVALUE 8.00e-67
gggctacgtgatagccaatgtggagaggctgacctgtgcagaactgagctgcatgtggcacagaattctcttctccacgttttcccgaaagcggatctcatacaaagactcagccattcggtccccatccagcacttcacccaggctaaggcttttgtgacgtatcttctcagggcagcagactggaagctgatagtagtggtaagtttcctgagggttatggtagggtcccactttgttgacatacagaataacagggtcgccggccttgtagtgtgtcacgccttccacccctggcccatggcctgtgcccagcaacagtatcaggattggcaaccactggcagctccaacttcgagggttccctacgactgtcatccttaaggcagtggaacctgtttgggggaatcctgaggttatagaaaccagggaggttacagaaaccccaggtcaggtgcctcgaactgaggtcccctggctccacttgctcccattggccccctccccgcctcaccctaccccacgtctctctatcccaaagaccccgctccacctctgctctctcatcc

SEQ ID NO: 13260 - DNA, 578 bp, Homo sapiens
  MAP TO CHR6.3; EXPRESSED IN BRAIN, SIGNAL = 0.25; NT HIT: AJ132194.1, EVALUE 0.00e+00; EST_HUMAN HIT: BF838729.1, EVALUE 3.20e+00; SWISSPROT HIT: P58173, EVALUE 4.00e-51
attagccacacggtggaaactaaggatacagacgcgctgattcatgatgagggtgtagtgaagaggtctgcagatggccacatagcgatcaaaggacataatagccaaaagcaaacattctgttccccccattatgtgaaagaaataaagctgaaccgcacaccccatatagctgatggtcttcttagagcttcccaggttaaacagcatctgagggacaatgcttgtggtataacacatgtccaaaaaggagaggttggtgaggaagaaatacatggggctatgaagacgagagtctaacctggacatgagaatgattgtgatgtttcccatcacggctatagggtacattataagaagactagtgaacagaggaagctctagccaagggcggtctgcaaagcctagcagaataaattcttcagggtggctttcattagttagtggcattatcttcaatttgtttcacctgtagtagggatatgccaaagaaggtagagctatgggtatcgacaaaacatggtgatgcattgattgtctacttatagatgacagggtgcagtaacctggggtcagaa

SEQ ID NO: 13261 - DNA, 523 bp, Homo sapiens
  MAP TO CHR19.3; EXPRESSED IN LUNG, SIGNAL =   1; EXPRESSED IN BRAIN, SIGNAL = 0.99; EST_HUMAN HIT: BI828162.1, EVALUE 1.00e-119; SWISSPROT HIT: P34588, EVALUE 5.60e-01; NT HIT: AB051509.1, EVALUE 6.00e-53
agtgtcatccaaaagccctgggctgtcctcagagaaggcccatcacagagcacgccctggggtggccaccagcctcggccatgaaaggcaaggctttggttttctctctcctcagaaatcaacgaccgggagcagaagttgcatgcccttaaggaggtattaaagaaatttccaaaggaaaaccacgaagtcttcaagtatgtcatctctcacctaaacaagtaagtcgcagggccttctggttggtttttcctcctgaaaattgacagccagggtcagtgtgtcgcagaacaaggctctgtccacaagccagtagaagcctcaggccctggcctggaaggggtgctggctggcctcccatggtgcccgctggtctcggtgcccagagcctctgcctctcgcccatcctcaggcctccctcctgctcctgtctgagggcagcccacgtggcctcaaacctgcctaacaccagatagggcacttagctccagcgggcatggggcctcttgtaggcctgtgtccc

SEQ ID NO: 13262 - DNA, 507 bp, Homo sapiens
  MAP TO CHR1.3; EXPRESSED IN ADULT LIVER, SIGNAL = 0.96; EXPRESSED IN BRAIN, SIGNAL = 0.93; SWISSPROT HIT: P97347, EVALUE 2.00e-26; NT HIT: X99251.1, EVALUE 3.00e-24
gactgaccatggtgggaatctctgtcttgtctctcaggctgaccatggtgggaatctccgtcttgtctctcaggctgactgtggtgggagttctgcctttcttcctcgtgcctctgtctgtgttgtctgcctgtgtttcctgggaacttacagtcttgtgctccttcctgccccctttcttgctgtgaggtcctgcctccatgtgacttattgtctagcttatgatagcaggcttggaccaactggaacaccaacaagaggtactcatgaaaatcaatatgtccatctcggtcttgatctaagaggttcaagatggtttccacagtctctgggtcatttggtctctgttaggagataaaacaaagagcaaaatcagatgctgtcttgtgcatactaagatgtgtatcagtgttcatgccccaatccattcggtgctgcacggaccttcctaggttgaaaaaccattaatctgaagtggtgtggacttggcgctagtctttgatcagc

SEQ ID NO: 13263 - DNA, 566 bp, Homo sapiens
  MAP TO CHRX.3; EXPRESSED IN ADULT LIVER, SIGNAL = 0.49; EXPRESSED IN BRAIN, SIGNAL = 0.63; SWISSPROT HIT: P30550, EVALUE 1.00e-42; NT HIT: gi12743373, EVALUE 0.00e+00; EST_HUMAN HIT: AU125660.1, EVALUE 1.00e-129
tgtctccttctgtccccatcattcacttttctttcttaaaccaatatgttacactcaagaagtcatacccagaataaaaacctgcctggaagggaatccgtgtttgagtaaaacttcccttgtgcaatcagctccctgtcccgacatggtagttcatttacccaggcgtctatcacccttggagagcatgtaactttcagcctgtacttacctgtctgccgagagcgccgtgagtgtgaagacagacaccccaacagaggtaagctgtataaaggggatcagtttgcagccaatcctgccaaatagccatctgtcagccaggtacctgctggcatccactggagcacacgttattaggaggagcaggtctcccaaagccagactggaaatgaacaggtttggaacgtttcgcatggacttgactgtacagaagatcttgatcaaagtgatgttgccaatgaggcctatcagaatgataaccccataaactgcagggatgacatagaggatccccgggtgggaccagtcatcgttcacggggagatccgcactgtgactggagatgt

SEQ ID NO: 13264 - DNA, 592 bp, Homo sapiens
  MAP TO CHR8.3; EXPRESSED IN ADULT LIVER, SIGNAL = 0.71; EXPRESSED IN BRAIN, SIGNAL = 1.1; EST_HUMAN HIT: AU132666.1, EVALUE 4.00e-80; SWISSPROT HIT: Q12797, EVALUE 3.00e-14; NT HIT: gi14589865, EVALUE 2.00e-80
tctattgagaaccactgaaaggctatagaaattaccagtaccagaaagatgataacaaatattcaagactcctaagagatgtcacttactctcttacaaattcacataaggatatcaaaattcttacctagaacttcctcatagtcaacaagatcaaaccaaacgacagctacagatgtccagacgcccagcaatgcaatcaccataaaccacgtgaagaatgaagttcctgagagtccgcctttcctcccattcttgtgtcctccatgctttgtctctgtttagaaataaatgtaagatatcataagaagaaaacattttactgaacacttattctcacaattatttctccaataatttgggattatgtacaatgatagatcatttcaaaaacagtttccagttaaattctcaaaacacgtcacacaaaatatttctgaaaacagaaaagattgtttagatgcaacactaactttgaagtagtgcaggaaataaactcctgaatttttttaaagatttagtataatatgtatattccatccaagttactcatcaaaatgacctgaatattacctctttccaaaggcagagc

SEQ ID NO: 13265 - DNA, 560 bp, Homo sapiens
  MAP TO CHR15.3; EXPRESSED IN BRAIN, SIGNAL = 0.37; EST_HUMAN HIT: AI249163.1, EVALUE 1.00e-118; SWISSPROT HIT: P16452, EVALUE 5.00e-41; NT HIT: L06449.1, EVALUE 0.00e+00
ctgggtctgagagctggttcattcagggagaaagccctggcacagactgggtgttggtgctgtccttagagagggctgccacaggggcctggtgcaggtgctccctgccagagctgcaccccagctccagtgtctggagtctccatgcagcccaggctggcccaggtccaaacttacctctattccaggggttaaaaagcagtgtgaactgacccaagaggagttgcttcctgcctgagacctgcagcagaagcgagtagtggccaatgacagcgtccgcaggtgtggtcacagagatggtccaggactgggcatctctctcctccaccactgcactccaccactttcggtcccccagactggaaattgggaatgtggcttgggtcctgttgatcttggaaggctgctctcctgtagtcacacggtgattagtctgtcactgggacttcttggtcacaactcagagtaataaggtcagggtattacaaagatggagcaggtgaaatttgtttttggaggataatgaaagtgacccacctagaaatgaggcccatcaagaa

SEQ ID NO: 13266 - DNA, 507 bp, Homo sapiens
  MAP TO CHR2.3; EXPRESSED IN BRAIN, SIGNAL = 0.22; SWISSPROT HIT: P04114, EVALUE 3.00e-88; NT HIT: gi14722710, EVALUE 0.00e+00; EST_HUMAN HIT: T95095.1, EVALUE 5.00e-85
aatttgggcttttgtggttgttgccactgacacttccatatttttcgtggttaagctcacagtactgttatgactaccctccacaaatttgttgctcagagacagagctgtggctaacttcaatcccctttttcttgtcaatcttgtggtgccctctaatttgtactgcagtgcatcaatgacagatgaagatgaagaaaggagatgagcaacaatatctgactggttaaaaagttcagcattggtattcagtgtgatgacacttgatttaaaggagaaatcataggtaatattgcccatggcaggaataaaaatatggcttatggtacacaattccttgaaatctggaagagaaagcttgagatttctagggacatgaaggactggcagctctaatgatggcaggattaatgtgtatgaaggcacacggacgtcagaacctaggatggagaaactaggcatgctgactgcttttgggaacacatagccgaatgccgacatctctat

SEQ ID NO: 13267 - DNA, 571 bp, Homo sapiens
  MAP TO CHR10.3; EXPRESSED IN BRAIN, SIGNAL = 3.1; EXPRESSED IN ADULT LIVER, SIGNAL = 1.8; NT HIT: gi14737771, EVALUE 0.00e+00; EST_HUMAN HIT: BI258256.1, EVALUE 0.00e+00; SWISSPROT HIT: P77674, EVALUE 5.50e+00
acagggataactgtgctgggcttaagagaaaagagatgtaacaggggtaactgtgctgggcttaagagaaaagagatgtaacaggggtaactgtgctgggcttaagagaaaagagatgtaacagggataactgtgctgggcttaagagaaaagagatgtaacagggtctcttcgctgagcagacctgagccattaaacagattgttacccagtagttgaaattcagaatggaaaattggttttaagtaatgaacatactttatttttttctcctccttttagatggtgaagaaagccaagactatgatgaagaatgctcagaagaagatgaatcggttggggaagaaaggggaggcggatagacacgtgtttgatatgaagcccaagcacttgctgtctgggaagaggaaagctggtaaaaaggacaggagatagtatccgtttggttggcgtggcttcgctagagtgttgctgtttatttcctggtttggcacagtatggtttcatgaaattggagctctgtataaactgaaaaagacaaaataagtaaagcacttgttgctttgctgaa

SEQ ID NO: 13268 - DNA, 581 bp, Homo sapiens
  MAP TO CHR17.3; EXPRESSED IN BRAIN, SIGNAL = 4.8; EST_HUMAN HIT: AI132992.1, EVALUE 0.00e+00; SWISSPROT HIT: Q21184, EVALUE 2.50e-02; NT HIT: gi14770301, EVALUE 0.00e+00
ctgggaagtccttgcttgaggagcgcccctcgccttccgagttcacacacacccctccccagggccaccttgggagccaggacacgttgggtgtgagcactgctgctcttgctcctgccccatcccacctgagtgtcactgtgacaaagggcacagcggggaagggatgtgggaacggcttccaccccgggttgcctctggagctgggtgggtgtcagtcctcacagccattgttttccctctgcttccagtggagtctccaccaccatcgaccccttctgggacatcagcttggatctccccggctcttccaccccattctggcccctgagcccagggagcgagggcaacgtggtaaacggggaaagccacgtgtcgggaaccaccacgctcacggactgcctgcgacggtgagaggcctgcacccacacggcgggggcgtgtctcctggccagaaggctgtgctccatcaggaccaaagcagggctctttcacatgcccaggacagagcctgggcaaaggtgcagcatgagcctggattggctgcagtctcttgtgctagtttgtcctttgttttggcc

SEQ ID NO: 13269 - DNA, 569 bp, Homo sapiens
  MAP TO CHR17.3; EXPRESSED IN BRAIN, SIGNAL = 0.57; EXPRESSED IN ADULT LIVER, SIGNAL = 0.74; SWISSPROT HIT: P19012, EVALUE 3.00e-35; NT HIT: AF049259.1, EVALUE 0.00e+00; EST_HUMAN HIT: AW263881.1, EVALUE 1.00e-122
tgttaaccctgcagcctaccaaggaaatgtccccgtaaagtcagacagtgaggggtctcctctctgacatgagggggtggatctctaaggccctgcctgctctgacacccacgggtcctgcagtcactatcctaagaaagaggctggagaggacctacttggcgtcctggccctcgagcaggctgcggtaggtggcgatctcctgctccagacgtgtcttgatgtccagcagcatcttgtactcttggttctggcactccatctcactgcggagctcgctcagctgggcctcgatgctgctgatgagtccctggatctgctgcagctgcagggcatagcggcactccgtctctgccaccgtgttctccagccccgctttctggtggagcgacagacaagaagttacagagggagccaggccagagggaaacctagaggtggtcgccaccgggcaggaggctgcaggcataccatgctcagctgggactgcagctcaatctccaggccttggagcgtgcgcctgagctccgtgatctctgtcttgctggtctgaatcatggcagtgttgg

SEQ ID NO: 13270 - DNA, 588 bp, Homo sapiens
  MAP TO CHR10.3; EXPRESSED IN ADULT LIVER, SIGNAL = 0.62; EXPRESSED IN BRAIN, SIGNAL = 2.6; EST_HUMAN HIT: AW948651.1, EVALUE 0.00e+00; SWISSPROT HIT: P70662, EVALUE 3.00e-05; NT HIT: AJ243098.1, EVALUE 0.00e+00
tggatctgcaaacactccagtctgcatgtctatcagtgtgagtgtgtgtgctggatggtctgtgagccccaagctgtctgtcctgaatatccgtatgtcctcatgggtgtctctgtccctttatgccctagcttcctatggctgagtctgtgtgatcacacccatgcaagtgcctgacaagaactctctcaccagtaaaagcagttagcccatgctggcagagtacatgagaaaaactgtctttgcttctacgcctgctagtgagctcaggcttggaaaggggtcaggggtgagtggtggggcagcccagaagagagaagaaagccgagatgcttacaggtacctggctggagagggcgaaggtgctagctgggctcttcttcttgctgttgctgttgttggtgttgccaccaccagagctcatggtgctgccccctgacatcttccgtttccgccgtttgctgggctgctgacgtgtgggctccgctgtgccggtaaacggagactcagatgggagagggccccaggtcccctattctccattgtggctcccaaggagcatgagcctgccctgatcccaattttgta

SEQ ID NO: 13271 - DNA, 549 bp, Homo sapiens
  MAP TO CHR19.3; EXPRESSED IN BRAIN, SIGNAL = 3.2; EXPRESSED IN ADULT LIVER, SIGNAL = 1.8; SWISSPROT HIT: O43296, EVALUE 1.00e-114; NT HIT: gi11426566, EVALUE 0.00e+00; EST_HUMAN HIT: BF229534.1, EVALUE 1.00e-124
tctctccagtgtggatgctgaagtggcgaatgaggtccttccgattgctaaaggctttcccacactctttgcactcgaaaggcttttctccagtgtgggcccttttatgcaagataaaagtagagcagtgggtgaaggcctttccacattcactgcacacgaagggcttctccccagtgtgaatccgctggtgcctcttgaggtaggatcggtggttgaaagccttcccacactcgaggcactcaaagggcttctctccagtgtggatgacatagtggtgaatcagggctgcactctccaagaagaccttcccacattcactgcactcatagggcttctccccggtatgagtctgctggtgccacatgagatatgacctgtgtttgaagaccttgccacactccaagcactcatagggattctcaccactgtggacaacatagtgccggagaaagcctggcctatgtcgaaagacttggccacattctgtgcacacaaaggatttttctccagtgtgtctcctgttatgcaagacaaaattggagcggt

SEQ ID NO: 13272 - DNA, 583 bp, Homo sapiens
  MAP TO CHR10.3; EXPRESSED IN BRAIN, SIGNAL = 0.63; SWISSPROT HIT: P24410, EVALUE 2.00e-62; NT HIT: gi4758983, EVALUE 0.00e+00; EST_HUMAN HIT: AL532637.1, EVALUE 0.00e+00
tcggctctgtctgacatttgcttctgagaaacaatgtgaggtatctctgttagaattgtctgaaaagtagcttctacatttgtagagtctagagcagatgtctcaatgaatgacaaatcatttttttctgccaaagctcttgccttcaactctaggaacttccctgagatgatgtaaatcactcttatttgtccatgataacatgacaacaacattactatcagtgtgatcgctcagttctttcagcaatcattctgtattttcatatgtgagatgtttagcaatgtcttaaaccaataaggcacctatatcttcatgataataagcttatgttatagcttcgtattactcttgccctgctctgtcccacatctgtgcctttattgttttcctatcaatatggatgcttcttgttgcaaactactccagtggtgctcttgctttccagattaaactcattttgagtaaatcaagacaggagattattctttccaacaccagaatctccaataaggataacattaaagaggtagtcattctcattgttgcaggtgcccattgcacaactgaggagtgaaggggt

SEQ ID NO: 13273 - DNA, 511 bp, Homo sapiens
  MAP TO CHR12.3; EXPRESSED IN BRAIN, SIGNAL =   1; EST_HUMAN HIT: AI797907.1, EVALUE 0.00e+00; NT HIT: gi13650028, EVALUE 0.00e+00; SWISSPROT HIT: P24731, EVALUE 8.10e+00
tggggagataaaggcaaaaagaggaaatgtaagctatcttacagtcattctgagaacctctggtttcatgctatactttcccagctaaaagttactaatttacgaagttcagatactgaaacttaaaaatcaagatccatatattaggatgtcctgctgtcacactggtggtggcccattgtgtcggagtctggtaaatggccacaagatatgttctagagacgtccatgagtcctcttgctgtgtgggagcggcatccacagacttctggaataattggcctgtgaggaagctcatcaaagctgcaaacagtacaatgaatgcaatagagagccagagggccttattagcctttctgatggaggacttgagatttgttgcccaggaagctattgtgtcataactataaggaaaacacaaatagaatttggtaatcggtaatttgtcattagaaacattccttttgctaacaccaccagtcaggtgatctgcccttcatacccccaaaact

SEQ ID NO: 13274 - DNA, 593 bp, Homo sapiens
  MAP TO CHR12.3; EXPRESSED IN BRAIN, SIGNAL = 6.5; NT HIT: gi14767728, EVALUE 1.00e-121; SWISSPROT HIT: P16615, EVALUE 1.00e-37; EST_HUMAN HIT: AA488440.1, EVALUE 1.00e-121
tgtgaaggcaagtatggcagattgcaattgagatgttcttgccagggttaagatcccggtgaaccaataaaacaaaattgtttatctaaatctgtaacatttccagggtgctcctgaaggtgtcattgacaggtgcacccacattcgagttggaagtactaaggttcctatgacctctggagtcaaacagaagatcatgtctgtcattcgagagtggggtagtggcagcgacacactgcgatgcctggccctggccactcatgacaacccactgagaagagaagaaatgcaccttgaggactctgccaactttattaaatatgaggttagctaatgaaaagtttctttgtccacaccctgcacgattcattgtgtttaaacagtactccttcaagcaaaaggtcaaacagttctcacttttgccaagaaagaggtgtggttatttgtttttctgcctgccagctgtgtcacccttaaaatttgctgcttcaaacatacatagttaataatttcataaaagtgttattttcaaagtagaatattttcaaagtagaataatcaagatgagcttaagcttgtaaaccccattttgc

SEQ ID NO: 13275 - DNA, 574 bp, Homo sapiens
  MAP TO CHR1.3; EXPRESSED IN BRAIN, SIGNAL = 0.53; EST_HUMAN HIT: AW772606.1, EVALUE 2.00e-01; NT HIT: gi8922620, EVALUE 2.00e-93; SWISSPROT HIT: P06215, EVALUE 2.80e-01
ctttggctcttggcactaggctagcttgttgacccccaacccccattcttattttgagacaaatgttcaagctgaaatacgattcttccaaccaagaacattgagtgttcccaagacaaaccaaaccaaccctctgtcagctggcatagcaataatatttgtgggaagtttatgaaaaatcttatctaagggactgttttaggaatcaaggcaccatcgaatgacctcttttgtttccactttagatgcagcagcaggagcatgactccctgaaggccagcctgtgtgtcctggccctggggctgggccgccttctttgctggtggtggctggccgagctgatggctcacctgatgtacatgcatgccatctacagcagcatccccctcctggagactgtctcttgttggaccttaggtaattgtgggaatcaccaacagtgggatgagccccaatagtccaacagttagcatcagaatggagctggagtggggggtgagcaggggtgcaggtgcctatagcaaaccctctttattattattttttaacctactcctcttgtggccaagattgt

SEQ ID NO: 13276 - DNA, 600 bp, Homo sapiens
  MAP TO CHR6.3; EXPRESSED IN BRAIN, SIGNAL = 0.57; EST_HUMAN HIT: BE266298.1, EVALUE 0.00e+00; NT HIT: U07148.1, EVALUE 0.00e+00; SWISSPROT HIT: P23942, EVALUE 3.00e-39
ctccactgaaggctgtttccaaagagggaggcatgctctccaagcctggctccgcccccattagacccaaatgggaccggaggctctccttaccctctacccccagctggcccagggcctacctcgaagagccaaatgaggagcgtgacgacacccatggagttcatgaggctgctgtagtagctcagcagggcagccctgcagccacgcacccacaggttgagctcctccgtctggtggtcgtaactgtagtgtgctgagttgttggtgatctgatactggatgcagggccgtggcgagctaggattgcagcagctgaaagggacgccgtccaccaggtaccgcccatccacgttgctcttgattcgacttaaagggaaacagacagctggagatgggcttcccgggcttctcaacaggggccacttcctcccaacccctgcctctggaaacctagaatagtcattcactcgcacacttggtatatatttgctgtgcgcccgctacgtgccagtcactgttctaggcgctgaagacaaaaaaatgaataaatgcccctgccttcctcgaccttgaggtagacggtaatccaagacccaa

SEQ ID NO: 13277 - DNA, 563 bp, Homo sapiens
  MAP TO CHR2.3; EXPRESSED IN BRAIN, SIGNAL = 0.35; EST_HUMAN HIT: AW898897.1, EVALUE 1.00e-121; NT HIT: gi14732043, EVALUE 4.00e-60
gcccatctctttcagtctgctggttttgatcagatatggattgacttaaaatacatgcattcatgaaacctatgacttctagttttcaaacatttgtaaaccgactgatatgtctgctctctggagtctcccctacagaagtcactacttcttcattgtacccctcttccttttagttcagctcagaagccatattctccaggttaccagctgtcttctaaatgggttcacttgtttttgacttctgagtagaatgttgctaacacgggacgttgagcataaaaataattcttttttcacttaaagagaagtcatttaaaattccagttgagtgtgtttttgtttatgtaaggccttacaatttaatgctttttacttaatttgcaggagtagccactctataaaagaaccagtatctacacttcaccgactctcccagcgacgccgaagaacctactcagatacagattcttgtagtgatattcctcttgaagacccagatagtaagtgacatagattctgtctctttctttggcatattcagcaaaattactgtggggctc

SEQ ID NO: 13278 - DNA, 584 bp, Homo sapiens
  MAP TO CHR19.3; EXPRESSED IN ADULT LIVER, SIGNAL = 1.1; EXPRESSED IN BRAIN, SIGNAL = 0.76; EST_HUMAN HIT: BG541691.1, EVALUE 1.00e-52; SWISSPROT HIT: P25089, EVALUE 1.00e-109; NT HIT: gi11426996, EVALUE 0.00e+00
tgacgggactctggattttcaccatagtccttaccttaccaaatttcatcttctggactacaataagtactacgaatggggacacatactgtattttcaactttgcattctggggtgacactgctgtagagaggttgaacgtgttcattaccatggccaaggtctttctgatcctccacttcattattggcttcagcgtgcctatgtccatcatcacagtctgctatgggatcatcgctgccaaaattcacagaaaccacatgattaaatccagccgtcccttacgtgtcttcgctgctgtggtggcttctttcttcatctgttggttcccttatgaactaattggcattctaatggcagtctggctcaaagagatgttgttaaatggcaaatacaaaatcattcttgtcctgattaacccaacaagctccttggccttttttaacagctgcctcaacccaattctctacgtctttatgggtcgtaacttccaagaaagactgattcgctctttgcccactagtttggagagggccctgactgaggtccctgactcagcccagaccagcaacacagacaccact

SEQ ID NO: 13279 - DNA, 539 bp, Homo sapiens
  MAP TO CHR13.3; EXPRESSED IN ADULT LIVER, SIGNAL = 0.65; EXPRESSED IN BRAIN, SIGNAL = 0.54; EST_HUMAN HIT: AV662097.1, EVALUE 2.00e-56; SWISSPROT HIT: P46059, EVALUE 5.00e-22; NT HIT: gi15301457, EVALUE 8.00e-77
atgtgaacacgtgctcttgcaaagttcaagacagtaataattcttattcactaaggacaacacttggtgacctcagagaccttgctgtagggaagataccataatgctttctagactttttaaaaaatatagttatcccagatttaaattaagtcccatcagcattttctgcaggcaggggtattgcagatgggtggtaaatacaacaaacaagaaacctgagaatatgagaattccaatcccgtgacagagaagaccacttcgccacaggtgagaagaaaatactgcgggatttgcagagccatgttaactgtgttggctgaaatatcttcaaacaccttcacttcagggcagctgtcattctgcagcagtaaggcaaaagcagaagaagttgagatagcttctaaaataaaaactgttcgaacaggtaaattgagtttgaccttctaggattacatcatatgatttgtcaagtacgtacacattttaaacataaggcaacactgcattttacacttgcaatgggatttgaagacacg

SEQ ID NO: 13280 - DNA, 503 bp, Homo sapiens
  MAP TO CHR15.3; EXPRESSED IN BRAIN, SIGNAL = 0.31; SWISSPROT HIT: Q16548, EVALUE 2.00e-78; EST_HUMAN HIT: BG216703.1, EVALUE 0.00e+00; NT HIT: gi14753896, EVALUE 0.00e+00
tctcagcacattgcctcaacagcttcaaggtgagccagctcaagactttgctctccaccaggcagaagatgacagactgtgaatttggatatatttacaggctggctcaggactatctgcagtgcgtcctacagataccacaacctggatcaggtccaagcaaaacgtccagagtgctacaaaatgttgcgttctcagtccaaaaagaagtggaaaagaatctgaagtcatgcttggacaatgttaatgttgtgtccgtagacactgccagaacactattcaaccaagtgatggaaaaggagtttgaagacggcatcattaactggggaagaattgtaaccatatttgcatttgaaggtattctcatcaagaaacttctacgacagcaaattgccccggatgtggatacctataaggagatttcatattttgttgcggagttcataatgaataacacaggagaatggataaggcaaaacggaggctgggtatgtgtgatggaa

SEQ ID NO: 13281 - DNA, 502 bp, Homo sapiens
  MAP TO CHR1.3; EXPRESSED IN ADULT LIVER, SIGNAL = 2.5; EXPRESSED IN BRAIN, SIGNAL =  22; EST_HUMAN HIT: AL524897.1, EVALUE 1.00e-88; SWISSPROT HIT: Q62048, EVALUE 3.00e-23; NT HIT: AF153274.1, EVALUE 0.00e+00
gaccctatctcctgccttcctccagacaacctctcctacattgagcacatctttgagatctcccgccgtcctgacctactcactatggtggttgactacagaacccgtgtgctgaagatctctgaggaggatgagctggacaccaagctaacccgtatccccagtgccaagaagtacaaaggtaagcggccactcctttaactagctgcacctctgcctcgtcccgttgactatccttggagtacttgagttttgggagagtggaggcagatgcccaatgggcctgcctggcatctcccacactgctgtccctggacacatacctttttgcccccagacattatccggcagccctctgaggaagagatcatcaaattggctcccccaccgaagaaggcctgagcaagggggaggaagaggaggaaggttggaccttcatcagaccactcccttcccccatcctccaggagagggggcaagggcaacccaccatctacccact

SEQ ID NO: 13282 - DNA, 588 bp, Homo sapiens
  MAP TO CHR6.3; EXPRESSED IN BRAIN, SIGNAL = 2.3; EXPRESSED IN ADULT LIVER, SIGNAL = 2.1; NT HIT: AF108098.1, EVALUE 0.00e+00; EST_HUMAN HIT: AI683120.1, EVALUE 0.00e+00; SWISSPROT HIT: Q13608, EVALUE 6.00e-32
tgtaacaaaagccagggacctcctagggagggccagtactctcccttgatactcactgcacaccgccgtgctagctgtgccaagttcacctcctggcccaggggaaggtgggcagtgagggcccgcaggatgctgagccgctgcccctctgacagagcaggcacctcgagctcatgaggaaatgctgtctgcacatcagcaggcaggtcctgggcccggcttgtggtggccacaaccatgaggggagggcagctgcagacagaggagtgggcactgagggtgagaacatggctggcagctcctgtggactgccttgtcccaaagtcggcacagaagggcagggaagtgaggtgggtgctaggatggggtagggagatgagcatctaccccagttcctagatgggggaactgtgtttcccccatcacattgagggcagaggctttttctttaaccgagtgttccccaagaaatgctagaccacagactcctccctctggatccctctaaagacacggagctcagggctgtctagagggcagccaaatggatgggagatgactgacaagccactgaggggtgagagaagg

SEQ ID NO: 13283 - DNA, 577 bp, Homo sapiens
  MAP TO CHR14.3; EXPRESSED IN BRAIN, SIGNAL = 0.46; SWISSPROT HIT: O35799, EVALUE 4.20e+00; EST_HUMAN HIT: BI825694.1, EVALUE 3.00e-80; NT HIT: gi14751632, EVALUE 2.00e-80
atggatttgctttgacagggtgctagagactgtggagaaagtccatggcttggccacactgattggtaagtgccgttggcttcctgcggctcctaagcaccaatgcagaatttcccaaagcctacagttgcttttctggtggtttcttattttcttcctttgtcttgttcttgatccttgccacaccatctgtattccccctgctttcacactttctgctacccaggagctggtggagaagagttcggggttctagagtactggatgaggctgcgtttccccataaaacccagcctacaggcgtgcaataaacgaaagaaagcccaggtctacctgtcaaccgatgtgcttggaggccggaaggcccaggaagaggaggtgagaaaaaagatgtgccgaggcatctcagaggagcctcagccaaacagctcatgagcacagttcagtcttccactctcaataagtgtttgttgaatgtgaatgaaagagaaaactgtcacaccacaactagtctggattattcccttggtcaggcttgagtctgaaatgaaagtatgcctttggagcgagctacatc

SEQ ID NO: 13284 - DNA, 538 bp, Homo sapiens
  MAP TO CHR19.3; EXPRESSED IN BRAIN, SIGNAL = 6.8; NT HIT: AY047586.1, EVALUE 1.00e-116; EST_HUMAN HIT: AW996876.1, EVALUE 1.00e-116; SWISSPROT HIT: P15253, EVALUE 3.00e-58
tcagggtcagggatatgctcgggcttgtcccagtcctggggggtagatgaagagatcagagttggcccagatgtcttccacaccctccaatgtggagagcagagcccctgcccaaacaccaacctcaggcttggagtctgtgggatcatcgatcttggcccgctcatcccagtcttccggttttgaagcatcaggatcctttatcttcttgggtggcaggaagtcccaatcgtcttccaaggagccggactccacctggctgttgtcaatcttcacctcataggtgttgtctggccgcacaatcagtgtgtacaggtgtgtaaactcatcatcctgaagaaggaagaaggtgagcgggggccaccccccaatgaggctgacctctgaatctccccatgacagccatttgccaccacccccaggcacaccttgcaacggatgtccttgttgatcagcacgttcttgcccttgtagttgaagatgacatgaaccttcttggtgccagggccacagatgtcgggacctaggtgtgaagcag

SEQ ID NO: 13285 - DNA, 534 bp, Homo sapiens
  MAP TO CHR19.3; EXPRESSED IN BRAIN, SIGNAL = 3.8; SWISSPROT HIT: P53041, EVALUE 2.00e-36; NT HIT: gi11427528, EVALUE 1.00e-97; EST_HUMAN HIT: AL567317.1, EVALUE 2.00e-97
gaatgtccatgtccatgctggatgtcccctgcccaacacccacccaggctgggctgtggggtcagcacctggccgggccaggaggtggcctgtgagtgaccacccccggggaggtggacgagtccctaatgtttccctcgctccccaccagggcccatgtgtgacctgctctggtcagatccacagccacaggtgagtctagggtggggtgcagggccggcgggtgtgggctgtggcagcaggtggaggcagacagtcaccctgaacccctgtctctcccttctgcccaccctcagaacgggcgctcgatcagcaagcggggcgtgagctgtcagtttgggcctgacgtcaccaaggccttcttggaagagaacaacctggactatatcatccgcagccacgaagtcaaggccgagggctacgaggtggctcacggaggccgctgtgtcaccgtcttctctgcccccaactactggtatgtctttgcctttccagcccagggcctctaccaagccacgggtttttgtcttggtt

SEQ ID NO: 13286 - DNA, 595 bp, Homo sapiens
  MAP TO CHR14.3; EXPRESSED IN ADULT LIVER, SIGNAL = 3.8; EXPRESSED IN BRAIN, SIGNAL = 1.6; NT HIT: AF078829.1, EVALUE 0.00e+00; EST_HUMAN HIT: AA642041.1, EVALUE 0.00e+00; SWISSPROT HIT: Q06323, EVALUE 2.60e-02
ttcgagaagctcaagaagcccaggggagaaacaaagggaatgatctattgagagccctctctcccattctgtgatgagtacagcagagaccttcctgctttttactggggactccagattttccccaaactggcttctgttgagatttttccctcaccttgcctctcaggcacaataaatatagttataccactgcccatcagcccaagtctctttattggaaccgggccccgctggccctggctcaggcatttccatttccattagtgggaccaacccactgggtgatttgagtgttgagccgctggttggtccagtcctgccggatgtcatcaaggtggcagtcaaagtccacaaggtgctggtgggcccgatcttccagtagagctcccaccatctgccgtgactcttcccagtccctccacatcactctgaaatagtaacccccatggaggtcaaacagcaagtagtgggtccagacacagacttaacagagattgggtctagagaaagacccttggggcagggccaaggacagaggagacccaggagccttgggcttctaagaagaggtagagggagtggggtactcaca

SEQ ID NO: 13287 - DNA, 560 bp, Homo sapiens
  MAP TO CHR4.3; EXPRESSED IN BRAIN, SIGNAL = 0.42; SWISSPROT HIT: Q00532, EVALUE 2.00e-19; EST_HUMAN HIT: BE172061.1, EVALUE 1.00e-104; NT HIT: gi10938004, EVALUE 1.00e-107
ggaaggcggaggaaattaacgtactcaactttgttaaatctatgttttggttttcacagcaaaaagtttctacggactttaaattaaaatggaaaaatatgaaaacctgggtttggttggagaagggagttatggaatggtgatgaagtgtaggaataaagatactggaagaattgtggccataaagaagttcttagaaagtgacgatgacaaaatggttaaaaagattgcaatgcgagaaatcaagttactaaaggtgagtaaatgcatatattgaatcaaaaaatatgagtataagtttcttttttggcaataagaagaaatacaatgattagatatgcaaattcatttatctggtgaatgtaaacctgattttaaaagtgtttgttccttctctctatatctttctgtgtatttatcaatcatctatctatagtctgtgttaggagtcccaaagaccaccccagatttgatgacttgttaggaggaatagcattaatttttgttctttattatttcattttttctacttatttgtatgggtttattttgcagccctt

SEQ ID NO: 13288 - DNA, 505 bp, Homo sapiens
  MAP TO CHR2.3; EXPRESSED IN BRAIN, SIGNAL = 0.37; NT HIT: M84128.1, EVALUE 0.00e+00; EST_HUMAN HIT: BE565923.1, EVALUE 1.00e-130; SWISSPROT HIT: P22310, EVALUE 1.00e-97
tctttggcccttcataggtgttgtgtggagctactgcataatgaggccctgatcaggcacctgaatgctacttcctttgatgtggttttaacagaccccgttaacctctgtggggcggtgctggctaagtacctgtcgattcctgctgtgtttttttggaggtacattccatgtgacttagactttaagggcacacagtgtccaaatccttcctcctatattcctaagttactaacgaccaattcagaccacatgacattcctgcaaagggtcaagaacatgctctaccctctggccctgtcctacatttgccatactttttctgccccttatgcaagtcttgcctctgagctttttcagagagaggtgtcagtggtggatcttgtcagctatgcatccgtgtggctgttccgaggggactttgtgatggactaccccaggccgatcatgcccaacatggtcttcattgggggcatcaactgtgccaacgggaagccactatctc

SEQ ID NO: 13289 - DNA, 570 bp, Homo sapiens
  MAP TO CHR12.3; EXPRESSED IN BRAIN, SIGNAL = 0.77; NT HIT: gi16163903, EVALUE 8.00e-68; EST_HUMAN HIT: BF205587.1, EVALUE 1.00e-67; SWISSPROT HIT: Q14161, EVALUE 9.00e-32
tagccttcctcaactttgccaggctgagcttatatgcatttgaaatgtcttcatctgtaaaataaaataacgtacatctttaaaggggttcaatatcaacatatacaacttagctacttaacaaggaatcacacccaacaaaaaaatcccagagagaagtagcgagaatctaggtctcttaccttgcataatcaacgggagttttcccactagaatcctgtgtgcctgggtctgctccatatactgccaataattcagcctgtaaaatctgccctgctttggaggcaacatggagtggggtgtttcctttttcctaagaatcattaataaaaagtaggcaaaagagcacattaaataaaggctacatgaacacaactcacttagtttcaatatctgaagcaattcatgttttcttacaggatgaaagaagttggcttgtgctcctaaagataacagtctcaaacaggtttcaagattccctgttctcacgctcgaatggagttgctgaaaaacgcagaaacaaaaaaggaatcgtggttagaggtgtaaagaatgatgtcctagggcagc

SEQ ID NO: 13290 - DNA, 546 bp, Homo sapiens
  MAP TO CHR4.3; EXPRESSED IN ADULT LIVER, SIGNAL =  14; EST_HUMAN HIT: BG616965.1, EVALUE 0.00e+00; SWISSPROT HIT: P29451, EVALUE 2.00e-45; NT HIT: gi14740402, EVALUE 0.00e+00
tgtccaagctcagtccagtgctttggatccgtttccatcggtcgttacagttgctcatcagaccccagcagccaagaatggtaaaacgatcaagagcaaggttgcttttcaggaagccttggacaccgcaggcaataaacttgtagttgacttctcagccacatggtgtgggccttgcaaaatgatcaagtctttctttcattccctctctgaaaagtattccaacatggtattccttgaagtagatgtggatgactgtcaggatgttgctttagagtatgaagtcaaatgcatgccaacattccagttttttaagaagggacaaaaggtgggtgaattttctggggccaataaggaaaagcttgaagccaccataatgaattagtctaatcatgttttctgaaaatataaccagccattgactatttaaaacttatttttttttaatttacaaaaaacataaagtatgaagattataaacctaattgccatctgggtgacaataaaacattaattctaacaacaacaacaacaaaaaccgcgtct

SEQ ID NO: 13291 - DNA, 507 bp, Homo sapiens
  MAP TO CHR5.3; EXPRESSED IN ADULT LIVER, SIGNAL = 1.3; SWISSPROT HIT: Q9Y5E8, EVALUE 5.00e-03; EST_HUMAN HIT: AW973926.1, EVALUE 1.00e-110; NT HIT: gi14861871, EVALUE 0.00e+00
actctgtacctggtggtggcggtggccgcggtctcctgcgtcttcctggccttcgtcatcgtgctgctggcgctcaggctgcggcgctggcacaagtcacgcctgctgcaggcttcgggaggcggcttggcgagtacgcccggctcgcactttgtgggcgcggacggggttcgggctttcctgcagacctattcccacgaggtctccctcactgcggactcgcggaagagccacctgattttcccccagcccaactatgcggacacgctcatcagccaggagagctgtgagaaaagcgagcctcttctgataactcaggatttacttgaaatgaaaggagattccaacctacttcaggtgagtttatttatttctttgattattaagaacaaatatgagaatgtggttattataaagctttaacacatatgtatttgagaaataaagccatgaggttgtcattagtcctttgactaaatatttgtccccctttctttctgggcctat

SEQ ID NO: 13292 - DNA, 535 bp, Homo sapiens
  MAP TO CHR16.3; EXPRESSED IN ADULT LIVER, SIGNAL = 0.87; EST_HUMAN HIT: AU124466.1, EVALUE 0.00e+00; NT HIT: gi14785385, EVALUE 0.00e+00
tccgacgtgtcatcaaaatgatgtttctcctgatgctttaattgccaataaatttttacgacaggtaactgtctgtatccattttatgaaaaaattctttttaactgatttaactgtacttcagtgaatactgcataacatttttctgcattattatgcttggtatctgtaggctgtaaataacttcaaaaatgaaactggctatacaaaaagactacgaaaacagttacctcctccaccacccccaataccacctccgagaccactgattcagaggaacctacaacctctgatgagatctccgatatcaagacaacaagatcctcttatgattccagtgacatcttcatcaactcacccagctccgtctatatcttcattaacttctaatcagtcttccttggcccctcctgtgtctggaaatccgtcttctgctccagctcctgtacctgatataactgcaacagtatccatatcagttcattcagaaaaatcagatggaccttttcggtaagcctgtgtgtttttcactgtt

SEQ ID NO: 13293 - DNA, 593 bp, Homo sapiens
  MAP TO CHR11.3; EXPRESSED IN ADULT LIVER, SIGNAL = 2.1; NT HIT: AF013711.1, EVALUE 0.00e+00; SWISSPROT HIT: Q01995, EVALUE 6.00e-27; EST_HUMAN HIT: BF997718.1, EVALUE 0.00e+00
tgagctgactgctaagctgcgtcctatgccctatgcctggtagattctgagcaagctggtgaacagcctgtaccctgatggctccaagccggtgaaggtgcccgagaacccaccctccatggtcttcaagcagatggagcaggtggctcagttcctgaaggcggctgaggactatggggtcatcaagactgacatgttccagactgttgacctctttgaaggtagagaggaagaggctgggggaggaggtgggcaggaggacagggtgctgggacagggagagggaatgaccagaatatgccacaactaggggtgtgcttgcccgcacacagcagggatgggatatgccgagaataacacgccacgctcacagggcccactgagaggcctcccttgaattggggacaactcttggccctggtttggccatttttttgtgagagacgggggcaggccctggcttggagtcttgtttatacgttcttgatgttcatctcctctctcctgtcttctcacaggcaaagacatggcagcagtgcagaggaccctgatggctttgggcagcttggcagtgaccaagaatgatgggcact

SEQ ID NO: 13294 - DNA, 543 bp, Homo sapiens
  MAP TO CHR8.3; EXPRESSED IN ADULT LIVER, SIGNAL = 0.95; NT HIT: gi14748663, EVALUE 4.00e-54; SWISSPROT HIT: Q92597, EVALUE 2.00e-16; EST_HUMAN HIT: BF853569.1, EVALUE 0.00e+00
ctttttccgccactctcttgggaaccggctgacagggaatcagagctcctcagaacttacggttcatgccgatgtcatggtaggtgaggatgacaggccggtttcccttgggagtcccacacagcgtgacgtgaacagagccatgtaaagtctcgatgtcctgctcctgaggagacacagcagacagtgggctggtcatgtggggttcatggcatccgcgtggctgaagacagccagcctgtttccaactgtgttttgaggaagctctcttctcatctggccataagagccccggcttcgggcagcagctctctctggccagaagccactccaaggaccagggctaggaggggactcccaggaggcaggggacagaggcctggctcaaactgcgctgttaaatgcaccaaatgctggggaaagggcttgcccgccaccatctctgccccggactgtttgctccatctggaaaacaggccatcaagcctgcgcttccttgcttccttgccctcaggccccactggccccacaggttactgtacc

SEQ ID NO: 13295 - DNA, 599 bp, Homo sapiens
  MAP TO CHR1.3; EXPRESSED IN FETAL LIVER, SIGNAL = 0.52; EXPRESSED IN ADULT LIVER, SIGNAL = 0.68; EXPRESSED IN LUNG, SIGNAL = 2.6; EST_HUMAN HIT: N41523.1, EVALUE 0.00e+00; NT HIT: S75429.1, EVALUE 0.00e+00; SWISSPROT HIT: Q16666, EVALUE 3.00e-49
cctctgcttccccatacctcttgataggggatatgccttttctttatgggttaattctcattaaaaaagaaatattcttccttccactctcataaaacaatgaagataataaaattactccttacatctttttcatttcttccgttacctaaatcatactatctcagtgatctttgtctagttttccctactttacccagttaaggtgatacttgaggaccaacactgaggctgagatgactctcactagagaatgaccctgtttttcctgttttaattgtgcctatgttttggtctctaccttctaagttgaaaccaagactgaagactgaacctgaagaagtttccatagaagacagtgcccagagtgacctcaaagaagtgatggtgctgaacgcaacagaatcatttgtatatgagcccaaagagcagaagaaaatgtttcatgccacagtggcaactgagaatgaagtcttccgagtgaaggtttttaatattgacctaaaggagaagttcaccccaaagaagatcattgccatagcaaattatgtttgccgcaatgggttcctggaggtatatcctttcacacttgtggctga

SEQ ID NO: 13296 - DNA, 519 bp, Homo sapiens
  MAP TO CHR17.3; EXPRESSED IN ADULT LIVER, SIGNAL = 0.47; EST_HUMAN HIT: BF570391.1, EVALUE 1.00e-103; NT HIT: gi15208635, EVALUE 0.00e+00; SWISSPROT HIT: Q15323, EVALUE 4.00e-34
tttcatcaaacacgtctgcccatgtactcacttgcagtcctcgctctccagcaggctccggtatgtgttgatctcacactccagccgggcacgcacatccagcagcacctggtactcctggttctgccgctccaggtcactgcggatctccgccagctgggactccacgttggtgatcaggctctgcacctgggacagctgggagctgtagcgggcctcactctctgtcagcgtgttttccagagagtctcgctgtggtggagaagattgggaatgtcagagagctgctccttcaaagggtttcttcacaggattacaaggaagtcacaagctccaagagctaaggagagtgtgtggccccaagcacatccccgggactctgcctcccaagttcccgtcgctcaccagcaggtctgaacaatacacaccaggttgtgctgggcctgcagctcgatctccagggcgttgactgtgcgtctcagctcgatgatctccgcctggtaggactgcagctgctct

SEQ ID NO: 13297 - DNA, 593 bp, Homo sapiens
  MAP TO CHRX.3; EXPRESSED IN ADULT LIVER, SIGNAL = 0.6; NT HIT: AF020673.1, EVALUE 0.00e+00; SWISSPROT HIT: Q13496, EVALUE 2.00e-33; EST_HUMAN HIT: BE789637.1, EVALUE 3.00e-96
gaaaagaaaacaaatgcagcgtctgtagaggacgatcaacagatcctgcagctcttagtgtttccttttgataaatctttgttctggacgttaatattttaaagcatggctttttctaagtttaaaaactatcaaatgtaagcagtatcttataactccctactgactcacgtatttttctttgtcagctcgttttgacaggagccattcaagtagcagacaaagtttcttcagggaagagttcagtgcttgtgcattgcagtgacggatgggacaggactgctcagctgacatccttggccatgctgatgttggatagcttctataggagcattgaagggttcgaaatactggtacaaaaagaatggataagttttggacataaatttgcatctgtgagtaaacaaagctaatttctaaaaatagatcactaccattcaggattttaaaactagttgttaaattacatattcagtattacaatgaaaatctgaggagtgtaataaaaactttacgcgtttgaaaatgcatgatgccttgggtagtgaaagtctttttaagagatatgtttatccatctgcactgtttgcagt

SEQ ID NO: 13298 - DNA, 590 bp, Homo sapiens
  MAP TO CHR19.3; EXPRESSED IN FETAL LIVER, SIGNAL =   4; EXPRESSED IN ADULT LIVER, SIGNAL = 4.5; NT HIT: gi14755315, EVALUE 0.00e+00; SWISSPROT HIT: Q05481, EVALUE 1.00e-119; EST_HUMAN HIT: BG619358.1, EVALUE 0.00e+00
ctttcattggtcctcaacccttactaatcataaggaaattcatactgaagataaaccctacaaatgtgaagaatgtggcaaagcttttaagcagctctcaacccttactacacataaaataatttgtgctaaagagaaaatctacaagtgtgaagaatgtggcaaagcatttctatggtcctcaaccctaactagacataagaggatacacactggagagaaaccctacaaatgtgaagaatgtggcaaagcttttagccattcttcaacccttgctaaacataagagaattcatactggagagaaaccctacaaatgtgaagaatgtggcaaagcttttagccgttcttcaacccttgctaaacataagagaattcatactggagagaaaccctacaaatgtaaagaatgtggcaaagcttttagcaattcctcaacccttgctaatcataagataactcatactgaagagaaaccctacaaatgtaaagaatgtgacaaagcttttaagcgactctcaacccttactaaacataaaataatacatgctggagagaaactctacaaatgtgaagaatgtggcaaagctt

SEQ ID NO: 13299 - DNA, 550 bp, Homo sapiens
  MAP TO CHR1.3; EXPRESSED IN ADULT LIVER, SIGNAL = 0.75; NT HIT: X53321.1, EVALUE 0.00e+00; SWISSPROT HIT: P14060, EVALUE 1.00e-106; EST_HUMAN HIT: AL545509.1, EVALUE 0.00e+00
tgtccaagctagtgtgccagtcttcatctacaccagtagcatagaggtagccgggcccaactcctacaaggaaatcatccagaatggccatgaagaagagcctctggaaaacacatggcccgctccatacccacacagcaaaaagcttgctgagaaggctgtactggcggctaacgggtggaatctgaaaaacggcggcaccctgtacacttgtgccttacgacccatgtatatctatggggaaggaagccgattcctttctgctagtataaacgaggccctgaacaacaatgggatcctgtcaagtgttggaaagttctccactgttaacccagtctatgttggcaatgtggcctgggcccacattctggccttgagggccctgcaggaccccaagaaggccccaagcatccgaggacagttctactatatctcagatgacacgcctcaccaaagctatgataaccttaattacaccctgagcaaagagttcggcctccgccttgattccagatggagctttcctttatccctgatgtattggattggc

SEQ ID NO: 13300 - DNA, 594 bp, Homo sapiens
  MAP TO CHR2.3; EXPRESSED IN LUNG, SIGNAL = 1.1; EXPRESSED IN ADULT LIVER, SIGNAL = 1.1; EXPRESSED IN FETAL LIVER, SIGNAL = 1.2; NT HIT: gi14732782, EVALUE 0.00e+00; EST_HUMAN HIT: BI089807.1, EVALUE 0.00e+00
gtccagcccctatggaagtctggtttttgttcttattgggtctataaaccttgagttgtgaagatacctgttgtttcatacatagtatgatgttttacatttctttgtaatatctgacaggctggctataagaaaaaattatggaaaaagacacctgcaaggaagaagcgattgagggaatttgtattctgcaataaaacccagagtaaactcttagataaaatgacgacgtccttctggaagaggcgaaactggtacgttgatgatccttatcagaagtatcatgatcgaacaaacctgaaagtatagatcagaagtttcacttgtttctcagttattggatatgtatctttgtgtacatatctttgcaaaaatggataagtacaaaacttgatgtaaattgtaccaatgaatacgtaaacatacagtgacaacattaaacttagaaaagttttaaaacttaatggatcagactttgccagatttggttagggaaacagaaatttagaatggtgcattatttttaacaaatggtattggcttaactagttgtttcagttatgctcttttagttgcaaggaatctcaagtggga

SEQ ID NO: 13301 - DNA, 560 bp, Homo sapiens
  MAP TO CHR7.3; EXPRESSED IN ADULT LIVER, SIGNAL = 1.4; SWISSPROT HIT: P52435, EVALUE 8.00e-27; NT HIT: AJ277931.1, EVALUE 0.00e+00; EST_HUMAN HIT: BI755647.1, EVALUE 0.00e+00
caggacctccgaagaaacaggccagggctgtcccaggcctgggcacacgggccagtgtccagcccaccccgtctgcccctccaggccccgccctcacccggaagcgctcctccagcagggacagctcactgatgaggtcggtgatggcgttggtaaaggcttcctgggggctgtagtccggcgtggtctgcactcggatgatgatcttgtgctccaaggggtgggggactttgtagccagcaaatagcacttgcgggtcctttaggtcacactgtctgaggtccagggacagacagtgtgagggtctagcctcatgcccaagctgggtagcagccagatcagagcagaagaacagactttctagccaaaaatcccccccaactttttttcccaaaagtcttcaaggaaagtaacacttttaggaagatacctcatgtggggacaccctacccccgccacacacacacaccctgcatccatgaggttgaaggacccgagctggaaacagattccagcaacctcttcccaccgggcaccgcagtgctggcaaagagatctcc

SEQ ID NO: 13302 - DNA, 530 bp, Homo sapiens
  MAP TO CHR10.3; EXPRESSED IN ADULT LIVER, SIGNAL =   8; EXPRESSED IN LUNG, SIGNAL = 0.87; EST_HUMAN HIT: BG205599.1, EVALUE 5.00e-76; SWISSPROT HIT: P11712, EVALUE 3.00e-23; NT HIT: L16882.1, EVALUE 0.00e+00
tggaaatggtactgcccttctttggaacgggatttcctcatctgcacatcaaaagatttaactacatgattaccactgtttcttcaaccttcatggcttctttacagctcagttcatctatgtctcttgtttctagggcacaaccatattaatttccctgacttctgtgctacatgacaacaaagaatttcccaacccagagatgtttgaccctcatcactttctggatgaaggtggcaattttaagaaaagtaaatacttcatgcctttctcagcaggtaatataaatttatttccatttgtgtttcagggtacaagataacttttttgatccattggaacttacatgtgcctcctctgcagtggtacaattactctttgtacatgatcaagagcactgttctgaatgcctgtgtacaccctgctcatgatacatcctaattattgggccagattagtggactttggggagttaatccaattcttccaaattgagaaagctgaaatataggttggttgaattctgcctc

SEQ ID NO: 13303 - DNA, 515 bp, Homo sapiens
  MAP TO CHR6.3; EXPRESSED IN ADULT LIVER, SIGNAL = 1.8; SWISSPROT HIT: Q01860, EVALUE 6.00e-24; NT HIT: Z11900.1, EVALUE 0.00e+00; EST_HUMAN HIT: AA205468.1, EVALUE 0.00e+00
gactcctgcttcaccctcaggctgagaggtctccaagccgccttggggcactagccccactccaacctggggcccacagtacgccatccccccacagaactcatacggcggggggcatgggggaatcccccacacctcagagcctggcccaacccccggcccgattcctggccctccaggagggccttggaagcttagccaggtccgaggatcaacccagcccggctccggcccccctggcccatcacctccaccacctggagggggcgagaaggcgaaatctgaagccaggtgtcccgccatggggaaggaaggcgccccaagccgggggcctggtgaaatgagggcttgcgaagggactactcaacccctctctccctccccagtcccacccactagccttgacctctggccccgccccctggatgggtggaggagagggaggtggggggagaaactgaggcgaaggatgtttgcctaatggtggtggcaatggtgtctgtggaaggggaaaa

SEQ ID NO: 13304 - DNA, 516 bp, Homo sapiens
  MAP TO CHR2.3; EXPRESSED IN FETAL LIVER, SIGNAL = 1.3; EXPRESSED IN ADULT LIVER, SIGNAL = 1.1; EXPRESSED IN LUNG, SIGNAL = 2.6; EST_HUMAN HIT: BE904863.1, EVALUE 1.00e-109; SWISSPROT HIT: Q14203, EVALUE 4.00e-14; NT HIT: AF064205.1, EVALUE 0.00e+00
ccagcatgcttccttaggtctcaggctgccccagccacccccttcatccagagtcaaacctttctcgcctccttgaggcgccgctgcaggtcggcctgctgctcctgcattttgctcttccattcctgcacctgctccagctggattttgtgtttctccagctcttttagctttgctttgtcttctgcccgtttcagtctcagggtctctagtttctcctccaggtcccgcacctgagcccttagtccctcctcctcctgcaaaggagaggcctcacggtctgtgcacagcccactcctcctctccaccaacactgagctggcgcaaagaacacaagaaagtgtgcaaacatcacccagccccagggtggccaacagtcagtggcataagaacatctgagaggaaaccgtagcacagtatatatggggaaagtatggcataagggcaagaaaggaaaggatggctcagtcagtagcaagatatccataggctatgtcctcaccctttctgatccaa

SEQ ID NO: 13305 - DNA, 592 bp, Homo sapiens
  MAP TO CHR19.3; EXPRESSED IN ADULT LIVER, SIGNAL = 0.28; SWISSPROT HIT: P87312, EVALUE 6.60e-01; NT HIT: gi14757776, EVALUE 1.00e-109; EST_HUMAN HIT: BI918955.1, EVALUE 0.00e+00
acccatcgctatgcctaatgtgaaaccagtgtgaacaaactatttggaaaataaagacatgaatcacggacaacaacaaaacacatgcatctccaggagcctcttcccacatcccgtctgctgggtgacatcctacgcggagctagtgtcacagtgaggccgtttctggaaactaacctggggaaccagcgcacctgctaggctcaccttgaggaagcgccgatagcctcgcacagctgtctcaggcagtgggtgtgagcgcaggaagcgcagatacaggggccaaattcgagagtgctgcgtgatgggcagtgcccggagggcacggtcgaaggtgcggcgggtgtgtgtgacgcgcccctggtccatgaggaactggcagtaatctagccacagacgaggcatctgggggtgtggggagaggcggctggggctaagccacggactccatggcctggccacagacactcgatgtcctgtggctgagccacacctggggccaccacataaatgcggcgggacccagaaacccccagctccaggactgagtccagcccaacttcccatgcaaagaagcaacaggaatccaagc

SEQ ID NO: 13306 - DNA, 560 bp, Homo sapiens
  MAP TO CHR1.3; EXPRESSED IN ADULT LIVER, SIGNAL = 0.86; SWISSPROT HIT: P01222, EVALUE 1.00e-26; NT HIT: M25164.1, EVALUE 0.00e+00; EST_HUMAN HIT: BG202613.1, EVALUE 2.00e-84
ggaaagaattgcttagccccattctccaataccaacttaaccacgttgaattctacagagacaaaagtgagaccctcctctctttcatcgttgatcatgggaacaagataaggtttaagtaaagctgggacacaaaactgttataaaattatgcgtatccattgtgctgagtagattcacataatattgtaacctgtgtactctgcttctaaggagccaataaccattagatttgggaaatgaggttgtgatttatttcatttcctttctatataggaatggacttcttcagggcttatataatttacagccaaaagaagtgacatgaactacatacccgtgtcatacaatatccagcacagatggtggtgttgatggttaggcaataagcacactctctcctttcgatgtgcattgtatactcagttggaatacaaaaagacatcgcttgcccacatgtaaggccaaaaagcatggacatcagaaagagagcagtcatgctaaatcaaagataaaattaaagaacctatttgttaaaatcagaaagggcaaagaaacca

SEQ ID NO: 13307 - DNA, 550 bp, Homo sapiens
  MAP TO CHR12.3; EXPRESSED IN ADULT LIVER, SIGNAL = 0.84; NT HIT: gi6005761, EVALUE 0.00e+00; EST_HUMAN HIT: BG960287.1, EVALUE 0.00e+00; SWISSPROT HIT: P18537, EVALUE 2.00e-42
tctccatgtgctactgcgtctactccgtgggctacctcatccgcctcttcgccggcgccgagagcatcgcctgcgaccgggacagcggccagctctatgtcatccaggagggactggagagcaccggctgcacgctggtcttcctggtcctctactacttcggcatggccagctcgctgtggtgggtggtcctcacgctcacctggttcctggccgccggcaagaagtggggccacgaggccatcgaagccaacagcagctacttccacctggcagcctgggccatcccggcggtgaagaccatcctgatcctggtcatgcgcagggtggcgggggacgagctcaccggggtctgctacgtgggcagcatggacgtcaacgcgctcaccggcttcgtgctcattcccctggcctgctacctggtcatcggcacgtccttcatcctctcgggcttcgtggccctgttccacatccggagggtgatgaagacgggcggcgagaacacggacaagctggagaagctcatggtgcgtatcgggctcttctctgt

SEQ ID NO: 13308 - DNA, 524 bp, Homo sapiens
  MAP TO CHR19.3; EXPRESSED IN ADULT LIVER, SIGNAL = 1.3; NT HIT: J02902.1, EVALUE 8.00e-71; EST_HUMAN HIT: BF304980.1, EVALUE 1.00e-70; SWISSPROT HIT: P54612, EVALUE 2.00e-18
tgagatcctggtgcccttacctcatccttcagctgagccaggaagaggggcaagaggtgctcgatggtgttgtctttgcccaagatgggagagagacccatgatgactgaggccagggcagacttgacatgttggttggcatcggacaccagctcctgggagagagaagaggcaggcacaggggtcagtgcaacccctgcagcagcaagtggctaagcagatgccaactcctaagagacaataacctgcttctgcccctctcattcatagagcaggggatggcttagggtacaggggaaatcactattccttatgagtaccacctacttaagagttcaatgacccctgctctcagcagcccccactccaaccccaaaaccctgtgaatgacaggactcagtgacatctgaggttctagaaagtacttccacctttaaggtcagcctcaagctgcagtcaggacccctaactgcttgaaacccaagagctgcctggtcccagagggctgggaacctagtttgcag

SEQ ID NO: 13309 - DNA, 569 bp, Homo sapiens
  MAP TO CHR19.3; EXPRESSED IN ADULT LIVER, SIGNAL = 1.3; NT HIT: AJ001702.1, EVALUE 0.00e+00; EST_HUMAN HIT: AU122285.1, EVALUE 0.00e+00; SWISSPROT HIT: P49366, EVALUE 7.00e-26
tgttccttggtcccctgtagaactggtcctgtatccctgaatgtgcagggcctggggtgaaatctgtttctggagcccacctggagtcctgagtctgggatttaaggccagtgcttaacttgacttggcccttactcacagatcgagaagaagctggaaccactgtcacaggatgaagaccagcacgcggacctgacccagagccgccgcccacttaccagctgcaccattttcctgggatatacatccaacctcatcagttcaggcatccgtgagaccattcgctaccttgtgcagcacaacatggtggggacctggtgaggccgtggccttggcctctgggtcaatgggcaatgcagttattgatcgtttaagtgagatgggcagataggggtctgttataagcagaggaatagaatcaagttttgttttgtagcagagctccctcataagagtcactggacaaggatgaggttagaagttctgcccagaatgagggcaggggcttccttcttgggccaaattcactgccttgtggctgcaggtggacgtattggtgaccacagctg

SEQ ID NO: 13310 - DNA, 546 bp, Homo sapiens
  MAP TO CHR1.3; EXPRESSED IN FETAL LIVER, SIGNAL = 1.8; EXPRESSED IN ADULT LIVER, SIGNAL = 6.4; NT HIT: AF179235.1, EVALUE 0.00e+00; EST_HUMAN HIT: AV659761.1, EVALUE 0.00e+00; SWISSPROT HIT: P25970, EVALUE 4.00e-04
acaaggtggccagacaagacgaatgaccagctctaggacacatcagactttgtgaaatatgctcggtgtcctggggcagggagccctcggccctctccctcgcaggaaggctcgggccctagagcatcatgtgtgtccggggtgggctgttctccccgaaagaaaggtggaggggttgtcagagctgcagctgctccaccctgacaccccatctgccctcagaccaccaaggccttcctgccgcgtatgctggagctgcagaatggccacatcgtgtgcctcaactccgtgctggcactgtctgccatccccggtgccatcgactactgcacatccaaagcgtcagccttcgccttcatggagagcctgaccctggggctgctggactgtccgggagtcagcgccaccacagtgctgcccttccacaccagcaccgagatgttccagggcatgagagtcaggtcagtgagcaggggacccaccttgagaccagccttctcacctgcctccccaagccattcagtcagccaactgcagaaagagctc

SEQ ID NO: 13311 - DNA, 505 bp, Homo sapiens
  MAP TO CHR5.3; EXPRESSED IN FETAL LIVER, SIGNAL = 0.32; EXPRESSED IN ADULT LIVER, SIGNAL = 0.35; NT HIT: gi15295007, EVALUE 1.00e-126; EST_HUMAN HIT: BF368029.1, EVALUE 1.00e-125; SWISSPROT HIT: P35556, EVALUE 1.00e-45
ttggtgaagaaggaccaaggcgctggccgcaggcagttacctttgtaaaatggccgcccagtaagaacatcccctcggttagcaaagccagccccgcgggggcacagcgtctcgtattccttggtgccaggtttggggcactcctcacactcggtgccccaagccgccccgacagcacagcagcaggcatccatgcggaactttccaggaacggggtggatgcattcatcttcatcccacttcaagtaacactgctccatgcgaatatctacaccgagaacgaaatcacagggtgagaatgagttgaaacatccattgaacagtcacatgtcaagcgtctgctcagcaccaggcatcatgcaggacccttgcggtgtactggtgggcaagatgcagtccctgacctcctggaatggactccataatgacagtcatttaaggagaacaaaggtgagatcctcttcagtcttaattctcacaagaaaccctcaggaagaaaaggtcc

SEQ ID NO: 13312 - DNA, 588 bp, Homo sapiens
  MAP TO CHR16.3; EXPRESSED IN ADULT LIVER, SIGNAL = 0.89; EXPRESSED IN LUNG, SIGNAL = 1.4; SWISSPROT HIT: Q08705, EVALUE 3.00e-31; NT HIT: AF145469.1, EVALUE 0.00e+00; EST_HUMAN HIT: AU132930.1, EVALUE 3.00e-93
aatatgaagcctccaaagccaacaaaaattaaaaagaaaggtaaaacgagtttatccatagtggtttcataaaaccattttgggataagcatacaacacagtgcatatgcaagttgttttatattaaccgtatttgtaaaaggtcgttatgtgggtaccgttctttaaaaccagtctaaaataagttttttccagattgaatgctctttttttaatcccaaagaagaaggaaatgtattagtgacatgagataattatgacttatattgggttttgttattaaaagctaatcaaatatatttgtagaaatttaagattaggattaatcttaacactttgaaactctgcagcaagtaagtgttttattttgcacataggtgtaaagaagacattccagtgtgagctttgcagttacacgtgtccacggcgttcaaatttggatcgtcacatgaaaagccacactgatgagagaccacacaagtgccatctctgtggcagggcattcagaacagtcaccctcctgaggaatcaccttaacacacacacaggtgctggataagaatgttgggggctacaacagcaaatgct

SEQ ID NO: 13313 - DNA, 571 bp, Homo sapiens
  MAP TO CHR1.3; EXPRESSED IN ADULT LIVER, SIGNAL = 1.2; SWISSPROT HIT: P21266, EVALUE 1.00e-24; EST_HUMAN HIT: AI076147.1, EVALUE 6.00e-57; NT HIT: AF043105.1, EVALUE 0.00e+00
tgatcccattaggcaaaagccggggaagaatcctccactatgggatcctgcaggtcccaggggagcctgtgagtgtttttataagagaaaggtgcaggaaacgtcacctcaaaacggcacatgaaagccttcaggtttgggaactcatccaggcacttggggtcaaatatacggttctgatccaagatatcataggtgagaaaatccacaaaggtgagctagaagaaaagcaataagatgcttaggtctgaggagtagtagcctgcagagatagagaagtatcctcttcttttcccttcttcctaccttttccccggcaaaccatgagaatttccccagaaacatggagaattgtttcagttgtccaggtagctcttccaagtactgaggcttcagtttttcctgagaggaaaaaacagaatgagaatagtggtgatcatctttgtagttaatcagggcacaggccagtgatggacacttagtagccccttctctaggtgggttctcattgccttcacttgaggatggcagggtggggaaagaggagtttagaaagaagaggcaccagcac

SEQ ID NO: 13314 - DNA, 561 bp, Homo sapiens
  MAP TO CHR2.3; EXPRESSED IN FETAL LIVER, SIGNAL = 2.9; EXPRESSED IN ADULT LIVER, SIGNAL = 1.2; NT HIT: AF077197.1, EVALUE 0.00e+00; SWISSPROT HIT: O95183, EVALUE 2.00e-21; EST_HUMAN HIT: AV645797.1, EVALUE 0.00e+00
actcccactttgtgtctgggggtatccgcagagctcaaccttcaacaagactacacagaacctggcccagaagaagtgctgggagaacatccgttaccggatctgcgtggggctggtggtggttggtgtcctgctcatcatcctgattgtgctgctggtcgtctttctccctcagagcagtgacagcagtagtgccccacggacccaggatgcaggcattgcctcagggcctgggaactgacccagctggtcctgaaggagaagccaaatggctgcactggccgattctggtctccagaggaccttggtgtttgctctcccttgacccaccccagtgagtgccaaagggcagccccaacatgtgcacccctgcatttcctgtcatgccacagactggcccttgagggcagcctgctgtactggccatgctgggccagccccacctggagctcagtaaaaactgctgtttgattaaaagctggtatctgtgtgtgaaggtccccaggttggttaatcccatctgtctctacccctagggctgcttaaaaagcccatcaccca

SEQ ID NO: 13315 - DNA, 593 bp, Homo sapiens
  MAP TO CHR3.3; EXPRESSED IN ADULT LIVER, SIGNAL = 8.1; NT HIT: gi13644548, EVALUE 0.00e+00; SWISSPROT HIT: P41104, EVALUE 5.00e-31; EST_HUMAN HIT: BI550490.1, EVALUE 0.00e+00
ctaccttcagcccacacctccacacccgcatctgcctccccaatggctgtcagttcggtaaagtcaccctctccttctactctggtattaccacgagaattgaaatttttaagcagaaaaaaaaagaagtcaagttacaaataaatgagtggcgaaccaagggaagccctttgactatgatttccaattttctgttcaatccacactgcagagatacaaggataaaccaccattttggttcccaagttttattcaagaactcatacaaaattttccagataaatgaaatttaatcctcgtcttcctcctcttcttcgtcctggttaatctggaagtaacgtaattcgtaactctctttgctgttagcaactacgcgcaaccagtcacgtagattattcttcttcaaatattttttggtgagatatttcaaataccttttggagaaaggcacctcggatgtcacggtgatcttgctcttgctcctttcgatggtcaccacccctccaccaaggttcccagcttttccgttcactttgatcctttcttgcaaaaactgctcaaaattggcagcatccatgattctacagggtggg

SEQ ID NO: 13316 - DNA, 559 bp, Homo sapiens
  MAP TO CHR11.3; EXPRESSED IN LUNG, SIGNAL =  19; EXPRESSED IN ADULT LIVER, SIGNAL =  11; NT HIT: gi14784008, EVALUE 0.00e+00; SWISSPROT HIT: P10668, EVALUE 2.00e-54; EST_HUMAN HIT: BI908635.1, EVALUE 0.00e+00
acatctgggttgaccaggagccacagaagttcccatcatgagaaagggggcaggtgacaggaagaagtgccagaatgagctcaccagaagataaacaccagatcctccttcttgctctccttggtctcataggttgcatcatagagggcatagcggcagtccttatctggcagcatcttgacaaaggtggcgtaggggtcgtcgacagtctggcccacatcgcccaccaggatctccttgccctcctccaggatgatgttcttcttgtcctcactcaggcagaagagcaccgccttcttgcgcttcttcacctcctctggcgttgaagacttacgcaccttcatgtcgttgaacaccttgatgacaccatcagagacagccacaccggaggcctaggagacatgccacgtatacgtcaagaaaaggattctagggaactgccccttgttttttcagaagatctcagtccacgtcccgagtggtcactagtgcccttcccaaggcaagtcactagttttcccacccaagtcactgtcaaagaaccagatgggacacaacc

SEQ ID NO: 13317 - DNA, 557 bp, Homo sapiens
  MAP TO CHR12.3; EXPRESSED IN FETAL LIVER, SIGNAL = 2.5; EXPRESSED IN ADULT LIVER, SIGNAL = 1.8; SWISSPROT HIT: Q9Z0N1, EVALUE 1.00e-102; EST_HUMAN HIT: BE778098.1, EVALUE 0.00e+00; NT HIT: gi13651913, EVALUE 0.00e+00
accaagttgacgccactttcacacgaagttatcagcagacaagccacaattaatataggtacaattggtcatgtagctcatgggaaatccacagtcgtcaaagctatttctggagttcacaccgtcaggttcaaaaatgaactagaaagaaatattacaatcaagcttggatatgctaatgctaagatttatcaacttgatgacccaagttgccctcggccagaatgttatcgatcttgtgggagcagtatgcctgatgagtttcctacagacattccaggaaccaaagggaacttcagattagtcagacatgtttcctttgttgactgtcctggccacgatattttgatggctactatgctgaacggtgcagcagtgatggatgcagctcttctgttgatagctggtaatgaatcttgccctcagcctcagacatctgaacacctggctgctatagagatcatgaaactgaagcatattttgattctacaaaataaaattgatttggtaaaagaaaggcaggctaaagaacaatacgagcagatccttgcgtttgt

SEQ ID NO: 13318 - DNA, 578 bp, Homo sapiens
  MAP TO CHR11.3; EXPRESSED IN FETAL LIVER, SIGNAL =  33; EXPRESSED IN ADULT LIVER, SIGNAL = 4.5; NT HIT: gi14767553, EVALUE 0.00e+00; SWISSPROT HIT: P05216, EVALUE 7.00e-94; EST_HUMAN HIT: AL518671.1, EVALUE 0.00e+00
atccctagccactatgcgtgaatgcgtctccatccacgttggccaggctggtgtccagattggcaatgtctgctgggagctctactgcctggaacatggcatccagcccgatggccagatgccaagtgacaagaccattgggggaggagatgactccttcaacaccttcagtgagacgggtgctggcaagcatgtgccccgggctgtgtttgtagacttggaacccatggtcattgatgaagtttgcactggcacctaccgccagctcttccaccctgagcagctcatcacaggcaaggaagatgctgccaataactatgcccgagggcactacaccattggcaaggagatcattgaccttgtgttggaccgaattcgcaagctggctaaccagtgcactggttttcagggcttcttggttttccacagctttggtgggggaactggttctgggttcacctccctgctcatagaacgtctcttagttgattatggcaagaagtccaagctggagttctccaattacccagcgccccaggtttccacagctgtagttgagccctacaactccatcctca

SEQ ID NO: 13319 - DNA, 598 bp, Homo sapiens
  MAP TO CHR4.3; EXPRESSED IN FETAL LIVER, SIGNAL = 0.78; EXPRESSED IN ADULT LIVER, SIGNAL = 0.94; NT HIT: X86693.1, EVALUE 0.00e+00; SWISSPROT HIT: Q62245, EVALUE 1.50e+00; EST_HUMAN HIT: BG621734.1, EVALUE 0.00e+00
aatcccctctgcacacagacagggaataaaagtttgacaaacacccaagaaaaactctttaaatccctttcctcgttagctctgcttctttgcccagaggcatattcaagtctactggagttgaaattctgctgctctgtcaactagtgggggtctgaagtgacagacgagaatttggaggttggcaccagagagtatttcagactgtcatcgtttttgttgcagattcctggatttccctagcaggctggcctctcatgcgagggctttacaggcagtgcttgcaaaccaaaagggaaagagctaattctggtggcgtggatggggttaacagtcttcccctcaagctcttgttctcagagcctcataacttggccagaatataagcacttggctctttatgcattttttttctttttcaaacaactctgaaaggttttataagcagcatcccttttttggagatttttattttaagaccttgaaaagaaactccatgctgttgtttctttctaaaggaaattggggagtagggattaaaggagggaagaagagaaatggcagcagatgcatttttacgttgctcaattggaaattg

SEQ ID NO: 13320 - DNA, 525 bp, Homo sapiens
  MAP TO CHR4.3; EXPRESSED IN FETAL LIVER, SIGNAL = 0.56; EXPRESSED IN ADULT LIVER, SIGNAL = 0.7; EXPRESSED IN LUNG, SIGNAL = 0.66; EST_HUMAN HIT: AW951558.1, EVALUE 0.00e+00; SWISSPROT HIT: Q02108, EVALUE 4.00e-36; NT HIT: AF233750.1, EVALUE 0.00e+00
tcaatgagtcaaaccccaaagacttataaataggtatataggttgctaatctattcctgatgctttgcctaaaaaattggcattgccatcttccacatctttcttttggaagcatggttttgagtttgttccttgttggtaagcatccagaaaatggcagattccggggatttcactagggaagtttggtggaagttcctcccttgatcgaggggtaaacacgaaaccaggacagtctttgagtaatctgaaaatattaaaatataatactgacataaatgtttgtccactcaaaaaaagaacacaacataactaactgaatgttactgagaatatttataaaccagtgattttaggtgtgagtgacagaaaaagtctaacgagattaacagacatcttcccagaagtacaatgaagaatcaattcacaacaagaaaattgtgtcaattaatgtatttcacttacactggaaaaaattataaaatatttttgcaaaaataatatccacacaacagtgcaatttgc

SEQ ID NO: 13321 - DNA, 561 bp, Homo sapiens
  MAP TO CHR1.3; EXPRESSED IN FETAL LIVER, SIGNAL =  11; EXPRESSED IN ADULT LIVER, SIGNAL =  14; SWISSPROT HIT: P07156, EVALUE 2.00e-15; NT HIT: D14718.1, EVALUE 1.00e-130; EST_HUMAN HIT: BG258244.1, EVALUE 4.00e-83
actgcaccaggcaaggttagtggctattgaaaacaccaccaggagagggctatctaaagacacattcggtagtgtgttaactttataaaaaaagacactgtacagtttaaaaacaaatcctacacagacttacatttccatttttttctttaaaaggagtgacttgtgaacagtagggttaaatgctttatagacgagaaaaaaaaccgctagaaccaacttattcatcatcttcttcatcttcatcttcttcatctacctcctcatcataatcttcttcatcttcctcatcttcctcctcttccttctttttcttgcttttttcagccttgataaatcccttttttgctgcatcaggcttccctttagctcaatatgcagcaatatcctttttgtatttttcctttagctttgcagccttcttttcacaaggctgcttgtcttctgcagcagtgttattccacatctctcccagtttcttcacgacatcactaatgggcaggccaagttgttctcctttaatttttgggtgatactcagagcagaacaggaaaaaggctg

SEQ ID NO: 13322 - DNA, 594 bp, Homo sapiens
  MAP TO CHR1.3; EXPRESSED IN FETAL LIVER, SIGNAL = 0.7; EXPRESSED IN ADULT LIVER, SIGNAL = 0.38; NT HIT: gi4505956, EVALUE 2.00e-62; SWISSPROT HIT: P15143, EVALUE 2.00e-03; EST_HUMAN HIT: BI462228.1, EVALUE 3.00e-62
agcagctttgctggcattagaattaacaagtttaaaaacttggtatgtgaaactaggaaaatacaaataaaagaaaggaggtaaaccagaactcatgactgaataagctcatgttttaaatgattcctaaaagatggggttttaagtacatttcttttaatcaaccatttgcaatcttttatttcctacccaccccacctcagtctaaatctaatgaagaatcgggggattcgcagcagccaagccagccttcccagcagccttcagtgcaggcagccattccccagacccagcttatgctagctggaggacagataactggggtaagtgttcactgagagaattataacaaactttttctgtgtcagaactgccattggccaatagctgattagaattgttcaccatagctggtagtaacatggctatgcctggcactattgtgtctttaaggaacttcctacactgtaggtagtaagttgctctgaaaaaggaattatctttgtcgtaagttttcaggatatcttttattagaattgtggatgctctggataaattaaaaaccttattaaacccctgtttcaggtgttgctt

SEQ ID NO: 13323 - DNA, 569 bp, Homo sapiens
  MAP TO CHR2.3; EXPRESSED IN LUNG, SIGNAL = 1.6; EXPRESSED IN ADULT LIVER, SIGNAL = 0.47; SWISSPROT HIT: P23023, EVALUE 3.20e-02; NT HIT: gi4504704, EVALUE 2.00e-62; EST_HUMAN HIT: AL519965.1, EVALUE 4.00e-61
ccctgtgacaactgacgatgtgatcgtctcatctctttgaatgtcatttactctttgtgctttctttgaatgtgtttggaacagaaaactaatcagagtctggttttaaaggattcatttctttcccgtgttgattctgtagcttgcagtgagctgcatactccatcgctagatcgaaagccaaatagttttgttgcggtgagtgtcaccacccctcctcaggcattctggacgaagcatgcacagacggagatcattgaggtgggtgctggtggtctctctctgaggggctgtgggacatgctctagtggtgtctcttgtcctgatgttcagttacttgtgcatctgtagctgaagctgtatttacgtgagttgttgctattttcccatgggttttcagtacattgatatttttcatcacatttactcatctgggtggcatttatattgccatatcctttacagttattgattaactgttggcagcttgtttttgaacaatgatcctgtaagcttcattgccttgtaagaggtaagacctaattccttcttgtcacctccaattggct

SEQ ID NO: 13324 - DNA, 583 bp, Homo sapiens
  MAP TO CHR10.3; EXPRESSED IN ADULT LIVER, SIGNAL = 6.1; EXPRESSED IN LUNG, SIGNAL = 5.8; SWISSPROT HIT: O00767, EVALUE 9.00e-45; NT HIT: AB032261.1, EVALUE 0.00e+00; EST_HUMAN HIT: BI091926.1, EVALUE 0.00e+00
tatgcgggttttcctttgtcttcgtggggatgtgagtgctttacttctccttcctactgccgcctcccgataggtttcgcgcccctcgtccccctcgccctccgcccctaatgtatctgtacagtttcagggaacttttctccgttgcgtctcggatacaccctaccctcagtgaactacggcgctgcggaagggtccgtactgtccacccttcccccagcgtgattagagagcggagtggccccagctgcctccacgtgtctcttctcctgactctcctcttcctcccccttccagatctctagctcctataccaccaccaccaccattacagcgcctccctccagggtcctgcagaatggaggagataagttggagacgatgcccctctacttggaagacgacattcgccctgatataaaagatgatatatatgaccccacctacaaggataaggaaggcccaagccccaaggttgaatatgtctggagaaacatcatccttatgtctctgctacacttgggagccctgtatgggatcactttgattcctacctgcaagttctacacctggctttggggta

SEQ ID NO: 13325 - DNA, 595 bp, Homo sapiens
  MAP TO CHR12.3; EXPRESSED IN ADULT LIVER, SIGNAL =   1; SWISSPROT HIT: P20645, EVALUE 4.00e-27; NT HIT: X56255.1, EVALUE 0.00e+00; EST_HUMAN HIT: BE175497.1, EVALUE 4.00e-92
ttacagtctcaggtgtgccgaaccacacgtatgatatgctgaagacactagaaacggccaagacatacaggattgtcagagggattgacttgggatcagttagtcaatcgatggtaggaaggggagttttcttacttccgttgaagatgtgagtctcgttgagtctccctaccactgtctccttcccattacttttgttgatttgcaccaggcctgccccagaagtgtggttgccagcttcccggcacaccctgaagatgtagatgtatgtgtctgaaccctggcccacagtgctctcaaagctgtaaagagaagtgggaagaaagaagaggagagttactagctatcagcctcaggaataacagcatccctttccttaattaaaacaaaacaaacaacatgctcgatttatttatttgaggtcatggctgagtgaatatttgtttaattttaagatattcataaccttgacagaccatccttattgctgatgatgaattattaaaacacacttgagctatcttgatagctcaatattctagttatttttagaatgcctgttagtaaccatgttccaatgaataagggcccatgt

SEQ ID NO: 13326 - DNA, 588 bp, Homo sapiens
  MAP TO CHR9.3; EXPRESSED IN ADULT LIVER, SIGNAL = 1.1; EST_HUMAN HIT: AI858740.1, EVALUE 9.00e-84; SWISSPROT HIT: Q64320, EVALUE 1.00e-26; NT HIT: gi4507296, EVALUE 6.00e-84
aacttgacccagcaaacgtcagagctgaactgatcctgtctgttgcctgcatgtttctaagagtgacaaggtcacagcagcacaggcattcatagtgactcttctcctgggaaccaatccacttgaaaattgcattgcagtgaaatttcagccagcactcactaagcatctacactgtttggggcacaagtgtacagacctaataagtaaacaaaccactggggtatgaagcactagatgccgtgagtgcagataaactgactgacattctctttctctctctctttctcagcgcccgctatgggcactggcataagaacaaggccccaggcgagtaccgcagtggcccccgcctcatcattttcatccttgggggtgtgagcctgaatgagatgcgctgcgcctacgaggtgacccaggccaacggaaagtgggaggtgctgataggtgagtggccgtgcttccagcggaaggcgccgccgcatcgcacctcaactccattccacgctttggtgtcgcattctgtcatagactcccttgacccacaaaacttagtctttaggtaactgtggacagcagaagctaggg

SEQ ID NO: 13327 - DNA, 582 bp, Homo sapiens
  MAP TO CHR14.3; EXPRESSED IN ADULT LIVER, SIGNAL = 1.2; EXPRESSED IN FETAL LIVER, SIGNAL = 0.41; EXPRESSED IN LUNG, SIGNAL = 2.2; SWISSPROT HIT: P20718, EVALUE 6.00e-29; NT HIT: M72150.1, EVALUE 0.00e+00; EST_HUMAN HIT: BI027779.1, EVALUE 4.00e-95
tcacactggcagtccttctgcactgtcagcaacacttcctgcagtgtggttgctaaagtgctcattgagacataaccccagccagccacactgcacagctgccctggcttcacctgggccttgctgctaggtagcctgagaggccgcacagctgtggtccacttggcctttctctccagctggtggggaagaagcaagaaagtccaggtcaggcaatggccttctgggccccgacacagtgatggggctgcacaatcttccctctcctctaaggcacaggaactgaccaagaggtcaggatggaaaggaggaaagggccggcatcccagtgggagtggaaccaactggaccaagaagagcaagagtggcaggagtgtgcctcacctgcagtagcatgatgtcgttggagaagttcttaggattataggctggatgggggatgggtcttttcacagggataaactgctgggtccgctcctgttccttgatattgtgggcccccaaggtgacatttatggagctgcacagagagcagagtgaggatgggggtggagtcacaggggatagagcccaggagcagtg

SEQ ID NO: 13328 - DNA, 545 bp, Homo sapiens
  MAP TO CHR11.3; EXPRESSED IN ADULT LIVER, SIGNAL = 0.65; EST_HUMAN HIT: AI288932.1, EVALUE 0.00e+00; SWISSPROT HIT: P39013, EVALUE 8.80e+00; NT HIT: gi15297386, EVALUE 2.00e-53
aaggacccaggattgttaggaaatcagttatgtgccactggattatatagcagtttttgtgccttctctcctgtgttggcagcagccattgcagttttcacaatgccttcctcctctgctcctaatataccagagactaaaataaaataatggaaatgttactaatacattaaccaatatgctttgaatatggtctagggccatgtaaattttcttgcacttaggctctaaaaccttgttttcttttttgtgtgttccagactgtcttccatgttagggaatcgtctggtttaacattaaataaaatgttaatctgttgtctgttgtcaagatttgagttgataatttgtttacctttcttcagggaagaactgctaaagctttgaggtcattacaatttacgaatccaggaaggcaaactgaatttgctccagaaactggtaaaagagaaaaaagaaggcttacaaaaaatgcaaccgctggttcagacaggtaggctaagtgttactgaagacatgttaacttgctgcttcacatctgcattg

SEQ ID NO: 13329 - DNA, 524 bp, Homo sapiens
  MAP TO CHR6.3; EXPRESSED IN LUNG, SIGNAL =  14; EXPRESSED IN ADULT LIVER, SIGNAL =  14; EST_HUMAN HIT: BG231561.1, EVALUE 0.00e+00; SWISSPROT HIT: P52859, EVALUE 3.00e-26; NT HIT: Z23090.1, EVALUE 1.00e-113
atgccagtaagagcacccaccaggattgaaacttttggagtaaccctggtcttggcccgggtccaagtacctgctcaccaggccactgggggaggaaggacaggccatctgctattcgtccaccaacctgacttgatcctctcttccctcctcccaggtgttatgtctggctgtagctgttggtcacgtgaagatgacagacgatgagcttgtgtataacattcacctggctgtcaacttcttggtgtcattgctcaagaaaaactggcagaatgtccgggccttatatatcaagagcaccatgggcaagccccagcgcctatattaaggcacatttgaataaattctattaccagttccctctgtctgcctgtgattgagggtggggggtggtttgtcagctgacaagtgagggccttggcactgctgatggctagttgtgtagtttgtcactttgatgatggatagttgggtactatagggaagaggatgtttttctgccatcaaaatcaggcagtcttgca

SEQ ID NO: 13330 - DNA, 561 bp, Homo sapiens
  MAP TO CHR18.3; EXPRESSED IN ADULT LIVER, SIGNAL = 0.57; EST_HUMAN HIT: AL553610.1, EVALUE 5.00e-76; SWISSPROT HIT: P05120, EVALUE 1.00e-22; NT HIT: M31549.1, EVALUE 0.00e+00
tccaaacttgataggcggtctaaattttaaatgcattatttcttcattttttcttggattttgcaagcttttgggaaatttgtttcaattttaattttgctttaaataaacctaaaaaactttagcttgaagattaacaactctgcaatttgaagaatttagtttgatggctactcagaagattcagtaagtaatttcacagttcttgattatgaaacctaaatatatgttatgttttctgtaggcaaaatcccaaacttgttacctgaaggttctgtagatggggataccaggatggtcctggtgaatgctgtctacttcaaaggaaagtggaaaactccatttgagaagaaactaaatgggctttatcctttccgtgtaaactcggtatgagacaacaaaatacatcttcctagcatatattttagggcttttgacaagatatagacagaaaaattagagaccgctcattatagacttgctagttagaagttatgcatgttggacagttgattgactctttagaaacagtataggtaaaggggaagactgtggcttttt

SEQ ID NO: 13331 - DNA, 536 bp, Homo sapiens
  MAP TO CHR12.3; EXPRESSED IN LUNG, SIGNAL =  17; EXPRESSED IN FETAL LIVER, SIGNAL =  15; EXPRESSED IN ADULT LIVER, SIGNAL =  15; SWISSPROT HIT: Q9PLE5, EVALUE 3.80e+00; EST_HUMAN HIT: AL565743.1, EVALUE 0.00e+00; NT HIT: X12671.1, EVALUE 0.00e+00
gagccagagaagtgacagggaagctacaggttacaacagatttgtgaactcagccaagcacagtggtggcagggcctagctgctacaaagaagacatgttttagacaaatactcatgtgtatgggcaaaaaactcgaggactgtatttgtgactaattgtataacaggttattttagtttctgttctgtggaaagtgtaaagcattccaacaaagggttttaatgtagatttttttttttgcaccccatgctgttgattgctaaatgtaacagtctgatcgtgacgctgaataaatgtcttttttttaatgtgctgtgtaaagttagtctactcttaagccatcttggtaaatttccccacagtgtgaagttagaattccttcagggtgatgccaggttctatttggaatttatatacaacctgcttgggtggagaagccattgtcttcggaaaccttggtgtagttgaactgatagttactgttgtgacctgaagttcaccattaaaagggattacccaagcaaaatcatggaat

SEQ ID NO: 13332 - DNA, 506 bp, Homo sapiens
  MAP TO CHR8.3; EXPRESSED IN ADULT LIVER, SIGNAL = 0.86; SWISSPROT HIT: O14977, EVALUE 1.00e-39; EST_HUMAN HIT: BG006008.1, EVALUE 1.00e-120; NT HIT: gi16162044, EVALUE 1.00e-120
tatgccatcatacaatcgcctaatgttgtatttgtcagaacaaattcccatcattaagtaactacactgtataggcaatacatgactgtacttctaagtttagcattcattacagaattaaaacttattagcaagtctaaaaggacagttcaaatatcccatctgccttaaaataaaatcaccttaccaatcactgaatgacatcatgtaataaatggctggcctctgaaaatcattaaaagcagatggttcatggaaagaatctgctcccatgttatcaaagataagccaatctcccacattcagctcaggaagaagacagctttccacaatttgatcaagctcatcacaggatggaccccaaaggctgcttgtaaacagaggctcatcttccttgtatttctgtaggaaaagttttacaatttaatttttactcatacttacgcaggtattgaatttgtgagtaaataagtattttcactgtctcagatccaatgtgctcatgg

SEQ ID NO: 13333 - DNA, 551 bp, Homo sapiens
  MAP TO CHRX.3; EXPRESSED IN LUNG, SIGNAL = 1.4; EXPRESSED IN FETAL LIVER, SIGNAL = 2.6; EXPRESSED IN ADULT LIVER, SIGNAL = 2.2; SWISSPROT HIT: Q14657, EVALUE 2.00e-23; NT HIT: L44140.1, EVALUE 0.00e+00; EST_HUMAN HIT: BE551626.1, EVALUE 6.00e-88
gcctacaaggagacgcaaagtgggacctcgctccatttgcccaggccaggcttagcgggaaacggggggcccaaagcgctgcatggtccgcaccaccagggaaagctggtcaagaaagttgatgacggaaattcggagcaggcgacagtcttcagctttccagcggctaaaagtgaggggaaaagaaaatcaaattggaggtggcaactcctggtccctcgctctgcccctcaggcacccaatatagcaaacccttgggagccctgccattacacagcccctcaggcagagaccggcccagcgcacctggcgctccttagggctcatccttggatgtcccccatgtctccatgggccgcctcccccaaccccgtccctttcagaacttacacgaccaggatcctgccactcactgtgagatccttcccaaccaccctttggtggggctcggcatctggtgccagggacccatgggcgatttccgcctccaagggggtcgggaaaggcacgctgagggtgctgggggtcattcggttaaggtgccatctgat

SEQ ID NO: 13334 - DNA, 564 bp, Homo sapiens
  MAP TO CHR12.3; EXPRESSED IN LUNG, SIGNAL = 0.58; EXPRESSED IN ADULT LIVER, SIGNAL = 0.46; EST_HUMAN HIT: AL555838.1, EVALUE 3.00e-74; SWISSPROT HIT: P13056, EVALUE 3.00e-21; NT HIT: gi4507672, EVALUE 2.00e-74
ctggtcagaaatagcctgccagacttaagtatactgttttcaattttgttgcactctatttaaaaaatatttttagaggattagtaaatttataaaattgtaaaaattatctaaagtaagaagagcattggtacctaaaacactaatataataattattagatatctaactttagtcataacatttaatgaaactcatgcctcctcctacaacctggaaaaggtaaggaaggtgctttttaccttgttgaagactattgtgaagacaattgacaaatgttgctaatatagttgctacattcatcacttgccagcactgggcaagaccaagagtaaaaagttcattccagtaagctttcaccagtgatatgctgttttcttgcctattaaaaacagtaataaaagcacaaatcagatattattaaaataagttttataaaccttacagctagtccaaatacttaaaaacagcatattactaaactaaaattattctagaaagatttgagcaagtctgtgttttgtatagctgataacaaaatgagaaatgaggaatgcttaggca

SEQ ID NO: 13335 - DNA, 503 bp, Homo sapiens
  MAP TO CHR1.3; EXPRESSED IN LUNG, SIGNAL = 1.6; EXPRESSED IN ADULT LIVER, SIGNAL = 0.64; SWISSPROT HIT: Q9UN79, EVALUE 6.00e-28; NT HIT: AF149301.1, EVALUE 0.00e+00; EST_HUMAN HIT: AA531323.1, EVALUE 1.80e-01
tccctacatggcgtcttacccctaggatcaccacttctgcctgtatctgctgccatctaggggagtgggcctgcccagccgagcagagagcccaggtacagcgcatgggtgtgaggatggaggcagggcggggacactgacccaggagcccctgaaattcccctgggctggagcttgggggtcagcactatcctgggaggcccgggctgggtctccaggctgaggttcagcggcagtggctgagccctggggggcctcgtggcaaggctctttcttctcctctgacttgatggtgcagttcaccatggtgccaacgccatccagggccagctgggcagagatggggctcctcatggacatcctgggggagggacagagtgagctgaggtgagtccccagtcgtaaacttctgcccagaggcagtgaccctactgtttgctcccctgaccccacccaagtgcctcctggtgcctgtcacatgggcacactcacagaaagggcaa

SEQ ID NO: 13336 - DNA, 519 bp, Homo sapiens
  MAP TO CHR17.3; EXPRESSED IN ADULT LIVER, SIGNAL = 0.42; EST_HUMAN HIT: BF756785.1, EVALUE 2.00e-26; SWISSPROT HIT: Q14532, EVALUE 2.00e-88; NT HIT: X90761.1, EVALUE 0.00e+00
tgacatcctcctgctgtgtcaccaacaacttgcaagcctctctcaagagctgcccccggcctgcctcggtctgttccagcggcgtgaactgccggcctgagctgtgcctgggctatgtctgccagcccatggcatgcctgccttcggtctgcctgcccaccaccttccggccagccagctgcctctccaaaacctatctatccagttcctgccaggcagccagtggcatctccggctccatgggccccggcagctggtacagcgaaggggccttcaatggcaatgagaaggaaaccatgcagttccttaacgaccgcctggccagctacctgacgagggtgcggcagctggagcaggagaatgcggagctggagagcaggatccaagaggcctctcactcccaggtgctcaccatgactcctgactaccagtctcatttcaggaccattgaggagctccagcagaaggtgagggcagcggtgaggtgaataggctctctgggaagggaactggactagc

SEQ ID NO: 13337 - DNA, 584 bp, Homo sapiens
  MAP TO CHR22.3; EXPRESSED IN LUNG, SIGNAL = 0.65; EXPRESSED IN ADULT LIVER, SIGNAL = 0.6; SWISSPROT HIT: O14994, EVALUE 5.00e-14; NT HIT: gi4507332, EVALUE 0.00e+00; EST_HUMAN HIT: BG703843.1, EVALUE 0.00e+00
taaccctgaatcagccaagctctgcctacaccccagctctatcctataccttttccaattcccaaagcacttacttgagatgcggatggggtggtgctggcttcttggactcttcaccctgctgggaggtactacggccctgcacagggggccggggctgtgaggcgagggtggcacctggcttggaggcctggtttggggagctgccactggatgcccgggatagctgcggagagcctggtgacctttgctgctgtggagatccggactgggggctcaggggctgctggccttgtggggagagcctctgttgggaggggcttccagatctctggggctgaggagactgagcttggcgagggcctcctaaggggccagaaaaaaaaaggttcagttcaattttttttcttaggatagatatggctgtacacaaataatgttgcttcaaggatgttcattacagtgtttcttataatggtgaaaaactgaaaaccgtataaatacctaaccataaggaagtaattaggaacattaagatacatctgtataatggaatatgctgtggtcatcacataggatgtggc

SEQ ID NO: 13338 - DNA, 543 bp, Homo sapiens
  MAP TO CHR9.3; EXPRESSED IN ADULT LIVER, SIGNAL = 0.53; SWISSPROT HIT: Q01819, EVALUE 1.00e-08; NT HIT: AF172171.1, EVALUE 0.00e+00; EST_HUMAN HIT: BE837977.1, EVALUE 7.60e-01
ttcaatggcatcttcaatggcttgtccagtctcgaagtcttgaaaatggctggcaattctttccaggaaaacttccttccagatatcttcacagagctgagaaacttgaccttcctggacctctctcagtgtcaactggagcagttgtctccaacagcatttaactcactctccagtcttcaggtactaaatatgagccacaacaacttcttttcattggatacgtttccttataagtgtctgaactccctccaggttcttgattacagtctcaatcacataatgacttccaaaaaacaggaactacagcattttccaagtagtctagctttcttaaatcttactcagaatgactttgcttgtacttgtgaacaccagagtttcctgcaatggatcaaggaccagaggcagctcttggtggaagttgaacgaatggaatgtgcaacaccttcagataagcagggcatgcctgtgctgagtttgaatatcacctgtcagatgaataagaccatcattggtgtgtcggtcctcagtgtgcttgta

SEQ ID NO: 13339 - DNA, 525 bp, Homo sapiens
  MAP TO CHR3.3; EXPRESSED IN FETAL LIVER, SIGNAL = 0.77; EXPRESSED IN ADULT LIVER, SIGNAL = 1.1; EXPRESSED IN LUNG, SIGNAL =   1; NT HIT: AB026898.1, EVALUE 0.00e+00; EST_HUMAN HIT: BG721487.1, EVALUE 0.00e+00
  unsure 461
  unsure 475
  unsure 476
  unsure 490
caaaacgcggaggtctttagcgtcccggaccaacgagtgccaggggacaatgtgggcgccaacttcgccaccagccgggtccagcagccccagccagcccacctggaagtcctccttgtattcctccctcgcctactctgaggccttccactacagcttcgcagcccggccccgccgcctcacgcagcttgcgctggcgcagcgtcccgagcctcagctgcttcgtctgcgcccctcctcgctgcgcacccaagatatctcgcacttgctcaccggcgtcttccgcaacttgtactcagccgaggtcatcggcgacgaagtgagcgcaagcttgatcaaggcccgcggcagcgagaatgagcgccacgaggagttcgtggaccagctgcagcaggtaacgtggcggtggcgtcgcgtctgcggacggttgccgggggtctcagcgctcggcacgcgtccgnccctgcccaggctnnaaggcgctgttccnggatctggggctgcagttgagaaccagcccatcat

SEQ ID NO: 13340 - DNA, 521 bp, Homo sapiens
  MAP TO CHR5.3; EXPRESSED IN LUNG, SIGNAL =  14; EXPRESSED IN ADULT LIVER, SIGNAL = 3.6; NT HIT: M25744.1, EVALUE 6.00e-87; EST_HUMAN HIT: AW839719.1, EVALUE 0.00e+00; SWISSPROT HIT: P09486, EVALUE 3.00e-25
tttctttgtcccaggtccacatcttttctccagatgcctcatccttctgctccaatccccaggcaaactgtggatgccagggcttggagcagtataggctgctgagaggctttctggccatagctagtgcacctgccagccttgagctctgttcactctagggtctggggtcttacccgtcaatggggtgctggtccagctggccgaactgccagtgtacagggaagatgtacatgttatagttcttctcgaagtcccgggccagcagctccacggggtggtctcctgcctccaggcgcttctcattctcatggatcttcttcacctgagggagtagagactgtgtgtgacaagaggtccatggagattgtctggaccagtcgggccctcccacccctcccagaaggccagagcaggcagagactagccagaccaaagctcacagcgaggggagggaggtgtcatagatgggtactagcatctcattcacaaaaatagaagcctgggatgacctcaaagaa

SEQ ID NO: 13341 - DNA, 551 bp, Homo sapiens
  MAP TO CHR6.3; EXPRESSED IN LUNG, SIGNAL = 1.3; EXPRESSED IN ADULT LIVER, SIGNAL = 0.82; EST_HUMAN HIT: AW589239.1, EVALUE 1.00e-119; SWISSPROT HIT: Q9Y5X1, EVALUE 3.00e-14; NT HIT: gi14747901, EVALUE 1.00e-78
gatcactggaaagggaaaaggccagctgcctcttggtagggtatatactttgtattaatgtatacttctaccacggccctggttccctggctcccctttaaacttacttgttaaggggaattttcatggatgaggaactagcacgactgtttcctcgctgagcgccgcctgcatcagctgactctgaatccttaaagtaggaagaggatttgggcccatcccagtcttcatcccagtcatcatcatcaccagttgctagaggtgaaaatggaagatcatcagttaaaaaaaaaaaaaagaccaaaataaaaatgaaattacttaattttctgacagtaactacctactgggcaaatcaatttttttttgatggagaaaagggtatagtataggagtataatatggatgttaagagtaaaggctgtgtagtcaattttaagccttgaattacagattcttttagtgcaaaagacaaatcagaagcaacttaaagagggctatcagattacttttaaatttttgacacgggcaccgagatgacacagtggaga

SEQ ID NO: 13342 - DNA, 556 bp, Homo sapiens
  MAP TO CHR17.3; EXPRESSED IN FETAL LIVER, SIGNAL =   5; EXPRESSED IN ADULT LIVER, SIGNAL =   4; SWISSPROT HIT: P04765, EVALUE 2.00e-29; NT HIT: gi16164238, EVALUE 9.00e-77; EST_HUMAN HIT: AW960771.1, EVALUE 0.00e+00
tgatgaagatgactgcctgggtgatggtcagggtttcatacaagtcacatagtgtgtccagcttccactcctggaggttgggggacaaaaatcagtcaggggctatacccaacaactcactaccaggcccgcctcctgcactgggccccacctctcgttccacgttgatgtagaactggcggataccctccagggtcaactcttccttcttgacaagaatccgaatggggtccctcatgaacttcttggtcacctcaagcacatcagaaggcattgtggctgacagcaaaactacctagtggaaaaaaaggccagtcttagagtgctggttccttcctgaggcctgctcccttccctagccacacctaaaactgaagcagatgcataaaaaggctcaagaatccagtatatggttcccctggcacttactatttttcaagaatcattagctattcaagcaagactgccctcacctgggtgttgctgttgagcttttggaatatgtcatagatctggtccttgaatccacggcttaacatttcgtcagcttcatcca

SEQ ID NO: 13343 - DNA, 556 bp, Homo sapiens
  MAP TO CHR5.3; EXPRESSED IN ADULT LIVER, SIGNAL = 1.6; EXPRESSED IN LUNG, SIGNAL =   2; SWISSPROT HIT: P07686, EVALUE 6.00e-22; NT HIT: M23292.1, EVALUE 0.00e+00; EST_HUMAN HIT: BG370208.1, EVALUE 5.00e-73
gcgcatatcctgaggaactcagtagagtcacagcatctggcttccctgtaatcctttctgctccttggtacttagatttgattagctatggacaagattggaggaaatactataaagtggaacctcttgattttggcggtaagtgaagcagttggtccaagtgttgtgggttactgtgaagctgatggtaagtgaagcaaccattgttacctttgttttatgagttttcttccctaacctcccaccccagaagtctttacctagatattacctaccaactatcttttatgtttgatccttgattttatgtgtttttttaagttcagtatcattttaaactctcaagaaaccatacagttgcctaaattcaagaacttcaaaagtattatagatccccttagattttatctccattttcagtgatggctcctcactctctacattctaaaggtatttgattgcattaaccttacatgccctcttctgaactgcttctccaatgtaagacacctaagcaaagctatagttttagttcagtggatttcaggctgtgttg

SEQ ID NO: 13344 - DNA, 509 bp, Homo sapiens
  MAP TO CHR6.3; EXPRESSED IN LUNG, SIGNAL = 7.5; EXPRESSED IN ADULT LIVER, SIGNAL = 4.3; EXPRESSED IN FETAL LIVER, SIGNAL =  11; NT HIT: Z80780.1, EVALUE 0.00e+00; EST_HUMAN HIT: BE877790.1, EVALUE 0.00e+00; SWISSPROT HIT: Q99879, EVALUE 3.00e-45
caaattccgaggatcaggagatgtagatttcattttctttcctaactgcagaacagcaaagatagcatgcctgagccagcgaaatccgctcccgccccgaagaagggctccaagaaggccgtgaccaaggcgcagaagaaggacggcaagaagcgcaagcgcagccgcaaggagagctactccgtatacgtgtacaaggtgctgaaacaggtccaccccgacaccggcatctcctctaaagccatggggatcatgaattcctttgtcaacgacatcttcgagcgcatcgccggcgaggcttcccgcctggcgcattacaacaagcgctcgaccatcacctccagggagatccagacggccgtgcgcctgctgcttcccggggagctggccaagcacgctgtgtcagagggcaccaaggccgttaccaagtacaccagctccaagtaaacttgtccctgcaactgccttagtaaacccaaaggctcttttcagagccactcaccttttca

SEQ ID NO: 13345 - DNA, 576 bp, Homo sapiens
  MAP TO CHR17.3; EXPRESSED IN ADULT LIVER, SIGNAL =  10; EXPRESSED IN LUNG, SIGNAL =  12; EST_HUMAN HIT: BG529612.1, EVALUE 0.00e+00; SWISSPROT HIT: P23821, EVALUE 3.00e-26; NT HIT: gi16164938, EVALUE 0.00e+00
catactaagccgggaagctgcaccacaactttaggtagataaatcccagcaggaggagaggtactggaaagaaagatgcgagaaaagtaaaattgtacaaactgccctagccagactagtacaactgaagtgccaaactcaccgtgagttatagcacacagcaggtcacacagtgcttgctctagatccaaagatgccccaacacagaagatgccaggaggactgaggctggaggtaagaaggtaagaaccgtatcttacagactccccccaaaattaatcttaagaatgtagggattttgacgtgctctcgcgagatttgggtctcttcctaagcaggcgctgcaagttctcccaggagaaagccatgttcagttcgagcgccaagatcgtgaagcccaatggcgagaagccggacgagttcgagtccggccatctcccaggctcttctggagctggagatgaactcggacctcaaggctcagctcagggagctgaatattacggcagccaaggaaactgaagttggtggtggtcggaaagctatcataatctttgttcccgttcctcaactgaa

SEQ ID NO: 13346 - DNA, 547 bp, Homo sapiens
  MAP TO CHR2.3; EXPRESSED IN LUNG, SIGNAL = 0.45; EXPRESSED IN ADULT LIVER, SIGNAL = 0.52; EST_HUMAN HIT: BG540850.1, EVALUE 1.90e-01; NT HIT: gi11429010, EVALUE 0.00e+00; SWISSPROT HIT: O95393, EVALUE 1.00e-100
tttggcgttccttctgattcgggcagtggagtcatagatgatgtttgatctcatctgcaacaaagcctcttccccaggtccactggaaaagctatccaggcccaagttgtccagctctggaagttgctcatgggaaatcatttcattcagttcctccttcctctccttgtcactgctttggtcatcagaaaacacgatgagcaaagggttatgcttattctgggcactggtatctatttctagccgtccactgctggcatcctcagcttcatcgtgtttgctctcaatgtggacctccagctggtgggtggatgagcctgacttttgccaacgtctgatggcatctgtgacatcaaaagtctcccactcactgttggttccatatatctccccagacaccaagaccagcatgtttctttctccctcattatcccctttgctctccagcacttcaaaaatggtaattttccggtctactccatcgtatatcatacgatccctttgcaccagtgtgtatagcctaagttcagccatgatgacctcttca

SEQ ID NO: 13347 - DNA, 541 bp, Homo sapiens
  MAP TO CHR6.3; EXPRESSED IN FETAL LIVER, SIGNAL = 1.3; EXPRESSED IN ADULT LIVER, SIGNAL = 1.6; EST_HUMAN HIT: BF055472.1, EVALUE 0.00e+00; NT HIT: gi14781831, EVALUE 4.00e-57; SWISSPROT HIT: P02554, EVALUE 1.00e-16
tgtgaccagcagagaaggtggcctcagcatctgtctagctctggtcataacctgtgcttttggcccctggctctttgaagtcctttcaagttgcctatagcctatgaagcctggcttgaagcttttccttgctctttcttccttccagtctgaggctgctctgcaatgggagggctgcagcagccctctgcaggctggcgttgatctgtgagccatgaccacccatggactgcatggagctaggccaggactcagggctgccgtggacacagtgtcaccttggcactgaacactaagaactgtgctttgcagggctgttaggaagaaggtgtgtcatttggccagttcccagtgatcatgactacataccgaacacgaagttgtctggtctgaagatctggccgaagggtccagacctgacagagtccatggtgccaggctccagatccaccaggatggcccgaggtacatatttgttacctgcaggaaataagaactgactcaggcctgtgcttggggagggactcacagcagcattcaa

SEQ ID NO: 13348 - DNA, 594 bp, Homo sapiens
  MAP TO CHR9.3; EXPRESSED IN ADULT LIVER, SIGNAL = 0.71; EST_HUMAN HIT: BI766583.1, EVALUE 0.00e+00; NT HIT: M96264.1, EVALUE 0.00e+00; SWISSPROT HIT: O75962, EVALUE 5.80e+00
ggcagctttcacagaggttcttccagtgtagtggctctagctctgggtgaagtaggatcatcaatgtcggcccccagggttcacagctgttctgagccccgcccccaggtggcagggcagcccagtcagtcagtcacgtgctggcggctggccaatcatcgggggcggcgcggggaggggtggtgtggacggagaaagtgaaaggtgaggcacggccctgcagattttccagcggatcccccggtggcctcatgtcgcgcagtggaaccgatcctcagcaacgccagcaggcgtcagaggcggacgccgcagcagcaaccttccgggcaaacggtaactgcaccgcggcagggactcgctggggcgcggagccgagccctccccttccttaggaagctttcgtcccctccgaaggttggaacgctcatcccgagccagaccgacaaggcgtacagtctgcaggcctgtacgagcagcaggccaattggcgctgggaaagtccaatcctgggcctctagctcctgagcgggacagggccgagagggcgctcccgagcttgggcctgctggtgggtgagacccaggagagagggag

SEQ ID NO: 13349 - DNA, 591 bp, Homo sapiens
  MAP TO CHR5.3; EXPRESSED IN ADULT LIVER, SIGNAL =  21; EST_HUMAN HIT: BF155208.1, EVALUE 0.00e+00; NT HIT: gi14110394, EVALUE 1.00e-122; SWISSPROT HIT: P17861, EVALUE 7.60e-02
tccctttctctgtcagtggggacattatcagccaagcttgaagctattaatgaactaattaattttgactacatatatgccaagcccgtagtctgagacagagagccaagctaatgcggtagtgaaaatcaaggaagcacctctcagccttttagagaatgatcacccagaattcgtggtctcagtgaaggaagactttgtggaagatgacttcattccagacctgggtatctccaatctacttccatccagccactgcccgaagccatcttcctgtctactggatgtttacagtgactgtgggtatgagggctcccctttccccttcagcgacatggcctctccacttggtgcaaaccattctaaggaggagactggccaatgaactctttcaccagctggttagtgtctaaggagtgatccaatactgttgctcttttccttgactattacactgcctggaggatagcagagaagcctgcctgcgcttcattcaaaacgtcacagagtgtacagtcctagagaattcccctatttacctgtttaaacgtcatagataaccccaagtattgtcttttggcatccagcagt

SEQ ID NO: 13350 - DNA, 545 bp, Homo sapiens
  MAP TO CHR8.3; EXPRESSED IN ADULT LIVER, SIGNAL = 0.38; EXPRESSED IN LUNG, SIGNAL = 0.42; NT HIT: gi15295009, EVALUE 5.00e-72; EST_HUMAN HIT: AV757535.1, EVALUE 5.00e-73; SWISSPROT HIT: P07155, EVALUE 5.00e-19
acgggtcttgttcacctttgacatgtctgcaaattttcttttttctttagcagacatagtcttcctcctatctaagcacttcttcgaaaactctgagaagttgactgaaacatctggatgcttcttcttgagctcctcctgacaagtttgcgcaaagaatgcatataatgacattttgcctatcggcttcttaggacctcctttgcccaggcttagttatctttcctcagcgaggcacagaattgctcagtgcccattcaagtctcaagtgccccagtgctgtctctacagagctcagtgtactgtcaattaagattcataattgatggtgaactacacattttagagggcacatgctggtgccctcctactaagaggaatagtcaagatagtcagcatgcaggaagaatttatcttagtcaagatgaatggatgtgttctctttcaatcagatgaatgaaaaaaaaaaaagagttagaattgagaaatgtgcttttctttacattatctggttagtttcccccagataacaccattgagcgggt

SEQ ID NO: 13351 - DNA, 541 bp, Homo sapiens
  MAP TO CHR2.3; EXPRESSED IN ADULT LIVER, SIGNAL = 5.9; EXPRESSED IN LUNG, SIGNAL = 5.4; NT HIT: M60858.1, EVALUE 0.00e+00; EST_HUMAN HIT: BI468480.1, EVALUE 0.00e+00; SWISSPROT HIT: P19338, EVALUE 2.30e+00
cttttacaaccccacgaacgcaaaaaaaaaaaaaacaaaaacaaaacaaaaaaaagaaacaacaacaaaacccaaactatttgtaggaaaaaatggttttgtacatgggatgaaacaatataaattcaaaacttacagataagggttagctctatcactcaactctttaaaaagtttatatgaatatccagtcaaaaccaacacggtattgcccttgaaatgttaactagacggatttccaaggagaccacaggactgtatactgtcttggaatgtcctcagaaggctctgtcattgatcaggtaacagtaaaaaccccagagtcctttctttcaaatggaaaagggaaagcagagggacagaagctattcaaacttcgtcttctttccttgtggcttgtggtcacctcctcctcctctgcctcctcggaagcctcctcgccctacaggaggaaggcaagacactgttaaaagaatgggtacaaagctcctcctccccagtgattaggaaccgtgacagggcacagggtctgaagagcaca

SEQ ID NO: 13352 - DNA, 539 bp, Homo sapiens
  MAP TO CHR10.3; EXPRESSED IN ADULT LIVER, SIGNAL = 1.3; EST_HUMAN HIT: BG481548.1, EVALUE 4.00e-55; SWISSPROT HIT: P12956, EVALUE 9.00e-19; NT HIT: D88107.1, EVALUE 1.00e-119
tgcgccaaagtgaacagtagccaacatgtcagggtgggagttgtattacaaaatcgagggcgatgaagaagcagaagaagaagaagaagagaaccttgaagcaagtggagactataaatattcaggaagacatagtttgatttttttggttgatgcctccagggctatgtttgaatctcagagtgaagttttgattccttttgacatgagcatccagtgtatccaaagtgtgtacatcagtaagatcataagcagtaagaaagatcataagcagtaagattataagcagtaagaaagatcataagtagtgagatcataagcagtgagatcataagcagtaagatcataaacagatcataagcagtgagatcataagcagtgagatcataagcagtgagatcataaacagatcataagcagtgagatcataagcagtgaggtcataaacagtgagatcataagcagtgagatcataaacagatcataagcaatgagatcataagcagtgattgagatctcttggcagtggtgttctatgg

SEQ ID NO: 13353 - DNA, 573 bp, Homo sapiens
  MAP TO CHR2.3; EXPRESSED IN ADULT LIVER, SIGNAL = 4.6; EST_HUMAN HIT: AI494285.1, EVALUE 0.00e+00; SWISSPROT HIT: P40925, EVALUE 5.00e-16; NT HIT: gi14726672, EVALUE 0.00e+00
gcaatggttttcagtgttgttgttctttattataactgtgctaaagtcagtcatttttgaagttttttttttttagattcaaggggtttaaaattcaagtgttgagtttttattagaattatctattaattaaaatctggatttttatttactttagaatcagactttaaaacgatatacctctaaatataagttcaaacaaggttgttgcttactgaaagatcagttccagtttaaatctcttatttgcattattttcaaacagaataagacctggaagtgtgttgaaggtctccctattaatgatttctcacgtgagaagatggatcttactgcaaaggaactgacagaagaaaaagaaagtgcttttgaatttctttcctctgcctgactagacaatgatgttactaaatgcttcaaagctgaagaatctaaatgtcgtctttgactcaagtaccaaataataataatgctatacttaaattacttgtgaaaaacaacacattttaaagattacgtgcttcttggtacaggtttgtgaatgacagtttatcgtcatgctgttagtgtgca

SEQ ID NO: 13354 - DNA, 596 bp, Homo sapiens
  MAP TO CHR5.3; EXPRESSED IN ADULT LIVER, SIGNAL = 8.4; EST_HUMAN HIT: BI546882.1, EVALUE 0.00e+00; NT HIT: AB054976.1, EVALUE 0.00e+00; SWISSPROT HIT: O43678, EVALUE 2.00e-14
attaggatgggtaggtcgggattcgccttcttcagctccacgtagcgtttctcaatgaagtccctgcggggccggagagagcgccgcgcgtgctgtgggcgggggcttccctcaacttcagggaggtcgaggtcgtgaccctggcgtcccgaagcccgcccgcctcaccacgccgcgcctcacctgacgccctggctgccgggcgagcgctgacataagtggatgcgaatctcacgcaggcccagctttgccccgactcctcgacttgctgcggccgccgccatccttgttaatatcgaagtcgccaattccaggtcttcaggccaagtgctccggtctgaccaaccgcggaccctaaagcctagcccataggctgcatgaggcaggggcggggtaaagcttggccaatgatataaaagtattgtaggaccgctgcgaggtcaatttctttgcgctcggggttggtcggagggaaaaacaggaagcggaaaggctgcgaacgcaaagcagtgtgggttgattctgaggtgcactgtgggaaagagcttgtcgctgcggtgttgctgttggagactcgattgttggtgacagcgaaa

SEQ ID NO: 13355 - DNA, 566 bp, Homo sapiens
  MAP TO CHR19.3; EXPRESSED IN ADULT LIVER, SIGNAL = 0.73; SWISSPROT HIT: P51146, EVALUE 3.00e-06; NT HIT: gi14277708, EVALUE 0.00e+00; EST_HUMAN HIT: BE674995.1, EVALUE 0.00e+00
aaattcctggtgattggcagtgcaggaactggcaaatcatgtctccttcatcagttcattgagaataagtgtgagtttcccgcagtggtcctgggaaccctgagctgtgtttatgcgcatggtgtgggctggtgggcagccggtggggagggcagggctggccataggtacaagtccagtgctggctttttggtccttgctttgtcgtatgtcctttactaggttctccttgacctcaagtcactccagcaaggagaatgggtttgtagagactgagagggccttggaggatgggggatcctctgagctgtctcctctctccctgtactgccccttctgttcctcctactcccagtcaaacaggactccaaccacacaatcggcgtggagtttggatcccgggctggtcaacgtgggtgggaagactgtgaagctacagatttgggacacggctggctaggagcggtttcggtaggtgggctgggctcccaagggtgatggggagagagattgagaaggatagagagagatgtgtgtgtagagtcacttggagacactgagagggc

SEQ ID NO: 13356 - DNA, 548 bp, Homo sapiens
  MAP TO CHR1.3; EXPRESSED IN ADULT LIVER, SIGNAL = 0.73; EST_HUMAN HIT: BF353770.1, EVALUE 0.00e+00; SWISSPROT HIT: Q9Y624, EVALUE 7.00e-04; NT HIT: gi14723968, EVALUE 1.00e-54
tcaaacttggagaaccccaggacagcacctcactcaccctttctttgttcctgaaagagaagaaatgggatcatgagtgtcagcaggacagaagacagcatggcttgggaagatggaggggcaggcccccagctcttggtgttagatgggtgatcagtgttccccaggggacaacacccacacacatgagcacagtatcagggtcagtactcagatgacacccatgccaggccctgggatgggggcagtacaaaggagagcctctgggggcagatacttactgtcaaagtggcctcggctataggcaaaccagatgccaaaaaccaagattcccaggagaatcagggttacaaggacggctgccacgatgacccccacattccgctccactgcgagacacaaataagaagtcaggcacggggatactcactcacggcacctacagtatcaccaatggcaggatgaaaagcagaccccaatccccaccccaggtctgggctcaagccctaactctcaccagcttccatgcgcacagcatttgaagtcat

SEQ ID NO: 13357 - DNA, 567 bp, Homo sapiens
  MAP TO CHR1.3; EXPRESSED IN ADULT LIVER, SIGNAL =  49; EST_HUMAN HIT: BG196817.1, EVALUE 0.00e+00; SWISSPROT HIT: P02248, EVALUE 2.00e-30; NT HIT: X04802.1, EVALUE 0.00e+00
ctgagaggatgagacagggcaagaaattcaccactatcctaaaactggaagtcttctaatgaataatttcaaagtacagtcgtgtacaacttttatagaaggacttttgaaataatgtttttccaaaagtatggcatccagaattttctttaatgctaccatgcaacaaaacctttattaacattttgaacaggttcaactattactgaaacttgtaatttctaaacttaagtgggggcagatggctatagtgcagtgtaatgccatcactgagcactgcaaatgcaagactgaagaactaacagccacatctcagacgctggaccaggtacagggtcaactctttctggatgttgtagtcagaaagagtacagccatcttctagctgcatgcctgcaaagatgagcctctgctggtcggggaggatgccttccttatcctggatattggccttcacattttcgatggtgtcactgggctccacttcaagggtgatggtcttgccagtcagggtcttcacgaagatctgcattttgacctgttagcagatacgaggatgctgcgaat

SEQ ID NO: 13358 - DNA, 593 bp, Homo sapiens
  MAP TO CHR19.3; EXPRESSED IN ADULT LIVER, SIGNAL = 1.5; EST_HUMAN HIT: AA773643.1, EVALUE 0.00e+00; SWISSPROT HIT: Q9UJU3, EVALUE 7.00e-66; NT HIT: gi12056481, EVALUE 5.00e-32
ggcttcagtcagtcctctggtcttcaatcccatcagagagtccacacgggggaaaagccatacaaatgtgatgtgtgtggaaagggctttagatacagttcgcagtttatataccatcagagaggccacactggagaaaaaccttacaaatgtgaagagtgtgggaaaggctttggtaggagcttgaatcttcgccatcatcagagggtccacacgggagagaaaccccatatatgtgaggagtgtggtaaggccttcagtctcccctcaaatcttcgagtccacctgggtgttcacaccagggaaaaactctttaaatgtgaagagtgtggtaaaggcttcagtcagagtgcacgtcttgaagcccatcagagagtccacactggagaaaaaccatacaaatgtgacatatgtgataaggacttccgtcaccgttcacgtcttacatatcatcagaaagtccatactggtaaaaagctttagaaatgagaaatgtgttaccaacttttgtctgaatgcacatcttcaagtttttggctagtccatgctggtggtaaaccctgtaaaactactgagagtggaagggggtttgt

SEQ ID NO: 13359 - DNA, 576 bp, Homo sapiens
  MAP TO CHRX.3; EXPRESSED IN ADULT LIVER, SIGNAL = 0.44; EST_HUMAN HIT: AA252274.1, EVALUE 0.00e+00; SWISSPROT HIT: P27966, EVALUE 4.00e-97; NT HIT: gi14765973, EVALUE 0.00e+00
gtcacccagtggtgttagggctccagcttgtattaccttctccatataattgagaccaaatctgagatgatcaaacttatagatattgcacaacagactgcacagggcatggattactgacacgccaagtcagtcatccacagagacctcaagagtaataatatagttcttcatgaagacctcacagtggaaataggtgattttggtctagccacagtgaaatcttgatggagtgggtcccatcagtttgaacagttgtctggatcttttttgtgtatggcaccagaagtcatcagaatgcaagataaaaattcatacagctttcagtcagatatatatgcatttgggattgttctgtatgaattgatgactggacagttaccttattcaaacatcaacaacagggaccagataatttttatggtgggacaaggatacctatctccagatctcagtaaggtacggagtaactgtccaaaagccatgaagagattaatggcagagtgcctcaaaaagaaaagagatgagagaccactctttccccaaattctcacctctattaagctgctgacccgc

SEQ ID NO: 13360 - DNA, 521 bp, Homo sapiens
  MAP TO CHR22.3; EXPRESSED IN ADULT LIVER, SIGNAL = 0.8; NT HIT: gi11418311, EVALUE 0.00e+00; SWISSPROT HIT: P98161, EVALUE 7.00e-14; EST_HUMAN HIT: BI460948.1, EVALUE 2.90e+00
gctcatctggatgggtaacgtgaaatgttctgtccaaagtggtatcaacagaaagccatttctggcatatgaacagccaaatgtgcctgctaaacagattttccactttgattctacttaaataccagctaggcgatcgaccctcgttgttgtgccacacacggatggaatggatgtcccccaagtcactttttgtcgttaggaggaaagtgttgatgctacctcggtagagagttgtgaaatgtggatggcttaaacaatgcacgtcgctggtactcacagttcctctaagttgcacaaagacattggccctggtcccagacccccaacgacttcctgtaaaaatagtcaccaagtagcataaattatcataaggatcattatctggtagaactatcacatgcccccgaagatgctggtccatttcatccctgtataaagcccaaaaagctaggcccacgtataagagaataatgaaaagcacagtgaagagggtcacggggttttggtgaaggctcttg

SEQ ID NO: 13361 - DNA, 533 bp, Homo sapiens
  MAP TO CHR1.3; EXPRESSED IN ADULT LIVER, SIGNAL = 0.43; EST_HUMAN HIT: BE905187.1, EVALUE 0.00e+00; NT HIT: AF149301.1, EVALUE 0.00e+00; SWISSPROT HIT: Q9UN79, EVALUE 2.00e-43
cgagttgggacaaggtcttccccagaggagaaggggccaggcccacccagccgggatcagtctgtgagcaccaccaactccccatcgctcttctcttcgccctccgagtcctcgtcctcgctgtaccggtacatctcgccatcagccaccgagtgcctgtcatctgtgccctcaccctcctctctgaggctgcaggtgttgacgatcacaggcatgttggggtccaggctacgagggacatagtgctccaccagtggctgtgccagcggcatgcctgctgcccgagggtacaggacatctgaggagctcatctgcacctggccagcctgcgggctgtggggcagagaaggggaacggtgatggatgcacacttgattcaaccccaaacccatctcccctccaggcctcctcagagcatgcactcccactccacacactcttggctgtgacttatataccctgcccccagcctgctttctgatggccaaattcactggcacctacgaccctgcagatgacctgcagacctaggg

SEQ ID NO: 13362 - DNA, 560 bp, Homo sapiens
  MAP TO CHR2.3; EXPRESSED IN ADULT LIVER, SIGNAL = 0.4; NT HIT: AF330128.1, EVALUE 0.00e+00; SWISSPROT HIT: Q9NY46, EVALUE 3.00e-59; EST_HUMAN HIT: BG253038.1, EVALUE 0.00e+00
gcatcttttcacttgattacagcttagagttttcaagttggcaaaatcctggcccacactaaatatgctaattaagatcattggcaattctgtgggggctctaggaaacctcaccttggtgttggccatcatcgtcttcatttttgctgtggtcggcatgcagctctttggtaagagctacaaagaatgtgtctgcaagatcaatgatgactgtacgctcccacggtggcacatgaacgacttcttccactccttcctgattgtgttccgcgtgctgtgtggagagtggatagagaccatgtgggactgtatggaggtcgctggccaaaccatgtgccttattgttttcatgttggtcatggtcattggaaaccttgtggtatgtatgtagtacaaatgctcataaattagaacaagagcagacagtagctaggaacgtggccagatgtagtaaacatatctctggtttatagtaagtggcctagactgaaatccccctattagcactcagagaataagcaagttatttaacttctcctgggctctggtttcccattttt

SEQ ID NO: 13363 - DNA, 592 bp, Homo sapiens
  MAP TO CHR1.3; EXPRESSED IN LUNG, SIGNAL = 2.3; EXPRESSED IN ADULT LIVER, SIGNAL = 1.6; SWISSPROT HIT: P14543, EVALUE 1.00e-41; NT HIT: X84825.1, EVALUE 0.00e+00; EST_HUMAN HIT: BF843205.1, EVALUE 1.00e-118
ttttaaaagccctgccaatgccagcagtagccttaagagggtccactctgtaaggcacctcaacaggttagcattctgcactttactttagatagaatcacgaataggcctttggttagaagaacagacaggcagcttttccaagaatcaaaaataacaagacattctttttttcctgccagaagatactttagcataattttcttctacagactgagagtaagagaccaaaaacaatgtcaaagagtggggttttaaaaatgcatgagcacctgtgcccagcatgagctgtatccccttacccctcacaggcccaatggagttgctgagagcatagcgcaagatcttctcctcctggttgtacaggacgaacacgctgtccaccgagagctgctgggtgctgggcagggctggccgggagtcatcgtggacgcattcctggaaggtgatggtctggcgccactggtaagtgtagatgcgtgaaggagatgccccatctcgctcgggctcagtcaccgtgtactcccgggtggaggaggaagtgatcactgcagagtgggaaggatggaggggacaaggcagggagacagag

SEQ ID NO: 13364 - DNA, 507 bp, Homo sapiens
  MAP TO CHR9.3; EXPRESSED IN LUNG, SIGNAL = 1.2; EXPRESSED IN ADULT LIVER, SIGNAL =  41; EST_HUMAN HIT: AA180226.1, EVALUE 4.00e-70; NT HIT: L00084.1, EVALUE 3.00e-70; SWISSPROT HIT: P09034, EVALUE 9.00e-20
attgctgcagtcatgcaaactgtagggggtggaagctgccggacaccttgggaagccggtgcatctccctggacacaccccatggcaaggcaggttctagcatccccttgctccctcatgccctgcactttccctcaaccccctttggcctgcaccttttggggtctcacatgaggatggcagtgggcggcaggggaggaaggtgctgatacggaggggagggccaggcccgagagcctgatagtactttgggatcccttgtgaggcggttagagggggcagccatagagtcttacgcaccggtatacaccagctcagcaaatttcaagcccaggccttgtttgattttgcgcacttcccggtccatggtgaaggcctcgatgtctaaatgagcatggtaaaggatggtgcctgctggggtctcgtagatacctagccatttttccaggcagggggaaaaggagaaaaaagagagaaacgcatgaaacccaaactgtcagcaaatga

SEQ ID NO: 13365 - DNA, 550 bp, Homo sapiens
  MAP TO CHR8.3; EXPRESSED IN ADULT LIVER, SIGNAL = 0.51; SWISSPROT HIT: P29122, EVALUE 5.20e+00; EST_HUMAN HIT: BF357837.1, EVALUE 0.00e+00; NT HIT: gi7657078, EVALUE 1.00e-17
tctgcctgggtaggaaacacttcaggtaggaggtaaccatttaagctatggtttggaggcaaaggacaaaaaagttttctcaggtccaggatgacagctcaaaacctagagaaagtgggcatgtaaactgaaggggttgtttgatttggttttgtttaattgtaattgtttttccaggtgtgctggcattggaagaaccttgctgagctggaccagctctggatgctgaaatgtttacggtttaactggtacatcaatttctctccaactccctttgagcaggggatctggaagaagcactatattcaaatggtgaaagaacttcatattaccaagcctaaggtgaattttagacagaaagccacaagcttgcaaacattggctctttgcaaattctagaactaagaataaaggatcagactggaagttggggaagggaggtagttcaaaggacatatactatgatttcaaaattctccttttctgagacttgatagttgttttcaagacattcatgttagttgagagccctcatttgccactcccaaac

SEQ ID NO: 13366 - DNA, 545 bp, Homo sapiens
  MAP TO CHR1.3; EXPRESSED IN ADULT LIVER, SIGNAL = 0.3; EXPRESSED IN LUNG, SIGNAL = 0.43; SWISSPROT HIT: Q02563, EVALUE 1.00e-34; EST_HUMAN HIT: BE313236.1, EVALUE 1.00e-113; NT HIT: gi16158286, EVALUE 1.00e-113
cagaggaaacaaccaggctcatagaggtaatttgccagaggccagaggcaggtggtggagctgagattcaaaacccataacctcaaagcctgtgccctaaccacttgcaattctgcttacctcctttacccccagagaagcttctgtgccagtccccaccccatcctgcagcaccccctaaacagaaaacatgagagaggaactctctgaccaatctcttccacagcccaaggtgagaagcctgttgactgcctcccgcagcccctggcccctactatcagatctgactcagcctctcccccttaccaagcattctgagcctgccgatcttgtccatgagcagggcagacacgatattcccaggaagcactgccagtgtccccaggaagctcacaaagtataccatgtaggcaccttcgcccgtccctgtcacgtctagcgggcagccctccttgttgtgcaggaatgtactgtttatcagacggctgttcacaaacttgtactcgaacaggtctgtgggcaaaggccaagataagcaggcagtc

SEQ ID NO: 13367 - DNA, 506 bp, Homo sapiens
  MAP TO CHR5.3; EXPRESSED IN ADULT LIVER, SIGNAL = 3.5; EST_HUMAN HIT: N52288.1, EVALUE 0.00e+00; SWISSPROT HIT: Q93088, EVALUE 8.00e-30; NT HIT: AF118374.1, EVALUE 0.00e+00
tggcaaactgttcaacttggtaaagctttgaactattccataacagtcattttctggaataagatactattgtaaatatacaactaagatgtgaatgtttgaataataattttatttcaatttcacatgaaaatttagatgtctcatatactcacccattttaggggcaggaagtcaatgaagctgcttgcgacatcgcccgacaagtggctgatgaaggagatgctttggtagcaggaggagtgagtcagacaccttcataccttagctgcaagagtgaaactgaagtcaaaaaagtatttctgcaacagttagaggtctttatgaagaagaacgtggacttcttgattgcagaggtaaagaaagatgtggtgaaagataagacaaatacacctagtacattttctttaccttttgctttcaagagtactgtgtggggttaggtgacaatcataactagcaatagtaatatttagtttttgaaatcgttttccaattcagggcta

SEQ ID NO: 13368 - DNA, 532 bp, Homo sapiens
  MAP TO CHR6.3; EXPRESSED IN FETAL LIVER, SIGNAL = 0.33; EXPRESSED IN ADULT LIVER, SIGNAL = 0.39; EST_HUMAN HIT: AA334499.1, EVALUE 3.00e-25; SWISSPROT HIT: P42260, EVALUE 5.00e-36; NT HIT: gi13631104, EVALUE 1.00e-120
gtacacctctccaccccttgaggtatatgctattattaagaattgtgcacaaataatggcgttgttacactcttacatttgtgaatcgagagaagtttgcgctctatcattttaatttgtaaattttaggtaaccagcagaacttaccttgaaaaaagtcatggttgcaccatcctctactgctccatattctatcttggtttgtttagctaaatcatcagcagagtcaataggggattccatgcgttccactgtcagaaaggcggctaagttagcagtatacgaagaaatgatgataagtgtgaaaaaccaccaaatgcctcccactatcctggtggacagtgctttgggcatgagctcagaacctaacagagagtgggggaaaggtgaaacgaatatagagaatttgatcagcaatcagatactttttgtcacagtggcagaatggaatcactgtgtaataaaagcttaaatcaaagatttacatatttctttagtaagcaagcaacaaccattgggaaagcagaggcta

SEQ ID NO: 13369 - DNA, 556 bp, Homo sapiens
  MAP TO CHR17.3; EXPRESSED IN LUNG, SIGNAL = 2.3; EXPRESSED IN FETAL LIVER, SIGNAL = 0.71; EXPRESSED IN ADULT LIVER, SIGNAL = 0.75; SWISSPROT HIT: P75404, EVALUE 6.90e+00; NT HIT: gi4507088, EVALUE 7.00e-93; EST_HUMAN HIT: BG426402.1, EVALUE 1.00e-92
catatcacctgggatttgtggtataggcacatcttattgaaatgaatgttttatgactttacctgatgaaccattaaggactggacctgccgtttgaggacctgcattctagctgttgtgacaactgaccgaacgtctggcaccacactctcactaagaatttcactgatgaggcggtggtttctctggaaacgggcggtggctgtatgcttcattgaaaagccatcatcataatctggagtgaacaaattgttctggaaatcaggtcaccagtaaccataaaaaggagtgtaacaatgttaacacttaattaccaacgaactatggccctcactggcctaacaagtggacctgcccagcgtcatgggagcactggggcagttacttgataaaaaccatacagaggacgtaatgtgttcattggccaaggtagtaatttatctcacagtctttaagtgataatgttgtgtctgagaaggatttggctaaaacataaacgagatacaacatgtctcttctggcttcggaatcaatgtgaaggctgtatgtgatggca

SEQ ID NO: 13370 - DNA, 556 bp, Homo sapiens
  MAP TO CHR11.3; EXPRESSED IN ADULT LIVER, SIGNAL = 3.6; NT HIT: X08058.1, EVALUE 0.00e+00; EST_HUMAN HIT: AA593413.1, EVALUE 0.00e+00; SWISSPROT HIT: P09211, EVALUE 4.00e-26
attgtgggagaccaggtgagcatctggccccatgctgttccttcctcgccaccctctgcttccagatggacacaggtgtgagccatttgtttagcaaagcagagcagacctaggggatgggcttaggccctctgcccccaattcctccagcctgctcccgctggctgagtccctggcccccctgccctgcagatctccttcgctgactacaacctgctggacttgctgctgatccatgaggtcctagcccctggctgcctggatgcgttccccctgctctcagcatatgtggggcgcctcagtgcccggcccaagctcaaggccttcctggcctcccctgagtacgtgaacctccccatcaatggcaacgggaaacagtgagggttggggggactctgagcgggaggcagagtttgccttcctttctccaggaccaataaaatttctaagagagctactatgagcactgtgtttcctgggacggggcttaggggttctcagcctcgaggtcggtgggagggcagagcagaggactagaaaacagctcctccagcac

SEQ ID NO: 13371 - DNA, 579 bp, Homo sapiens
  MAP TO CHR2.3; EXPRESSED IN ADULT LIVER, SIGNAL =   2; NT HIT: gi8923276, EVALUE 0.00e+00; SWISSPROT HIT: P49901, EVALUE 3.30e-02; EST_HUMAN HIT: BG488600.1, EVALUE 0.00e+00
ctgccttcctttcttggttgcgtttcctccagatgcctctgcggctgcaggaaccccgctccagaagcccgaggatgaccgtgttccctcctggaggggcttcccaggtcctctcagcccaagggtggggctgtgtggcaaatccctccagcctgctctgaaggcagctgacaccttcagggctggtgcagcttcccccgctcggtcagcagtgtcatggcagaggcgtagaggacatagcccagggtgagcagcagcgtgcatgggaggggcccgacgcagaacagagaggccacgaagaaggccagcagcagcgagaccagcgtccggtaactgcccaggaagcgcaggctgagcctggggccgcgggtgtggccggccacctgcctccgccccacagggctcagcaggtgcctgctggccagcccaggttctgtgaggtggtagcgacagaagctgccgaggaagtcatcccgggaacacagagccgccatctgtcctgcaaactgaagcacagacagaggcacggggatgtggggtggtggcaccacaggcctcaggacagcagtaccccaccct

SEQ ID NO: 13372 - DNA, 547 bp, Homo sapiens
  MAP TO CHR10.3; EXPRESSED IN ADULT LIVER, SIGNAL = 1.5; NT HIT: gi14745110, EVALUE 0.00e+00; EST_HUMAN HIT: BG724319.1, EVALUE 0.00e+00; SWISSPROT HIT: P38994, EVALUE 1.20e-01
gaagtagcggaaggcaacaggtgcataggtcttgaaacgaaaggcattgtagtgatgagcaggggtcaggttgctcccttcactgggaaagaagatactctccaccatgtggaaatcttgcatgaggacatcactctctggtttggtactcaggctccccacagtgtgggtaatgcctaactggatggcacctttcaaggctgatgaggttgtccctcctgaggaatcaacacttctatggcctattttcttgatgggcatgccagaggcataaggcacctcagatgccatgggactcttgattccagatgctgaggacgaggtacaggaagggaccgcgggatcaacggagaaaaaccgaccgaagacaacggcccggaggaggccgacgccatcttggcagccccctccccctcaagggcctggctctctttcaatccggctcttcctcttctcggaatcgaatcttcccaatgtctctttatagaacccacgttctgtgggccccctccccgccccctccagggctccctcagacaagtcgagc

SEQ ID NO: 13373 - DNA, 530 bp, Homo sapiens
  MAP TO CHR18.3; EXPRESSED IN LUNG, SIGNAL = 1.1; EXPRESSED IN BONE MARROW, SIGNAL = 0.62; NT HIT: gi14762337, EVALUE 7.00e-22; SWISSPROT HIT: Q64733, EVALUE 8.60e-02; EST_HUMAN HIT: AL542672.1, EVALUE 2.00e-20
ccttgccaggattaacatcgtgtctcttcttctctcacagacgacttcgcagaggaggaggaggtgcaatccttcggttacaagcggtttggtgagtcctaacaaagctgtgttccttctcagtggtcaacctgggatgcagccacgaaccctcagagaccattggcaggccactggcaggcccttcatgcacatgggtgtttgtggctctgaggtccaattttggttggaaagtgagtgtctgtgtcccagggggagggtttctcacaattctgaggggccatgggacaggagctgcacccaggcatggggaagtgatgggatgttcatgggtctgctgaatggaaaagagacagcctactagacaaagtgtagcgggaaaggcaaatctgtgacaagacaacagcaaaatacctgaaatttttcagttttgttattcagaaaacgtctttgctcaggccttacactcctaacccagtgttcatggatgagtgagagggagacttcttccaagaatctgcctggacaca

SEQ ID NO: 13374 - DNA, 546 bp, Homo sapiens
  MAP TO CHR18.3; EXPRESSED IN LUNG, SIGNAL = 1.2; NT HIT: gi15304914, EVALUE 7.00e-65; EST_HUMAN HIT: BG205207.1, EVALUE 2.00e-63; SWISSPROT HIT: O14628, EVALUE 3.00e-11
aatacagtgctgaaccatccctagaatttagattcctgtttatgtaaaataaaccttgaccatataatctatactttgcttacattctaatatagaaacaaaaatcaatgatatcttctaattttctcactctgagaataaatattcaaatgtcctaagtgtgtggagtccattgaatcatattcttgacatttcatggaaataaatgttttttaaattgtcaataccaggtttattccttcatttccagttgttattattattcatctgtaacatttcttgatatattacaggagaaaaacctttcaagtgcgatgagtgtaactttgcctccacaactcagtcccatttgactcggcataaacgtgtccacactggagaaaagccctacagatgcccctggtgtgactacaggtaatgactcatcactgagcagtcaaatcaggtgggccgccatgatggattaaaagcccgttaaatcccaattagaagtgtagtttttctaatcaccatgagttcatatattcggttgggagctaattacct

SEQ ID NO: 13375 - DNA, 515 bp, Homo sapiens
  MAP TO CHR19.3; EXPRESSED IN LUNG, SIGNAL = 2.6; EXPRESSED IN FETAL LIVER, SIGNAL = 3.1; SWISSPROT HIT: P08472, EVALUE 9.40e-01; EST_HUMAN HIT: AW865800.1, EVALUE 0.00e+00; NT HIT: AF274048.1, EVALUE 1.00e-118
ctgggggtcagagacagttccctgggcagaggcactcaggggcacaaggtggtcggtcttagaaagatgctcagcagtgagcaggaacagaccccagaggggaggcaggaaggccaggccggaggctaagggcctcgcacacacagcgctggctggacggcttcaaagccagtccgggggccccgggaggggaggaaaggagagaggaagggctcgccccaggacgcgaggctcaccccagcaccacgttggcgtagagttcccgcgccgtcctggtctcgcgcttcctggagatctccgcgtcgtaccagaagccccgctccttggggttgtcggggttgtagttgagcatgaccacctggcccacctccaggtcctgccacttgatgatggtgcgggcgcgcgctcggacgtccctggagttcatctggaccacgccgttctccgggtagctgggaggaaagcccgggccttagaccccgtgctaagaccaagcctccttccctcaatgggaa

SEQ ID NO: 13376 - DNA, 591 bp, Homo sapiens
  MAP TO CHR16.3; EXPRESSED IN LUNG, SIGNAL = 1.2; NT HIT: gi13569912, EVALUE 1.00e-105; SWISSPROT HIT: Q15878, EVALUE 5.00e-01; EST_HUMAN HIT: AL597167.1, EVALUE 0.00e+00
aaggcctaaaataggcaggcactggctcaaggccacacagtcaaggccccagggttcgtccgcctcgggctcctgtcaccctcgggtagaaggtggcccaaggctgaagaccgaggtccagggaggcgcctttccaaccgtgccagagagggcaggtcgcagacgccggggctgcggggaatagaggccctcaccgcagatgccacctgccgtgccctgctctgcggccaacgccagcgctggacccggagctacccgcccccgacccggaactccctcgagtaccgcgcgagccgcttggtcgccattcccgacactccttgcttttccaagtccagctgccggaagtcgctcgacttctacttccggtccgttcaaaaagcccgcgaggctgaggggcggttgttgttggcagctgtggctaaggaggggagaacctctgctccccgcccgtcttctcttctgcgtttcccgggctagggggcgtggggagtggttttaggcggcgaagccgctcggcagcaccttccttctttgccaggcagacgcccgttgtagccgttggggaaccgttgagaatccggtaaccga

SEQ ID NO: 13377 - DNA, 585 bp, Homo sapiens
  MAP TO CHR16.3; EXPRESSED IN LUNG, SIGNAL =   1; EXPRESSED IN FETAL LIVER, SIGNAL = 1.5; NT HIT: AB044076.1, EVALUE 2.20e+00; EST_HUMAN HIT: AW246845.1, EVALUE 2.10e-01; SWISSPROT HIT: P34403, EVALUE 9.70e+00
atggacgaggcaatttgttcaacaactccgggggaagaaaatgcagacttctagccacctaagaggcatagattttatttggggaaaaccccagcaagtttccctagagaaaatttcttgctccccgagcagtttcaaagacattttgtttcccaacagatcatgttcttgacacgtgcgaagttacgggaaatgttttttaatcgacgcgatgcagtttatctcctttctctgcttttacagatttctgaaggctccattccagccgtgcaatgcccaggagtatccacaaggtgtcagcaccttcatgataagcagggcgggccgggcggtctttttctttttccttttctcgtagtagttccctggttggcctcaagatgacgccaacacccacggagtccgcccagccgctccaggtgcagcggccacgggccgggaggagcgcagcgcggtgggggcggaaggcgaattaaatacctttaggctttatcgccgcttattattccaggaacacgcgaggccctctgggacccgattccgcgttcggctcactgacttacaaggtcaagaagggggaaaatc

SEQ ID NO: 13378 - DNA, 520 bp, Homo sapiens
  MAP TO CHR16.3; EXPRESSED IN LUNG, SIGNAL = 1.1; NT HIT: gi15318237, EVALUE 1.00e-113; SWISSPROT HIT: P28284, EVALUE 3.70e+00; EST_HUMAN HIT: AA601490.1, EVALUE 0.00e+00
ccaccccaaagaaatgtcacttgcctgatgacatatcacagtgattctcatgaaattagatcccttccttagatccatgtgatgcttatggtccgtgcattccatttgcaaatctgtgaagactaataaggctcacactaatcaataccagttaagggtgtggggttgtacagcacagaagtggatgggtttaggctcttgatctacaaatctctgggatgtgaagtgagttgacctttctgtcatcttgataacccattagccccagagcactttggagacacgatcttattcacaaccgatgatgacattctcgaggccatattctattctgatgagatgtttgacctggatgtggggagcctggacagcctgcaggatgaagaggcaatgaggaggcccagcacggccgacggcgagggggatgagcggcccttcacccaggctggcttgggggctgatgaacgggtaggactggagctggggggctgtggggggacccccagataggtttcttccc

SEQ ID NO: 13379 - DNA, 575 bp, Homo sapiens
  MAP TO CHR16.3; EXPRESSED IN LUNG, SIGNAL = 2.2; NT HIT: AF254822.1, EVALUE 5.50e-01; SWISSPROT HIT: P40568, EVALUE 3.20e+00; EST_HUMAN HIT: AW997444.1, EVALUE 3.20e+00
tgagaaaatagggccactgcaggtcatttcaggtctcatcatggatgatctgatgaaggcatgttgatatcaataactccaaattcatgtttttgcctctatctatgtacaccagacatccaggtcccaccttgtaaaattcttctttcccgcagtgtctgggttttgcaaatgcctgttcacctccctgccctttgcaggcaccacgtggcatctgtctagttcttctgttcccgtcctcccccttttgtcaaggatcctcagagtcatggagcccatcgtgaagacatcgttgttcatccccagggggctgcctcgaccctctgtgaactgcttgtccttgaagcgagaggcagggctgtgctctgttctgggtggaagccagtccctttctttagttctcattccgctttgtggcccaagctgcacagcagccccagaggcctcttgtccaagtcatgtccaagtcaggccaaggggccccttgggaaacaggtgccatgcccttacccttttccccttttcccttcctctccattgtgcccctgaaaacaaggtaacacaaagcaccccat

SEQ ID NO: 13380 - DNA, 561 bp, Homo sapiens
  MAP TO CHR16.3; EXPRESSED IN LUNG, SIGNAL = 1.3; SWISSPROT HIT: P49187, EVALUE 7.00e+00; NT HIT: gi9630315, EVALUE 8.30e+00
ctgtgtcagatggctgcttcggaaagaggcaacacaggtacagcattctggatgtctgtggactccagttctagggctagttgttacttttaatgtgacattgctgcataattttttttggcgggggggcttgaaaacataattctctttactacatggcagaagatgatgcaaggttaattttgttaatttccatattacatattgaaagaatacaacaccagaatgctggaatcatccactttgttcaccttaagtactatgctcacattaccacacattacgtaggagatgtagctgcgtggtgtctgatcttgccacgtgtgttccaggtgacaacagctcctgaggtatgggtggcggcctgcctctttccacatgtacacctgcacagagttatccttgaatgcagcgagcatgtggagggatgccacccagtagttgctgatggctgtctggtggtcgttaaatcattgcagccagtgacggtggagaggaacaagaatggcccactggtaaatacaatcatatatcctattctggctcccatccagttaggat

SEQ ID NO: 13381 - DNA, 594 bp, Homo sapiens
  MAP TO CHR19.3; EXPRESSED IN LUNG, SIGNAL = 2.8; EXPRESSED IN BONE MARROW, SIGNAL = 3.3; SWISSPROT HIT: Q9U969, EVALUE 2.00e-20; NT HIT: gi14757758, EVALUE 2.00e-68; EST_HUMAN HIT: AL121522.1, EVALUE 3.00e-68
gaggccttcctctttcatcccaagtctgttcctgcaggatcatgcgcgcacagcccagtgtggtgctgagtgcggcgcacacggtggcagccaggatgtcgcccttcgtgcgccagatggacttcgccatcgactggactgcagtggaggcgggacgcgcgctgtacaggtgcagctcccaccgcgctgctcaggcccggcctaggggtggggacctgggggtggtcagaccttgctgacctccacgcccactcaggcagggcgaccgctccgactgcacttacatcgtgctcaatgggcggctgcgtagcgtgatccagcgaggcagtggcaagaaggagctggtgggcgagtacggccgcggcgacctcatcggcgtggtgagcgcgacccccacccactgacctctggccttttccaggccagtccctcgacaactcacacacatcatcccgggtaatccagggagtggtgaatgcagctcccgacctctgaggtcacccagtccactccccgcccagacctcatttcgttggaaaaaggggattccgcctgtcgtggatccctgtcctctccctctccccagagctctaa

SEQ ID NO: 13382 - DNA, 522 bp, Homo sapiens
  MAP TO CHR19.3; EXPRESSED IN LUNG, SIGNAL = 1.5; EXPRESSED IN BONE MARROW, SIGNAL = 2.5; EXPRESSED IN FETAL LIVER, SIGNAL = 1.4; EST_HUMAN HIT: BI009914.1, EVALUE 0.00e+00; SWISSPROT HIT: P08059, EVALUE 2.00e-04; NT HIT: X83461.1, EVALUE 6.00e-96
aggggtatcatgctctggtgtcccaggcaggcctgggtgagagctgttgcagagcagtgtgtgggccaggtcctcacacggggttacagctgccctcagcagggggctttgcaggcacaacgtcactggcgtgctggtcatggactgatctggtgtccagcttggggtgggcagatcctgggccctgccctcgactcacaggctgctccagccctgccccatccctggctctggggaaggtgaggctcagctcacggagcacagctccctgcctcccggagctcctgttcccatcccgctagcaaatgcttctttgcatttctctccctttgtttttttttttgtagaccaaagtgaaggagtttggaattgaccctcaaaacatgttcgagttctgggatgtaagtacaagcacttctgcactgggtgaattaagtgtcctttgccaagtcatggctgttgagaggcccatgaggtcaggtcagtgtttattgagtacctgctgcatacctagcttgggga

SEQ ID NO: 13383 - DNA, 517 bp, Homo sapiens
  MAP TO CHR14.3; EXPRESSED IN LUNG, SIGNAL = 1.7; EXPRESSED IN BONE MARROW, SIGNAL = 1.2; NT HIT: X69160.1, EVALUE 4.90e-01; SWISSPROT HIT: Q9KGK0, EVALUE 2.10e+00
agagtcctccccttgaaagccttttagtccctgacatccatcattgtgggggctcagcttggctgagctgaatatttatgagtcattatttaattaagcctttcatactttcattgataaatgcagtcaccccttgccccattagtccccaccaccaccttgcagcccacagccaacttccagcccaggcgctgctcctcattctgttcctggcatgctgttgactgccctccagtgtctaccacccactggagagaaatcaaggccgggattcctttcagtgcccccagtatgtggaggcaaagagagacatttgcactgaccattggtagatgctatagtttgaccaaacggcccctattcctaggtgtttggcaacttgtagcccaagtggaagacgggagagaacaacccaacaggcatctggggaggtgcctgttctcctgacgctgcctgtctgtctgatggttctattaacagccttcaagaaggatgaaggggagggtacaacagtgaa

SEQ ID NO: 13384 - DNA, 590 bp, Homo sapiens
  MAP TO CHR14.3; EXPRESSED IN FETAL LIVER, SIGNAL = 3.1; EXPRESSED IN LUNG, SIGNAL = 4.2; SWISSPROT HIT: P70345, EVALUE 2.00e-10; NT HIT: gi14751151, EVALUE 0.00e+00; EST_HUMAN HIT: AL157542.1, EVALUE 1.00e-119
ctcctgcttcccttctctcccacaggcggagttcacagctctatacggggacggggccctggaggaggcgcggcgtctgcgggaggggaactgggcatcagtgaggacagtgctgacgggggccgtggcactgggggccctggtaactgtaggggccttttttgctagcaagtgaaagtccagggccaggtggggctaggtgtggctgggggccaggagagcaggaacagaacagagaaatgcccttggaagaagtggagttggtggatgggtgggcatggaacaggatgggcagagaaagggtagtgtgtgagggagctgagtaggccaggtaggcgattggaagagtgagcaggacacagaggggaggggaatgttttggcaagtttaggggcacaggagatgtagtcgttccagggctgggggaggtgggagggatcacgcctataggtgtgggcacatgaaacgacctggaacttgcttcacagccctgaggaaggtggacttacataagcagctgtattccattagatgagtgggatttagggaacgcagaaggcacatccctttggaatggaagcttaggggtt

SEQ ID NO: 13385 - DNA, 550 bp, Homo sapiens
  MAP TO CHR18.3; EXPRESSED IN LUNG, SIGNAL = 1.2; SWISSPROT HIT: P01061, EVALUE 6.80e+00; EST_HUMAN HIT: BG008883.1, EVALUE 0.00e+00; NT HIT: gi14591917, EVALUE 6.00e-50
tgtttcttctttttgtcaaagcacttaagatctttttgtcatgaagttagtcacagtagggttactttttgtttcatagttaatgaccaaaaatttcaggaggaaaaattactaagacctcttaagtatcttttaaaaatatgttgaatgcttgaaagcttttttcaggcaaagagctcctttctatctgagccataagaatatgctaaaaacagttcataaggatggaatcttcagttcccatgtgtgacattctcaggtgcatacttgcagtgtggccatgtcagctatgtggcagagacctagattcactagtagtgtgacaggctaactgtaagctggttgtctgcttgcctccagtgtgttcattctgtgaatgaaatgtgtatttcttttgttatctaaaatgttctttctccccgtttctagctctcgtgctcattcccccatgatcgccgtaggaagtgatgacagtagccccaacgcaatggccaaggttcagatttttgaatataatgaaaacaccaggtcagtcctgctttggttttaa

SEQ ID NO: 13386 - DNA, 532 bp, Homo sapiens
  MAP TO CHR16.3; EXPRESSED IN LUNG, SIGNAL = 1.3; EXPRESSED IN BONE MARROW, SIGNAL = 0.75; SWISSPROT HIT: P01267, EVALUE 7.50e-01; EST_HUMAN HIT: BE671332.1, EVALUE 1.90e-01; NT HIT: gi13518417, EVALUE 7.90e+00
cctctgaggctcactggaagaactctttgttgtctgcacagaagatctcagcactaagcctggaacagaggagacttcagtcgatgtagggcatctccccaaactgcttttattctttatgcctcactgaaacttgaatcaaaaagcggctggaggaaaaagagctttgccaccgggcagtactgctgggtcttgcgtcacagagatgccttctgctcccttcttcagggagacctcagagtatgaaagtgctgcttacccagcagatgagatttagtccagtcatccatctgcgtggtctctgtggataaagtaagcgtttcattcaacttttaaaaatattgcaaattgaccctcgcacatcttttcttactgccggtcacctagccagcaaagaccccaggtgagatcccactggtttggaggaaggagaggaaagtccccacttgggcaaaaacaatttaggatacctgaagattgcaaagcccagctcctcacaaagggggtggcagctggggagaagctgaatcag

SEQ ID NO: 13387 - DNA, 510 bp, Homo sapiens
  MAP TO CHR18.3; EXPRESSED IN LUNG, SIGNAL = 1.7; EXPRESSED IN FETAL LIVER, SIGNAL = 0.83; NT HIT: X63384.1, EVALUE 1.90e+00; EST_HUMAN HIT: BF826743.1, EVALUE 1.80e-01
cggatcaacctaggaatagctcacgaatgtatcaaaaacaaagtacttttattcaatgttggagacatatagcttattgcatcttttaagcatttttctttgttttttaacaggttgtttggtatcaagtcagtaattcaaacggactgttcaagtacttggaagatcatagtgaacccggacctgtcgtggtaccaccacgccaaccctatcctcctgctggtgatgtactacactctggccactctgatccgcatctggctgcaagagccccttgtaaggacaaaaacattttcatgatcttgtctgcaaagtaacctagaatctccacgtgaaatgattcactcctgttctctactgactaatcgatactctattccaacacaactctagtgttctgggtatgatgttttaattctgcaaagagtattaagtgaatataaatactatcagatcaaagactagcttccctttactaccacaaactgctggtaagaatggcaggcagtg

SEQ ID NO: 13388 - DNA, 579 bp, Homo sapiens
  MAP TO CHR16.3; EXPRESSED IN LUNG, SIGNAL = 2.6; EST_HUMAN HIT: BI834039.1, EVALUE 0.00e+00; SWISSPROT HIT: P04258, EVALUE 5.00e-03
ctcccaaactggacgctggcctctggcctctgctcgggttcagcccagctcaccaggcctgtggcggggggcctcccctcccagggctggggcccccagaaggtgctccgggctgggacctccagtacggtctgggggcccaagttgctgggagcagaatttggggctgagggggcaggtggggctgttgctcgggcctccaaagtgcccacctgggtgggaggctcaggggcccgatctgtcagcagggggaccgcagagccataccagtcctcagagcgctctcgggcggtgcccatgggctcaatccacagctctcctcctgggcgccacaccagggtgggtgcacggtggctggggtctgggcggagagcacggcggaacaggcgttcagccaacacagcggtggtgaggatgaagagcgcagccagggtggccaggaccagcatgatggggatgcagggcccacagggcagtgagggccatggggctgcttcccatgcggggggcccctccacgcgcccagagggcggctctggagtcaacggcatctgagagacacaggggtgagaagaggaa

SEQ ID NO: 13389 - DNA, 527 bp, Homo sapiens
  MAP TO CHR18.3; EXPRESSED IN LUNG, SIGNAL = 1.1; EXPRESSED IN FETAL LIVER, SIGNAL = 1.9; EXPRESSED IN BONE MARROW, SIGNAL = 1.1; EST_HUMAN HIT: BE965441.2, EVALUE 7.40e-01; NT HIT: AJ276023.1, EVALUE 1.30e-01; SWISSPROT HIT: O95721, EVALUE 1.30e+00
cctggaagtttcagccactcaccccttctgctgattaggctgctctgtgactcgagagttctgccctggaggactgtcagcaaaacagttagcatgtccagatgtggacacttccttaaaggtgaagtacaacagggggaaaagattaatctgtaatgcactgaagtcagaaactaacccagcgatgtgttcaatgaaaaggaaaagatgctgttgaattttatctccaagtggtgtcattatttccaactaacttactccttcaggcgactgagatagtttattttcccaaagccctttcccaacattgcacacgccctcctcttgctagaacccagagaggaatgacagcagctgagaaaacattccagtccccaggaaaaggaaagactggctgatgattactgagcgggcggggatggcaggttgtcaccccaggtgcgcagctcagtttgcatcagggaaagggggatttcagttgggggcaaaggcctttttgttggctgtgcaagtcacagggggttaaa

SEQ ID NO: 13390 - DNA, 536 bp, Homo sapiens
  MAP TO CHR18.3; EXPRESSED IN LUNG, SIGNAL = 1.2; EST_HUMAN HIT: BF196457.1, EVALUE 1.00e-85; NT HIT: gi13645276, EVALUE 1.00e-111; SWISSPROT HIT: Q02487, EVALUE 6.00e-33
tccctggtaatgttgattacgtctgaagaaaagatatcatttcttcatttatgtagccttgtatacctttgtttgatgctccaaaaagacaaatattttcttcttttcttggttctcagtgttggaaagtaatatggtaaaacttctcttctccgaggacaatagaatagtatttgttgtatagactgaaccatcctccaaaatttggaagtcaggatcacttgaatgaattagatttgcagctgtaaagcactctttcaggttaactgtagaaaatatgcacagcaatcatttttaaagtaaaacataggatatagttttaacagtaatgtatgcacgtggggagagccaaaaacttaaaattcattatactgacacttgtaaatttttgaaaggacacataaaactatatggtgaattaagttgtgcttaaatacttacatcacttctaatacctacttaacattctcttaaagaagagacatttgctctgaagtaaacatatgtgagctccagtgtttgaatctttaaaccaa

SEQ ID NO: 13391 - DNA, 565 bp, Homo sapiens
  MAP TO CHR16.3; EXPRESSED IN LUNG, SIGNAL = 1.6; EXPRESSED IN FETAL LIVER, SIGNAL = 2.1; NT HIT: D87438.1, EVALUE 9.00e-43; SWISSPROT HIT: Q9XTA2, EVALUE 1.40e+00; EST_HUMAN HIT: BI913553.1, EVALUE 0.00e+00
aaatgagcggggatagttcctgagacacacttttattaaagtgcattttcaggattttccttcatatgtataaagcacaccttctgttgctgttatgaaagctaataacattaaaaatatacttaagtgtcaacttgcaacagcacagcctttatttttttaagtacatggtgagtaagcaacattaaataattagttcttagactggtgttttttcttccagtgtgaatctggcaacattggctctgggttatgtctcctcatcagtgctggtatgttgttgatttactgaatattggtgtttttaagaatgaatttaaaatcactcaatccctcctggctcttcacagtttttatgaatggaggagggtgttaggtttgtgtattctgataatctaacaaagagttgttcttgttttggtaggctgcagccaaatgtgatagcatgacgatgactcctggcccgtggctgggtttgccagctgttcctgcggtgacactgtataaacacgaccctgccttggtaagtttcccctcactgcggagggagtgggtgtggctaata

SEQ ID NO: 13392 - DNA, 518 bp, Homo sapiens
  MAP TO CHR16.3; EXPRESSED IN LUNG, SIGNAL = 3.8; NT HIT: AF282903.1, EVALUE 0.00e+00; SWISSPROT HIT: P46467, EVALUE 1.00e-28; EST_HUMAN HIT: AI337255.1, EVALUE 1.00e-122
gactgtgtcacctgagcagccggggagcaggaccaggagctgggaaaaaaaaaaccgaacatcccgctcttactatgagatttttctcagcagtggccgcgggcactcacctttttgaagtgtgtggccgactgcaccttcctcacgggctgcatgagagagtcccgcacgatgatgctgatgtccgcgcccgagtagccttccgtcttccgggccagctcgtggatgtttgcatccgtgaggttgtggggagtgctcccgagatgcaaccggaacatctgggcgcgggcagcttcctccggcaaggggatataaattcgtttttcaaacctagagagcccagcacacggcaggagttgacagcggatgatggaatggtattcacggaaggggaggcacgaagatttgagtgaaacggacgcatttcatgggccagtgatgctggcggcacatcctcaacaagccagcctcacaaagggctctgcttggcaggcagacgggaagactccagggaaaag

SEQ ID NO: 13393 - DNA, 573 bp, Homo sapiens
  MAP TO CHR16.3; EXPRESSED IN FETAL LIVER, SIGNAL = 1.2; EXPRESSED IN LUNG, SIGNAL = 1.2; EST_HUMAN HIT: AW951140.1, EVALUE 5.20e-02; NT HIT: AB046558.1, EVALUE 1.40e-01; SWISSPROT HIT: O08710, EVALUE 3.20e+00
gcaaataaagtgggctctgcgagatgtctctcagaccactgccagtcctgatggtctggagaagttcatagaattgggagatcaattagtatcgaatttccagttacccacctgtttacatttttcctatttttagattgtgttaacagaaatgtactatgatgggttccatcgttccttttgtgatacagacgacctggaaacagtccatgaaagcgactgcatttttgcctttgagactcccgaaatatttaggcctgaaggaattctcagtcaaagaggtaagggagctcctgtttccataatgccacctgggtttgcaggtttaactatagtctacctttttagttgtctattatataatgatatacatttttttttaaattgtggtaaaatacacatgattttttaatgatggtataatggtaaaaatcttatagtaatattttcctagaagaaggcagctcttactgttttaggcaaagatatatccatagtttagttgggaaaacctcttattgagatttaggactgactgtgacctctttaagtagcctttttggcatcttatca

SEQ ID NO: 13394 - DNA, 569 bp, Homo sapiens
  MAP TO CHR18.3; EXPRESSED IN FETAL LIVER, SIGNAL = 2.9; EXPRESSED IN LUNG, SIGNAL = 1.1; EST_HUMAN HIT: AV706762.1, EVALUE 0.00e+00; NT HIT: Y16975.1, EVALUE 5.40e-01; SWISSPROT HIT: P98167, EVALUE 1.60e-01
cccattgttgtgaggtttcctccaactggacgttaagttactgagaacaggaatcagggatgcgattggtgcgtgtcttctgtggctacctggtcagcattcataaacggtgataatggattgaatgctgcagtttcaaccttcctgacaacagaggagagtgttactttggggcatgaacagttattgatccagctgggccttggttaatgagtcatttggcttacagtgttcccgagtcacaggctgtcctgaagatcacctgctgactcattggtgcccttgtttccccgaggcctcctgcagtgacgtgctgaggagaggagcccaggtctgcgggtgggggacccgtcctctgagaagcctgcagcttctcctccaggacccttccagcccacctggctggctgtggggataatgggcacttgggagcattggagggggaggaagcatagagaaagcagcaggagacgcacctggaagcccaggggagggaagtccacctccctgcaagtgtagggcagtgagaggagccctggcaccagcagagcaagaaagaaatgcatgca

SEQ ID NO: 13395 - DNA, 592 bp, Homo sapiens
  MAP TO CHR16.3; EXPRESSED IN LUNG, SIGNAL = 1.1; SWISSPROT HIT: Q05952, EVALUE 5.00e-41; NT HIT: gi14779951, EVALUE 0.00e+00; EST_HUMAN HIT: AA634325.1, EVALUE 0.00e+00
cctcttccttcttgcctgtggttcctttgtgacctggctgcagccttcctctcactgcccccaaggtctgctctccatcatctgtgggctcggtggcccttccccacctccttaaagggtacctgagctccgcgtcttggttttgtacacctgctggatcctcttggccatttttttctttttcagcttgccttccaagttctttctgttcttggggcagcggcagtgcaggatggtgggccgcatgggagagtggtgggagttcatagtctttttgtggcgctttggtggtggactagtgttgggactctggctctggtggccggatgagctgtgggctccagttgggttgcggtggctggccgggctctggctggagctctggctccggctgccacgatggctctgtctgcaactctggctgaaggtttggcaatggcgggtgcaggtgcggctttggggctgagagttgctatggagctgagtgtgggtgataggaaggctgtgagtctgggtgtccataggaggccacgtttggaggggcagggctcctcctcatcctctcccagcaggcctagctttacagaggccc

SEQ ID NO: 13396 - DNA, 545 bp, Homo sapiens
  MAP TO CHR16.3; EXPRESSED IN BONE MARROW, SIGNAL = 0.94; EXPRESSED IN LUNG, SIGNAL = 1.2; EST_HUMAN HIT: BF880873.1, EVALUE 1.90e-01; SWISSPROT HIT: P48733, EVALUE 1.70e+00; NT HIT: AF146793.2, EVALUE 1.30e-01
tgtgtcctgaaagcccctacttcaatataaaatcattgcatacttgcaaattattttacaagcatagctagaaaaccatgaaaatttttatggatgacgttaatttggtgtgacaggtgatgctgtcctcctaaaaccaaactgctaacagagtgtggtgtaggcagctgggcccagctttttgagtctggcctgcacgtgcttccacgtaccttacagttactcaccctccctcttttttgggttcagagccagggaaatgagcactgtgtgtgtccacaggcaggaattggttgctttgttcaggggggcctttgtaggtgctcactgaatgcttgtggactgaaaagaaggaataaatgatcagttaaggccgcattcattcaaggtacgtaacggatatttgagaatgaatgaccacagtgattggtgttttgtgttgttggtagagtgatgtgtggcagtaattcggccataaggaaggtgagaaaaatcatcattgctaacatttaagggcctgccaagccttggacgtgggttaactc

SEQ ID NO: 13397 - DNA, 584 bp, Homo sapiens
  MAP TO CHR14.3; EXPRESSED IN LUNG, SIGNAL =   1; NT HIT: AL161549.2, EVALUE 8.70e+00; EST_HUMAN HIT: BI910471.1, EVALUE 3.00e-68; SWISSPROT HIT: P27759, EVALUE 8.50e-01
tctattcattgctttcgccctgttgttatatgatttcagctattggaatattaaagatggattcttataacattttgataatcaatcatgtgataagtttagcaatgccaaactgtgctggaaacactgataagaattacaatgcatggtagagagtcactggacccagtataaatttatgactttcttttgtctaggatggaaagaactgttgaagaagcttttatacttcttgtttgcttgaagccttggagggtagcaagtagtctggagaaaaaggagaaggaggatgaatctttccagctgctacttggctcacgctataatgtattagagggtaggtacgtaggaaccctcaaatatagagagaataagaaaattgtggccaatggtacacgttagccaaatggtgaaccagcagatcagcagtagtttttaggacctagtgagatgattatatgggatagatgtatttcaatgattgctggatgggtataaggaaggtaaatggaacattatagatgtaaaattatgaataagatatgtactcgtgtaatgtcccctgcctcagtccctccattctt

SEQ ID NO: 13398 - DNA, 527 bp, Homo sapiens
  MAP TO CHR14.3; EXPRESSED IN LUNG, SIGNAL = 1.1; SWISSPROT HIT: Q05319, EVALUE 1.70e+00; NT HIT: AF045551.2, EVALUE 2.00e+00; EST_HUMAN HIT: BG764414.1, EVALUE 7.40e-01
gaaagaggagagcaaaggggcaaatgttggccgtgcccattcagacactgtccagggaagaagaatcttagccaaaagattctgtgatttccaatctctaggcaaaactatcacatctatgtggttaatgggtattagctcaatgcccttacatagtttgtgtatcacttaactttccttgttttcaaagcaaacttcggatttgcatgtagatctgccttgagaggaaaatgaactaactgtaggggttttgatgcctctgatagagatttctcatgacaggtcctaagtgtggaccatcagaagatttggcttcccacgtgtcttcctagaggtagaaaatgtacagatggtgccagtgaaggcacccgtggtcttcctaacagctatcttgttgctggtgcttgtttcaatctctgtgcatttccattaagctgagccagtccaggacttaatcatgcctggcatcaaagtctccctggccgatgaagcctttgttggtgcatgggcggcaccactatgatatt

SEQ ID NO: 13399 - DNA, 598 bp, Homo sapiens
  MAP TO CHR16.3; EXPRESSED IN LUNG, SIGNAL = 1.1; EXPRESSED IN BONE MARROW, SIGNAL = 0.96; EST_HUMAN HIT: BG910194.1, EVALUE 0.00e+00; SWISSPROT HIT: P25134, EVALUE 2.00e+00; NT HIT: gi14777067, EVALUE 0.00e+00
gctcgtccagtctttccaagtgccaggacacctgcagtgcctgtgctgagtgacagcaagccctaagctccgaccgccccattcctgctactcaccagacatggcccacattaaccagggacatgtagaggccccacagggcagccatgagaagcatgttggcgcagcccgtgatcagtacgaaagacgagatgcccagtccgagaagagccagcaagtccaggttggagttcatgtctgaccagtccatcagccagaggatggtgggcatgtagctgaagacttcccagctcgtcctgtcctggaagtactgctggaagttcttcaggaacactctgcagggaagcagccccctgtcaccgatgagctgcttgttctgatggaaagccaccaggaatgccacgactggaagaaaaagaagacaaaacaagcatgactaggaacaaaccacatgtggacaccatgggcgcagctcagaatgcggggcgaggcaggcgggaaggggaggcagagtctggctgacggtttggggccaaaccctagactcaggagtctgagtactttctcaagattttgggggaaacactggaaaagccaa

SEQ ID NO: 13400 - DNA, 563 bp, Homo sapiens
  MAP TO CHR14.3; EXPRESSED IN LUNG, SIGNAL = 1.2; EXPRESSED IN BONE MARROW, SIGNAL = 1.1; SWISSPROT HIT: Q09142, EVALUE 7.00e+00; NT HIT: AF053577.1, EVALUE 2.00e-03
gaggcagtgtctggctcttctttctttcgctccccgcccccgccaagaggcctataacccagagtgaagcttgtagggctgcttggtaaagccatttcattcacctacagccctgccccaagtctctctaagtagtcccactgctttctagcctactccccagtggctattactagataaaagtcactaaatgaaaaacagatattccccacacagaagagagacagagacagattttttaatcactaatattttttggtcttaactacagttatttacttgtaaccttggcagcagtttttgtaccactttccaaaaaaagaaagatggtgactgattcagataagatggtatcatagaggccagtggccatgaactgaaataaagaagaaagaaattctgataatatgaataacagctttgatcatgaaaattattcagggcaaagtgatgtattaggataacccatttcaaattgtgggggtttgctgtagtaactgggaaacacaaatacttgtagttgtagaacacattggtttacaagccatcaatgctcacaacaa

SEQ ID NO: 13401 - DNA, 550 bp, Homo sapiens
  MAP TO CHR18.3; EXPRESSED IN LUNG, SIGNAL = 1.1; SWISSPROT HIT: P34036, EVALUE 4.60e-01; NT HIT: gi14763118, EVALUE 4.00e-60; EST_HUMAN HIT: BF091438.1, EVALUE 0.00e+00
cctgccagaatccacataggaaaaaggcaaaacaacactaaagctaaatgaaggactaatgtggattatcctgtaaccaccctatatagcatcctgtgattgtaatttcaactttctttttcagtttgacattcttcttggtcaacataatgatgaaatgcaagaactgtcaggcaatataaaggaagaatccaaatctcaaaacagcaaagacagagtgatttgtgagttaagagcagaggtaagacactgggtaaagagtaccatatatattaaaacataactgactgttgttaaatgccatactattttaagtagggtaacggtcgtgcctttggttactttatgaaagtgaatgctgctgctaatgtaatcagcttatatgtgatttaaaaggctgtggaatgacattggcccataactagatctgaactatttgaatattacaaagatgaaatatttgactatgaaactatcttatagccaatacaagtcttactgtgcataaatattttttaaaagttcaaccagctgctggatcatgtgtgtt

SEQ ID NO: 13402 - DNA, 530 bp, Homo sapiens
  MAP TO CHR16.3; EXPRESSED IN LUNG, SIGNAL = 1.9; EXPRESSED IN FETAL LIVER, SIGNAL = 2.4; SWISSPROT HIT: Q9Y613, EVALUE 4.00e-34; NT HIT: gi16164709, EVALUE 1.00e-108; EST_HUMAN HIT: AA311166.1, EVALUE 0.00e+00
gccctcctcactctgtcatctcctgcactgcagtccagggtccagatagatttccgggatacagcaccttcacacctccaggccaggacccttgcttagtcccagtgcctgcaccaggtcatctccgagcccactcttcaacgtccttctcactgcagggacagagcagggttggagggggttgatggggttcaggtgggcagtgggattgtggggggttacttacaagacttgcggttgccgcgggaacgcttgcgttccctagcagctaaggcacgaggactgctcttggtcactgactgcaccagaaggtccatgatctcatctgatgtatcactgggtaaactggagcctgggggttcttctggggatgcagtggagggccccactgtgggcatgattggggagctgctctggaccatgcctgaggaaggccagatagcaaagtcaggccaaggtggcactggagcccattccccacagctgctatgggcctcacctctgctgcggcgattgtgtgtggtgtcctc

SEQ ID NO: 13403 - DNA, 506 bp, Homo sapiens
  MAP TO CHR18.3; EXPRESSED IN LUNG, SIGNAL = 1.4; SWISSPROT HIT: Q9Z0Y8, EVALUE 1.20e+00
  unsure 425
ggacagtgcaaaagcatcagtaataagtatcacaaattgtggtgagatgtagggacttgggagaaatgatggtttatttggtgtacccaaagtttatctcatgatatctgtgataccagatgaaatatattactacaacatctgttgtctttttctaaaaaaaaaaattgaatctcatgataataaaaatagcccgggatgtttagtttgtgttgggaggaaaaaatatttcaaaagtcaggaagcttggtgtaggtcccttttatttcaaattattaaaaggccagaaaataattgaactttctcccttcagtttgtttatcaagcctggattactgatcctaaaacagcactccgacaaagacacaaagagaaaaaaaggtctgcaagagaagaacggaaacgaaggcggaaaggatccaagnagggtgagtggtgggtggggtggctgtggtgggtgtggcaggtttcaggctgtgctccccagccttgtctgcaaaggacag

SEQ ID NO: 13404 - DNA, 546 bp, Homo sapiens
  MAP TO CHR18.3; EXPRESSED IN LUNG, SIGNAL =   1; EST_HUMAN HIT: AV689461.1, EVALUE 0.00e+00; SWISSPROT HIT: O43309, EVALUE 1.00e-40; NT HIT: gi14761661, EVALUE 0.00e+00
tgctgtaagttaactgcttttatatccttcaggaaagaagagattactcacactccttcgcaagcacagaaccagttgtactgagctttttgctaagctgtttcagccaagaatggctgtggaatctggagtgatttcaaccctgatacctcaggatcctccggaacaagaactaatactagtgaaagtagaagataacttttcctgggatgagaaatttaagcagaatgggagtactcaatcctgccaagaattgtttcgtcagcaattcagaaaattttgctaccaggagacacctgggccccgggaggctctgagccgactccaggaactttgctatcagtggctaatgccagagttgcacacaaaggagcagatcttagaactgctggtactggagcagttcctgagcattctgcctgaggagctgcagatctgggttcagcaacataatccagaaagcggcgaggaagctgtgaccctgttggaggatttagagagggagtttgatgacccagggcagcaggtgggaacggagaaaagtga

SEQ ID NO: 13405 - DNA, 593 bp, Homo sapiens
  MAP TO CHR18.3; EXPRESSED IN LUNG, SIGNAL = 1.1; NT HIT: AF139188.1, EVALUE 1.40e-01; EST_HUMAN HIT: AI014952.1, EVALUE 0.00e+00; SWISSPROT HIT: Q19311, EVALUE 7.60e+00
ttttcataatgcaccgtactccatagatttctccctcagtctacttttggacgttcacaatgtctgcattttggagtcagaagagaaagccatgaggagaggaaaaagtaacttcaataaactatttaacacaaagaactggatggcagccgtcagcctgaatgaatcatggagtgagagactaaggtgaatagtaccttcaaggatctccaaggctccatacaaagtagtgcatggctttcagattcttcaccagagcaagggtattaaacaaaagggccccaggtgtccccctgtaagctacccaattagggttattaatttgtaaaattattttagggatttaattatgttatctttcttcagagttcatttgtattccctaatttctgtaaaggtctgctgaatatttagaggtgtctgagattcagtttataactcatcatagaggcatagaataaaagaaatgatgttctaaaaacctgaaagaattggtatgttttacctggattctcctctcaccacggagcaacatagccattgaaggacacaaagaccaagcagaaaagcatggcaaagtgaaggcagctttc

SEQ ID NO: 13406 - DNA, 500 bp, Homo sapiens
  MAP TO CHR16.3; EXPRESSED IN LUNG, SIGNAL = 1.1; SWISSPROT HIT: Q41364, EVALUE 1.40e-01; NT HIT: AF121239.1, EVALUE 4.70e-01; EST_HUMAN HIT: BI460604.1, EVALUE 1.80e-01
agagccagagaaaggttgaaaaacccaatcagtgcaactcccagcctgcactctcaccactccacaaggaacatcaccctgctcccggcccagaggggcaagaaagccacattcaccatgaggacggtgggcatgatgaacgctgcgaaagagagaggcagtaagtgctgtgggaatgcccaggaggaagcggctctgcctggacagctggaaaaggttgggttatgaagcaggggtgcattgctagatgggtcggggagggttggtgcaccaagaaatttggaagggggcagcatattcagcaaatggggctgggctgatggcatcaaaggatggggtgtagacagtgagggattggaatgagatgagaggcaggcagtctctcgagactcccttaaatctcaggctgaggagttgggtttttctttacttaacaagggctttaaagcaggagagctcatcaatagtgatcatagtctgtgtttgggagctgcctcagt

SEQ ID NO: 13407 - DNA, 506 bp, Homo sapiens
  MAP TO CHR18.3; EXPRESSED IN LUNG, SIGNAL = 1.2; EXPRESSED IN FETAL LIVER, SIGNAL = 3.4; EST_HUMAN HIT: AI281977.1, EVALUE 9.00e-90; SWISSPROT HIT: P42765, EVALUE 8.00e-25; NT HIT: gi15295627, EVALUE 6.00e-90
tgatcaaagaagcaataggagtgaacaccttcctttactctactaacctgcaggacattgcccataatcacactgtcaactgtttcaggtgagactttgccagcagacaaggcagccttggcagcaaattcagacaagtcagtagcagtgaagtctttcagaaggcctccgtaagctccaaagggcgttcgcttagcagcaactacaaacacacctattgcaacaagaagagatttgtaagccatcacaggttagtaaatacctctaaatgcttcgaataatctcactgtgaaaccttacacaatttaaaattagataatggaaatttctgttaggcaataatacctagaacaagtcatacccatggaagcagagtcttaaggactaccagtttgacagtttgatctttacctacatgcaggtaccaagaactgcactgcatgctgttaaggaagaagaccaccacttctcctgcgcaccccgccccccttgcctagtttataaaa

SEQ ID NO: 13408 - DNA, 518 bp, Homo sapiens
  MAP TO CHR18.3; EXPRESSED IN LUNG, SIGNAL = 1.3; SWISSPROT HIT: P48236, EVALUE 1.20e+00; NT HIT: gi13384601, EVALUE 0.00e+00; EST_HUMAN HIT: AA456746.1, EVALUE 0.00e+00
acaaaccatttccgtcgaactagaaatgcttagctcttatgagaatattgtgcttttaaaaaaaattcaaatgttaacattatttgcagtctgtgttctaaggtttcaatttgttttttctctagtccatttgatcattgtctctggtgagcgatataggaatattaatttggcatagagatcttcttctagctccagttctcctgtctctcgaactaaaaaaatatctgtgcacaacttcaaaattcgatccacatttggaagctcttcaaacatgatggagtgagaaatcccactgaagaattcacggacaaatttcccaatcacaaggacaactgaagcatataatcccataatactgaaaaaaacagtaagtagaaattgcatacagcagttaaatatagttaataaagaaaagcatgtctaaaagaaaaaaatattactttccctcaaattctgtagaagaaataagcaaatcaaatcttacattttttccctttggttaaaaagttgacttt

SEQ ID NO: 13409 - DNA, 501 bp, Homo sapiens
  MAP TO CHR19.3; EXPRESSED IN LUNG, SIGNAL = 1.2; EXPRESSED IN BONE MARROW, SIGNAL = 1.8; SWISSPROT HIT: Q44258, EVALUE 2.10e-02; NT HIT: gi11425216, EVALUE 4.00e-88; EST_HUMAN HIT: AL558925.1, EVALUE 1.80e-01
gagaggtaacagccccttcctaaggacagctccctaagggagacaggggtgtgaccgaccacctggtccctgggtgctagggcggggcctcgaagttgtgggcggagctcggctgtctgggtgggcggggctgctgacctcttgacctactcccaccctagaggtggcctacattggcacccagcacccccagcacaaggcggcggtgatgctgtgcttggcggcgggcaaggccgttctgtgcgagaagcccacgggcgtgaacgcggcggaagttcgcgagatggtcgcggaggcccgatcccgagccctcttccttatggaggtgagggcagaggagcccttccaatatccagcgtaaaagtgcttgccattaaatatggttgccagtgcgcggacggggtcagtgcatttgccaggatgtatctgaatctccttggcagcatctattaccgtgaaagccattgcttttggcccttagcaaacacggcaaggcttact

SEQ ID NO: 13410 - DNA, 520 bp, Homo sapiens
  MAP TO CHR16.3; EXPRESSED IN FETAL LIVER, SIGNAL = 2.1; EXPRESSED IN LUNG, SIGNAL = 3.4; SWISSPROT HIT: P49588, EVALUE 4.00e-16; NT HIT: gi16179468, EVALUE 3.00e-58; EST_HUMAN HIT: AA371724.1, EVALUE 1.00e-104
tcaccaataagaaggcctgggtaaggggtactggcaaaggtaaccaaccggtgggcagaaaggctgtttcgaatgcaggctgtacacacacaggcctcagccaacaaccttaagacctaacacttcccactggtgcgaggtggtgctgacctggggaacttgacacaggcacgtgatcttgccagcctcattgtccaccgtgaagagcatggcagaagtctgaggggagtgcatcttgaagagcttcaaggcttcattcagggcctgtggggaggacctggctcaggccacggtgctggagcagggaccctcactagtgtgagcatttgcagccctcagaaggcctgccacccacccctaccccttcccagagcaggggctgtgcccagggcctgtggggaggaccccagcgccgggccctgcccctaccctggcccaggtatgcctcccacatgcagggagctgctgctcctcccaatctcaatcccagaccgtgggcccttaggcaaccacttcgctc

SEQ ID NO: 13411 - DNA, 548 bp, Homo sapiens
  MAP TO CHR14.3; EXPRESSED IN LUNG, SIGNAL = 1.3; EXPRESSED IN BONE MARROW, SIGNAL = 1.4
agatggacgaaacacaagggaataaataagagttgagtttagagagaagaaccagacatgattttgttcaaaatttcattctttattagcaataaattaaaataaggtggatttttttgatgagtcataagatagatgttgcatgaaagggcagtggaatcaacaggcacaaaataagatggccaaacatggaaaaatgatcataggtagatcatttgttccagttgccttttatcttttacacctgtgtttgaattcacccaaacttgcgtaaatcctttacacagctgtcgaaattgcacctgaaaaaaggctgaagtagtctcagacgggctaacatttcatcatcctgaatacttaaacccaaacaggtttaaacactttgccaaacccaaggataacgggcttcccattgatcttcgctctgctcaaatgttcaactgtgtgtgccaaaatgtacactgcagactgcattgtgtcgattccaacaatttttagctgcagacaagctcaaaaacaaagttttaaggatggcaggtctcctttaa

SEQ ID NO: 13412 - DNA, 501 bp, Homo sapiens
  MAP TO CHR14.3; EXPRESSED IN FETAL LIVER, SIGNAL = 1.7; EXPRESSED IN BONE MARROW, SIGNAL = 1.4; EXPRESSED IN LUNG, SIGNAL = 1.4; SWISSPROT HIT: P03304, EVALUE 3.10e-01; NT HIT: AF202635.1, EVALUE 9.00e-12; EST_HUMAN HIT: AA663932.1, EVALUE 2.00e-16
cttttctggattgggtccactgacgtgttttccttgaagtcaggaagtaccttaccaataaggtactgcctttcaaaattctttcgatattggacaatgcccctggccacccagaaccatatgagttcgacatgaaaggtgctgaactggtcttcttgccctcaaacacaacatctttaatgtatcctctagatcagggggttgtgaggacctttaaggctcattatgcaggatactctatggaaaggattgtcagtgctatggaagagaaccctggtagagaaaaaatcatgaaaaagctgttaaagctatcaagcccaaaagaaattcctgctggagaaaagctgtgtccaaatgttgttcatgacttcacggaatttatgacagagtcaatcaggaaaatcatgaaagagattgtggatatggcataaaagatgagggatgaagggtttcagatatgcacctcagagaaattcaagaccttgtagacgccacaccaga

SEQ ID NO: 13413 - DNA, 600 bp, Homo sapiens
  MAP TO CHR16.3; EXPRESSED IN LUNG, SIGNAL = 1.9; SWISSPROT HIT: P53990, EVALUE 8.00e-27; NT HIT: gi7661971, EVALUE 1.00e-97; EST_HUMAN HIT: BF894026.1, EVALUE 0.00e+00
gttaggcagcagatccttgggcatgtgaaatagtcccttaatgcagaaagagatcatattactcctttctcaaattccagaaatgatttaggtctctgaatcaaaatatcttacttcatagactggataaggccaaaccgagccagcagcaggtcacagtacagctccaggatctccatggcctccacgaggtagtcttcccggataatgtgctccacacggatccgagctcgttcatctttcccagcagccagatagtcagcaatctccttccttgctttctgggccagttccgctaagacacaaatcccactccgatctcacagcagtagagcacttgcatctggcctacaggccaatctccccccaacaggaagaactgggtgtttctactatatcctagctcctctcctttagcaaatctaatcccatcccctctactgtagaatttgctactctgtctaggtgagaaaatatagctcatgtggcttgacatttccaactcaagagtcaggtgacctaatgccacaacaacagagtatgtccctttctctgcaaaaaaggtactcagtctaaaagtcacaaagggcagaaatggat

SEQ ID NO: 13414 - DNA, 585 bp, Homo sapiens
  MAP TO CHR14.3; EXPRESSED IN LUNG, SIGNAL = 6.7; EXPRESSED IN FETAL LIVER, SIGNAL = 8.6; NT HIT: AF111168.2, EVALUE 0.00e+00; EST_HUMAN HIT: AL524208.1, EVALUE 0.00e+00; SWISSPROT HIT: O95433, EVALUE 5.00e-29
gatatgaaacctccgtcccctctgcctttcccaggacactttgccaccatcaccttgaccttcatcgacaagaacggagagactgagctgtgcatggaaggtcgaggcatccctgctcctgaggaagagcggacgcgacagggctggcagcggtactactttgagggcattaaacagacctttggctatggcgcacgcttattttagggccagcggcaggggactccagcctgctggacacttcagtccagctctctcctgactggggcttgcgactcacaggattgcatcgtcccagctgctaacttggggccggggcccctcccttccacatataccttgggtttgtgcatgttttctgctgggtgggttcagagggcaatttctcttttatgtgtacatatgctaaataaacataatttaaaaaacatgcgtgtctggaacctatgttgattgagtggctggtattgagagctcccttgaaggttttgaattcaaaaaagaaggacagggtggacagccttgtctctattctgggtaagtgtaggtaattaagaggcacagagcctgcttctcactaccagg

SEQ ID NO: 13415 - DNA, 546 bp, Homo sapiens
  MAP TO CHR18.3; EXPRESSED IN LUNG, SIGNAL = 1.3; SWISSPROT HIT: P25391, EVALUE 1.00e-16; NT HIT: gi14762393, EVALUE 4.00e-57; EST_HUMAN HIT: AA984262.1, EVALUE 7.70e-01
tatttgcgagcgtgtgagtcacataacaatctgtctatttgtaggttggagtccgtctctctggacatagccagctctaatgccatcgacctggtggtggccgctgatgtggagcactgtgaatgtccgcaaggctacacagggacctcctgtgaggtgacgcttctctcttcctgtctttttcctttcgttccttcctaaggggaaaacagtgcactgaaggggatgtcatggcaaacatttgatttttagctttagcagcccaatgtttggctcagtcttttttgggcaatagaaatattagaagtcacattgtttaaaaaaatcagattcctccaccaggaatgggctggagcaccggacaatattctgacttagtgctgccctcttgccttagtcaacaagaaacttgcaatactcatgccattgactgtgtttctaaggaggatggaacttgatcatatctgaacatttacaaatcaccagcatgtgacctgggtagctttagacaagccagccctattttgagaccttttatggcccctc

SEQ ID NO: 13416 - DNA, 536 bp, Homo sapiens
  MAP TO CHR14.3; EXPRESSED IN LUNG, SIGNAL = 1.5; EST_HUMAN HIT: BI195775.1, EVALUE 5.00e-79; NT HIT: gi13654827, EVALUE 3.00e-79
tgtgcccatggtgattctacttttgctagaggaagagctagattggataattgctttttttgtttgtttgtttttgataattgcttttttaaagttggtgacaaaggttgccaggggagctgagattaagataatgatattactttcttccttgccttcctttttaggatttatttccaatgaacatggacaaaagagtttacagcaaacagtcccaagcagacttcttttttgtttttgttaatactagggtatcaatgtaaatttttctttgttcttgttttctttttccttcagtccccaacacccttcctgcttatttttccaatataatacacagctgggcccaccttaccacatcctcgttgataccaactttatcaacttttccataaaagccaaactggacttagtgcagtcaatgatggactgtctgtatgccaagtgtgagtatcatacttttatgtttccgtgacatttgttcagaataattatatttatacaaatacatgaaaggagggagatggggttcttgt

SEQ ID NO: 13417 - DNA, 543 bp, Homo sapiens
  MAP TO CHR18.3; EXPRESSED IN LUNG, SIGNAL =   1; SWISSPROT HIT: P77423, EVALUE 3.00e+00; EST_HUMAN HIT: BG677092.1, EVALUE 0.00e+00; NT HIT: gi14760257, EVALUE 0.00e+00
ggtgttgacctgaacagtctatgaataactacatatataaatgtatgtgtgtgtgaaaacttaccattagccaggatcttgggtttatttgcaggactgaagcaaacattatgaaagataagaagaggcaataaagggctgctcttgtgcttgtatttgctcatctctgttagtaagtctagacagccatcaagcctcagaatcatttgttgcccatcttctccagatgatatattcaggagtaacttcaaccaaagaatagtcagattacttagatgtttatttcctccttttggcaatgctagagagaggaagttctgtaagaagttactctgtggataaatagagagaatattattttcttctcatctttttcattattttcctagtcccttggtgaccaattaactaacattctgatatactctccctctacattaatttctcctttctaatagcttctgaatattccatctatattatttccaagcataagtgaaaaaggtaagaagaacaaaatagtgctcaagttttaattcctgc

SEQ ID NO: 13418 - DNA, 515 bp, Homo sapiens
  MAP TO CHR16.3; EXPRESSED IN LUNG, SIGNAL = 1.1; NT HIT: AE006634.1, EVALUE 7.60e+00; SWISSPROT HIT: O95972, EVALUE 1.60e+00; EST_HUMAN HIT: BF913104.1, EVALUE 7.20e-01
tgagggcttgggacataatcaaaaagaaaagccaaaaatatcttgctatattttgcctgtttcaagaaggtttcttagtattgaaaaatcactaactaaggctcaggtcctagaaaaggatagatgagaaaggtttatgaccctcaggcatctgttttaagacaagtgatggggattgagtgcccatggggagagcttggcacagcagaattgaaggaggcaaggatgctatgagttgggtgtgttgcgggaagctgtgattgaggaaacagatctcaaaaggggtaatgagactgcattactatcttctgtcctccaggatttggctttgcctttgaatgtcttctgagtgagatcaggaataaaagacactatgttcactcttgcatggcttgctttcagatattgggttatcagagcatgggcccatcagtcatgatgatggatttatgggtgaagagatatcttggaaggagatatggtaagtttaccaggggagtggtgggaagtccctg

SEQ ID NO: 13419 - DNA, 590 bp, Homo sapiens
  MAP TO CHR19.3; EXPRESSED IN LUNG, SIGNAL = 4.6; EXPRESSED IN BONE MARROW, SIGNAL = 1.9; SWISSPROT HIT: Q9NXH9, EVALUE 2.00e-44; NT HIT: gi13632544, EVALUE 0.00e+00; EST_HUMAN HIT: BE731996.1, EVALUE 0.00e+00
ctaacgtctgacccctgctcacgtcaggtcccgattgaattcctgcaccgggttataaaagacctcgttggcactgggaaaggcgattttggcagccccctcggtgactgtcgtctcctggacttcacgtggacgttcttctccgtagggcccggtgccgttctccatcgctgctgtattcggcagccctggagactgccactcgaaaaaccgggctctagagagcacccgggcggagcggaaagtgaggcttagccacagagacgatccttgcatgagacatccgctggcgcctccgcccgccaagcctggttcggggggcgggggagggcacagagagggtcagagagccgcattccgggcccggggatgtcctacatatctatgaggtagggactaggaaaacctgcggcctcggtaagctgatatcccctcgttttggggatgactggtccctgtggagccgatgccctcgtgcaggcccgccccgagtccgaatccctccccgcgctgcctagcccgtcctcacctgctctcgtagccacagaaaaccgaattagtcaaggtgcacgtttcccgaattaggacct

SEQ ID NO: 13420 - DNA, 588 bp, Homo sapiens
  MAP TO CHR16.3; EXPRESSED IN LUNG, SIGNAL =   6; EXPRESSED IN FETAL LIVER, SIGNAL =  12; SWISSPROT HIT: Q00733, EVALUE 2.50e+00; NT HIT: AF271775.1, EVALUE 0.00e+00; EST_HUMAN HIT: AW182584.1, EVALUE 0.00e+00
aagatttattttccatttatcacttccttgaattttttgtttttcaggttgttgctgtagcccatgctgtttatcaagcaatgctcagcttgaagaatattcctgttttggagactgcctataagttaatattgggagaaatgacttgtgccctaaacaacctcctgcacagtctgcaacttcctgaggcctgttctgaaataaaacatgaggcttttaagaatcatgtgttcaatgtagacaatgcaaaatttgtagttaaatttgacctcagtgccctgactacaactggaaatgccaaaaactcgagtctttaattgtaatgactttgttttatccacagttaagccttttctcattacatatttatgtatttcactgtcatgtcaacatgtctgcagaatcactgtatgtaacaaacagccatatttaagacatgcctggataaataaaattggtaggaatgttttcttgccattatatttaacgtttcttctttttccttgacaaatcttgataagtttttttatattagttttattttctagaaaacgtcttatgaatttctcccatttgctctagcatgct

SEQ ID NO: 13421 - DNA, 574 bp, Homo sapiens
  MAP TO CHR19.3; EXPRESSED IN LUNG, SIGNAL =  15; EXPRESSED IN FETAL LIVER, SIGNAL = 5.2; SWISSPROT HIT: Q15758, EVALUE 1.00e-39; NT HIT: gi14758778, EVALUE 1.00e-129; EST_HUMAN HIT: BF800974.1, EVALUE 1.00e-129
ggagagttttatctccgggctgctctacctttgaggggaaagagagcatgagattggcatgggggcttcaggggccaggcctgggagtggtgcccatgctgaagcacacattgctggggcttctcctgacctcaggaaggcaggaagatgtgggtagggtgctgagcctcacgcctggccactgggcccgtggaagaggcaacaagctgtctcctgtgttactgatcaggtacgcccctgtgggcatcatgttcctggtggctggcaagatcgtggagatggaggatgtgggtttactctttgcccgccttggcaagtacattctgtgctgcctgctgggtcacgccatccatgggctcctggtactgcccctcatctacttcctcttcacccgcaaaaacccctaccgcttcctgtggggcatcgtgacgccgctggccactgcctttgggacctcttccaggtacggccttggggtgggctagggtgggatgtttaatccgctaagcggcatggagcggatgaaattttctctgcccgggacattgtatctgggtacaggggccatacttca

SEQ ID NO: 13422 - DNA, 547 bp, Homo sapiens
  MAP TO CHR16.3; EXPRESSED IN LUNG, SIGNAL = 2.4; EXPRESSED IN FETAL LIVER, SIGNAL = 1.2; NT HIT: gi14785415, EVALUE 0.00e+00; EST_HUMAN HIT: BG190283.1, EVALUE 0.00e+00; SWISSPROT HIT: P38883, EVALUE 8.80e+00
gacagctcctccagatggtctgtctgttagtgaattcttaagcacttagagccttgaagattgagaaattctaaagaaattttttaaaaggaggagggtggtagatgtcaaagacacaaaagctctttgtaggtgctgactggctcactttgtccccaggttcatcttagagctcaagcagattcaagacatgaggcagagatgctagacttgcgtcaggggcaaaaacttctggtagtagctcttggtgacgtcaatcatcagctcctgagtgcactccgggagctcccctgagaagagtcctggggaaagaaagacccagctctaaggagcttgaagaagttacaagaagttaagatatttctctggcaatatccttctcacttcaatcagatgcatgtctgacaatcacttaaataatcgctgaggctgttctggtccagtgcttgctaagaacagctaaactttttcacagcaggaccccaatatggagaaattactaaacaaaagtctctccttcctcctctgcaaaagcagagatgcatga

SEQ ID NO: 13423 - DNA, 537 bp, Homo sapiens
  MAP TO CHR19.3; EXPRESSED IN LUNG, SIGNAL = 2.1; EST_HUMAN HIT: BE742793.1, EVALUE 1.90e-01; SWISSPROT HIT: P32021, EVALUE 2.90e+00
tacccactttggggtgattcctggaccctggagatggaccccaagggtcaccctcaccccacgggacctcccaacaatggacaaggccagtctgtcctctcccccagcccccagttgtgcagaatcctcaacatggcacccccagtgtggagctgaagactccagacttcaggggtgggggcggggctgtgggaggggagatcatggctgcggttctggtccagccagacctcctgggtttgttctttttttaagaaccaccgcaatttaaagagcggagtcctccctccctgcagcccacctgccacgtgggctggcccctgttcccctctccttctctccgtctctgcctgccgggcttgggctgcgggggccggagcttccgtttcactttggtatcaccggtttcactttcagggctggggacagagagaggagaagagggacagagagatggacagagccggggagggtggccttgttaagtcgggggccggggaggggtccaccacctgccgctccttttcctgaccttcc

SEQ ID NO: 13424 - DNA, 530 bp, Homo sapiens
  MAP TO CHR19.3; EXPRESSED IN LUNG, SIGNAL = 1.2; SWISSPROT HIT: P33485, EVALUE 5.70e-01; NT HIT: gi14770167, EVALUE 5.00e-01
ttcaaaggggatcagtggagacacagagcccaccgtggcaccaccgcccgtgcctcccacccacgatgctcagtgcggcgagcagcacacgggcctcctgctggggtgctctcaatgctggtgcgcaaggtgccctgccccacgtgctttccctggaaggggcggcacgccttggcaccaagcatctacacccaacgacagctgtcgctgctgaacctctcggtgggcctggcgccaccccaggtgctggcctgtcccctctggaggaatccagaatctggccagagcaggagacccacgactggggtacacaaggcaggagggttgccagggtcgcaggcggcttccctcgggagtggtcacggggtgaaggccgcagacaccatgagcaggtcaggccgaggatggagagacaggccggggggccgggacagggccagcagtgtctgtctcattcttccctccccagtcagcctaaaagtgaattccaggctgcaaggaaagctcaagcccaataggaagtcagcgac

SEQ ID NO: 13425 - DNA, 569 bp, Homo sapiens
  MAP TO CHR14.3; EXPRESSED IN LUNG, SIGNAL = 1.1; SWISSPROT HIT: Q58195, EVALUE 4.80e-01; NT HIT: gi5834871, EVALUE 1.40e-01
ttagtttgccgtgttctggacatattcttccttctttcctctgatcctttggaaaactattcatgcatatcagtcctacctctaccacaagaatggtagttaaagaggctcttcgactgtgtttttcttttgcttttcatgttcatgttcagtgatttttaacaataaagaagctacttttttatggtaagtaaaagaggtgtttattcctatgcctagtctttttcccttatttattttcctgtcataaaaattaatacacacacaaactctaactccatatttcacccattcaccatgtgttttggagaaatccgtttggagacttgattataaaacattaacacagtatcaaaaagttccatactgcaaaagatgctctgaagcagctttaatttaattagcagattatttaagaagaacatcctttgatgtacaaatgctgctcccagaaattcgtgtgctaaatctgccatcagaagcacaggagcacctttgtaactcctacattaaaaaaagaatcagaagaagaaaagaaaatgaaaaagcctacacgaaatcagacatca

SEQ ID NO: 13426 - DNA, 583 bp, Homo sapiens
  MAP TO CHR14.3; EXPRESSED IN LUNG, SIGNAL = 1.2; NT HIT: gi7656994, EVALUE 1.40e-01; SWISSPROT HIT: Q12815, EVALUE 7.40e+00; EST_HUMAN HIT: AV692514.1, EVALUE 2.10e-01
gaaatggagagctggcgtaggaatgtggatgcactgagaggttattcacaccagtgttctggaaagcaggaaacttctctggtgaaagtcaaactgtatgaaaacagtgatgtagagagagatgcttgatgtatttgtagaggttgataataaagttgagcagtagcaaaaggaagaagacttttcagagtttacccaatcaaacttggacaagtggcaaaccgtctgtccaatctgatcccagggtttgctgccttgctgtttgcctctccctacttagaacgcctcctaggagatggtggaagctggtgcactatcttcaatccacaattgtttgcctctttaccttgggtccccccaacccaccccatccaggcagcccatttctacttgtaccctgtgcatcttgcaatctggcctgatacttggctccagagctttgcccgatgagaattaggcctttgaatccttggttccctcccatcctgaccactgtttaatctatctctctattcctgcctctcctagacacttgaccctggaactcagcttggccaaacctgcctccgatccaaattgtgtt

SEQ ID NO: 13427 - DNA, 585 bp, Homo sapiens
  MAP TO CHR14.3; EXPRESSED IN LUNG, SIGNAL = 1.2; SWISSPROT HIT: P03204, EVALUE 2.60e-02; NT HIT: U10297.1, EVALUE 1.40e-01; EST_HUMAN HIT: BE778399.1, EVALUE 1.30e-02
cagtggccatcaaaacacaggttaaaaacagcattcacaggcttcatttaaatcacacaggataagctttatgcagtaggttgagtggtggtatctgaacagcctgggcaaggaggatgggcacagctggaaaactggacgtatcaggtttgctgtttttcaaggcaggtgtcctgtatttaatttctgctcaccctcatgaggagcctaggattttagtggtttctccccttttaccccctctcccagccacctcaccacttatggtgttagcagggaagcctgacctgctgctgcagcgctgccaatggcctgtagagttgagcggccactgccagttctccgaatggtgctgctacccgcatctgagttctggttttcaatcttgtgctctacttgggccagttcttggatcacttcctggtagcgctccatgaacatcagttcccctgaactgggtgaggacttcaggttgaacgtgaacagcacctgtcataggagagggagtgtgtgggccctggtggtcccactgatttagggaatgtccatggataggagatcttgccaaccattagactgtggccc

SEQ ID NO: 13428 - DNA, 500 bp, Homo sapiens
  MAP TO CHR12.3; EXPRESSED IN LUNG, SIGNAL = 2.2; EXPRESSED IN FETAL LIVER, SIGNAL = 0.9; SWISSPROT HIT: P37139, EVALUE 8.00e-11; EST_HUMAN HIT: BG741916.1, EVALUE 0.00e+00; NT HIT: gi4506006, EVALUE 0.00e+00
acaggataaactgtcctggggtgtacagctttaacaccatcattaaaattgtttgcaaaaggaacagagaattaaaaaacaaaacacttttctttttggagtgaagagtctttcatttgctgttataaccagcaaatgccattcactaaatcaaaaatggaaggaagggcccccacaaacacagatctatctgagcaagctgaccagtacacattacagtcttaaaaatgaaggttatatactctatgttacaagtcccgactaggcagtgtcaaaacgacatctatttctttgcttgctttgtgatcataccccttggaggcgttacaggtctcgtggcatttggcttctttttctctgcaggctttaaaatctggagattcaaaagacagttaatttaggaaatatactcaaccccaaatcttaagagtccttaaatttcattcagatcttctgttcagatggtgttcacaactgccccaacaactgtaaaagccccc

SEQ ID NO: 13429 - DNA, 565 bp, Homo sapiens
  MAP TO CHR6.3; EXPRESSED IN LUNG, SIGNAL = 0.6; SWISSPROT HIT: P00747, EVALUE 1.00e-29; EST_HUMAN HIT: AV655576.1, EVALUE 9.00e-84; NT HIT: M74220.1, EVALUE 2.00e-86
tacccttgcttacctgtgggagccaattgttccgtggatactggggaggagtcacaggacggtatcttacagtactcccaccgcacttggctgttggttgtatggcaccatggggccctttttccgtcaggattgcggcagtagttttcatccaaatttctgaaaaagaagtgattgtgagtttagctttccaaaaagaaaaaagtctagggaaccacgctttgagaacaaccgttacgggaaaaaacgtgctaaagttcatttcctttacttatgactagatcagtttttcttccagaatactttatcctgcgttcctacagtaactaaaactaaggcaaagtcaatgggatttcacattccatagcagcagaatgagaccggaggggacttacttgcaggggaagttttctggtgtcctgttatgtgtgtgaggggtctgtgcactccagtgctgacaggtgtgcccggacacggtaacagccacattcccgcgatagttttcacctgttcccttcagacactggtaggtgggaccagaagatggtggaggtgttgcttgaat

SEQ ID NO: 13430 - DNA, 551 bp, Homo sapiens
  MAP TO CHR3.3; EXPRESSED IN LUNG, SIGNAL = 2.2e+02; NT HIT: L20941.1, EVALUE 0.00e+00; SWISSPROT HIT: P02794, EVALUE 8.00e-57; EST_HUMAN HIT: BG714475.1, EVALUE 0.00e+00
tgcttcaacagtgcttggacggaacccggcgttcgtcccccatcccggccggccgcccatagccagtcctccgtcaccacttcaccgcgccctcggtaccgccccaaggcccgccgccgctccagcgccgcgcagccaccgccgcctctccttagccgccgccgtgacgaccgcgtccacctcgcaggtgcgccagagctaccaccaggactcagaggccgtcatcaaccgctagatcaacctggagctctacgcctcctacgtttacctgtccatgtcttactactttgaccgcgatgatgtggctttgaagaactttgccaaatactttcttcaccaatctcatgaggagagggaacatgccgagaaactgatgacgttgcagaaccaacgaggtggccgaatcttccttcaggatatcaagaaaccagactgtgacgactgggagagcgggctgaatgcgatggagtgtgcattacatttggggaaaaaaaaatatgagtcagtcactactggaactgcacaaactggccagtgacaaaaatgacccc

SEQ ID NO: 13431 - DNA, 589 bp, Homo sapiens
  MAP TO CHR3.3; EXPRESSED IN LUNG, SIGNAL = 0.31; NT HIT: X74497.1, EVALUE 0.00e+00; SWISSPROT HIT: P37243, EVALUE 7.00e-64; EST_HUMAN HIT: BF963462.1, EVALUE 5.30e-02
caaatttaagcaaaatggtccctaccttttttttgagaatacgatggcgactgcacttgagaaaaagtaggcttttcttcagtgaaatattcaggttggctgtattgattcagggccatgtccaagtcagagtccttgcttttaaacatgtttccagggtaactacaggtataaggctgattcactgcccaggcctgttccatatatatgttgttactgggcacagcctgagcatcgcaaccgctgtaacccggactatcttcaaaatacgcgtaataatcagtggactgcatgtagcaattgctgccggcagctgggtgcacttcatatatttcttgcatacagtagttcattttgtttccctggttcagtttctagtttacatatacacacagtctacgcatgcattctccagccccatacaccctgagagctgggcatatacgcagagaagcatacatacatacacatgaaacgcgaagggaagatgaataaacaccaccaccaacacagcaacccagcctgctttactttgtaatagcacctgatgtgctaaaatcctatttagaccgaggtgtcttttgagctc

SEQ ID NO: 13432 - DNA, 535 bp, Homo sapiens
  MAP TO CHR8.3; EXPRESSED IN FETAL LIVER, SIGNAL =  11; EXPRESSED IN LUNG, SIGNAL =  13; SWISSPROT HIT: P47833, EVALUE 5.00e-21; NT HIT: gi14782735, EVALUE 1.00e-69; EST_HUMAN HIT: R23487.1, EVALUE 0.00e+00
ttgcatcttaccctcttccgtgagtattgatactgtcttaaacatagtaggggttgattagatatttgctggttgccccttcacttgcaagggatacatacaaatgttggtttgtattggataatgaatatgatgtttttaagagtaatatgtgattttgttactttttgaaggccttaacaacattaacactagtaaaagaagtagtaacatttagtctgtcagtcacttggtatcgcatttatttatttgcccattttggttcccaaaggaaatctgaaatagagtactatgctatgttggctaaaactggtgtccatcactacagtggcaataatattgaactgggcacagcatgcggaaaatactacagagtgtgcacactggctatcattgatccaggtatgctttttaaatcataaagtctttttttttttttgcctttctaatgtaatgtctggacaagtatttcttactacgcaaatgtctttggttcctaaattcagatagaatatggatctagcaaggcatatcg

SEQ ID NO: 13433 - DNA, 561 bp, Homo sapiens
  MAP TO CHR10.3; EXPRESSED IN LUNG, SIGNAL = 6.3; SWISSPROT HIT: P55036, EVALUE 9.00e-70; NT HIT: gi13645505, EVALUE 0.00e+00; EST_HUMAN HIT: AL046194.1, EVALUE 0.00e+00
gctaccctttccctccagtctcacttcttgtcttcctccttcttgtccttcttgctgtccttggtggcctgggaggccagggagcccacagcatttcgaatggcttcattgttgggatccacacctgggaggttctctaggacactctgaaggaactcagggtcttgcatcacgtcgtaatcatcctcctccttggctggctcagatgtgtccatggctgagctggcatcaatgtctgctgattctgccaggccaaactctgctccctgcagggacatctgcatggcacaaacaatcttctcttcctcagtcatactgcttaggtcaggaagcccagtgtggccaaactcttgctggctgatggtcatcttcagcagggcatcgtctgagtcttcagtcccagtcgtagcaatcccggcctcagcagcagaagctgcagctgcctgccgggcctcctcctcctgccgctgccgctgctcttccataaatacacgaaggaccaaggccagctcaggatcagcactgggatctactccaaattcaaagtcactggcaccaaga

SEQ ID NO: 13434 - DNA, 521 bp, Homo sapiens
  MAP TO CHR12.3; EXPRESSED IN LUNG, SIGNAL = 1.9; EXPRESSED IN FETAL LIVER, SIGNAL = 2.3; EST_HUMAN HIT: BG709513.1, EVALUE 0.00e+00; NT HIT: gi16187848, EVALUE 1.00e-66; SWISSPROT HIT: Q15742, EVALUE 2.90e-01
atggacatctgctccagtccactgtctgaatcccgaacagtcctccgtgtctcccggatctgggatgaggcagaacgtggcacactcagccgccccttccaaagccctgcctataccatctcaggataaacacaccacacacaacccaatccggaaaaaagcagccagggtttctggcggtgccgctcaatcctaccttctctgggacaggagggctccccaactcaccccgcctggtgccgagcgcatctctgatgtctcttggtagaccttgggggcaccatcacccgtattggagtaggagatgacagtggaagatgagaaggtctggcaattgcctccagctgtcatgtgttcctgaggacagggtaggtaggggagggctgaatggggaggcatcacccctggtgaagggatttcacccttcagctgcctgttctagcctgtatctttctcacaaaatgcaagaactgaaaaaacatcaggcctcatcattaccctcccaaattcctctgagtcca

SEQ ID NO: 13435 - DNA, 598 bp, Homo sapiens
  MAP TO CHR1.3; EXPRESSED IN LUNG, SIGNAL = 1.7; EXPRESSED IN FETAL LIVER, SIGNAL = 0.8; NT HIT: AF053616.1, EVALUE 0.00e+00; EST_HUMAN HIT: BE219253.1, EVALUE 0.00e+00; SWISSPROT HIT: P39098, EVALUE 1.00e-24
tggcactaaccatccaaaagttgtatcaaaaatattttaagtgtccaataattacattataattaacattaaaaaaaaaaacaagaaagagttctagtccttattaccaacctggaaactatactacaactatgacccaagaataaacagatcaaaacaggataccatagattatatatatttgtttgtatccaaatacaaatccataaacactccatatcacaaaactcagcttattacctctttaattttttcccttttctctcttatgtcattatcttctgggtctccaccacgtattcctacaaggttgggaatagggactggtggcagtggcttgttctcttttatcttcatttcttggactaccttatttttctctgtctgaatttctgctcgaatttcctctcttgactttcttaatttttcttttgcttcttccaaggccttctcatgatcagctcgaattttatttctcagacgttcttcctcttccctgtgagaaaagaaggaaataaaacgtaacagtgagcctacttaagaatgtcaacctttaaatataaaacataaaggtttctccattaaacccaggaacttg

SEQ ID NO: 13436 - DNA, 532 bp, Homo sapiens
  MAP TO CHR21.3; EXPRESSED IN LUNG, SIGNAL = 2.7; EST_HUMAN HIT: AL552081.1, EVALUE 1.00e-127; NT HIT: AL163300.2, EVALUE 0.00e+00; SWISSPROT HIT: P56554, EVALUE 7.00e-16
atccacaggaagccatgaactgctggtttcagcggggagaggtagtgctgacagctctgataatctacctgaagccctttgtgaggaatactgtaaaactgcagtaagctgtcaatattcgacattaagtcatcatttcagaagagaagcctgtttgaagtaggaaaggtttgaaaaaaaaaaaagatgccatggttcttgcaagtctgccttgtttggtaccagcacagagcatcactgtcactaagtgtgccgggggagaatgctgagctgcttggcggtgtgtgcgcgcctgtgcgaggccaggtctcacagtcccagagacttctggacgatctgcttggcaatcttatagaactgctcccggtcatcgcgccacattttggacgcatccacgttagctccactttcgtcattgggctctgaaagaaaagggaacaccctccatgtaaaagggagtcttatacgtaagcagcctggcaaggtctcccatttatttaaaacactggcgggggctttcaagagctgtgtc

SEQ ID NO: 13437 - DNA, 589 bp, Homo sapiens
  MAP TO CHR1.3; EXPRESSED IN LUNG, SIGNAL = 0.34; EXPRESSED IN FETAL LIVER, SIGNAL = 0.77; SWISSPROT HIT: P35321, EVALUE 4.00e-24; EST_HUMAN HIT: BE184218.1, EVALUE 0.00e+00; NT HIT: L05187.1, EVALUE 0.00e+00
  unsure 453
cagggtcaataggcaaatgggattcataagcagaatggagtagggtgttcagtatccagtggccagctcctcaagggcatggctgtggaccacattacttctgcttggtcttctgctgggctggtgctggagtgaccgttgaagggcagggctcaggcaccttgggctggcagggctctggaaccttgggctggcagggctcaggcactttggggtggcagggctcaggcaccttggggtggcagggctccttggttttggggatgcatggttcctggggtggaggctggcaaggttgtttcacctgctgctgctgaggctgagggggtggggtgcaaggctgcttctgctgctgagaattcatgcttcaaatgtgtttttttctagagacagaaagctgacacagtgattcaattaaagaaagatggatacaaattcatgccaaacagattntatttcaggaccctttaagaaaagaaagcctttcatctcccttaactcccccattacatttaaaaatgaaataagcttggataattttcaggccctttgaagaggaggagctaaaaggcaatttcttctgctccat

SEQ ID NO: 13438 - DNA, 512 bp, Homo sapiens
  MAP TO CHRX.3; EXPRESSED IN LUNG, SIGNAL = 0.45; EST_HUMAN HIT: AI142010.1, EVALUE 1.00e-14; NT HIT: U93163.1, EVALUE 1.00e-26; SWISSPROT HIT: P43363, EVALUE 7.00e-54
tgcactggccatgagagtagtaccacccatggtggcaattatagcctgagctttctctttctcatctcttaaagcttcctcatacaggagtggaaaggaactggcatcactcccactgactctggagaaaaactccaggactttcatcttggtggtttcagcatgagcccttgggccccacgggaatttgtatcttggaggatcactgttggatacctgacagcactccaggtatttttcctgcaccaaatctctggtgatgagcttcctgggctccccatagatgaaatccttccacccagcatacaccctgataatattcagcacttcccagatcttctcttcagaggcacagttggcctccattaagatcacaccgaaggtaagaatcaggaggccggtcttgggcattccctggtcatcgctcagcctcctatcgtaggtgaggtctagtgatttgaggagcacacaggagtggctgatggggtccacctccttcatgtcagtgccaa

SEQ ID NO: 13439 - DNA, 535 bp, Homo sapiens
  MAP TO CHR12.3; EXPRESSED IN LUNG, SIGNAL = 4.5; EST_HUMAN HIT: BI042188.1, EVALUE 0.00e+00; NT HIT: M75865.1, EVALUE 0.00e+00; SWISSPROT HIT: P19438, EVALUE 2.00e-23
gttttctgaagcggtgaaggagccgctctcacactccctgcagtccgtatcctgccccgggcctggacagtcattgtacaagtaggttcctgtgaatggggccgcagagttaggctgcgggtgagaacacaaggaaggagccccatgctagggacaacagccagggccgattccctgaagtctctaggagaggagggagggagaaaatcccagcccaggagagacagcaaagttagggaagaacaactggaagaagcagagaaagaagcagcaccccagacctgagggcattcaccgtttccacttgcccctacctttgtggcacttggtacagcaaatcgaattattttgagggtggatatattttccttggggacacacactatctctcttctccctgtcccctaggtgagggaccagtccaataacccctgaggggtatattcccaccaacagctccaggagcacctggggaagaatcagatagaggagacaccatcaagagagggagggatgggaagcttaggggtagcag

SEQ ID NO: 13440 - DNA, 596 bp, Homo sapiens
  MAP TO CHR18.3; EXPRESSED IN LUNG, SIGNAL = 0.32; NT HIT: M31551.1, EVALUE 0.00e+00; SWISSPROT HIT: P05120, EVALUE 1.00e-56; EST_HUMAN HIT: BF666685.1, EVALUE 0.00e+00
atggcatgcctctacatttcattcaaagccttaactatgtcatacgtgttaccttcttgtaaaaatctgaccaatctgttaactttctatatcacccacaatatagtaaagtcactgatttttaatattagacttaaagttgttttccttctttctaatacttgctgtattttcttttgtttgttttgttttgttttgctttgcagctggaaagtgaaataacctatgacaaactcaacaagtggaccagcaaagacaaaatggctgaagatgaagttgaggtatacataccccagttcaaattagaagagcattatgaactcagatccattctgagaagcatgggcatggaggacgccttcaacaagggacgggccaatttctcagggatgtcggagaggaatgacctgtttctttctgaagtgttccaccaagccatggtggatgtgaatgaggagggcactgaagcagccgctggcacaggaggtgttatgacagggagaactggacatggaggcccacagtttgtggcagatcatccttttctttttcttattatgcataagataaccaactgcattttatttttcggcaga

SEQ ID NO: 13441 - DNA, 598 bp, Homo sapiens
  MAP TO CHR17.3; EXPRESSED IN LUNG, SIGNAL = 0.62; SWISSPROT HIT: Q92183, EVALUE 1.00e-22; EST_HUMAN HIT: AL120519.1, EVALUE 0.00e+00; NT HIT: Y11341.1, EVALUE 0.00e+00
agtctgagccatgggaaatggccaaagagtctcaagattcccactgtatcctgtgccttggagcaggcaaggagaccatggcagccctggccccggtcagttcttggctttggcagttccgggaccaggacgctggtacagccggattatcccttcatcgtgtagccgcttccagacttctctctccagcttgaagtcatggtttatgtaaaagatcagccgcttccatgatgtatcatagtagtgatcagaaaagcgctcatggccctcagtgatgaagccataagcactcacctacatcacggttggaggagaaacacggcctgtagttgctgttgcccaggcttcttctcatggctaattctgtgttgaggggtgggggttcttttccctggctccgtccctaggggtctgggtgcaggtccctggatacgcacgcataactgcatgcacccatactcatgcccaccctctttcccagcagatgtgggcacccagcccatgcactgtcctatgctgaacaggcccaggaatagcccaggagctgtttctccaggtatttctgcagctgcagtggagccttacctggtcacagagc

SEQ ID NO: 13442 - DNA, 520 bp, Homo sapiens
  MAP TO CHR9.3; EXPRESSED IN LUNG, SIGNAL = 1.3; NT HIT: AF029308.1, EVALUE 0.00e+00; SWISSPROT HIT: P15951, EVALUE 2.00e-27; EST_HUMAN HIT: AA308186.1, EVALUE 3.00e-86
gacacagagacttgggagccacatccagtgatgctcaccaggggtggcagcgctccctcccttgcctggcctcactgggcttgttaaggatttctaattggcaggaagcaaccgcaggctgggagcaccacccctaacatgctactgacttgccttctcccttcctatttccactccagttgctgtcccctttgacgatgatgacaagattgttgggggctacacctgtgaggagaattctctcccctaccaggtgtccctgaattctggctcccacttctgcggtggctccctcatcagcgaacagtgggtggtatcagcagctcactgctacaagacgtaagtgtggggcccctgactgcaaagctcccagccaggctgcctgggagagcttggcttcagcccagggaagtactgaggttgggtaagacggatgggagaggtggtggagaagaaaacttgttgacagcagctgactctccagagcaaggccaatccatgaaacagcaagggttgtggt

SEQ ID NO: 13443 - DNA, 513 bp, Homo sapiens
  MAP TO CHR19.3; EXPRESSED IN LUNG, SIGNAL = 1.3; SWISSPROT HIT: O95863, EVALUE 1.90e-01; NT HIT: gi14760398, EVALUE 0.00e+00; EST_HUMAN HIT: AA206179.1, EVALUE 0.00e+00
agccccggctttctatattccgagggccagcggctggcactggaggctctgttgagcaagggcgcggaggcgttccagacctgcgtgcagcgcgaggagctgtggcccttcctcagtgcggatgaggttcagggcttggcagcggcagctgaagactggacagtggccaagcaggagcccagcgggatggcagagggagccaccaccaccgatgtggacgcgggcagcctgagctactggcctgggcagtcggagcagccggcgcccgtcctgcggctgggctggccagtggactctgcgtggaaaggcatcacccgggcgcagctgtacacccagcctcctggagagggtcagccgcccctcaaggagctggtgcggctggagatccaggctgcccacaaggtgggtgtcgcgggggccctgtgtccattcaccagactgggacggggacccaggcattctctcccttgtcctcctgggacttgcaagcgcacacccctaccctaaaggacc

SEQ ID NO: 13444 - DNA, 583 bp, Homo sapiens
  MAP TO CHR17.3; EXPRESSED IN LUNG, SIGNAL = 0.34; NT HIT: gi14773822, EVALUE 0.00e+00; SWISSPROT HIT: P23515, EVALUE 7.00e-26; EST_HUMAN HIT: BE704153.1, EVALUE 0.00e+00
tggaaagccaaatgacacagttatgagcatagaccttttattttccagatgtttgacagtgtaaacatacataaaatacatattaaagtttagatgctttatattttgtgcaataaattgaagccttaaaacatttcattttttttataaaagaaactcattagtttacttaattaagacagtaaaatagcagcaagtaccaagacattgtgcatttcttttatttaagacaagttacttcatttacatcagagttagaaatgttaagactggctttcttgaatacttaaatatagctcgaatcactggttagatatggacatattttcccaactgtacatcagggaggagtgctttcattagtttcagaaaatgcagaccctcagacagccagcatgaccacaacattgagcaataagagaaatgaagcatttactttccaagcatttgccacagaaggtaatggagtctttacatttgtggttgtctcttccctccataagttaagggttgtgctttgttgaggcatttcagagaaattatttggcatgccactagtgatacttagggtcatgggtgttgg

SEQ ID NO: 13445 - DNA, 553 bp, Homo sapiens
  MAP TO CHR2.3; EXPRESSED IN LUNG, SIGNAL = 0.61; EST_HUMAN HIT: AL534740.1, EVALUE 1.00e-76; SWISSPROT HIT: Q28892, EVALUE 1.00e-13; NT HIT: L03843.1, EVALUE 0.00e+00
gctggacagccttcttcaacaagacaggcacaggaccttcccggccgtcacctcagttgcctctgtttacatggacttatgtttgttcttagaaaaaattttattactgctactctcatccagctaacttccaacttcaatacaagcccagcaagtcagaatatgctaacccagattatagtatcaaccttcccttaaaaaattaaatatcttcggtttctcaatcttcctctgcgggttaaaagcctgtttggagaagaagaaagctacgtgaatgctgccgcttttattgaaaaatttacctatggtggtgaaaagctcgcagcccaaggaaacaaagtgagaaaaatgcaaatgcaagtgctgggagggaccaagtggccagggcatagccgatccattcaatgatctcaccgaggaaattggctccagaaacatacgtaaacaagccacctgcgtgcagaagaatcggaaggtcaatcattgcaactgaatcattttgacattaaacccatctgtgttgttccaaaatacacaaaggcagcaagaacaa

SEQ ID NO: 13446 - DNA, 559 bp, Homo sapiens
  MAP TO CHR17.3; EXPRESSED IN LUNG, SIGNAL = 7.6; SWISSPROT HIT: P17844, EVALUE 3.00e-26; NT HIT: AF015812.1, EVALUE 0.00e+00; EST_HUMAN HIT: BG337761.1, EVALUE 2.00e-69
tatgaagccaatttccctggtaagtgctacttttcagttctacctacccgtgtttttgtttccacctaccccctctttttcttggcatcactaatttttactaaatatctgttactaattatagcaaatgtcatggatgttattgcaagacagaatttcactgaacccactgctattcaagctcagggatggccagttgctctaagtggattggatatggttggagtggcacagactggatctgggaaaacattgtctgtaagtttgggagaactcttgagttgatctgatatatgcaagaaaatgtaatggtaatttaaaaacgagtattttaatgtgatttctgtttgtccccactttcaccctaaatagtatttgcttcctgccattgtccacatcaatcatcagccattcctagagagaggcgatgggcctattgtaagtatatatttttaactttttattagaagcataatgtgtagattttagactacatagctaaagatgtaatcatttgtggtggttttatatagaggttagctcaccctattcagctgga

SEQ ID NO: 13447 - DNA, 502 bp, Homo sapiens
  MAP TO CHR6.3; EXPRESSED IN LUNG, SIGNAL = 4.9; SWISSPROT HIT: Q93078, EVALUE 1.00e-45; NT HIT: Z83336.1, EVALUE 0.00e+00; EST_HUMAN HIT: AA873858.1, EVALUE 0.00e+00
tccaattttccggcagttactcccagtcatgcccgagccctcaaagtccgctcctgccccgaagaaaggctccaagaaggcagtgacaaaggcccagaagaaggacggcaagaagcgcaagcgcagccgcaaggagagctactccgtgtacgtgtacaaggtgctgaagcaggtccaccccgacaccggtatctcgtccaaggccatgggcatcatgaactccttcgtcaatgacatcttcgagcgcatcgccggcgaggcttcccgcctggcgcattacaacaagcgctcgaccatcacctccagggagatccagacggccgtgcgcctgctgctgccaggggagctggccaagcacgcggtgtcggagggcaccaaggccgtcaccaagtacaccagttccaagtgagcccgcccaccgcggaacgttcggtcagtctcggcccacaccccaaaggctcttttcagagccactcagtcttcccaaagagaactggcactc

SEQ ID NO: 13448 - DNA, 502 bp, Homo sapiens
  MAP TO CHR17.3; EXPRESSED IN LUNG, SIGNAL = 0.99; SWISSPROT HIT: Q16586, EVALUE 5.00e-22; NT HIT: gi14773218, EVALUE 1.00e-115; EST_HUMAN HIT: BF673712.1, EVALUE 1.00e-115
tccttttgtgcctgagaaccccattcccatggtgtctgggtcccatacagcacaagtgccactgtgagtcccatgggtgtgagctccagcaggtgctcccccgcccttcatgcccacattcaccttccctcccgccggcagcacatgacataggccagcagcaaggtgagaagcagggccaccagcaggggcaccaggagggtgaccagagcatccaccaagaagtcacggtctggggcctcagtgggtgggcagaagaacgggtcatgctccaggatcccatcacctggggtgggcacctcatctgcaggctccggcactgacttatccacctgcacagagagctcagggctgacgcaggaagtggctggctggacacagaggtccccaggaacatggcaggggccaggactaggaggcaggagacacaaagtccagcagaggcgggacagtgcactggttagcgcacagctctagggtctgacctcctggtttgaatcca

SEQ ID NO: 13449 - DNA, 502 bp, Homo sapiens
  MAP TO CHR18.3; EXPRESSED IN LUNG, SIGNAL = 1.5; NT HIT: gi5453556, EVALUE 0.00e+00; SWISSPROT HIT: P50876, EVALUE 1.40e-01; EST_HUMAN HIT: AU120172.1, EVALUE 0.00e+00
tgaaagagcacatgaccagcttagcctctgtcctaaaggtatctcattcagttgctaaacttatattagttaatttccattggcaagtttcagagagattggacagatacaagtccaattctgctcaactgctcgttgaggctcgagttcagcctaatccatcaaaacatgttcccgcatctcatccccctcacctctgtgcagtgtgtatgcagtttgcgcgaaagaaaaacctactctccctggtctgtcagcaccagttttgccgtagctgctgggagcagcactgctcagttctcgttaaggatggtgtgggtgtgggagtcgcttgcatggctcaggactgtcccactccatacaccagaggactttgtgtttccattgcttcccaatgaagaattgagggagaaatacaggtgctacctcttcagggactatgtgaagagtcattactagctccagctgtgccctggtgcagactgcctcatggttgttcgggtac

SEQ ID NO: 13450 - DNA, 578 bp, Homo sapiens
  MAP TO CHR11.3; EXPRESSED IN LUNG, SIGNAL = 1.1; NT HIT: AF188177.1, EVALUE 0.00e+00; EST_HUMAN HIT: BI021749.1, EVALUE 4.00e-95; SWISSPROT HIT: P29798, EVALUE 6.00e-12
gcctgtttttctcctgttggggctcactggagcagacaggggtgatgtgccctcctcatcagggttggttgaggtcttcagagctgggaacacacatggtttgaagggctgaaaagccttaaatcatttgtgtaaggtttaatgatctgtggcccaggccatgagggagtttggggagcacctcatcccaccctatttttttccatgaggaatacagggatgagacagtccactggaggaggaggaggaggataggaggggaacaaaatattggggtatgaccacagccttgtaaaggttggtgtggagtgagcatggaggggggcctccagctgagactgtgctctgagaggtccctcttttttccaggatgaaaggtgagaccccggtgaacagcactatgagtattgggcaagcacgcaagatggtggaacagcttaagattgaagccagcttgtgtcggataaaggtaggtgggaccctggctggctcccattagttggccaggctgtgctgtgctgcaggttcccaaagctcaagataagagatgcgttctttccttcactccctgaggtcag

SEQ ID NO: 13451 - DNA, 563 bp, Homo sapiens
  MAP TO CHR6.3; EXPRESSED IN LUNG, SIGNAL = 1.1e+02; SWISSPROT HIT: P30512, EVALUE 3.00e-46; NT HIT: AJ303359.2, EVALUE 0.00e+00; EST_HUMAN HIT: BG325639.1, EVALUE 1.00e-127
gtgtcgggtttccagagaagccaatcagtgtcgtcgcggtcgcggttctaaagtccgcacgcacccaccgggactcagattctccccagacgccgaggatggccgtcatggcgccccgaaccctcctcctgctactcttgggggccctggccctgacccagacctgggcgggtgagtgcggggtcgtggggaaaccgcctctgcggggagaagcaaggggcccgcccggcggggacgcaggacccgggtagccgcgccgggaggagggtcgggtgggtctcagccactcctcgcccccaggctcccactccatgaggtatttcaccacatccgtgtcccggcccggccgcggggagccccgcttcatcgccgtgggctacgtggacgacacgcagttcgtgcggtttgacagcgacgccgcgagccagaggatggagccgcgggcaccgtggatagagcaggaggggccggagtattgggacctgcagacacggaatgtgaaggcccagtcacagactgaccgagcgaacctggggaccctgcgcggctactacaaccagagc

SEQ ID NO: 13452 - DNA, 566 bp, Homo sapiens
  MAP TO CHR20.3; EXPRESSED IN LUNG, SIGNAL = 1.1; NT HIT: AB029636.1, EVALUE 0.00e+00; EST_HUMAN HIT: BI837917.1, EVALUE 0.00e+00; SWISSPROT HIT: O76096, EVALUE 8.00e-18
ggccagaaaggagacatctgtctcaggaaggggcacaaacccagcacggggcagggaggggagtgggaggggtctgcaggctctgccgtaagcccgaagcattgccccaagatgctggcccacttcccttctcctcggtgggcacctgcaccactgtcttgaggccctgcttcctagtggagaagcctgccctccctcccctgtgcccagtaacccagtccctttgctccctccagatagtgaaaggcctgaaatatatgctggaggtggaaattggcagaactacctgcaagaaaaaccagcacctgcgtctggatgactgtgacttccaaaccaaccacaccttgaagcaggtaaagcagcaggcccttctctcagatgtgccctctcttccccagcccactccctcccaggactgtgaaaaacaccgtcaccacgtctctaacgcagcgccccaaacctcacccctgaggaagccaggcctcccagactcccgcacgactgaggatccgggagaacaggaggtagagcctgtgccaggagctcctcagatgacatcctcccgt

SEQ ID NO: 13453 - DNA, 598 bp, Homo sapiens
  MAP TO CHR2.3; EXPRESSED IN LUNG, SIGNAL = 0.77; SWISSPROT HIT: Q01118, EVALUE 1.00e-40; NT HIT: gi16157121, EVALUE 0.00e+00; EST_HUMAN HIT: BF527027.1, EVALUE 6.00e-05
tttttgcaggtacaaaattggaaatgttggcttcaccagaacctaagggccttgttcccttcactaaagagtcttttgaacttataaaacagcatattgctaaaacacataatgaagaccatgaagaagaagacttaaagccaactcctgatttggaagttggcaaaaagcttccatttatttatggaaacctttctcaaggaatggtgtcagagcccttggaagatgtggacccatattactacaagaaaaaaaatgtgagtattaattgagattattttgatgacatttttattattttatttccagacatacagaaaatgtaattgagataggatacaaaaagataatgaaaaacagggaaagatctgattttaaattttacagaacgacataagatatctcattttgggaacacacatattggagatttttgtcaaaactgatatcttacctggttaggcagtatattttggattactctacttcataatatatgtattagtatgccttaatgtaagtgaaatattttaagggaacatgatgattgtccatttgtggttatcaattttaaaatgcctataaaatgcccagaaca

SEQ ID NO: 13454 - DNA, 558 bp, Homo sapiens
  MAP TO CHR6.3; EXPRESSED IN LUNG, SIGNAL =  32; NT HIT: gi12732288, EVALUE 0.00e+00; EST_HUMAN HIT: BE397902.1, EVALUE 0.00e+00; SWISSPROT HIT: P41051, EVALUE 1.00e-93
aagcagtctgatgtcatgcgctttcttctgagggtccgctgctggcagtaccgccagctctctgctctccacagggctccccgccccacccggcctgataaagcgcgccgactgggctacaaggccaagcaaggttacgttatatataggattcgtgttcgccgtggtggccgaaaacgcccagttcctaagggtgcaacttacggcaagcctgtccatcatggtgttaaccagctaaagtttgctcgaagccttcagtccgttgcagaggagcgagttggacgccactgtggggctctgagggtcctgaattcttactgggttggtgaagattccacatacaaattttttgaggttatcctcattgatccattccataaagctatcagaagaaatcctgacacccagtggatcaccaaaccagtccacaagcacagggagatgcgtgggctgacatctgcaggccgaaagagccgtggccttggaaagggccataagttccaccacactattggtggctctcgccgggcagcttggagaaggcgcaatactctccag

SEQ ID NO: 13455 - DNA, 546 bp, Homo sapiens
  MAP TO CHR6.3; EXPRESSED IN LUNG, SIGNAL = 0.83; SWISSPROT HIT: P49910, EVALUE 5.00e-77; NT HIT: U88084.1, EVALUE 0.00e+00; EST_HUMAN HIT: BG771463.1, EVALUE 0.00e+00
ttttgatccctcaggaggactcttgaaactaaagaagaccctttccaaagcagttctgataatatattctatccacagatggctacagaaccaaagaaagctgcagcccagaactctccagaggatgaaggacttctgatagtgaagatagaagaggaagaatttatccatgggcaggacacttgcttacagagaagtgaactccttaagcaggagctctgcaggcagctttttaggcagttctgctaccaggattctcctggacctcgcgaggcactgagccgcctccgggagctctgctgtcagtggctgaagccagagatccataccaaggaacagattctggaactgctggtgctagagcagttcctgaccatcctgccaggagatttgcaggcctgggtacatgaacattacccagagagtggagaggaggcagtgaccatactagaagatttggagagaggcactgatgaagcagtactccaggtgcacaggggatgggagatctaagacctccataatggataaagttccacggtggga

SEQ ID NO: 13456 - DNA, 567 bp, Homo sapiens
  MAP TO CHR1.3; EXPRESSED IN FETAL LIVER, SIGNAL = 0.5; EXPRESSED IN LUNG, SIGNAL = 0.56; NT HIT: gi14731967, EVALUE 7.00e-93; EST_HUMAN HIT: AW176538.1, EVALUE 2.00e-81; SWISSPROT HIT: P10775, EVALUE 1.00e-06
tgctttctctattccggagctctctggtcaggtgtgtcctgatgcattctctattccagagctctctggtcaggtgtgtcctgatgctttctctattccagagctctcttgtcaggtgtgtcctgatgctttctctattctggagctctctggtcagatgtgttctgatgctttctctattccggagctctctggtcaggtgtgttctgatgctttctgtattccggagctctctgatcagatgtgttctgatgctttctctattccggagcttcctgatcaggtgtgtcctgatgcttcctctgttctggagctctctggtcaggtgtgttctgatgctttctgcctctgttcttggcatgaaggttggggcgctgtggcctctcgcatgagtgctgcttcgacatctccttggtcctcagcagcaaccagaagctggtggagctggacctgagtgacaacgccctcggtgacttcggaatcagacttctgtgtgtgggactgaagcacctgttgtgcaatctgaagaagctctggtgagtcgagcccgttcccctaaggaagttc

SEQ ID NO: 13457 - DNA, 542 bp, Homo sapiens
  MAP TO CHR2.3; EXPRESSED IN LUNG, SIGNAL = 2.7; EXPRESSED IN FETAL LIVER, SIGNAL = 2.3; SWISSPROT HIT: P48874, EVALUE 8.80e+00; EST_HUMAN HIT: AA211574.1, EVALUE 0.00e+00; NT HIT: AF015947.1, EVALUE 0.00e+00
atggtccaggtcttttgcagtgtgtttgtgctgatggtttccatggatacaagtgtatgcgccaggtgaggaattaggccgtctaactagggatacaaggaatgcatagagcaagtcttctcagaaaggagagccacaagaccaggagctgatacaaatttcctataggtggaaaactatagaattgccctagacaaagtgataggtatattaggaaagaactaggtgttaggatgtggccctccgtgtaacgttgtatgggggtgttttttggtctgttgttcacagggctcgttctcactgcttatgttcttcgggattctgggagccaccactctatccgtctccattctgctttgggcgacccagcgccgaaaagccaagacttcatgaactacataggtcttaccattgacctaagatcaatctgaactatcttagcccagtcagggagctctgcttcctagaaaggcatctttcgccagtggattcgcctcaaggttgaggccgccattggaagatgaaaaattgcactcccttgg

SEQ ID NO: 13458 - DNA, 516 bp, Homo sapiens
  MAP TO CHR5.3; EXPRESSED IN LUNG, SIGNAL =   3; EXPRESSED IN FETAL LIVER, SIGNAL = 2.4; EST_HUMAN HIT: BE731643.1, EVALUE 0.00e+00; NT HIT: AB063318.1, EVALUE 0.00e+00; SWISSPROT HIT: P40227, EVALUE 3.00e-72
tccatgatcacaaccatgaagagatcaataggttcatcttgtcttttaatggccaaaatggagtccactacagcctctgttaaggcatctgcaagttcagcatgaactttagtatgaagagatgttctggccacatttataagtgtttccctgtccatctctttccttattttgacttcttccaaaaaccgaagggccttttcctttgcagcttcaaatccttcagtaattattctgagatgaaggccttcagaaatgtagagatcctcctgtttcagtagcttttcaatgattaggacattggaagttgtactatcaccagttatatcatcctgggctgttgctacctttgctattaaggaagctgttgtgtgttgaatttgcatttcgtgaaacagcacattgccatctttttagtaagcttgatgtctccagcgccagaaacaagcatattcattgtgcccttgggccccaggttggttcccagcacgtcctgcagaccctgcattatgctga

SEQ ID NO: 13459 - DNA, 519 bp, Homo sapiens
  MAP TO CHR1.3; EXPRESSED IN LUNG, SIGNAL = 0.8; NT HIT: M61891.1, EVALUE 0.00e+00; SWISSPROT HIT: P98107, EVALUE 1.00e-31
caaccaccatcaatcaatgcatcaccttcacaggtaggtagcaggccagaccagtgtcctgtggctccacatgtccgagctgcagagccattgagcgtccatccttcaggacaggcgaacttgcacacagtgccaaacacgggctccccactgcagctcatgttgatctttcccggaactgccaggcttgaacattttaccactgcaaatgttaggtacacaggcagagtttcagaaaaatctactggaaaacttccaaaacttgcttaaaagtcaacaatgaatgtaaagtgtaagcgctacttagttttcagcatgtaggaaattaggaccaaacccctttggggcaatctaggttcagaaactttatgaagtatttgacctgtaccctaaaaaagtctgcactcaattctaccttggcaggaaggaacctcttctgtccattgtccctgagatgtgcactcaagttgagttgatccatgtaattcaaatccctcctcacagctgaaggcacaagag

SEQ ID NO: 13460 - DNA, 537 bp, Homo sapiens
  MAP TO CHR1.3; EXPRESSED IN LUNG, SIGNAL = 2.3; EXPRESSED IN FETAL LIVER, SIGNAL = 1.4; SWISSPROT HIT: P35609, EVALUE 3.00e-41; EST_HUMAN HIT: BF838250.1, EVALUE 1.00e-128; NT HIT: AJ249765.1, EVALUE 0.00e+00
tcgacctgtgtttggtatcgttggggtgatcactcgcggccatgggcggacactgaacatctcgttcatgcctctgtgcgtagaggtaccacatctcagtgattttaggaacattcatcctttacaaattattggatgcctcattttttttttttaactgggggagggggcttgctggtgtcttcagcagtatttttgtgtttgcggagcagcttttggaatggattcgtcgcacgatcccctggctggagaaccggactcccgagaagaccatgcaagccatgcagaagaagctggaggacttccgggattaccgccggaagcacaagccacccaaggtgcaggagaaatgccagctggagatcaacttcaacacgctgcagaccaagctgcggatcagcaaccgtcctgccttcatgccctccgagggcaagatggtgtcggtgagtagcaagcgccaagccctcctggcgccacgggaagccctccttctagcctaaaggcgtttgacctgggtcaggaggaggcattgacttc

SEQ ID NO: 13461 - DNA, 555 bp, Homo sapiens
  MAP TO CHR1.3; EXPRESSED IN LUNG, SIGNAL = 0.56; SWISSPROT HIT: P40238, EVALUE 4.00e-56; NT HIT: U68159.1, EVALUE 0.00e+00
cctgaaagcctttgcttttgtcagtgggaatgacccaaagtaggaagcccctaagtaggcgtggctcatatctgagcctatactaactctccaaggacgaacctaggtctggaatccccaaagtatggtctgtcctttcctggggcaagattgaaggtaggagataagaggtggggcagaagaaggtcagcatacttctctacttggggaggtctgctttggtccatcttgccagggcattgtgggctgagcacatggagactggtccagagcagaggctgagtgaggcctctgcagagcagggcagcaggtttctgtggcaatcagctgtatgaccgtgggaccagtggagttcttgggatctctggggccatagcggagttcgtacctcaggaaatcactgatttctggagctggctcctcccagctgatctgaagttcccctggctggctcccacccatggccttgatgatactggggggagccggcaggcctgagggcaagacagggcacatcagaactctgagtaccacagtctatggctcagcctctgg

SEQ ID NO: 13462 - DNA, 549 bp, Homo sapiens
  MAP TO CHR22.3; EXPRESSED IN LUNG, SIGNAL = 2.2; EST_HUMAN HIT: BF219926.1, EVALUE 2.00e-75; SWISSPROT HIT: P43331, EVALUE 1.00e-18; NT HIT: gi14777840, EVALUE 1.00e-75
tgtccatcccatcattcctcctcaccccacatcttgcacatatttgccagatagtttcctccaaaccaggagctgagcttttttttttttccttggtagaaaatgcagctttggtgtttttgctaagttttatggagtgccaggccttaaaggaagcatgatgtgtgccacatgccttttcagactctgaaagatgaactgactgttgtctctctcattgtagaactctcttcctgccaagatgtctattggtgtgccgattaaagtactgcatgaggccgagggccacattgtgacatgtgagacgaacaccggtgaggtatatcgggggaagctcattgaagcagaggacaacatgaactgccaggtattctgctttgcatgtgaggctgtgtgggaggaatggccctgtgtcttgaaggacagaaaagtgtgtgttgagggtctctggaaattgttctcattcagcagtgatttcctaagtgcctaatgcataccagtcaggtgctgttataggctctgggggtgtgggcatgaacgagacacata

SEQ ID NO: 13463 - DNA, 549 bp, Homo sapiens
  MAP TO CHR20.3; EXPRESSED IN LUNG, SIGNAL =  14; EXPRESSED IN FETAL LIVER, SIGNAL =  11; EST_HUMAN HIT: AL036912.3, EVALUE 0.00e+00; SWISSPROT HIT: P02894, EVALUE 2.30e+00; NT HIT: D79206.1, EVALUE 0.00e+00
tattccagccccatcagaaggcaccaggaacagggcaagagaaaaaggcaaaaacccacccagccacatgaaaattcactcactcaaccacccagcaacatcaaactggaaacaccacactatttcctgaaaaaaatatatttatctatttttctagaaccaaggaagaataataatatattataagaacacagacacaaatatcccaccatccccttcattatattttgggatctgctaaaaaaaaactatgtttcggcaaaagctattttataagaggaagcagcttcagaaagggccaaggccatgaggagcggggtttaaagtataaaaaaaaaactggggaaggggtttaatgaaagagaacaaagaaagaagaggggaagggaggccctatctaaagctataaatagtaaaaaaaaaaaaaaaaaaaaaaaattaataaaaatcatctctccggctcttctctcattttcaagaaacaaacaaaaacaaaaacaaaaaccattaaatacaaacttagcaggtgctgtggaaatgtgcgagaga

SEQ ID NO: 13464 - DNA, 530 bp, Homo sapiens
  MAP TO CHR5.3; EXPRESSED IN LUNG, SIGNAL = 3.4; EXPRESSED IN FETAL LIVER, SIGNAL = 3.5; EST_HUMAN HIT: BF981477.1, EVALUE 3.00e-74; SWISSPROT HIT: O35501, EVALUE 2.00e-19; NT HIT: gi16158323, EVALUE 5.00e-72
tgttgcactccaagatgagggacccacatatgtcctcatcattcattctattccactccccctccccactttctaccctactggtgggttctggattccttccctttgacactaactccaatgccaaagtagagtcaagacggcaggagactatctcccaactctaatctcactctaaattccacaaatggctatggagggagccaccagtgacagtcatcaagaacagttccatccagatcaagttagaatcaaaatccacttcagcccttgtacctttttgtatgccatttcgaacagcttcaatgatgcctgctgaagagaggatgctgcctgtctaatattttctcctgtttcgctgtcttttctagccaggagctccctcattttggaaatctcttctttcagcttgttgcacttaaaaaaagaaaacaaaaatccttacttttccaggtctcctgtaccattacaagtagaagtactatttagaaacattttaaaataattaaacccctatcaaaacccacaga

SEQ ID NO: 13465 - DNA, 525 bp, Homo sapiens
  MAP TO CHR1.3; EXPRESSED IN LUNG, SIGNAL = 6.9; EXPRESSED IN FETAL LIVER, SIGNAL = 8.9; EST_HUMAN HIT: BG541628.1, EVALUE 0.00e+00; SWISSPROT HIT: Q00839, EVALUE 6.00e-28; NT HIT: AF073991.1, EVALUE 9.00e-52
gaatcatcgaggagactggcaaaattagtaatgtctttagactgcgtcactagcgccaatcgaattcgtagttgattgttctttgaattcacatttgagtcctcggttaaaacctcagttaaaaagcaggataaagtcgagctgctttggttctcggaacggaaaagcgtttttttgttgtttagaggcttggctttatggggctcgtgtgtgttttaggggacggcaaaacagaacagaaaggcggagataaaaagaggggtgttaaaagaccacgagaagatcatggccgtggatattttgagtacattgaagagaacaagtatagcaggtataggatgctcacctagttttactcatcccttattcgttcgttgatcggaaagctgtatcaggagacaattctgtctttcagagccaaatctcctcagccacctgttgaagaagaagatgaacacttcgatgacacagtggtttgtcttgatacttgtaagtgaagctgtttctccccaattatgaaatgcg

SEQ ID NO: 13466 - DNA, 592 bp, Homo sapiens
  MAP TO CHR4.3; EXPRESSED IN FETAL LIVER, SIGNAL = 1.7; EXPRESSED IN LUNG, SIGNAL = 2.2; EST_HUMAN HIT: AA249850.1, EVALUE 6.00e-05; SWISSPROT HIT: Q9Y5Q5, EVALUE 1.00e-25; NT HIT: gi15295189, EVALUE 0.00e+00
ggaaagcacaactcctccacaggctgacaaggaaagctttgttgaaactttccaagttggttaatctgggtttagctttatagtatcctcaggatagcatggacacacattactgccctgaaatgccagttcctaactcccatcgttacttattgcagggtgacagcggtgggcctcttgtttgtgagaagctggaggacggtggacattatttggattaacttcatggggctccgtctgcttttccaaagtcctggggcctggcgtttatagtaatgtgtcatatttcgtcgaatggattaaaagacagatttacatccagacctttctcctaaactaattataaggatgatcagagacttttgccagctacactaaaagaaaatggccttcttgactgtgaagagctgcctgcagagagctgtacagaagcacttttcatggacagaaatgctcaatcgtgcactgcaaatttgcatgtttgttttggactaatttttttcaatttattttttcaccttcatttttctcttatttcaagttcaatgaaagactttacaaaagcaaacaaagcagactttgtccttttgcc

SEQ ID NO: 13467 - DNA, 510 bp, Homo sapiens
  MAP TO CHR13.3; EXPRESSED IN LUNG, SIGNAL = 0.86; SWISSPROT HIT: P28715, EVALUE 5.00e-36; NT HIT: AF255437.1, EVALUE 0.00e+00; EST_HUMAN HIT: AA312903.1, EVALUE 1.00e-115
gttctttgttccctgttggggaaagggtggaaatatggtaatattatctgtatttaatataaaacagtaattttgtttgtttattttgcctttaggagtctgatgacttttcacagtaccaactcaaaggcttgcttaaaaagaactatctgaaccagcatatagaacatgtccaaaaggaaatgaatcagcaacattcaggacacatccgaaggcagtatgaagatgaagggggctttctgaaggaggtagagtcaaggagagtggtctctgaagacacttcacattacatcttgataaaaggtatcaggcaccatcatttatatatttacattaaaaaatcaaagatatatcatgactctgaattctataaactagcacccctggataatattaatgaaattctatttatgtaataactgtatactgctattaatggattaactactatagtgccaaaccactttaaaattagctaatgaattaactcctagttgccgattaaatgaa

SEQ ID NO: 13468 - DNA, 553 bp, Homo sapiens
  MAP TO CHR5.3; EXPRESSED IN LUNG, SIGNAL =  23; EST_HUMAN HIT: BG720551.1, EVALUE 0.00e+00; NT HIT: gi14734892, EVALUE 0.00e+00; SWISSPROT HIT: Q02877, EVALUE 1.00e-74
ggcactcttgggtattcacaggtatttttttttctttgtttcaagttttaatcgaagcttgtatataagattactttattcctgcatcttctcaattgtttcttccttgtatttgcccttttcctttcctacttggcaagatttggctttccgttcaaggatcttttcacagtctttgtccagttttagcctagtgataaccaccttgctggggtgaatgcctacgtggacagttgtgccattagccttttcccgctgcacccgttcaatgtagataacatatttcttcctgtaaacctggactactttgccaatttgctgacctttatagtgtccatgtacaacctgaacttcatcatcctttcggatgggcatggatcacacgttgtacttctgtctcagctctttggaaagaggggaagacatagtcttccttcgaatgtgggaaggtgcattgaaatgccttttgcgattcttgcttcggtcggaagtcacaaagggattaaacttcattttggccactcctgcttcggtgatagccgcaaaagggaag

SEQ ID NO: 13469 - DNA, 570 bp, Homo sapiens
  MAP TO CHR17.3; EXPRESSED IN FETAL LIVER, SIGNAL = 0.79; EXPRESSED IN LUNG, SIGNAL = 0.44; EST_HUMAN HIT: W76135.1, EVALUE 6.00e-85; SWISSPROT HIT: O76009, EVALUE 6.00e-27; NT HIT: gi15208635, EVALUE 0.00e+00
agctggataccacctgcttgttcagctcctcggtctgaaacacccaaggggagaaaggatcagaccctgcctccggggccctggggggcctcgggtcctgagtggccacgtgcttagatgcccacctgcgtggcgaaccattgctccacttccctgcggttggtttccaccagggcctcatactgactcctggtctcattcaggacctggttcaggtccacagtgggagcagcgtccacctccacgttgaggcggtctccaagctggcagcgcagggtgttaacctcctgatggagaaagggcaaaattttaaatttcacaaaggatcttggtgctctccttaagagaatgcaattcaacttctgatcattcttaagctttcaagaaactttgttccctctgatcctgtcactaaccaggatctatattcaatgactaatttgtatactccactttttacaaactactttcaagcccatgacttccctctgctctttgtattaaatgtatcactcctcatttagagagattcagtgatttgggctcaaagctgatacatggtgggccatt

SEQ ID NO: 13470 - DNA, 552 bp, Homo sapiens
  MAP TO CHR14.3; EXPRESSED IN LUNG, SIGNAL = 0.55; EST_HUMAN HIT: BG054621.1, EVALUE 0.00e+00; NT HIT: AF361796.1, EVALUE 0.00e+00; SWISSPROT HIT: P05154, EVALUE 3.00e-41
gcacccaagagcaagacttctacgtgacctcggagactgtggtgcgggtacccatgatgagccgcgaggatcagtatcactacctcctggaccggaacctctcctgcagggtggtgggggtcccctaccaaggcaatgccacggctttgttcattctccccagtgagggaaagatgcagcaggtggagaatggactgagtgagaaaacgctgaggaagtggcttaagatgttcaaaaagaggtactttcagactaccccagggccagcctaaacccacacagccccagggagacacacacgccctaccagggccacacagcactggtgggaaggactcacccagccaaggagctgcctccaggcccagaggcatcctgtgacatccaagtcctgggggcctagcccagttggagggacaagagctggaaactgggttccttagggtggtgccagagtgggcagagacctctgggcagcccacgtccaagtccagagcaaggggaggctcatcctagaaaagaggccagaggagccataaccaccattgttcc

SEQ ID NO: 13471 - DNA, 553 bp, Homo sapiens
  MAP TO CHRX.3; EXPRESSED IN LUNG, SIGNAL =   1; EST_HUMAN HIT: BF910416.1, EVALUE 6.00e-54; SWISSPROT HIT: Q06787, EVALUE 4.00e-21; NT HIT: L19485.1, EVALUE 9.00e-80
tgaggatgcacctttctgtgcaatagtactcttaagatactgtctcatcaaagagccgtaattttcacatattgtctagctttctttttgaaagattcttttagctaaagttaaatcttttttttctgcgtacaatttgtattcggtaattttataaaccaaaactgtttataataacttacattttttaaaaatatgatgattgataacactaatagagctaaataaagtcttaaattggtcctttttttctcttttgtgttttctgttttttaccaaggaaattatgccaccaaattcccttccttccaataattcaagggttggacctaatgccccagaagaaaaaaaacatttagatataaaggaaaacagcacccatttttctcaacctaacagtacaaaagtccagagggtaagaattacttgtcactttgaattacaatacaagtaatttgtctcagatgtcacaattggtattttggatgttttctctggttagacttgtaggctacttatgttctattttttttccaaatgtaattgccagctt

SEQ ID NO: 13472 - DNA, 545 bp, Homo sapiens
  MAP TO CHR1.3; EXPRESSED IN FETAL LIVER, SIGNAL = 0.72; EXPRESSED IN LUNG, SIGNAL = 2.3; EST_HUMAN HIT: AI918126.1, EVALUE 0.00e+00; SWISSPROT HIT: Q11174, EVALUE 5.00e-06; NT HIT: gi16160974, EVALUE 0.00e+00
gcaaggctgagagcagaaagcctggataaaggaagaccacagaaaggcctgcaggagccagattgcggcccccagggaaaacccaggaggcaggctgtagagtgatcctgggcccagcctcaaagctgggactggaggggctttagcgactcaattccaggtgcagcatttgcaggagttgctgaacaccaggcctgtcgggcagctttgctggaacagccgccccgctgcacagctgtagaagctggaccgttcccgaggattgggatagagcccatcagctttgccctggcagaacgtgtcttgtccagggctggggccatgctcaggttcagagggctgacctggttttggaacttcaagctctggggtgcctgaaggcaagtatggaagacctgggaagacagtgaagattcaaccaaggctcccccgaagagatcccaaacccacaggcagagcacacaggcagcaaccattggctggcagcagcccagcaccacatgccctacaggctgagtacagccagataccccaggcagagaaca

SEQ ID NO: 13473 - DNA, 516 bp, Homo sapiens
  MAP TO CHR5.3; EXPRESSED IN LUNG, SIGNAL = 2.7; EXPRESSED IN FETAL LIVER, SIGNAL = 3.9; SWISSPROT HIT: Q9TT15, EVALUE 5.00e-31; EST_HUMAN HIT: BG323263.1, EVALUE 8.00e-81; NT HIT: AF151094.1, EVALUE 0.00e+00
gtagagttagccttggcccccccacattcagggtcttgcctcttgcagaaaggcaagtatagtgtttaggagtgaagtgaagccaagtgagtgctatggtgcaggctgtgactcttctctctcctttgaaggaatttacaagctcaggctcagccaacactgagaccaccaaagtgacgggcagtctggaaaccaagtacagatggactgagtacggcctgacgtttacagagaaatggaataccgacaatacactaggcaccgagattactgtggaagatcaggtaatggctgctgtgaaaagatgtggatttattaattcgcatctgccagcctgccttgtgactaaatctagtggcaaatttcttttctgttcagcttgcacgtggactgaagctgaccttcgattcatccttctcacctaacactgggtaagagtttcatctgttttctccacaaggatgttctctgatgttgcaggtggtggaagccctttgtgacaaaatgttttggggg

SEQ ID NO: 13474 - DNA, 533 bp, Homo sapiens
  MAP TO CHR19.3; EXPRESSED IN LUNG, SIGNAL = 6.4; EXPRESSED IN FETAL LIVER, SIGNAL = 4.7; NT HIT: AF092453.1, EVALUE 0.00e+00; EST_HUMAN HIT: BF344063.1, EVALUE 2.00e-72; SWISSPROT HIT: O75821, EVALUE 8.00e-37
ggaagctgatgaaggcaaagccctgtggaggggcgggatggggtcgggcacgagctaggacaggcgaccctaggacaagtgaccctcacacagccccaccgtgcctgcctgcctgcccaccttggattggccagtggtcttgtccttagccaggtagatgcgggagatggagccgaaaggccggaagagctcctgcaggtcggtctcacgcgtgtcctctgacaagttggtgacacggatggtggcgttgtcgtcggctgtgtgggagaggggaggtggctgtgagggggaggacactgcccagccctcgtgtgctgcccagccctcgtgtgcacgcttcggggataattacgaggtgccgggaggtgcccacccaccagcctggcgtcggggtgcccctcacctctgcggttgggctgcatggactccccgcggcggctggccccgtcgcgcaggctcggcggcacatacttccctgtcttgttctgcgtggcctgcaccggctctagctctggggaccaaaagacagtcaa

SEQ ID NO: 13475 - DNA, 515 bp, Homo sapiens
  MAP TO CHR1.3; EXPRESSED IN FETAL LIVER, SIGNAL = 3.2; EXPRESSED IN LUNG, SIGNAL = 7.2; SWISSPROT HIT: Q22038, EVALUE 5.00e-18; NT HIT: gi14739280, EVALUE 4.00e-63; EST_HUMAN HIT: BG677963.1, EVALUE 0.00e+00
gacatgcaccaacaggtgtcggtgcctccacttaagctagaaagctcccctgggggggccctcatcttcccagagcagtcttagaagccattcagcatgatggtccctttcacagctcaaaacctcaacagtagtatgccctcagagggccagttaccacagtaaaggagaccaacagggcctgagtgctcccctgcatccccacccccacctctgaagatgactgaagacaggccaaggcacgagacctctggctgattccaaggggttctcagtcccctccctccaatcccctcacccaggctgtcagggctgtcgatggagaagcacatgaggatgacatcagtgtccgggtaggagagaggccgcagtcgatcatagtcttcctgccctgctgtgtcccacagagccagctccacctgacacacagggccagtgagtagctggcctgagggccccaaccctgccacccaaaggtcccctgaaaccactgtccttcgggctcactgaacttc

SEQ ID NO: 13476 - DNA, 505 bp, Homo sapiens
  MAP TO CHR18.3; EXPRESSED IN LUNG, SIGNAL = 0.47; NT HIT: gi16163728, EVALUE 0.00e+00; EST_HUMAN HIT: BG722695.1, EVALUE 0.00e+00; SWISSPROT HIT: P36051, EVALUE 1.00e-10
ttctcatcatcacccctgtgcccagtgcatgataaatagtaagatattttgcagtttacttaactcagaataacattttaagagatgtctctgtatcagtttacatgcttacctaataaacggtgctctagagtttccattttcatctaattcgtaaagtgcatctgctcgaaggccatcagcaacaaacaacactaatcttctcgctggaggaggcaatggtgtaaactgaggagtcattccatgaaccaaaggagatgtaaaataaatgtcaaagatggaggcgaagaacacaaaatgtataagcaatcccaaagtaaagaacagcagcatatccagtgtaactaattagtcttcaagaacagctgaaagagagaacaaaattaaattggggtaaatcttaatgcattcatatgtattttcacatattttgatgatcacaagtagatgaaacatatatttttaattattatataactcacaactttactttcatttgtggtgg

SEQ ID NO: 13477 - DNA, 559 bp, Homo sapiens
  MAP TO CHR16.3; EXPRESSED IN LUNG, SIGNAL = 1.7; NT HIT: gi14775323, EVALUE 3.00e-89; EST_HUMAN HIT: AA203413.1, EVALUE 4.00e-89; SWISSPROT HIT: Q9ULV3, EVALUE 2.70e-01
tggcaaagggtttgagaatcacagctgtgaacacaaaggtcatttgggcaaattggaatgaacatgcttctctattcaattatcctaagacatttcaaattagtattggaagactattaaatcttttcatataacctaagaagagtgaaaggaatggtttgatgagcagcgaaacactttgagccaaaacccaagaatccttcagggtctgtcagagcacagcaacattagaactttaacacccaggtattccgtgtcagctgacatgtccatgaaaatttgaggtcagcaattctgacatggaaaaattgtagaaacctacatacctatcacaaatactgaaatagcctgttgggaagcggtgctgccagcagtactggtcgtcctcggtgtggaaaaccttctctttgtgcttctcggaggagatgtggccctgccactgcttctcactgttgcagtttttcccacacatccagcagtgaaagtccacctaatgtgcagcaaagacacatgtcccattagtcacctgatgtgagatccagactcaattccagggagc

SEQ ID NO: 13478 - DNA, 540 bp, Homo sapiens
  MAP TO CHR14.3; EXPRESSED IN BONE MARROW, SIGNAL = 0.63; NT HIT: U87252.1, EVALUE 3.30e-02; SWISSPROT HIT: Q03560, EVALUE 2.30e+00
tcgttttccccttgaatgtcttaggtcaatcacaaatttctataaaatccttctggattcccatcactaagtttccatttttctcttagaattttaaaccatttgtttcatttccattctttcaacctcagaatgaaaatatgaaactgtacatggatcggttcgtttattgtctgattgtggctctagaaattgcagttttctatccttccttctcatgggattatggaaaaggtaaaattaataaatggccataaagctcaatttccaggtacaaaaaccaatgccatattcactctctttcaaatactgtttcagtttggttagaaggattttcaatttcaacgcatttttaagggtcagtcaatgaggtttggcaccaaggcaaattattcaatccttttatcttccccaatgctttgagaaaaataaccaaaataagggatgaaagcatataaatagctgcaggccattgattcctgcacaagcaaacatgtaccaaagacaggaaaaaaaaattccatctctcccttctgctca

SEQ ID NO: 13479 - DNA, 527 bp, Homo sapiens
  MAP TO CHR14.3; EXPRESSED IN FETAL LIVER, SIGNAL = 5.4; EXPRESSED IN BONE MARROW, SIGNAL = 1.7; SWISSPROT HIT: P54854, EVALUE 7.40e-01; NT HIT: gi13650450, EVALUE 0.00e+00; EST_HUMAN HIT: BG767699.1, EVALUE 0.00e+00
ggcatattgggtggaatcagaacattcagcaatatgttgcctaaattggtgtctgcccgcaccaaaagctatgtcttctgatttgccgtaggttttaaatgcagagtacctatgcctttctctttaaactcattgtctttcttgtaaaatagtttacactttttggagtaaaaagcatcttcttttacttcggtaactactactttgggtggctcatcattctcttcttaatctccacctttgcattcaccactgtcaccttccgcttggccctccaatggtttagtgggaaatggtgaagagactggtttactctggataatatctttgccaaataaactagagtttccaggggagaatgaaaatccagtcgggggacagagcttaatgagcccaaaacagagctatcaactttctcgccgaaattaaatgaggcacttgtcgctcctagtgatgatgggtccgttttcttttcagatgccacctccaccttcttgtcaggtgtatcttcagttttgctgccatga

SEQ ID NO: 13480 - DNA, 507 bp, Homo sapiens
  MAP TO CHR19.3; EXPRESSED IN BONE MARROW, SIGNAL = 0.76; EST_HUMAN HIT: BF826295.1, EVALUE 2.00e-63; SWISSPROT HIT: Q14324, EVALUE 6.00e-34; NT HIT: gi15303543, EVALUE 1.00e-63
caaggcagaggcaaagaaactatgtgcacctgtatggagatcagggatcaagggtcacttaccacatcacctgggcaccctcttctgacacctccactgccatttccacccggtcacccacaaacacctgctggtcctcaagaggtgtgacaattaggactggaggttctgtggggcagggggacaggaggtcagtcgtttcaggaccccctccagagttccagtccctctccaggctcagttctgaattccagcctcacctttgacgaagagctcggtgaaacacttctcatccttgacagctacttcataggcagcgtcatccgccagcgtgcacttgttgatggtaagaattcgcttcttaccaacgttctcaaacacgtacctgattcaaaagtctcacctcaaaccagggcgtggagcatccacctatccctggggtagctctgcttacctgttctcaaggcaagtctctctctctctctctcagagccaaattgtgtggaa

SEQ ID NO: 13481 - DNA, 592 bp, Homo sapiens
  MAP TO CHR18.3; EXPRESSED IN FETAL LIVER, SIGNAL = 0.92; EXPRESSED IN BONE MARROW, SIGNAL = 1.2; SWISSPROT HIT: P52683, EVALUE 3.30e+00; NT HIT: AJ296303.1, EVALUE 5.70e-01; EST_HUMAN HIT: AI766656.1, EVALUE 8.30e-01
gacctgtgggaagcattgactcttcatcaggggttgtgttgttcaatcttatcttacgaatttgcagtcagatggaaggttcaggacttcacagatgtgcaagatttctcatttaggtagaagaagaggatccaggtcatttctgtgtaagagatgactcaaggctgggaagacccagagcccaaagctgtgaaggttctacgagtcacggtgatcttactgaacagggacttttcaagccacttcatttacggcactgcgcagagggtagcaaaggcagagatggctgggctgtaagctccaaactcaatttgaatcatgaaagattacttttatctggtttttgcacaagtgtacagtgggttttgtataaatcttgagagggaaaaagcattctgctgctaacacattaacaagttagaaatcttgcctcagagggtatttctttagcctgatgcttcaagtggggcctgaaaccgttctggggggagctgggcatgctcatgtgtctgagcctgggtgggcttcccccatctttcaagccactttggctctggctgtcaaggatcactgatgtcactgtgagccatgg

SEQ ID NO: 13482 - DNA, 501 bp, Homo sapiens
  MAP TO CHR14.3; EXPRESSED IN BONE MARROW, SIGNAL = 1.3; EST_HUMAN HIT: AA436981.1, EVALUE 0.00e+00; NT HIT: M83134.1, EVALUE 5.00e-04
ctccaaccttccaaatcagccttcttcttaggcttgagtagtaatcatggttctgagggtgaccttccaaattttcctgtctgtacctcttccaccaggggtagagtgtcttcccaaccataatggtttctctccagtgtcctcagcttctcctcctttgtacttaccctgcagattaaggatttcttctagatggagtttcctgggaatcctctgttttcttttgtttctgttgactccaccacaccccataggtcacaggtttgattggatttcccctggagacagtggaggtggatccaggcgttcaacagtcctcgctgttcttcccttcctgtcagcaccacaggacagcagataagggagttgactgtggatttttcaaattcctgggaaaagcctgcaaggactagtagattcacactctaataccattagcacatgcatccaaaaaaaatcctcactaaatatttccaggttagcctgttcctctctcaatgc

SEQ ID NO: 13483 - DNA, 536 bp, Homo sapiens
  MAP TO CHR18.3; EXPRESSED IN BONE MARROW, SIGNAL = 0.69; EXPRESSED IN FETAL LIVER, SIGNAL = 0.93; NT HIT: AF201726.1, EVALUE 8.00e+00; SWISSPROT HIT: O15541, EVALUE 5.80e-01; EST_HUMAN HIT: BF527096.1, EVALUE 1.90e-01
actggatgtgaaatccctgcccgagccacgtccgggctgagggcctcagcccgttcccagctcagctcagcgccagtccattaaacctgcttccaagaacacataatgatctgcttggcgcactcagactctccttggctgcccacacctcctcttctccttcagaaatatggacagagaggctgtttggatcagtcccacgtctctccaaaaaccaggcctcaaatgtctggcaaggggctcccaaaacagaccagctcctccatcctctttgtaagaaccctccttgttgaatatctaccgttcgcctgtgggctaccctggagggatcattgctggaaggcccagtccttgcctgcaaagggctcacattcgagtgcccaggagaagcagtgagcaggcactgtgtcctgagcaggaggcacaagggcagagggcaagagggcggtgcagagagcacagagcggctgccctgccctcccagccctggggagactgggctcagcttccatgtcaggacttggctaagcaggtga

SEQ ID NO: 13484 - DNA, 548 bp, Homo sapiens
  MAP TO CHR16.3; EXPRESSED IN FETAL LIVER, SIGNAL = 0.87; EXPRESSED IN BONE MARROW, SIGNAL = 0.75; EST_HUMAN HIT: BF312249.1, EVALUE 1.90e-01; NT HIT: AE005822.1, EVALUE 5.20e-01; SWISSPROT HIT: P15054, EVALUE 1.30e+00
gaggggtcacagagaagtcggtggcactggccaattggagggtccacatgaccacaccctcacagctgcactcttggcctaacagtaagcttcctagattttcctcattgcccaacccccagaggcctgagcaacgcagctggcatggaggatgctgggggagggcctaccttgtcaagcatgttcttcagcatgtccacttcttttctgagggctgtgatggtgacctggagtgcatgaagatcagtgagcaagtcctgcagggtctgcattgactgcaaaagaggaggagaaaatgtgaagccgggtatggctgggggagaaggtaagtgaagtgcagaagctttctgatgatagccgttgttcaagaggtcctcttggctctcccaaggcctagactggaacctacaaggggaccaggagatgctactaaagtcaacagtgctctcatctccaagtggcctggatgagaaggaggcaactctgtatttgaatatatccagaaaccaggagttactcgtcatgaagcatctcacgccctttcttct

SEQ ID NO: 13485 - DNA, 579 bp, Homo sapiens
  MAP TO CHR19.3; EXPRESSED IN BONE MARROW, SIGNAL = 0.81; EXPRESSED IN FETAL LIVER, SIGNAL = 0.96; EST_HUMAN HIT: W22972.1, EVALUE 1.00e-92; NT HIT: gi7657477, EVALUE 0.00e+00; SWISSPROT HIT: P14061, EVALUE 4.00e-07
ggttggggcatcagacttacactacccatgcctggtcgccagcatctccctggtggagccaggccccgtggtcaccgagtttgaggggaagcttctggcgcaggtttctatggctgagttcccaggcactgaccctgagaccctgcactacttccgggacctctatctcccagcctccaggaagctgttttgctccgtgggacagaacccacaggacgtggttcaggtgagtgaagggcccagagccccaagacgtggctcaggtatgttgcggggtgaggccctccctgggtcccagcgctcagggcctccattctgcaggccattgtcaacgtcatcagctcgactcgaccacccctgcgccgacagaccaacatccgctactcgccgctgaccacgctcaaaaccgtggattcctctggcagcctgtatgtgcgaacgacccaccgcctcctcttccgctgtccacgcctcctcaaccttggccttcaatgtctgtcctgcggctgcctcccaacgcgggtgcggccaagatgagcagaacagagcttcacgatccccatccctgaacaaccagac

SEQ ID NO: 13486 - DNA, 551 bp, Homo sapiens
  MAP TO CHR18.3; EXPRESSED IN FETAL LIVER, SIGNAL = 0.98; EXPRESSED IN BONE MARROW, SIGNAL = 1.1; EST_HUMAN HIT: BG190442.1, EVALUE 2.00e-01; NT HIT: AE001540.1, EVALUE 5.20e-01
actgttgctattcatggggcagaatattttcactagtgctgattatgattgccacgttccctcttcacacttcttgtctgtcttcttgaagaagtaggtgctaatttcatctggaaacttgatcgataaattagtgttattagcaagcttcttttgagatctcaatgaagaggttcttcagttgaaaaactcttcctttcactttggaaaaggggaagtcggagcaaatagagcctgcgttttctcttctgttactgagggggaaaatgcattcttcctgttgactctacaaggagattataagcaacaatttcagatttctgtagtcttaaatccagatgcttttactgcttgtgaggaccaatgctctacaaataaaaaccattccagcatagctacccttcagagatttgcatatatagttgtcagttgatgaacacttccttctttctctgagcaatttcaattatgaaaagtaagcaggaacatttaaggagctggaagatacaatagttgtccccataaggtattgtcgaagaaacatctcccca

SEQ ID NO: 13487 - DNA, 518 bp, Homo sapiens
  MAP TO CHR14.3; EXPRESSED IN BONE MARROW, SIGNAL = 0.91; EXPRESSED IN FETAL LIVER, SIGNAL = 1.1; NT HIT: AF156097.1, EVALUE 4.90e-01; SWISSPROT HIT: Q9HNE3, EVALUE 2.80e+00
catgtccttatcctgccctcttcaatatgagagaagggccatggataagaattgggggcattttgagcaaagcaggttaagggaaacttccaaagccagtttctgattctttctccaccctactcttcttgtccctgggacactgtcatcaactgtggaaagtatatgactcttctaggtatagctctccctttggaacatatgcaaagatatcctgcagcattattttaggctcttctctgacccaggttaatgattttggaataggggctgaggacttacaggacaggaagttacaccctagactcaccagatgtggcttcaggaggcaagaggaagaccagcaaaatgatcagggcctgcattttccctgcgacattgcccatactgaccatggctagttctgtcaccccttcactgggccccgcttttatagccctagaagtagaagaaaggggatggcttgaagccacagaaaccacctgatctcatttctgtctttcatgctggcatggtta

SEQ ID NO: 13488 - DNA, 530 bp, Homo sapiens
  MAP TO CHR16.3; EXPRESSED IN FETAL LIVER, SIGNAL = 1.2; EXPRESSED IN BONE MARROW, SIGNAL =   1; SWISSPROT HIT: P40340, EVALUE 1.30e+00; EST_HUMAN HIT: AW884493.1, EVALUE 1.90e-01; NT HIT: AB055894.1, EVALUE 3.20e-02
ggggtattggacctctgttgtatggtatatgctagtgggagagactttttttctatctttgcttcaaacttgtgcactgtgatttctattatgtaatttaagtggacatcttttagataaaataagcctataataaaatggctttgatggcagatgtacaaactataaaaatgaatacacatatgcatgtgaagtaatacttttattattctactgttctacaaataagttttgccttatgctattttcccagcttctcattgccttcatggatatattcatttgaatgactgtcgtcagagatttcatccacagacctgcatttttaaagaggatttgactgggcctcctgttttttctctctctaatcatttgggccacagcagctaattgcagtgtctaattgtatcctcagttggctgcttgcacccacaattaactaaatataagcaccagcatcttggtacattcaattttatgcctcaaagggagctgtgtgagagggcagttggcagttggctatcttcagg

SEQ ID NO: 13489 - DNA, 553 bp, Homo sapiens
  MAP TO CHR18.3; EXPRESSED IN FETAL LIVER, SIGNAL =  78; EXPRESSED IN BONE MARROW, SIGNAL =  41; SWISSPROT HIT: P02383, EVALUE 8.00e-35; EST_HUMAN HIT: BG612921.1, EVALUE 0.00e+00; NT HIT: gi14759881, EVALUE 0.00e+00
aggaaggcagtcctctctccggtccgtgcctctaagatgacaaagaaaagagggaacaatggtcgtgctaaaaagggccgtggccacatgcagcctattcgctgcaggaactgtgcccgatgcatacccaaggacaaggccattaagaaattcatcattcacaacatagtggaggccgcagcagtcagggacatttctgaagcaagcgtcttcgatgcctatgtgcttcccaagctgtatgtgaagctacattactttttgagttgtgcagttcacagcaaagtagtcaggaatcaatcttgtgtagcccgcaaggaccaaacacccccaccccgattgagacctgcgggtgctgctctacaacccccaccaaagcccatgtaaggagctgagtccttaaagactgaagatggactattctctggagaaaaataaaatggaaattgtacttaaaaaaaaaaaaagaggaagacagttcttagcgaagtgctataaatctcttagacctttgagggtaatttatagtttttggagcaaccccacctctagctta

SEQ ID NO: 13490 - DNA, 507 bp, Homo sapiens
  MAP TO CHR18.3; EXPRESSED IN BONE MARROW, SIGNAL = 0.94; SWISSPROT HIT: P03318, EVALUE 2.70e+00; EST_HUMAN HIT: AW183657.1, EVALUE 4.50e-02; NT HIT: U54776.1, EVALUE 4.80e-01
gatgagagaaaaaccatctgggtttcatactttttcacaatgataaagaagagaaaataatagagaaacatctattgaggactttacgacattgtgacaatgtgagaaggcagagaaaataaaaatattgtatggtaaatgcccagtggtctttgcagccccaggtgcaactctagggcttcacctgccaggtgttttctcagccaccctcagctgaggtgcttcctaccttttcatcatagctgcagcccattcttggcccacaaggttgaaagctctgacagaaggggttttaaggaaaaaggctgtgattttaacatcctgaacccgagtcaagttcctgttcacatgggaaattgtaaaggaaaagactgaaaagccgtcatttgttctagtctgaaaacaaacaactatcaaacactttaaggtcatatttaagtttactttggtataagaaaataaacatttcaacaaagaatttttaaatggtgctacgaaaaatgcctg

SEQ ID NO: 13491 - DNA, 509 bp, Homo sapiens
  MAP TO CHR14.3; EXPRESSED IN BONE MARROW, SIGNAL = 0.9; EST_HUMAN HIT: AA888741.1, EVALUE 7.10e-01; SWISSPROT HIT: P36941, EVALUE 3.60e+00; NT HIT: AF265669.1, EVALUE 1.00e-35
ttttgtttgacatttgaaagctgtattttataagattttcctcgacatgtaccaaggttactgattcacttaatttctttttatatgtgtaagaacccaattctaaactcctgtaacaacagtttctaagtatcctttttgtatttagtgtttctggttctaacagcataatttctttcagcagtgtcataagtatggctaaacccattggtctatgcatgcctaacagtgcccacatcatggccagcaataccatgcaagtggaagagccacccaagtctcctgagaaaatgtggcctaaagatgaaaattttgaacagagaagctcattggagtgtgctcagaaggctgcagagcttcggtaagagtgtggcactccatgcctcaaaccaaaacgaactgaaaaagctaagagattcttatttatacctttcctccatctcagaggaaaagagtgtttgggattaaattcaatcggagtagtagacacggagtccctcgtaggttaa

SEQ ID NO: 13492 - DNA, 588 bp, Homo sapiens
  MAP TO CHR18.3; EXPRESSED IN BONE MARROW, SIGNAL = 0.92; NT HIT: X01704.1, EVALUE 9.00e-03; SWISSPROT HIT: P34735, EVALUE 1.50e+00
ttggtgtcttttcctccaatctttcatatccagtaagtcatcccactaccacagcaaaccaactaggattggccgaaatcgtgcctgcttgcgccttctttctagaaatttccatgtccccagcgtgcatgttctgtcgccttctgcccctttctgtcttgctgccgtactctccattggtcttgcctctgctgccttgtttcctttctgtacaagtgcaaggcagagctctttcctttcccctgagcatctgtccctgtgcaaatttatcaggtttctctcgtctagcagagaaagaaaaatgaagtatcagcattatggcctatctgtgcactttttaaaattaactgcaagcttcatttaatatcttcattcttgtttttcctttccttttctcttccactttaattttattcctcctcgctgtactcttggatctcagtaagccaccttaagttctttttgacataagaaagagagataaatacattttttcaacttataaattgaggtagtttcgtgtcccagggtttcgaagttaatactgtctttcttcctgcgtttaacacggacttgatggaacaggtc

SEQ ID NO: 13493 - DNA, 598 bp, Homo sapiens
  MAP TO CHR16.3; EXPRESSED IN BONE MARROW, SIGNAL = 0.62; NT HIT: AB019549.1, EVALUE 3.70e-02; SWISSPROT HIT: P93149, EVALUE 3.40e+00; EST_HUMAN HIT: AW874691.1, EVALUE 0.00e+00
tttggtatctggaaccgaggttgctaattaatgacccaagagctaagccttgtttgatgaaatgcaagatgtaatacacagattgccttggagtgatgtgtgattattaccatccattcatgtgtaatcccgtatttggaaggtttgtaatttgtttttgacacatttctctctgattttatacactcatgcatacaggtctcacctccctccaaaaccttatttccaaagcagactttgtttgtttggtttgggtaattcattgggccctatttgtcttccttatacataatctattttcttactgctgcctctgtcttccaaaccaagaatataaagaatgaagcctggggactggaacttaaaacttctgccgagaaaagaaagtcaaggcctgtgggctcctaaaacatcctgtggaattcgcctcagatgcccctccatttgcactggtatatggaggatgtttgaaaaccaccagaacctattgtgtactttggaacaatggcattttcctgcttgattgtgaagatggccgctggaaaagaagccaactcccagggggcacgaggggctaagctgtctcctgggaagtttg

SEQ ID NO: 13494 - DNA, 529 bp, Homo sapiens
  MAP TO CHR14.3; EXPRESSED IN FETAL LIVER, SIGNAL = 0.79; EXPRESSED IN BONE MARROW, SIGNAL = 0.83; SWISSPROT HIT: Q10069, EVALUE 8.40e+00; NT HIT: AJ318061.1, EVALUE 5.00e-01
aagtgcatgctcagggaaactgaaattctcattctcatgagatctcttctcacatttgcactacctgatcttcaattcattggtgaaaaagaaaatagtttggccttcatactttatttttaacagaaagtttactgctttctgaagttcagtatcatcaagcttccagtgcaaagtcaagtttgtgtgacttgcttaccagatctgctgaatcaaaaatttgccatcttgagatataaccgaggctttagcaaccataaagcccatcagctctaccctcagtccctcctcattctcaattttaggtaaggtgataagccactttagcatcaagacaaggtccccaagcattcttctcctttatataaatttgggggcttccactgataaaaagccatggcttgaacatagggcaaaggtaaatagaagattgcctactgaccaagtggctgtagtctcttgtttgccattggcccttagctggagtttctgacatgattctacttaatcaacaagaagctcccacctc

SEQ ID NO: 13495 - DNA, 586 bp, Homo sapiens
  MAP TO CHR19.3; EXPRESSED IN FETAL LIVER, SIGNAL = 0.78; EXPRESSED IN BONE MARROW, SIGNAL = 0.85; SWISSPROT HIT: P29315, EVALUE 2.00e-10; NT HIT: gi16176805, EVALUE 1.00e-91; EST_HUMAN HIT: AI820831.1, EVALUE 0.00e+00
agctacattccccaaatccctatagaatattactactactctactactacttatacttttttcctaccatcatctacccaggtcttaccagttgtcattagcatcatgcttggaacttttagaggaattaagtgttctcataaccaccctactcaaacccggaggtggggggcgtgtgcatatacacccacgcacacaggcagccagcacggacttacaccaaggtctgcagtttacactcggggtacctcaagccctcacacagaaacttcacccctgtattcccaatggggttcttggccaagcacaggtgtgtcagctcccggctgacaaccaacacagcagcaaggtccttgcaattggcttctgtaaggtgacagttttccaacctacaaaagaatcacaaatggcaacacggttgacaggtccaacttcaaccttcccggctagctccacaagtgccagcatccaaaagccccttcttgtgaactccccaccttctatcatgcactggtgatcctatgaaggaataggaatgagagaagaacaaaattcacaggccatcggcctggatctaaacatggga

SEQ ID NO: 13496 - DNA, 590 bp, Homo sapiens
  MAP TO CHR16.3; EXPRESSED IN BONE MARROW, SIGNAL = 2.8; EXPRESSED IN FETAL LIVER, SIGNAL = 5.4; SWISSPROT HIT: P49743, EVALUE 2.20e-01; NT HIT: gi16165042, EVALUE 0.00e+00; EST_HUMAN HIT: BF526249.1, EVALUE 0.00e+00
ttgacaccagcgtcttcatctccaccttcctcggctagccaaaacagctggcaggactgccggtcacacaccagcacgtcccacctcgtgctcacggattttattacacagatagtggcggcaatggcctcagcccagcccaccctcacctgcttttccagcccacaaagggggacgatcacggcccagcaaaagcgatgctgagaggggaaacagtccagagtccaacagcagaacttgggggaagcggtcggggtggccaggaacataaactatgtataggggccgggggcttctgcccagggctcccctggaccaggacgccaggtagggcagggaacctcagtagtcctccacccagccattctcagagatgaatgcgtcaataacctccttcatagccaagttggggatgagctgttcctgggtcagggggctccgggtcacggggtcaaaatgacccacacgctgcagtgacaagaagggcagagggcagtcatggggcccaggaccatgccactggccctgctcccccagccgcaggcctcacctgcaggtgctcctcgatgtccttgcggtcgtaggtgatg

SEQ ID NO: 13497 - DNA, 582 bp, Homo sapiens
  MAP TO CHR18.3; EXPRESSED IN BONE MARROW, SIGNAL = 3.8; EXPRESSED IN FETAL LIVER, SIGNAL = 2.7; EST_HUMAN HIT: AW732427.1, EVALUE 1.00e-112; SWISSPROT HIT: P43616, EVALUE 2.00e-10; NT HIT: gi16164102, EVALUE 1.00e-112
ccttattgcagagggagcagcacaggctttcctggaagctcccctcggtcatgtggggtgactccagagagccccaccttgcgagactggaccagtccaagtggcctggagccacagcggcctggcagtacctggggagggggtgatgacaggtgcacacggaggcccatgtggtctgtctggagaatgccggagatgtgaaatatgtaatcctgagtgtggcttctagaaggaaggttcgcaaagctgaatatccactcgtgctgttcccttctcacaggagattcctgtcaacgtccgattctgcctcgaaggcatggaggagtcaggctctgagggcctagacgagctgatttttgcccggaaagacacattctttaaggatgtggactatgtctgcatttctgacaattactggctgggaaagaagaagccctgcatcacctacggcctcaggggcatttgctactttttcatcgaggtacagtgccaagctgtacgggtcacttctttctaacccctgaatctcccggttctcccaaacgcaaagtagacaaggacccagaagtcaggtgcacagga

SEQ ID NO: 13498 - DNA, 598 bp, Homo sapiens
  MAP TO CHR14.3; EXPRESSED IN BONE MARROW, SIGNAL = 1.7; EXPRESSED IN FETAL LIVER, SIGNAL = 2.1; NT HIT: AF111168.2, EVALUE 0.00e+00; EST_HUMAN HIT: BG432594.1, EVALUE 0.00e+00; SWISSPROT HIT: O95433, EVALUE 1.00e-11
aggagccggaagttaaggaggggagggggtggagggaaaagcaagccaggaggtgcttgcggccgcttctagtagtttccaggcgctgccgggcggctggcactaagcggtcctgaggctgtggctacggctgctccggagctggtggcgccgcgataggagagccgatggccaagtggggtgagggagacccacgctggatcgtggaggagcgggcggacgccaccaacgtcaacaactggcactggtgagggccagaaaagcaggccggccttgggagacctgcggccgggccagggtttcagggttcctagaacctcggcccggacagagctggggctgaggtagccctgtccggagatgggggtgggtccttcctgtggcaggggtccgtagccccaggcctctccactccgcggtcaccttctcagtgtttgaggggagggagatggacgtggagggctgcgccccagaggagggttgtcagagagactaggagataacgccctggctgctgcatccagcccgagcagggaggtgcttattacacgtggccagaggagtcactgagactggaacctcctttgattgtgttggg

SEQ ID NO: 13499 - DNA, 585 bp, Homo sapiens
  MAP TO CHR18.3; EXPRESSED IN BONE MARROW, SIGNAL = 0.73; EXPRESSED IN FETAL LIVER, SIGNAL = 0.81; NT HIT: gi14760770, EVALUE 0.00e+00; SWISSPROT HIT: P07492, EVALUE 5.00e-05; EST_HUMAN HIT: BF589155.1, EVALUE 0.00e+00
cagctcactctgtttgctgaactctttctaatatttcttaagttggtagactctctgctccaggttctcaacgtgaaggaaggaacccccagctgaaccagcaatgataatgatggcctctctcaaaagagaaaaacaaaacccctaagagactgcgttctgcaagcatcagttctacggatcatcaacaagatttccttgtgcaaaatatttgactattctgtatctttcatccttgactaaattcgtgattttcaagcagcatcttctggtttaaacttgtttgctgtgaacaattgtcgaaaagagtcttccaattaatgcttttttatatctaggctacctgttggttagattcaaggccccgagctgttaccattcacaataaaagcttaaacacattgtccaaagggcaggctgttctcttatttcaatcccaaatgagaggatagtgtggcagagatgaacaaacagcttgaggacgtactcgtgtgctcactgatcaagtcaggctgaagctctcccctctgaatccttgtagtgacttagagcctttccagaggctccctcactttctcattccca

SEQ ID NO: 13500 - DNA, 524 bp, Homo sapiens
  MAP TO CHR14.3; EXPRESSED IN FETAL LIVER, SIGNAL =  65; EXPRESSED IN BONE MARROW, SIGNAL =  58; EST_HUMAN HIT: BG114972.1, EVALUE 0.00e+00; SWISSPROT HIT: Q9CZM2, EVALUE 2.00e-62; NT HIT: gi15431292, EVALUE 0.00e+00
atctccctgtgcttgtggactggtttggtgatccactgggtgtcaggatttcttctgatagctttatggaatggattaatgaggataacctcaaaaaatttgtatgtggaatcttcaccaacccagtgagaattccgggctcttaaagagccccacagtggcgtccagcttgctcctctgcaacggaccgaaggcttcgagcaaactttagctggttaacaccatgatggacagacttgccgtcagttgttcctaagggaactgggtgttttcggccaccacggcgaacacgaatcctacatataatgtaaccttgtttggccttgtagcccagtcggtgtgctttatcaggccaggtggggcagggagcactgtgaagagcagagagctgacacactgccagcagtggaccctcagaagaaagcgcatgacgtcagactgcttctttctccatagctcctggatgtacttgtatgcacccatcttggcttacctgatggctgcctccagacggaaaggaaaga

SEQ ID NO: 13501 - DNA, 584 bp, Homo sapiens
  MAP TO CHR16.3; EXPRESSED IN BONE MARROW, SIGNAL = 0.92; SWISSPROT HIT: Q01317, EVALUE 4.30e+00; NT HIT: AY051753.1, EVALUE 1.40e-01; EST_HUMAN HIT: AI819394.1, EVALUE 0.00e+00
ctcagaactgataaacagaaaaacagaaacagaaaaagggaactgatatgggggcgatcttgatgcgggttgtgtctctcatgcatgataactcagaggacaggctcctcggtagtgcggtagtgctaactctgtgaagtttcttcaccctccttcctagccctggaggcggggtgattcatagctcctgttccaaaggcattcagcagccattcgacctgggaaagaaacagagttttagaaaatacaggccaaatgtagagacgcctgtgattaccaggatgagtatgtcagtgcaggtggcttctgaatttctgtttctgagtttgtttggctgatgcctaaggaaaggggtcccttacagccctgttttataccttagttcttggtggcaacgtgggtgttgctgatctctctgatgtgtttttctgtgcactgaaaacaccagacatgctccgtgacatcctcggagcatctcccatcataatggagtgttcctaacctgacaaagaatagcatattacctccccatctactcaaaataaaattatagtaaaatttatcgcccttctgctaatattttt

SEQ ID NO: 13502 - DNA, 596 bp, Homo sapiens
  MAP TO CHR14.3; EXPRESSED IN BONE MARROW, SIGNAL = 0.82; SWISSPROT HIT: P44395, EVALUE 2.00e+00
actgggcttaatgcaccaacttgaatttttagatgagtcacttttctgtcaaataaatttgtcttttgatcatcaagcactttaaaataatgctgataaataggcaatggataaaaatgtgtccgtttgatcagaggttttctttcttccacttatgctggaaccactaagattgaataatatttcaaatccatcttgaaatgaaacaggtatagataaatatgaattatataggctagatagagcaactgaccttggttttacatggctgggttcccatacctgtcatgcctggacatgcagaacactggtcacagttagtctttgcaaaggatgcccctctgtgcctagatcatgcgtagtggacacagtattttagaaagcaatggcactcacatgagatggaaagatggagtttggttaaactatcactgagtgcacaattggcaccacagcccatggggtcactggtacaggtggattcaaagcaagtgaggagtttgattaaaccaacattcttaaatcgcataaagtttttgtagtcagttaactgaataaatcatactcttacctgctttgaatttatgacttttccc

SEQ ID NO: 13503 - DNA, 578 bp, Homo sapiens
  MAP TO CHR14.3; EXPRESSED IN BONE MARROW, SIGNAL = 1.6; SWISSPROT HIT: Q9QUM4, EVALUE 3.20e+00
tgcgttaatgtctgtgcctctcttatcaccattacaatatattgaaagataactttaaaattgagagaaaaaagtgacctaatttattgagggctatttaatgctcatgttataggacttttattgaagtctggaggagtaattcttccttgttaacagtgtggatacatttagcaaatactgttaacagccctattcttcatcttttgcgccaagcaaccacccccagtccgtgcaggaatataacaattttttttttttttagaacgatagggccttgggagatggaaaaggaattaatcttctcaccctggcgagttttcctgaaactacttatccttagcgtcagcgctgtaagaggtggagccgctcagtcccgcgggtggctgcagacagaaggtgggcgagtcctgggacttaaaaagttttgcagaaggttgaaaagaggagcagagggagagttttgagtttatttattttattttcctttttttttttttgtcttgtgccaagcccttgaagttaacgtagcgacgacgtggtccttgtaggaccaagcattcttggcattctgtcga

SEQ ID NO: 13504 - DNA, 572 bp, Homo sapiens
  MAP TO CHR19.3; EXPRESSED IN BONE MARROW, SIGNAL = 9.9; EXPRESSED IN FETAL LIVER, SIGNAL =  10; SWISSPROT HIT: P04632, EVALUE 1.00e-37; EST_HUMAN HIT: BE549215.1, EVALUE 6.00e-57; NT HIT: gi16177496, EVALUE 7.00e-62
aggtcataggaatccccacccaggaagacagctgggttgtcactcacggaacatggcgtccagcctgaccaagcagctgatgaagttgtcaaaatccatgttcccactttcatctgagtagcgtcggatgatcatgttatagagatgctcattcaggtggaaccctaagatggatgtagtccttcaggtgcgggggccacatggcccaacccactcccatgcccaggagtcaggcccagaccagctgagtagaggttttctcacccatcccactcccagccccagcatgtccctgccagccatacctgctgcctcaaaggcacctgggagttcactactgcaaatggtccctgatcggtcagtgtcgaactgtttgtatatggcctgtgaggacagagacattgggtccaagtgagcattgtggggcatagtgtctccatggcttgggggtctgggtgccagggatttcagaggtttctacacacctgccaccttttgatgttgttccacaagtacttgaattcctcaaagcccagcttgcctgtggtgtcgctctggtgggagggtgttaa

SEQ ID NO: 13505 - DNA, 502 bp, Homo sapiens
  MAP TO CHR18.3; EXPRESSED IN BONE MARROW, SIGNAL = 0.99; NT HIT: AE000573.1, EVALUE 1.20e-01; SWISSPROT HIT: Q9XT90, EVALUE 3.10e-01
caagccctgttgtgggtaacccttggaagtgacatgctgttttctgatgggaattaaaaggtctagagtggccaaaaggcttctcagcaggagggtttgttattcttttaattgtggcattaaacctcaggctggaattgcatcaacattcatgctgctatccagcttgccgaatttgcttcttttgacagactttatcatggccaggtccagtctcacccggcggtgaaggcggccaccaatgcttggctggaagttgtaaatcttggaactcgaggaactccctaccctgaccctccctccaggactttctgtccttttggctgatgcctggaattctacctttgggacttcagggcattccactgaaaactttaatctctctttccctgggagaaaatattagcttaagttcataggggtacaaaaaatagaagttcactggttatagagaacaattagaaaacaaacagcttgctcaagggggcaagggatataagaa

SEQ ID NO: 13506 - DNA, 551 bp, Homo sapiens
  MAP TO CHR18.3; EXPRESSED IN FETAL LIVER, SIGNAL = 1.3; EXPRESSED IN BONE MARROW, SIGNAL = 1.5; SWISSPROT HIT: P34314, EVALUE 1.80e+00; EST_HUMAN HIT: AA477133.1, EVALUE 1.00e-124; NT HIT: AJ002250.1, EVALUE 1.30e-01
tgccctatcatgaagatcccagaggtgtaaatgagtccagagaaacatcctgtcacccatggtcagtgacacaactcaggagtttctggctgagataagacccttggcctttttaaggctaaactgagagagggaccaagtggggtgtggtggggtagggagagagggagacagagatggagggaaggatattgattgtgggttttatgaacttgcatactaggtttatcttagtaaaaatgttgataagtacaactgaggtcatattgtcttctgtttttcctgtggtggaattaaccatgcttttgttcttcatctcaattgcaggtgtgttcatcctcgaggtggtgtgattcagagtgtttcttcatggaagcatggctcgggcacgcagtatgttagcaccaggcaaacacagtcatggactgctgtgactccccagcagacttgggcttcaccagcagaagttgttgaccttaccttggatgaggatagcaggcgtaaatacctactgtaatacaatgtcactgtgtttcctctgcactgttccc

SEQ ID NO: 13507 - DNA, 540 bp, Homo sapiens
  MAP TO CHR18.3; EXPRESSED IN FETAL LIVER, SIGNAL = 1.4; EXPRESSED IN BONE MARROW, SIGNAL = 0.85; EST_HUMAN HIT: AW205887.1, EVALUE 2.00e-81; NT HIT: gi11425220, EVALUE 2.00e-16; SWISSPROT HIT: P50452, EVALUE 6.00e-12
tgttagggtttgcaaaaggcatatccacttataccaatacttagataacattcgtttcttttaggatgtgcttatagggaggcctgagaagaggcataggtaggcagacagggttgcttttgagacactctctatcttttattagattgatcatcttttaagctgtagtaagcatctgtaaatctcatattgctgagtttactgttgtgcctatattttgaagtcacagaatactgagaatgtgtatgtttattattattttattttcaggcactttgttttagtaaaatcggaggtgaagatggagatattcatcgaggttttcagtcacttcttgttgcaattaacagaactgacactgaatatgtgcttagaactgccaacgggctctttggagaaaagtcttatgatttcctcacagtaagtcatacttgtttattaggaaaataaagatagcaatgtggtgggaagtaggagaatgaatatgggctatgaattcctgcaggtggtcctgaactcagaactccacgcacgaatctc

SEQ ID NO: 13508 - DNA, 525 bp, Homo sapiens
  MAP TO CHR18.3; EXPRESSED IN BONE MARROW, SIGNAL = 1.4; NT HIT: AP003135.2, EVALUE 7.80e+00; EST_HUMAN HIT: BG536068.1, EVALUE 7.40e-01
cattttgaaaccaagggtggcttcagggctcttgagtctctcagagcttcattctggaccaagttctctgggaaataagtaaaattaatacttttctgcttagtcttcccctacataggagatataagcctagtaactgatttcaaaggttctcctcaactataaatttcaatcaggttcagaagctcatggttttggactcctttatgaagtacttaacagcctaaataagaccatttataaagcaggggtaatagatgatagtcatctagcaaagttggggttagtcatcctagtggttcataaaattggaaattttcatcaaaagaagctatagtcattttaaggcagaaaatgaagtgatctgtgtattcttcaaatcaaaattattttggattatgtatcatacccaaacatatgtatatcaagtgatattgacttgattttctttctgaacaaaagcttacatgggaacgtgcccctgttttactctactcttaatggagggtctccccctactttagc

SEQ ID NO: 13509 - DNA, 543 bp, Homo sapiens
  MAP TO CHR16.3; EXPRESSED IN BONE MARROW, SIGNAL = 0.86; EXPRESSED IN FETAL LIVER, SIGNAL =   1; NT HIT: AE008480.1, EVALUE 2.00e+00; EST_HUMAN HIT: AI791939.1, EVALUE 2.00e-84; SWISSPROT HIT: O15084, EVALUE 1.20e-01
acatcctgtgcctagatggccaatattacactcaagaaactaatggacatagaaaaattgaatgtacctccaaacactcaagatgaatacagcagtcttcaatagtcaacgtcatggccattccagagagaaaaggtccaagttcagtgcctcgaaccttgttgccttccgtgaaaggaagcagttgaaatgagctttgcccctggtgacactcttccttgtcactaattaaccagctctataggaaggttgctccgccaacaccttgctctgcctggagagacatctggccaagttctggtgagcaggaaaaatgtctactcgttaccaccaagctgctagtgatagttacctggaacttctaaaagaggctaccaagcgagatctaaatctttcggatgaagacggcatgactcctactctcttggcagcctaccatgggaacttggaagccctagagataatctgcagtagagggtaagttcaacccgatggtttctgttggaaacagtgttcatggtaggtttttgcagacagcagcaa

SEQ ID NO: 13510 - DNA, 597 bp, Homo sapiens
  MAP TO CHR16.3; EXPRESSED IN BONE MARROW, SIGNAL = 0.87; SWISSPROT HIT: Q9UKN7, EVALUE 5.90e-02; EST_HUMAN HIT: BF980073.1, EVALUE 7.00e-94; NT HIT: gi15304024, EVALUE 5.70e-01
gtgccacagcttcatctcagcggccccgccctgtttctgcctggcccgccgcctgcgttcccgtccgcagtccacgttccctgctccagccccgcggcccacctgcccggcagttccttcagcggcccgtagactgacctcgcttcctcaggcaaggcagcttgaactccccggccgaggacacgaagtgggaccagtcctcgatggcgcgcgtgaagcagggccagtccactcggttgatgcctggcgcgatgggcgccagctttccctcgtggtacctgttgcgaagcttctggcctgtggcggtgatgtcctgacagggccacgggggtcaggcccgcgcggccgtagccgcaggagcctagggaagccatcccagtccatcccaaaggcctcagttgacaagtggcccggtgcattggaccgagggggcgcccgaagtcgtgaacccggatggggtgatgtggggagcgggagtcccaagcaggcacctgagaaggtgcgcggggtgtagatcccaggaccagaggtgcttggggctggtgccccttagcaaacccaagggcagggcaaaggacactcaccaaacactgcagg

SEQ ID NO: 13511 - DNA, 555 bp, Homo sapiens
  MAP TO CHR16.3; EXPRESSED IN BONE MARROW, SIGNAL = 0.79; NT HIT: gi9631294, EVALUE 8.30e+00; EST_HUMAN HIT: BF316170.1, EVALUE 2.00e-01
ctggccacctagccttactggcttcagacttgaacataccaatttgcttcctcttttctcaagttcctcttctcctgtctttctcctttctatacaaagtactgaatcccactattttctcatgcacatagtttttttgttttgtttctataatttttatatctttttctagcttatgccctaggtactccattttcaatggtaaattgctttaactaggtagtttccttaaactgaggaactctactaccatttttgtcaatgcaatatcacagtgttatcctatttatgatgtaccagtcaagtttggctacaataatcctcttttatttgatataatgtagatttccaagaagggtttacttccatcatgttgctctaacttctctatttacataaatcataaatcatatgttcatctatttttattcactccaaacagcatgagccttatgaaagatggaagccagaaagttgcacccaagaaaagacaattgatatgaccaggggaactgagaatacaggtaagctaggtgccacagtgaaatggaggaa

SEQ ID NO: 13512 - DNA, 599 bp, Homo sapiens
  MAP TO CHR14.3; EXPRESSED IN BONE MARROW, SIGNAL = 1.4; EXPRESSED IN FETAL LIVER, SIGNAL = 0.79; EST_HUMAN HIT: AA134321.1, EVALUE 4.00e-24; SWISSPROT HIT: P28481, EVALUE 2.30e-01; NT HIT: AJ271881.1, EVALUE 3.00e-24
tagcaatagccgctcacaacctttaccaaaaggaagaatctctaaattctttgctctgcttgtataaagaataaaatagtccagctatcatgtcatttcagattcagccaaacaaataccaattgatattcactaaaataaggcctccctgttagataattgttgttctgtgtggcttctttatatttaaagcaatctccagcatgcctcactgcctgatggcctggggtctctcaggccctgctgcagccatctgctcacctggcccggaaagcagtgttgcagggccaggacctggcgagggggtcgggcactgggacctagtggaacatggcaaaaagtccaggtcagacaagcacctgtacgaggagtatgtagagaagcccttgaagctggtcctcaaagcaggagggaaccaagtcacccaggtctccaaacgcttgggcttcttaaaaaataaactcgggcttattttaatgaatatcaactggcaccgaggcaggttctgggggaaagaaaggggagaaaacagagaggagtaaaggaggatgaaagaaagtgagttccaggcagtgtggagaggaggcagaggaagagct

SEQ ID NO: 13513 - DNA, 581 bp, Homo sapiens
  MAP TO CHR14.3; EXPRESSED IN BONE MARROW, SIGNAL = 0.81; EST_HUMAN HIT: BI829473.1, EVALUE 0.00e+00; SWISSPROT HIT: Q01870, EVALUE 5.60e+00; NT HIT: AF172282.1, EVALUE 9.00e-03
cttgtctactccccgctcagggagctgagataccaagaatcccggagaaacagagtgagtgtgctcagggctcagcccgattctccatcacagaggaggtctgagtgccaggaccctgggcacagacagcaccctgggctccatgactcggccaagcacgcttaccgagtagcgtctccagtgtgccaccagctcgtcctcggtccccgctttcgccgcaggctgcaggccctcctgggccagcctctgcaggaccatcctgaactcactgagctcagcctccagctgcttaatctgctgctcccaggctcccctggaccggagcaggccccgcagccgctcctcctcctcctcccagagggcgcgcagcttctccagaactttcctcatctcttccagttctccggtgatcttctctgcacccaaaggagaggtgttccgaatgacacccgcagactgctcctccagcgtctccagagactcctcgcccctgggaaaatctttggcaatgtcctgaagagggtagaggggtgagggaaaaacaggcagggaaaaagaatacagttgctgcattttccaga

SEQ ID NO: 13514 - DNA, 507 bp, Homo sapiens
  MAP TO CHR18.3; EXPRESSED IN BONE MARROW, SIGNAL = 1.2; NT HIT: AB037734.1, EVALUE 4.80e-01; SWISSPROT HIT: P29386, EVALUE 6.10e+00; EST_HUMAN HIT: BF036780.1, EVALUE 7.10e-01
tgatcgtgatttcttggcagcataaatctgtttcattgtgtggtttatttgtcatcatgaaacagctgtaatacatattagagaaagtgaagagataaatgtgtctgcagttaggattttgcctttacattctaatgtaagagcacctggatcaaaaagtctaagttccagaaaacagtgattattcttctagaagcggcctcaagttgagtttgcctttctttaaaaatcatgagagcttatgggtactagcacttacaagagtactctgcatgttccaggttttccgttgctgtgtttctcccatactcctccaggctgagttcttcctggtctagatgttctatccacatccagctcttctgtggtcttgctttctgtgaaggataggttacatacttaaactaaagcctcaaagcctaacactggctttgtatgtaactagtgtttgacagggactcctcaacttctttataattggtgatggcaaaacttcaggttccggag

SEQ ID NO: 13515 - DNA, 517 bp, Homo sapiens
  MAP TO CHR16.3; EXPRESSED IN BONE MARROW, SIGNAL = 0.81; EST_HUMAN HIT: BG003882.1, EVALUE 7.20e-01; SWISSPROT HIT: P42396, EVALUE 2.10e+00
gggaatttagaagtggaggcacttgatagtgaaaatggaagccaactttctctttttgtcacttgcgttatttgggatgttttgagttggaaaaaaaaaaataagcagagactgaatctgtccactaaaggagaagggagaactgggttggagccaagaaatgggcagagtgagaagcaaggctgggaaccagatatttgctcagtttatttgcttcctctctcttgttagctattgagttttcattacagtgtactcacttctttcttcaagtcttcactgtcagtgtcttgcaaactgctgaacaccactggatccctcattcctaaagcagaagtggcttgactgaatgtcatcgtagtgggaatcacacacattgggcagaccccaccattggaggctacctcagcagatatcgtctgcaaagacagcctgtgcctggatgatgagatctatccctgctcaaggaacagctcactgtagcttccctaagtggagacaatgggcaggttaatgc

SEQ ID NO: 13516 - DNA, 513 bp, Homo sapiens
  MAP TO CHR16.3; EXPRESSED IN BONE MARROW, SIGNAL = 0.9; EST_HUMAN HIT: AW025919.1, EVALUE 1.00e-122; SWISSPROT HIT: P51761, EVALUE 2.80e+00; NT HIT: U76993.1, EVALUE 4.90e-01
gttttctcttttccccctgcccacttcagggcgatgaggagtagattgtgtttccaaacacatcagaagaatctgcagtggaagttggaagaataaccccaggcttcttggtctaattctcaaggtcaactgatatcattagaataacatgaactcaatttgagttacagcagggaaatcatgttaggaaatatgggtcactcatcactgagtaatgaagctgttaccttgcgcgatcggaaacgcgcttgcacagaaacctgtcaactgtcctcgtcccattgtagggctggcttttaacaatggagtcgcccacaaaaaccaaagcccactccgagagggaggattgagcagggacagctttggtacctgcagcctcagagccagccagaagggcaggatgtcctggaacaaaggccggatttgttcccattggttttcattgagaagctttctctgtgattcttgagattctctttaaaggccacagtgggaaatggggtcaagggaaat

SEQ ID NO: 13517 - DNA, 567 bp, Homo sapiens
  MAP TO CHR14.3; EXPRESSED IN BONE MARROW, SIGNAL = 0.73; EXPRESSED IN FETAL LIVER, SIGNAL = 1.2; SWISSPROT HIT: Q9ZHE5, EVALUE 4.10e+00; EST_HUMAN HIT: BE160552.1, EVALUE 1.30e-02
tggttccgtttcctgatttctgatttctgggattctggcaccaggcagaagaatgttgactgtgtaaggcagacctttgacattagaagtcagtatttgttcattacagagcaagagacttaattgattacaaatcaataaaactttaataagatcttccaaaaaactagaaacaggaaacacacccaggagactgaaaagcatgatgtaaatgtgaagaacgtggcaagtgggtggcttggcagcccagcagctatactggagcagctgcatgagtgaatacttgttactcctttagggctggctctccattctacaatcatgtacctctttcttgataaactcccaagaacacactttcagcatggaatttcagacttttagagatagcaactctctcaagtatggacaaatgtcggtgcggacaaatttgatgcactgctgaagaataccaaataatatgctaaggaattttttcattccacaataatggagtaaatagcagctggaaatgtttgcattaagttcatagattataatttgtaatggaatcaacaccaaatgcaa

SEQ ID NO: 13518 - DNA, 583 bp, Homo sapiens
  MAP TO CHR14.3; EXPRESSED IN BONE MARROW, SIGNAL = 0.81; EST_HUMAN HIT: AW502627.1, EVALUE 5.30e-02
caatgcaatgcctgaatgacatgacaaaggaaaagatgggaaataccagagttgtagttgatatgtgactgatttatcatgccaattagaaactcttgtaaatttaatgttttagaaatgatttatagttgaattatgattcattggtgggattttttttccaaaaaaatacctatgtgttttgtatttatgcatagagtgagatccaaaggttgttctatttgttttccatccctggggtgaaataggtttctcccaacctctgtctttattcttcagcatttacttctatgtgactcattctgcattttccacctcacacccagcatttgcaagtttcctatctctgagcagcaattctctgctgctattcgatatcaccattctctgcttatattcttggaagctgttagagcagtttgtacagctgtaccctgtgttttccaatcaagagaggctagggaatatattaatgaactttccacataaatccagtgaacatgcccaggtaaggatcatatgacttgaatttctattttcacttcttgacacaagtttgttagccaggcaaatgtgtcaatct

SEQ ID NO: 13519 - DNA, 580 bp, Homo sapiens
  MAP TO CHR18.3; EXPRESSED IN BONE MARROW, SIGNAL = 0.76; SWISSPROT HIT: P55289, EVALUE 8.00e-40; EST_HUMAN HIT: AA847055.1, EVALUE 3.00e-03; NT HIT: gi16306486, EVALUE 0.00e+00
gtgcacaataagcgttcagcttatctttccaagaacaataaaatttcatgtactcctgcctgacataagaattatttttacatatctccatatcactgactctcttgtaagttaatctcatctcacatgaatttttcaccagcttcactctgatgttgataaaggagatggttccatcaaatacatcttgtcaggcgaaggggcaagttccattttcattattgatgagaacactggggatattcatgccaccaagagactggatcgtgaggagcaggcctactacacgctccgagctcaagcgctggataggctcaccaacaaacccgtggagcccgagtcggagtttgtcatcaaaattcaggatatcaacgacaatgaacccaaatttttggatggcccatacacggcaggagttcccgaaatgtctcccgtgggtaagtaaagaacactctgcttttgtagcttgtggccgatttggggagatttgtatttaaaattaaatcatcattaagtactgaaaaaaaaaaaaaccttactagtatgtgtgtattgattgtcagttagggtgaggggaaca

SEQ ID NO: 13520 - DNA, 579 bp, Homo sapiens
  MAP TO CHR18.3; EXPRESSED IN BONE MARROW, SIGNAL = 0.93; SWISSPROT HIT: P16523, EVALUE 1.40e+00; EST_HUMAN HIT: AW293889.1, EVALUE 0.00e+00; NT HIT: gi15306948, EVALUE 0.00e+00
tgagcgcggtgttatttaagttctggaaaggaaaataatacctggaaacactacatttttttcagaacccaggaagtggtgaatatgattttcgatatatatttgtagaaattgaatcttatcctagaagaactattatcattgaagataatcgatcccaagatgattaaaatagggtttctgatggatgttgaatggcgtggactcgctactccgttcttcacagctgccttccagaatgtgttcaaaagaaagacaagaaggagtgtatggcttataaagtgaatctaatacagtatttgttgcatttaaacaaactagacattttcttacggaaaaattatgaaatacagcatattttatgttctcccattgactcaatcatgacaatatttctgctttaacaccatctttcatgattagaaatgtttgttattggaaatgttacaccatgtaaataaaggaaatagattttagtattgtattcattttatattatagaactgcataatgtctgcagaataaaattaaaactaacaaatatgtcattagcagctgccctccgcatactttggaatc

SEQ ID NO: 13521 - DNA, 510 bp, Homo sapiens
  MAP TO CHR16.3; EXPRESSED IN BONE MARROW, SIGNAL = 0.77; SWISSPROT HIT: P55879, EVALUE 3.60e+00; EST_HUMAN HIT: AI220577.1, EVALUE 3.00e-83; NT HIT: U15422.1, EVALUE 0.00e+00
acacccatgtgggagcatacagggcaaaagattgttatccaagcagagtggactctgcaggcttcttggcatcctacccccattcatttctgcccctgtgcaggcccccaaaacacataacacctttattagtgaaatcaaaatgactatgactactcagggatagtcttccaggtacaagctttaattagtgttgcgtagaaatcaccatagtaacatgttcctgcaagaagattgacttcatcctagcattttctcctttgggtgaaacacgcaggaacaagccaaggagtgcggtctcattagttggatttccatcctaagggataagagtgggaaaggaacctttaatagctgagcacttcatgaagtcagtgacctccttgacctcctgtaaggtcttacaactactcatttgtgattgaatatgggacatagatagagtttagactaccgtcagtgtccttttgacctatgtgaatccaggtatccatccatttatcccttcca

SEQ ID NO: 13522 - DNA, 512 bp, Homo sapiens
  MAP TO CHR18.3; EXPRESSED IN FETAL LIVER, SIGNAL = 1.6; EXPRESSED IN BONE MARROW, SIGNAL = 1.1; SWISSPROT HIT: P16241, EVALUE 2.10e+00
ctttgtcaccgatggctttctatttttagccgtcactgcttttatgaaatggaaatgccatcccccacatttaatggcacttaagatgggctgggattcacaggttcacaaagctctcattcctatctttccaccatttaaaaaataaaatagtgcatatattaggaaagtgatggcatctgacttcagtggtttaatctcagctttaatttcacagccttggaaggctaagcagccccgtgctgcttcaacatcatttctagcatgtgggattctgctgcttggtgatcaggtaagtacacaggttatcatcatatttagttgcagtgaaatctcataggaataaccatggcgtggatttgttattagtatttgaatataacctttgaaatataattaagcattctaaatataacacagagtgaaatctccttatgtgcttcctatgttgaaattctgtcaattaaagttcaacataagtttataattgcgtgggaaactgctgcaatatt

SEQ ID NO: 13523 - DNA, 559 bp, Homo sapiens
  MAP TO CHR18.3; EXPRESSED IN FETAL LIVER, SIGNAL = 0.93; EXPRESSED IN BONE MARROW, SIGNAL = 1.2; EST_HUMAN HIT: AL552067.1, EVALUE 2.00e-29; SWISSPROT HIT: Q9P2G3, EVALUE 6.00e-27; NT HIT: AB037805.1, EVALUE 4.00e-85
ccatttttcatgccttaccggtcagaaacctttcagactctcttactgaactgcagaacatttgtaaaatcacctcagtttgactttcagttgggaagccagaatcacaaggtcatagagacaggagagaagggagacctactgcaccttgtgatgctgttgatcagctagcaagccagttcaacagccaccaggctgatcctattttactatctaaagcaactgactgcttgcatgtaagtatgatactcttaaaaggtacatgtgtggaggataacacatttggaaggatacagaaaacgtaagcacaaacgaaataaaggaggatgcagtaaatgtggacacataccatactccagctgtagcctcccacaaggtaaatgctgtcatcaagcactgcacagccagggccacttcgaccctccaaaatgggagtttggagtatattccactggtcaccttttgggtcatagcattccacaagcattacatcaaggtgggagaaacctaagtgacagaacaaagtggaacaacaaaatgataaatgctcagggtccca

SEQ ID NO: 13524 - DNA, 540 bp, Homo sapiens
  MAP TO CHR14.3; EXPRESSED IN BONE MARROW, SIGNAL = 1.1; NT HIT: AF009145.1, EVALUE 3.30e-02; EST_HUMAN HIT: BG121839.1, EVALUE 3.00e+00; SWISSPROT HIT: Q02084, EVALUE 8.00e-09
actaggcagctgagccacacgtgggttggtttttcctgtcttgagagaaaaaaagtcaagccttcacagagaagcagtcctctgacaacgagtggactgccccgacctggacgaaggcctgactccctgggagatttggagaggggcatccatccagccacaaccttccactgactcaaagccactttattaagctgatctcatccctgcccttagctgcccttgaatgctctctctcttctctccccagaccatgtggtcctggacccagaaactaccagtgcttacctccaagaagcagaatgtaatctgagtgtaatgaacacaggcatgaagatgtctgtgccttccaacccacagaggttctcctacttcagtgtgctggggactgtgggattctcatcaggcagacacgactgagacgtgcaggtggcttttggtggctgatggaggctcagcatgatcaaagaatgcgtgagtagaaaagagtggtttaaactaaaacccaaggaaggcacctcagttattgggctctctgcc

SEQ ID NO: 13525 - DNA, 556 bp, Homo sapiens
  MAP TO CHR14.3; EXPRESSED IN FETAL LIVER, SIGNAL = 1.1; EXPRESSED IN BONE MARROW, SIGNAL =   1; NT HIT: U75304.1, EVALUE 3.40e-02; EST_HUMAN HIT: BG742723.1, EVALUE 1.00e-61
aaggagactttcggcctttggaaaggatggagaattcctctttctacatttgtttaaacctcccttgctcttcaggcacacagtccccagctgccggggggaagatgccaaggggaaggactgttgctggtatgaagcagcccttcgtgatgggaacccaattattgtttatcttcatggcagtgcagaacacaggtcagtggctctgcttacatatttttttttcaggagattgagagcatttcagccccatgggggaatgaaggacagggctctgtttttaactctgtaggcatgccttcacatatttcttctcctttgttgaaatctgagggtgttctggcaataagcttcacttaaaaagattattctatatgtagaataatgtggatccctaactgaggagaaaagaataactcttccaaaagttggatgttgatttcaaagaaagtgatgattcctttgctcccgaagagtgtctgaaatgatggattgaacccatgaatgacaggaaagggaacaggcacgcattatgggggaaaggaagagccatttc

SEQ ID NO: 13526 - DNA, 558 bp, Homo sapiens
  MAP TO CHR18.3; EXPRESSED IN FETAL LIVER, SIGNAL = 1.6; EXPRESSED IN BONE MARROW, SIGNAL = 1.2; SWISSPROT HIT: Q9MZT2, EVALUE 6.90e+00
catacagcactggttgtgccactcttagattcctcaactttcaaggttcacatcactgtatctcttcattcaagactcatctcaaggggttgagcacaaagtttacacaaacatctcttgggtcaatgtacaattgcatttccccctactttctaagcactagtctggaaataaaaaaaaaaaaaacttacatctttcaaaatacatatttattaggcagttagttgctaagaatgtgttaccataactgctgatacatctgacaactctcctggggcaatgacagccccctcttttgcaaatttaacagctgtgtttgcagggtctaagaaagtaacatatgtgataatatctaaaaatcttttttctactttatctgtacaagttagattttttttttgttgttgaaaggaagtgacatactcattttatctttactgttacatatttattataaggatactgtaaaaagtatgaaataataagataagataccaccttatgatctataaaattcacagaccaaccaacaggggctggctggaatgaccacttgtt

SEQ ID NO: 13527 - DNA, 549 bp, Homo sapiens
  MAP TO CHR16.3; EXPRESSED IN BONE MARROW, SIGNAL = 0.66; EST_HUMAN HIT: N87654.1, EVALUE 3.00e+00; SWISSPROT HIT: P40236, EVALUE 6.80e+00; NT HIT: Y10728.1, EVALUE 5.20e-01
gcagcaaggaagtctaggagagtgagtatctggcattttgttctctaagatggaaagtggtttctgccagcaaaatagagctgattggctcttggttgttacaccaatgtgtgcctatggcttagaacagagtgttctagccaaggtgacaaagaagatgtcaaaatcagaagaagatgggactgggtatgtggccaatgacccaggtgagaaggtcttggttgtgggatggatttcagtcttgtcggggaattgcaataaaaggtgcagaggacaagcaccaaggccgcaggtagttagatcaggaagctgcagcctgcttctcacatagatgcccaggggtcatattcctgtcccatgcccctccgggaagaacagctgggttacagcattgggtgaaattgttagggtaactggtccacaccattacttggtgtgtgtggggtaaggggatgagcatatatatggggaataccctttgaccactttgtctatgtgttccatggtttttcttgaacccatcctcacccagttcccttggaagcaatg

SEQ ID NO: 13528 - DNA, 501 bp, Homo sapiens
  MAP TO CHR18.3; EXPRESSED IN BONE MARROW, SIGNAL =   1; SWISSPROT HIT: Q9QZP1, EVALUE 7.90e+00; NT HIT: Z37569.1, EVALUE 7.40e+00
gcagcattctctttcatccgtcatttcactggagttgtttgtttgctttttagtatatagttggcatgtgtgcaccctcccttcagagggatgtcggtaacatttttcaaaggagacaaagaatgctttttttttttaaaaaaaagatattgctcatagagaaggtacatctgaattattgataggttcactcattcaagagttggccagggcgactgtggttccagcctccgctgggtcctgcctcgtcctccactgccagttgttctccatcctgccagaaatgccagccttgttctttgctcctttttcctgcagggcaatttttggaagcttgcctgcttactgacacaaaacaataatccaaacagaggacaaaatccagtggaaatttttcacgaaggggtctggtaagggattaatactaactgcagggatgacatggagagagtaaaacaaagcttctcttaataagtagtcacaaaaatggctgcagaacct

SEQ ID NO: 13529 - DNA, 599 bp, Homo sapiens
  MAP TO CHR16.3; EXPRESSED IN BONE MARROW, SIGNAL = 1.4; NT HIT: gi14785621, EVALUE 1.00e-79; EST_HUMAN HIT: AL561827.1, EVALUE 2.00e-78; SWISSPROT HIT: Q63880, EVALUE 6.00e-28
tgagtgcctaactcccatcccatcctttctctgtagattctggaagccctgtctttttctatgagttccagcatcgacccagttcttttgcgaagatcaaacctgcctgggtgaaggctgatcatggggccgagggtgcttttgtgttcggaggtcccttcctcatggacgagagctcccgcctgggtgaggacagacagacagacatgtgatccctaggctgccagactccaaggggcctgggcagggcttgcaggaacacgggtctccagtcagcactgaggatccttgggtcccttccaggtcccacctgactctcgttcagttctgtccctctcacctttccagcctttccagaggccacagaggaggagaagcagctaagcctcaccatgatggcccagtggacccactttgcccggacagggtgagtgagtgacagggcatagctcgctttgggcctgggatgctcaggtcggcccctctgggggacagcacaggaagccttggtcctcattcattcctcccacccagggaccccaatagcaaggctctgcctccttggccccaattcaaccaggcggaacaatatctggaga

SEQ ID NO: 13530 - DNA, 572 bp, Homo sapiens
  MAP TO CHR14.3; EXPRESSED IN BONE MARROW, SIGNAL = 0.95; SWISSPROT HIT: Q09297, EVALUE 3.20e+00; NT HIT: AL161555.2, EVALUE 3.50e-02; EST_HUMAN HIT: R60369.1, EVALUE 0.00e+00
gaagtttgggggagtatgggctagtagagatgtttacaaaggtcttgattgaaagacccacagggctttgttaattggttttaaagatacttacaatttctctgcaaatacatagaacaaagacaataaaacgttatttagtaagatataagtcctattgaatcagttggtacccactttcatttatagacccttcagagctgaaagggatggggaagagggtggatgaagaaggtctaatggagaatacacagaagaagcagaagccatggctcctctttttaacaatgacagagaaaggaaaacaatggacatagcaataaacatttgctcatttaattttagtcaagttaaatcaaatgtaaaaaatgtgtgccctataataataaatgacacaaaaatactaattagattcaagagagttgaactgaataaccctttaatcaatttaagtcacacagtaagtgtccttttccccagtatttctcataatactacatattaattgcgcttatggttattcagtcttattatttaattataaaagcttatagcttttactttgggggcaa

SEQ ID NO: 13531 - DNA, 550 bp, Homo sapiens
  MAP TO CHR16.3; EXPRESSED IN BONE MARROW, SIGNAL = 0.7; NT HIT: X52472.1, EVALUE 1.30e-01
tgccccaatcctactcactcctctcttctaaaggggtgcacatgaatctcagtacaagtttccctctcccctattgtgaagtggtcattgcccaagccttacccaatgccatgaccccattatcagaaaagcaggcagctgaccatgaaggcccacccttggctactgctgattgaacaagagatatacacctgactaagaggagacagtcagctatcttttctgacaattcctataaccccattttcagaaaatctaatgaagcaggcaaggggccatgaggactcactcttagctactgctgactggacaagagatgaacacctgaccaagaggagccaatcagctatcttttctgagaattggagcttagagactctagccaacctctgctgagggtttcaaaggaactggcatgtttagggtgggacccaggggtgatggtgggaataatttgtactgcacagtagagaaggcctgcctgctttctggaggtagaacaaagcagatgtgcaaaaagagaaaagggaggaacgtgggacaaagagaa

SEQ ID NO: 13532 - DNA, 599 bp, Homo sapiens
  MAP TO CHR19.3; EXPRESSED IN BONE MARROW, SIGNAL = 2.1; SWISSPROT HIT: P22117, EVALUE 5.90e+00; NT HIT: gi13630697, EVALUE 0.00e+00; EST_HUMAN HIT: AI091662.1, EVALUE 0.00e+00
ggcctctctcattgcttctgcaggactgtgagccggctcatttctgggctccatcggcacaggaggggccggatctttctccgataaaaccgtcgccctacagacccagctgtccccacgcctctgtcttttgggtcaagtcttaatccctgcacctgagttggtcctccctctgcacccccaccacctcctgcccgtctggcaactggaaagagggagttggcctgattttaagccttttgccgctccggggaccagcagcaatcctgggcagccagtggctcttgtagagaagacttaggatacctctctcactttctgtttcttgccgtccaccccgggccatgccagtgtgtccctctgggtccctccaaaactctggtcagttcaaggatgcccctcccaggctatgcttttctataacttttaaataaaccttggggggtgatggagtcattcctgcctgttacatttcttttttctttttttttcttgcctgttacatttcatgatgaggtgcaagttgctgctgccctgccctggggtgaagccaatgcgatctttgccaccccaagctctcctaacagacggctctccag

SEQ ID NO: 13533 - DNA, 588 bp, Homo sapiens
  MAP TO CHR18.3; EXPRESSED IN BONE MARROW, SIGNAL = 1.6; SWISSPROT HIT: P02817, EVALUE 7.50e+00; NT HIT: gi14760932, EVALUE 0.00e+00; EST_HUMAN HIT: BG181215.1, EVALUE 0.00e+00
caacctcacattcattctcacctcacttcacccttccaagaaatctgtcgtcaatataatctccattgttgtctccaccagcaagtgccggggatcctgaacccgaatcagaggcagaaccggaagcagaggcaggggcggggcaggttgctgatgaagctggccaggacatagcctctgcccacgagggtgcagagactgaagtggagcaggcactagagcaagagccggaagaaagagcctccctcagtgaaaaagagaggcagaacgagggggtgaacgagagggacaactgctctgcctccagcgtctcgtcctccagcagcacgttggagagggaggagaaggaggacaagctctccagggacaggacaactggtaaatgaagccccttgtttcagtcggcatgtgccagggaggcctggggtgcaggggctggttctctaagagcttgtccacaggctggcctctgaggtgacctgggtcaacccactcatgtggctgtgtcacccagtgtctggggacaaggagtgtggccacgctggcagccagccagcagccttctgccctgtagaaagacagccccca

SEQ ID NO: 13534 - DNA, 401 bp, Homo sapiens
  MAP TO CHR16.3; EXPRESSED IN BONE MARROW, SIGNAL = 0.62; SWISSPROT HIT: P54895, EVALUE 2.50e+00; NT HIT: gi13376295, EVALUE 9.50e-02; EST_HUMAN HIT: AL523358.1, EVALUE 1.40e-01
accatgggctagttgagcactgagagattgctaagggctctgctgaggtccgtgtgcccattttgttctcagggatgcgttcactccgtccttcatgcccacagaagtgccgaccactttcagggtgttgcagtactcagtggccctggatttgccaggtgtggcatcaagctgagacaggaaaagtgggctaaagcacttggggaaaaaaccaaacatccaagctgtggaattgagtctgtggagtgaaacggcagaaatttctggactgagaactgaatgcagaaagaggcgctttgagtccaacctgggcttggctgcctgcctctctttccagctgagcacccctcatactcacagtaccccgactcatccaaagcctgcagtgaaagcagctgagg

SEQ ID NO: 13535 - DNA, 600 bp, Homo sapiens
  MAP TO CHR16.3; EXPRESSED IN BONE MARROW, SIGNAL = 0.81; SWISSPROT HIT: P78333, EVALUE 1.00e-15; NT HIT: AF001462.1, EVALUE 3.00e-55; EST_HUMAN HIT: BF371094.1, EVALUE 5.40e-02
atttttggttgggtccattgagagaataacagtatttttagaatgatctaatggcacgataaacattttagcattttacctggaaaaacattatagctgtgccagtttctgttccaagaaaaaaatacattggtgtattctctaaaggaggaaattctgacctcaactatgttcagatagctgtggcagataatactctgatcaggtactaagtcatatatctttcacatttccctttgctagttatactcagcgtgtggttggaaatggaatcaaagcccagtctggaactcctgaagtcaaagtcaaaggaactgatcctgtgataaatcagattattgataaactgaagcatgttattcaggtaagtcctgatcctatattttttggtatagccaataataaataataagtggttactttctgttatacttgataaatttgttaatcctatcagataatcctacctaaaatattgtagcacattatttacatcaggacttttggaaagatttagtttaatgatttttgtatgcagtcaatatgcagctgtaatttaatgttggacaatctgtatatgtgaaaagcaagcctcagcct

SEQ ID NO: 13536 - DNA, 541 bp, Homo sapiens
  MAP TO CHR14.3; EXPRESSED IN BONE MARROW, SIGNAL = 0.81; EXPRESSED IN FETAL LIVER, SIGNAL = 0.83; SWISSPROT HIT: P73625, EVALUE 3.90e+00; NT HIT: M23354.1, EVALUE 1.30e-01; EST_HUMAN HIT: BF679319.1, EVALUE 7.60e-01
tgccaatgtgttagtctgggttctcaaaagcagaaactatgtagtaatgccaaactgagaagtgcaaactcagggaaccaatagtgaaagaaaaaagaaatgaagaagaagaaaagcaaataaatgttggtgtattcccaagatggttacagttgtataaacacagctgctctctaaatcatgcaaaggtctctggttaggtcatatggagctatggtacctcaaaataatcccctatggagagcaaaacagaggaattaatcctgtagatccttcccatgggttgtctctcattaatcaaaatatgcccaaagggcatttatttcctcacccttccagatggtattgcctcagcctactggacagctgctgaagaatcctcaatcatagccatcaacagggcataccatttgagtctgaggtttgtaggaatagccaaagactctattggtggtattagtccaagctttggtgccatagttgctggagcttttgcttaactggggcagtcaatcctctatcagagcctagccctcactgt

SEQ ID NO: 13537 - DNA, 557 bp, Homo sapiens
  MAP TO CHR14.3; EXPRESSED IN BONE MARROW, SIGNAL = 1.3; EXPRESSED IN FETAL LIVER, SIGNAL = 0.78; SWISSPROT HIT: P13682, EVALUE 6.90e+00
gcatctcagaaaggagcaggacccacagaacatgcatttgctgccctagaattaagtctgaacttcagtgaaaggggttgaacagtacctgggacttcttcattttggcaggtgccactgaaaatgccccttctccatcctctgcatttgccaggacatgccacacaggtctcctaaaaagtgctgtttgcttggcctctaatgattcttacggctttatcagcacacatggcccatcagctcctagccctcatgcagcctctgcagccctgatgccctgggggtgagagctgtggttcatcctgatttcttccctgctctggattctctaggcaagccatggaccctacttcatgggtccctgccccacagacccctgccccacaggtccttactctccaatctctacccaatgaacccccattcctcagactccttccctaaggacccctgcttactcctcagccacactgcagtcattcaattcatggaccctccctggagctttgcttctcttttctgaacccaggtgtccaggacggagaaaggcaccatta

SEQ ID NO: 13538 - DNA, 510 bp, Homo sapiens
  MAP TO CHR14.3; EXPRESSED IN BONE MARROW, SIGNAL = 1.4; SWISSPROT HIT: P55196, EVALUE 1.20e+00; NT HIT: AF260316.1, EVALUE 2.00e-22; EST_HUMAN HIT: BE348229.1, EVALUE 6.00e-23
ctgcacctgctgttcttttgcttatgccttaacctttggttaccctaattccctattctcctgcctcagaatgggcaccaaactaacagaacaatttcatcttctttgcttaaaatgaataatactggcaatttgccaatatttccagcatactcatactagtagagttagcagtttccaccatgatgggatttgaggggcaatgtccactgtgccaaaacccagcctgtaccctgaggagctcacagccagagtcttctggaggaagaccagactggagtgaaaaactcttcctccagacgtgtgaaaagcttcaccaggttgctgacatttgatcagagccttggaggacaaatagaagctgttcagtggagaaagaggaaggggcatgagaggtggaaagaaaagcaggaacaacaccatcctgtggtggaggagaccaggagaagcccagaaccctggagagaaggccagaaagatgagcggaggtcagggtgtgaaaggtcacct

SEQ ID NO: 13539 - DNA, 506 bp, Homo sapiens
  MAP TO CHR14.3; EXPRESSED IN BONE MARROW, SIGNAL =   1; SWISSPROT HIT: Q14974, EVALUE 6.10e+00; NT HIT: X78598.1, EVALUE 4.80e-01; EST_HUMAN HIT: BE513137.1, EVALUE 7.10e-01
acctgattcctttgtgtgggtccactttagtagttcctcttccggacctggactaggaaatccagaacctataaatgcagaattcctttctggaaatgcgcactctccatatcaccactctgaaaaccccagagctcacttctacataagcaaagctcctaatacaattgggagtcggtctagtgccagctctgtatcccatcactttatctgtagcagagcaaaaaggatccttgacttgcagcttggactttgtgcagcggcatctcttcctgtcccctgcccgtgtaacatgggtaggtaagatgcctgcttggaatgagtgccaagctgacggtctttgcatgctgcttttggtcttgtgctttgcacagtaggaaaaggtatgcattgcttggtgccagatgcatggaactaagaaaggggagaatattctttccatcttttcctagtcttttatacatctcagtgttctagcccccttccctgaaacgacgcaaaattga

SEQ ID NO: 13540 - DNA, 525 bp, Homo sapiens
  MAP TO CHR19.3; EXPRESSED IN BONE MARROW, SIGNAL = 0.77; EXPRESSED IN FETAL LIVER, SIGNAL = 0.83; SWISSPROT HIT: Q9Y337, EVALUE 2.00e-34; NT HIT: AF135028.1, EVALUE 0.00e+00; EST_HUMAN HIT: BE388198.1, EVALUE 0.00e+00
tccaggaatctgtgaggtccagttagagtccagtaaccctacctgagcctgggctctgtccttgagcttgagcctgggcttgagaggtgccactcttattctccaggccctgcccctgccccctcagcatgtcagacacccaccctctagctggtctggcctcttgagtctgaaacccacccccagcccaagccccgcctctgagccccgcccaacccattttccgttcccagagcatgttctcgccaacaatgatgtttcctgtgaccacccctctaacaccgtgccctctgggagcaaccaggacctgggagctggggccggggaagacgcccggtcggatgacagcagcagccgcatcatcaatggatccgactgcgatatgcacacccagccgtggcaggccgcgctgttgctaaggcccaaccagctctactgcggggcggtgttggtgcatccacagtggctgctcacggccgcccactgcaggaagaagtgagtgggagttccaagaggagggttggt

SEQ ID NO: 13541 - DNA, 528 bp, Homo sapiens
  MAP TO CHR16.3; EXPRESSED IN BONE MARROW, SIGNAL = 0.64; SWISSPROT HIT: P30183, EVALUE 2.90e+00; NT HIT: AF003528.1, EVALUE 2.00e+00
tcaaaagggcagaattacaccaaaagaagagtgattttgttccatttgcttttgggtggtggcctcaaccctgtcaagccagaggaggggttgacgtggaagggaatggcctgcgttacaagttcactccctctgaactactgtttctcaactgagaggctgagatagccataacccactggttggcagcctggatcagctttgaagctgtcctgagttcaaagggagccaagagattctgggttcatagaagggaaggatttgaatcatttctgttgggcttctctcaaggactctcaggctgtccgcccctgggagaaccacactggcccagcttctgccggtgtgtgctagggttccttctcttccatctgcccccacctcctctgttgctttgtctatcctgctggcaccactgaccttaactgcaaatgttcttttaacaaatagaacagcttagatactgcctctttatttgttaacttctgccctgtttaaattagtaccagggagtgcttagaacggtga

SEQ ID NO: 13542 - DNA, 524 bp, Homo sapiens
  MAP TO CHR16.3; EXPRESSED IN FETAL LIVER, SIGNAL = 5.9; EXPRESSED IN BONE MARROW, SIGNAL = 3.2; EST_HUMAN HIT: BF126066.1, EVALUE 1.00e-110; NT HIT: gi4507842, EVALUE 1.00e-111; SWISSPROT HIT: P22695, EVALUE 1.00e-22
aaaccaatggtgaacaagccattttcttcttccctctatccttaatctggccccaggtgaaatccgagaacagaatggagacagtcttgtccatgctgcttttgtagcagaaagtgctgtcgcgggaagtgcagaggcaaatgcatttagtgttcttcagcatgtcctcggtgctgggccacatgtcaagaggggcagcaacaccaccagccatctgcaccaggctgttgccaaggcaactcagcagccatttgatgtgagtctgaacagttggtatctctctttttgctttcaaaggctcagtatttaagatataattctgataatctactcttaaaatgtaagacaaacacacagaaaatctttgtacaattgaagagatagccaggcttgattttagtatctttgaaggcctatcaaaaactcactggcttttccactttgtctattacttgtcattagtaatataaaaagaggaattgaatgcttagaaataaagggaatccacacatccgttcccttta

SEQ ID NO: 13543 - DNA, 554 bp, Homo sapiens
  MAP TO CHR14.3; EXPRESSED IN BONE MARROW, SIGNAL = 0.68; SWISSPROT HIT: O15499, EVALUE 4.60e-01; EST_HUMAN HIT: AW993487.1, EVALUE 1.00e-70
tgcaatctggaaggaaaaggttaaagtaattaaattctcctgtcagctaggcaacatattgttgccactgccttttctttcttgcatcctccagaaagcacatacatatacaacattttagtttctgccaaaggaccgatgtaaaatgactgcaactgtaagtatgaatggcactgattctcagagtctcctttcccatgggactgtgggagggacaaaaccaaatgactcaacactaattagactgctttatggtggccaaatgagtgggagagaaatgaggaatgaaaaagtctggggagaatccctgggtacctctgtgatgaacaattaagcttgacttaccagaatctgctcgaggaagtgtttgttgttgctcaggcagtagaaataggccactttccaagcctcggctgggttgggattggagaacagggctagcattgcccgctcaggatctagatgatccggtgagactgaacatcaaacaagacggttatcaggaaaccaagaactcttcttttctaagctagagcccatttgaacaaccaagt

SEQ ID NO: 13544 - DNA, 511 bp, Homo sapiens
  MAP TO CHR16.3; EXPRESSED IN BONE MARROW, SIGNAL = 1.1; SWISSPROT HIT: P87072, EVALUE 8.20e-02; NT HIT: gi14778649, EVALUE 9.00e-49; EST_HUMAN HIT: BF115214.1, EVALUE 1.20e-02
ttggtctttatggcaggaccaccagtaatggtggaatgaacacttcacttccacaaaggatgaaactcataggtcctgcctcccagaggggctcccatcatggcaaagctgagctcaagaacccacactgggtgccatagagccatgataaatggccccagtcataaaaagtttatatttattgctgaacagaaaatatatttttcttccttcttgggaatagttgggctacttgcttgctgttccttcttagtgagacttttctccaaatagtgaatgatgaggttgagctataagacatacctgaattttaccttgtagtaggattaatagtaattccactagtggccctcctaattgatttatcccatcctttcacagaaccatgatggcagcattgacttccgagagtatgtgattggcctggctgtcttgtgcaacccttccaacacagaggagatcatccaggtggcatttaaggtactgtcagccccattgaaagcatcttggt

SEQ ID NO: 13545 - DNA, 567 bp, Homo sapiens
  MAP TO CHR14.3; EXPRESSED IN BONE MARROW, SIGNAL = 0.75; SWISSPROT HIT: P09507, EVALUE 1.10e+00; NT HIT: gi15828471, EVALUE 2.10e+00; EST_HUMAN HIT: AI246213.1, EVALUE 2.00e-01
ttgcatgagcttttcacacagtagtggcattaactttttgtcaaatttgtgccaaattatttctatctgtccttgatgcatgtaagttttctattcttatgtagtcaatttttaaagttatttccacttgtgatttcttccactgcttttaagtttagaaagcatgaatttctgtttgtttttctttaaaaaatttgtataaaaagctaaatatttaccatgaagaggtaagggagattttgtttttatcatcaggctttttttctcctgctctttcatttccttcttcaaacaaatctatgataattaaagtcatttatggttaattttgggaaaacacatttttctcaatttcaaaatttctcctcttgtttcacacccatttcttgtagagtctgcagtaagtgcagtagtcacattaagtagaaattattttccactgagggctatagaagtatctgttctttaccttcctaaaaatgcattgcttgacaaagattaaaactttggcacataggagttttaaaaaatttgctattgactcagtgtgctcatgatttggcagaa

SEQ ID NO: 13546 - DNA, 556 bp, Homo sapiens
  MAP TO CHR14.3; EXPRESSED IN BONE MARROW, SIGNAL =   1; EXPRESSED IN FETAL LIVER, SIGNAL = 0.91; SWISSPROT HIT: P01701, EVALUE 6.00e-06; EST_HUMAN HIT: BI771427.1, EVALUE 0.00e+00; NT HIT: U32522.1, EVALUE 0.00e+00
ggctagggcttctcctcaactctctctggaagggtgagtagcctccttcactatttggttttgtaaaagtgtatgaaattgttttaaaatttggactcatttttaatacaaaaacaagagaagtcagatctaacattcactgtacctaaggggcaatcaacaagccaaatagtactattaaagtgacagccctttttgttttctgtagttgcagaaagcaaggaccaagtgtttcagccttccacagtggcatcttcagagggagctgtggtggaaatcttctgtaatcactctgtgtccaatgcttacaacttcttctggtaccttcacttcccgggatgtgcaccaagactccttgttaaaggctcaaagccttctcagcagggacgatacaacatgacctatgaacggttctcttcatcgctgctcatcctccaggtgcgggaggcagatgctgctgtttactactgtgctgtggaggacacagaggcagggaacccatgaagagctgaacagaaacagagatcacagcctttgcaggaggcaaaacagagat

SEQ ID NO: 13547 - DNA, 582 bp, Homo sapiens
  MAP TO CHR14.3; EXPRESSED IN FETAL LIVER, SIGNAL = 0.9; EXPRESSED IN BONE MARROW, SIGNAL = 0.63; SWISSPROT HIT: O14181, EVALUE 2.90e-01; EST_HUMAN HIT: AI873810.1, EVALUE 2.10e-01; NT HIT: AJ235271.1, EVALUE 6.00e-04
ctcttaggagggacgtgtggaattttttcacaaaagaaagagcatgttgttataaatgcttcatgtaaccagtttaatacatcactgagtaagagacacacagaaaacaattcctcttatttggtcctgggagactgggcatatgcctcagtgtaaaggtgggaggcttgtgagtgcttatttcctggaagttgagaagcgtctttagtctactgtgttgacagcaaagccaggatcaacagattgttttattaatttgttgtaggttgagttgcttttgcctctgggcattcctgtgttcaactggggcttttgccaaaaaagccagaacgcccttaatctcctctttcctcatgaaactcacagctttggttcgtcacagatcttgcagatcttggcggtgctctcctactccccagttttgtctcagcaccatatggcttttgacaaagtcaggccacagcttcaacctaaacagcttaacattatcgaaagcccagcccactgaggaaataacagttctcgtttatttctgtaagtcatctggctgggagtgggaagagggtagggaagtcagtgtgg

SEQ ID NO: 13548 - DNA, 504 bp, Homo sapiens
  MAP TO CHR16.3; EXPRESSED IN BONE MARROW, SIGNAL =   1; EST_HUMAN HIT: BG014545.1, EVALUE 7.00e-01; SWISSPROT HIT: P25439, EVALUE 3.10e-01; NT HIT: AB067466.1, EVALUE 1.00e-108
gtgccccttcttctatgctcctggtctcaggaggagagagtgcttgtaggacatcaggggtgggggaaaaccggcagggtctgcttccctgccaagtggctcagtcaccctctcccatgatcttaacgcccatctcaaggaggcttcaggctgacctggaaccccctttcctacagatgagctgcccacgtggatcctgagcccacaggacctgcgttttggagaaggggtctactatttgactgtggtccctgagtctgacctggagccagcccccggcagggacctcacggttggcatcaccaccttcctgtctcactgtgtgttctgggatgaggtccaggagacttgggacgactcaggatgccaggtaaggagagcgaagtgaaggagatgaggcagcttggtgggctgtgcccagctcatgtagggttccttttggtgcctctggcacagcatcttgagcctctccgtggggcctttgctgttcctggtgcctaggat

SEQ ID NO: 13549 - DNA, 518 bp, Homo sapiens
  MAP TO CHR14.3; EXPRESSED IN BONE MARROW, SIGNAL = 0.84; NT HIT: gi14754508, EVALUE 0.00e+00; EST_HUMAN HIT: BI912572.1, EVALUE 0.00e+00; SWISSPROT HIT: P23989, EVALUE 6.30e+00
attcggaaactgacggaatgtaggtttcagagagcaaagcagcaaagcagggaagaaagacaagaggccaacactctccatggcacgaaaggtcctggctgtgatggagtctccttcctgaaatccaatttgtaccggtctcaacagcaggtcacttcacctggacccagctgaatcaccagctccttttatgatatttgtgtttgtttcacaatttctcaaggactaaagcagctcagtttgcattgctttctgctggtaagggcgggagaggtggtggtggtgaccgccacaggagtgatggtagagaaggaagatgttctctcgctctctctcctctacatctgacatcttagagatggcctcttagagaaagggaggacgatgtggaatgttactgacatctttacaaaaactgatttttttccactcaacacaaataatttcccatctggtctgctgtggccacaccaaggagccttgatgcaaggttcggggcgttcagagagaagcccaac

SEQ ID NO: 13550 - DNA, 524 bp, Homo sapiens
  MAP TO CHR14.3; EXPRESSED IN BONE MARROW, SIGNAL = 0.85; EST_HUMAN HIT: BE246639.1, EVALUE 1.20e-02; SWISSPROT HIT: P49081, EVALUE 4.90e+00
gtgggtcccttctagcttcctgtgtggcctcagctctcttcccctctcgggcctcagtttccctgtggcttcatagagctagccatacctgctctgcccactgtgaagggtggcaggaggatggaagacgaggtagtgcttctggaaattcgagatgccaagtccaagcctaggtgcctccctgcctccgaggagcctcccctgatgtcctggtcaccgcggcgctgtgctgtggccaccagcaagaccggcggcaccaaggggccccctagcggcccgaggagttgctgcagccacctgggcccagcatgtccttcccagacacccgcggatgtaggacctttcttggggacccagatcacgtgccaggcactgcgctgggtgccaggccagggaaacaccatctcctggcagccctgtgaggtgggcctttccccaccttatacctgtgcacacctccaggggactgtttcatatcatcaggctgctggacagccacaggctggactatgccgctgaaaatc

SEQ ID NO: 13551 - DNA, 520 bp, Homo sapiens
  MAP TO CHR14.3; EXPRESSED IN BONE MARROW, SIGNAL = 0.72; NT HIT: D84368.1, EVALUE 0.00e+00; EST_HUMAN HIT: BE891013.1, EVALUE 1.00e-95; SWISSPROT HIT: P54803, EVALUE 2.00e-32
gggtccaaaagtccttagtttttatactggaatcaaattgctcctgtaataatcactattaaatagggcaaaaatgagggaaggacactggggcagcaaaacaatttgcagctttgtggtcatcaccatactattcaacaacccttaatattacatattacacatctattaggttcttgaaataggaggaccattgaaaactcttcacttcaaaatgtacctgacaatattacaagggtatttcagccagatccacattgagaacatcaatcttaccagttgtagtctcctataatactgattgtgttggatgcatcggcagcccatgtaatgggtctctggttgagaacttggcgtagcgtgaagtgatgctcgccagggtcttcaatatttgtaaaatattcaaatacaccagtttgatcagcaaagtttggagcttcactaaaaaatgggtaatctgttcagaatgtaagaaattctctgtttagtatcaaatccttcagaagctctccttgctgat

SEQ ID NO: 13552 - DNA, 572 bp, Homo sapiens
  MAP TO CHR14.3; EXPRESSED IN BONE MARROW, SIGNAL = 0.8; EST_HUMAN HIT: BF219918.1, EVALUE 2.00e-01; SWISSPROT HIT: P13196, EVALUE 5.50e+00
gagggtggttcttgacatccttagacatgttcattctctgacttaattgaattaaatgtgagatttctcttatcctctttgaagtcttccatttccttgtctgcaaacaacttcttagtgttcattatgtttttaaacaaaatctaaattatccaacagtgtgaaaatgtgttatgaaaacagcctatcattctgtaacgttaagtattcactgaagtttatacctataggcaacctgagattatgataacattgaggtcacaatgaacacaggagctattaatatttcccacagtgaaagcacagtcaagatagaaagtttggtggtgatctgggtacagaaagacttcctctgtgttatttataagatgcagagtgaatgtttctgtacaatatctgaacaaggtagaagaagtgatgttccgacactctttaattcagtttgtacacaaggctggaggtaagcaaatattttcccttgtttgtcagaaaatttaggggctaggaggatgctggtgattgctaagcaaaagttctaattttgcagaaaaagctatggagcccagaaaaga

SEQ ID NO: 13553 - DNA, 406 bp, Homo sapiens
  MAP TO CHR16.3; EXPRESSED IN FETAL LIVER, SIGNAL = 0.77; EXPRESSED IN BONE MARROW, SIGNAL = 0.77; NT HIT: AF111167.2, EVALUE 6.00e+00; EST_HUMAN HIT: BI021438.1, EVALUE 3.60e-02; SWISSPROT HIT: Q90643, EVALUE 7.50e+00
ggtgcatggtagctgttgtcatcatagcccatggaggttttgggtgacctccaaagggcagggcttcgggaacatcactgtcttctgctccacggaagttgtctctaactcctgacatgctggaatagccctcaagtgatcagaagaaatgctaaatgttaacttttctgtacatatttttaaaatctgactttcataatagtctccactgttgtagagttagagaaaaatgaaagtctatctatagtaaaattttgtgattaaatattatggtgcaatgccccaaaaatgaaatgttctgaatcttgactgtggatctccatgtatattttaaaacttccatcgacccctttttctacattttcctcttcattttggtgacctttgcagaaactgagctctgggt

SEQ ID NO: 13554 - DNA, 506 bp, Homo sapiens
  MAP TO CHR14.3; EXPRESSED IN BONE MARROW, SIGNAL = 0.65; EST_HUMAN HIT: BG773469.1, EVALUE 3.00e-86; SWISSPROT HIT: Q60748, EVALUE 2.10e+00
gactgaaactattaagcagctcaaactatttaaattctattaaatgcaaccattgttaaactaacctgtaaagtacttgttatagtgttgaccttctcggtaacttctactgtaggaagacttcgagttcccctgtgcgttgatctggcagcccatggactcaatcggtcacgacagcggaagtgatctgattcgctggatgattctgccattgatgtacacaaatccttttaaataaatataggtcaaagttaatgaaacagtaaaaagcatggaaataaaagactaatacaacagtttacttttgatctcttttctatgtttaatacattagtaattttgcacactgtaatttctacatacatagcttaaaaacacaagaagtcacttccccatgtaattctccctcctccattgtctctgctttaagggagcgattcctcagatatgattttggtcatgtttacaactccagtgataataatcccttagattcatgcaatgct

SEQ ID NO: 13555 - DNA, 580 bp, Homo sapiens
  MAP TO CHR14.3; EXPRESSED IN BONE MARROW, SIGNAL = 1.3; SWISSPROT HIT: P06300, EVALUE 5.60e+00; NT HIT: AF367245.1, EVALUE 8.60e+00
cagcttgggttagggacaagataataagagtgtcatatacagaataggtgcttgaaaaatcttgatagaactccattaaaagatactccaggcttctctacttgacatttctattcagtgtgtggtttatttagcatttgctttttgtgaactttggttagttttgatattgctggaattggcagtgaaaggtgttatagtactttccaccacaaagaatgggaatgggagtgcagggatccagatggctccttgagttacatggcagatgatcacctgaatgcaagacctcatcctggtgaggaggacttcaatggccctggttctccaccttcatgtgggcagcatctgggctgttggcccaatcttgtgaggataaaagcctttgcaaaaagtggttgaatattcatgcagtgcttgataattaatgaaaggattcatgtgcagcttagttgatgtaagagcaaaataagaggtgggcacatctacctaaggaaagaaccagaaatccaaacaggattcccaagacatagttggagggaattagactctgtgcctcaggtggatgacctcatgaagg

SEQ ID NO: 13556 - DNA, 501 bp, Homo sapiens
  MAP TO CHR19.3; EXPRESSED IN FETAL LIVER, SIGNAL = 1.2; EXPRESSED IN BONE MARROW, SIGNAL = 0.62; NT HIT: gi14766644, EVALUE 6.00e-50; EST_HUMAN HIT: BI918858.1, EVALUE 6.00e-66; SWISSPROT HIT: P19515, EVALUE 2.40e-01
cgatgggatcacacaacaacacaacgtagcagggacgggggtgagacacacagtccccggggggcctcccttgggcctccacctcccgcagcaggcccccgattcccagacctaccctggcagggcagaggaggcgctgcctcacacaaacacagagcaggagacagcagggcacgcccaagtcccacctgcctacatgcccggcctcactgtgccccgcgaaatcccagctccctgccctctccgcccgcccgctcgcggcctgaccccgggtataaatatctcccacttcaccctggaggaattctgctcgctcaggccaccatggcaacagcctgccttcccccactcagggggtcacgcacagccctgccggggtgaggcccagctgccacatcgccacaggctgcccctgtgggaaaggccaccccgtctcctccctgggcagcaacgagaaaaggaaaagacagcccctctgcccgcctctgggtgacatctttc

SEQ ID NO: 13557 - DNA, 535 bp, Homo sapiens
  MAP TO CHR16.3; EXPRESSED IN BONE MARROW, SIGNAL = 0.89; EST_HUMAN HIT: AW236968.1, EVALUE 0.00e+00; SWISSPROT HIT: P98160, EVALUE 2.00e-01; NT HIT: gi13385711, EVALUE 6.00e-19
cgggggtctgcttttatttacctatttacaaggtatgttggccctgggctcccccaccacctcagccccaacgttgccttctggggcagcctcggcctcctcctgtggggcaccctccagcagagcggtgtcttcctccaggaagttgctgagctccgccagctctctacgaacgacactggtggcttggtccagccagcgcacacgccgcaggagggacagcagcaggggccgacggcgctcctggcgcacgctccaggcgttgtgcagctcccggtagcagttgtggcgagcacgctcggccgggtccagggtggccccgcagcccagggggcagcgctgctgggacccttgctggcaatgctgccggtgctctgccagggtcccacgcggcacctgcgaggtgcagccctcgttggggcaggccgttagctcaaaggggcatgagtcctggtgccccttgcgatgggccagggggcatgtcactatgcagccagcgtcggcgttcttgcactgagggtgaaggagaacgtgt

SEQ ID NO: 13558 - DNA, 551 bp, Homo sapiens
  MAP TO CHR16.3; EXPRESSED IN BONE MARROW, SIGNAL = 0.72; EST_HUMAN HIT: BF172395.1, EVALUE 2.00e-01; SWISSPROT HIT: P42526, EVALUE 1.60e-01; NT HIT: AF260225.1, EVALUE 1.30e-01
agctgcacacacagaaatggcattgcaagctggactaatgctgtaatgcaaagtaatgagtaatctctggaagagcaaagctatcacagaactaagcatgctgattaatgctagaaaggacatgctgatcaatgctagtatgggtatgctggtcaatgttggtatgggcatgctgatcaatgacagtatgggcatgctgatcaaagctaatataagtatgctgatcaatgctagcatgggcatgctgatcaatgctagtatgggggttcttatcaatgctagtataagcctgccgatcaatgctagtacggacgtgcttaccaatactagtatgggtgtgctgatcaatgctagtataaacctgctgatgaacgctagtatgagcatgctaaacaatgctaatatgggcatgccagtcaatgctagcataggtgtgctgatcaataagcaaagagaacacatgctgaagtcaagggctttaacaataacttttgtaaatactaccctttaatcccctgttaagtttactaccttcatcctaacccaagacg

SEQ ID NO: 13559 - DNA, 526 bp, Homo sapiens
  MAP TO CHR19.3; EXPRESSED IN BONE MARROW, SIGNAL = 0.85; EST_HUMAN HIT: AI907878.1, EVALUE 1.00e-88; SWISSPROT HIT: P17024, EVALUE 2.00e-08; NT HIT: gi8923076, EVALUE 7.00e-68
acctcagtccgaccaacaacagaacctctccagagaactggagaatgaagctgtgtccatggtcctggtgtgagaaagagataaggcataaaggtgaggggcacagactaactcaggtcacaggtgaatatgagtaccttacccagggaggatataagtgtcaaggtctccagcatcacgtcacggtacaggcatctctgagcctcattaagaagactccattcctccagggaaaagtttacagccacatcttcaaaggtcacactgctctgttatgatggggatagatgaaaccacaaatggcccctatgctgaagacccacagtccacttccccaacatatctacccttgcccatcctcctcctcccaggatccccaactcagaggagaaattttgcccactagtgccactgtgtcctcatgggaccattaatcatgacacatagccgtcagcaacaagaggcagataagcacacaggtatctatgctgtggtcctgaaataaagggttccatcctctcctttc

SEQ ID NO: 13560 - DNA, 501 bp, Homo sapiens
  MAP TO CHR18.3; EXPRESSED IN BONE MARROW, SIGNAL = 1.3; EXPRESSED IN FETAL LIVER, SIGNAL = 0.95; EST_HUMAN HIT: BG828322.1, EVALUE 4.50e-02; SWISSPROT HIT: Q92075, EVALUE 7.90e+00; NT HIT: AJ414148.1, EVALUE 3.00e-02
tcacctattgtcctggagccattgcccttgcaggtacctgccacatccctatgcttcctgggcccaaagacattccaacccatattcctgaacactatgaaactcaacatagaggatgtgctgatatgctaaacatgcagagcccacctctataaagcttaccaccttctcgggtatggaagcagtctcagctttgtctgtggcaggtctgtgacagccccacgccatgaagaggaaggcccactgtgactccaagcggtcccacctccctgctcatgggaactgccagatgttttacttgtccctttcttctctttttctgacggcttttgatgggttctataagggggacagtgttgaggtgaggggaggaggcaggaagagaaaagtccttctcaacccctcattggcattcacatcctcagctgttgcacgttcatcttctggacacttatttattttgtccccttctttctgtctccttggagatgccagttcctc

SEQ ID NO: 13561 - DNA, 550 bp, Homo sapiens
  MAP TO CHR18.3; EXPRESSED IN BONE MARROW, SIGNAL = 0.65; SWISSPROT HIT: Q02388, EVALUE 3.10e-02; EST_HUMAN HIT: AA361740.1, EVALUE 2.00e-47; NT HIT: gi15305528, EVALUE 0.00e+00
gagggagggcttggacttaccattgtcctccggtgctggggttggctcattctgcagggccaggggcaccaccgctcctgatgggccaggagggccgggggggcccttggggcctggcatgcctggtaccccaggcaagcctggcagtccccgaggtccaggcaccccaggctccccaacggtgccctgaagtccctggaagccaggagggccctgagggccggggagtccctctttgcctggtgggcccggggggcctgggtccccactggagccctgagggccgggcttcccaggggaaccacgggagcctttggggccctgggagcctttagatcctttgccgccacgctctccggggggaccagctggtccaattgggcctctctcacccgcagggccaggtggtccaggctcccccttctctcctttctgtcccttgttgccagttgggccagggggtccctgggatcctctgtcacctcttggacccctggggcccggtggacctaaagcataaaagaaaaaggtgtcaacatgaaatccactg

SEQ ID NO: 13562 - DNA, 511 bp, Homo sapiens
  MAP TO CHR14.3; EXPRESSED IN BONE MARROW, SIGNAL = 0.7; SWISSPROT HIT: P49327, EVALUE 7.10e-01; EST_HUMAN HIT: BG339499.1, EVALUE 1.80e-01; NT HIT: U79958.1, EVALUE 7.60e+00
gccagagcttcttgcaaatcccccaaatgattttcacatccttgcatttaactcctccatctcccccacccccgctctgagcagaggtgactgtaaactagtttttgttccatacttctagagtgttaccacggtggttgcagtccactaagggcagttgtgagataccggaagtcaaacccagttttcccttatcacctctttatgtcactgattttcaatttaacagttacagagaaaaatgaatttggctggtttcacgataaaccaaagaaagcacacctgaaggcaggtgagtatcaggtgctgtctgtaggtttcctatcaatgaatggagtggagggatgtggttcattcttattttctccctgacgtctctcccggcccagaggaccactctgttttaagccatgggatgatgttctttgacttgccagagtggctgcttctcctctgtcttgcaagggagggtccccctcagaggagtgagacagctttcagaccccacagt

SEQ ID NO: 13563 - DNA, 586 bp, Homo sapiens
  MAP TO CHR18.3; EXPRESSED IN BONE MARROW, SIGNAL = 0.83; SWISSPROT HIT: P75967, EVALUE 5.70e+00; EST_HUMAN HIT: AA993945.1, EVALUE 5.30e-02
gcatgccttcacacaaaatccaataaaatcattttgatgaaacacacttgtttcataactaaaaattttcatatgaatcaggacaagtttggtaagtcattattttacccagctgtaaagatgtaccaaaatatctgaaaaatattttttgaaacatttgacattaatcaaaggcaggttgttttgtaatatccagacaaaaccgcatatataggatgcagaaatagattttatcataatggagttttccgctagcattgtaatacctgacattttctatgagcatgatcaaggtaaagttgacattgtggaatctgcatggactgtggggtggcaagaagcagaaaagacttttcatccaggttgtgcctttggaagcactgaaaatgttaggactgactttatggtgatgaggatcagacctgctgactcttatatcttgagtcactacccagatgtctagctcttacaatagagtaaatcctataatgcatgtaacttcgactagtcattttttatgattcaccattccctaaatatatcattaattctgagatattttaggcacaggtatttgtatttaggc

SEQ ID NO: 13564 - DNA, 519 bp, Homo sapiens
  MAP TO CHR18.3; EXPRESSED IN BONE MARROW, SIGNAL = 0.93; SWISSPROT HIT: Q09140, EVALUE 1.20e+00
cagcttttctttcattggggaacaataataaacctcgaatatgtttgcagtttggatttctgatttatataccgcccaatagtgccccatttaatctgttcacctgtggttgctttgttctgaatttcatggctctgttgttttaaaccctcttttgcatacattttcagagagaggctgatgattgcaaaccgttggtttttgggaaattggaatgctgccactgtctgaattgcctgaataaagaaaagtaggtcctgtaattattttattttctccccagcatgtgatttgtgattgatgacacatgcatagggggcttttgccattaggctggctgatccctctactatgacattaatgtcactgtcactgtgctcgaagctatagtttgttaggcaactctggcatggggaaatgagcatggactttttaatgtgtttgaaatagctacatgctgacagatgttcccacgtgcttgctgatgtcatgactggggctcctagaaatcccgggaaa

SEQ ID NO: 13565 - DNA, 572 bp, Homo sapiens
  MAP TO CHR18.3; EXPRESSED IN BONE MARROW, SIGNAL = 0.71; SWISSPROT HIT: Q9H3N8, EVALUE 4.00e-28; EST_HUMAN HIT: BE062373.1, EVALUE 8.00e-01; NT HIT: AF307973.1, EVALUE 4.00e-91
agttgggacaacttgccttgggttttctttgattccttcccatttcaatggtgcataggtgagtgaattatccaagtcacacaaactaacaaccagcaagaactttatgccagacaacaaaaggatagggttcctctaaggcctgtcgattaaattaacaattaggcttaaaagaatttttgcttgaggacccatcatatacatttacataatcttctaagggggataaattaatgtttcgacttacagcatttgagactgacaggtatcgatcatagctgatgaggacaatgttatatacagatgctgtacataacagatagtcagtagtgagccaaaatacacagatttcctttccaaaatcccattcgaacagcgtgtgagggatgtacaaaggaatggagatcacacctgcacagggaaaacataagtgtaaaaacatagcgcacatcaatgaacacaaatgtgcatgttttaatggctacacaacacaatgacctatctgaattcactacaaatgatttgtctctaatttagaaattcacggtatttcatcaagcagctcaggactg

SEQ ID NO: 13566 - DNA, 542 bp, Homo sapiens
  MAP TO CHR18.3; EXPRESSED IN BONE MARROW, SIGNAL = 0.97; NT HIT: gi9558746, EVALUE 3.00e-76; SWISSPROT HIT: P13983, EVALUE 1.00e+00; EST_HUMAN HIT: BF968902.1, EVALUE 4.00e-67
actggtcaaccaggaccaagacaactgagtccagaggaccgtgagtgagtcaggcaaaaccccagggacattgccacggagggctactgctggattggctccctcgccccacccagaccgcccccgcccaaagcagcaccttgggaaacatgcggaagatctcctggttgatgtggtagatgccactggtgtccacctcatacttgagctttgtccccaggggagtgttcttctgggtggtgaagagaaaggcaggggcgttgcagcacctggacagagtagacctgccaggcagggagacaggcaggaaagacgtgatgcaggaaagatgtgatggagggcagagcacaacctcacggagaacagaggggtggagccgaggcctctcctgctcacctatcccacgcttgcccccaccctgcatggagccgaggcctctcctgcccacccatcccacacacatccccaccctgcatggagccgaggcctctcctgcccactcattcccaggcttgcccccaacctacacctctgctcatgca

SEQ ID NO: 13567 - DNA, 596 bp, Homo sapiens
  MAP TO CHR16.3; EXPRESSED IN BONE MARROW, SIGNAL = 0.91; SWISSPROT HIT: P54824, EVALUE 1.00e+01; EST_HUMAN HIT: AI274656.1, EVALUE 2.10e-01; NT HIT: AB007612.1, EVALUE 5.70e-01
atggcctttctcaaggtttgtttttttttttttcagaagctctaactctattttgtaatgcctatttctatttctgcctagcttgtttgttcaactacttttgcagagttgacaactgaacgcacagcgctggctcagggagaggcaggaaactcaccagcagaaaagggcttccacacaatgcatctgatttgcccaactgaacgaaactcaacccgaaagtaaataggtaaatgccggtagtaattggcagttataaaaaacaagcatcactggttttgtttaaaatgtctctttgatagatgctccctcaatagcactataaatttttgtggatcatctgccacctttaatgtatctgacactgacttcacaatggagcttgtgatagaaaattcctacacaatccatgtgcatacattccaagtgttaaataacctcaagtaagaccatttttatgaatatttacatgccaaatatattttgaagtacgtagccaccatcttcctcatttaagagctatatagttaacatagctctaaatctaagatgaaaataaggggcaaaaccaaagaagaaaatgcttgctccaaacc

SEQ ID NO: 13568 - DNA, 527 bp, Homo sapiens
  MAP TO CHR14.3; EXPRESSED IN BONE MARROW, SIGNAL = 1.1; SWISSPROT HIT: P15184, EVALUE 9.70e-01; EST_HUMAN HIT: BG401290.1, EVALUE 7.40e-01; NT HIT: AJ277892.1, EVALUE 1.30e-01
gtaacactgggccagaggagtaatattcttgtctagctcagcaattccacggaggagcaaagcctcctgggcgccatttggagagatagtgagaggcaggcatttgcgtttctgtggggtttggacaggctgtgcagctaccacaggtgggtggtccaaatgatctgcagacagttgaactcctcggggttttgggtcctgggatatgcctaatatttcaaaagcagctccattctggatggttttctggagacaaaacctcagaatcaaaaatgatctcattaaaacaaggagaggtagctgaagccaaggtcccagagggagttgtttttccttggactccatttattttacttccttcagccaaaaaataagataaataaataaatttagaagcctacatgttttccttagaacttaagaaactgccttcctgcagctctcccctctctgctttggagctttgtacacatgcgttatatagggagagggagggacggcaatggggagaaagaaggatggcctcc

SEQ ID NO: 13569 - DNA, 539 bp, Homo sapiens
  MAP TO CHR18.3; EXPRESSED IN BONE MARROW, SIGNAL = 0.85; SWISSPROT HIT: P22913, EVALUE 1.30e+00; NT HIT: gi6681088, EVALUE 5.10e-01
tgcccatttttctcaaaagcaattttagactgcaaagccaatgcatgcagaggtattgcagaattagagtggtatggcacatttggaccctgcagagaagcctgtaggaccagaactttgtctcttcttttataggaagaagcagtttaccaggttcttattcttattctcaatggaccagctgggccagggccggttttcaatgcagactctctcttttgctcttgctgtgtatcggaaggattcccccctggttgcttgtcaggtgcaggctcttggcaacctggagccaagctcagtggaagcgcatgtttccagccacggcatcgccattgacaggaagggctggcatgtatcacttttcagcatccaaccaggtgattgcttccccaaaggtgggaacaggtgcttctccaatctctcaactgtgcctcgtttcctccagtcaggctgtttggtgggctgccctttagtaaaatccacttagatggcacctggccggcattttatttcacctatgtgagctggtctttgcattg

SEQ ID NO: 13570 - DNA, 550 bp, Homo sapiens
  MAP TO CHR14.3; EXPRESSED IN BONE MARROW, SIGNAL = 0.96; EST_HUMAN HIT: BF082982.1, EVALUE 2.00e-01
tgactgaatcacttgcgtcactcacaaaaataataacaatatttttttaaaggcagaaagaaagagaaagaagattaaaaaaaaattgctggcttatgtttttgtagttgtaattcctctcaaatttcttcttagttaattccagtgggcccaaattttattcttcactcacaaaattaaagaattataaattagttttaagtggttttgaatttcattcctgttcttcagatagaaccacttggaaattctcatggaacataaaggtattctgcttgctcagaaactccgagggaaaaatgccacttctcttcttagtaaccattttacatctattacttcttactaactatattttctaaggcataagtaaagtcctgctaataatttaggtctatttattttgttcattcaaaagcaaatataacacaattcttttcagcaagtcacatttgagtcagacactgatcttgtcaacataaaatattttaaccctctaagaaagataaactgactaattgaacaactgtggaaagtaacccatggcaaa

SEQ ID NO: 13571 - DNA, 559 bp, Homo sapiens
  MAP TO CHR18.3; EXPRESSED IN BONE MARROW, SIGNAL = 0.94; EST_HUMAN HIT: BI560635.1, EVALUE 4.00e-61; NT HIT: AF196779.1, EVALUE 8.30e+00
accaggggaaaaacttggaggagaaaaaagtcctcccactcaagttaagaaacattaggaaatctagggatatgtccatggttttagtccagtgtactggaagaaaacctaaaattcaattagatcacacagcaattttaaaagcgtaggtcctcaaaaaataaataaatgtgacctttttcatagggctatttttcagccaagtgtgctgttcacaaagtcaagccaagccatcctgacctgattaggatgctccttattgagcgatttggtgtcccctgtcttccccgctgtggttttggaccggggcctctgctgattgatcttgggaagattttgacaactgtcgttcatcatcctaagggagggaacaaagaccttggaagaaattattctagccacttaatttgaggtagttaaacaactattcttaagaatagcacatttaagaaagctattgaaagatatgcaggtggcaactatagggcccttccacctatgtgatccacccaccaggtccatcctggccctaacaccctccaggctactcactgggttc

SEQ ID NO: 13572 - DNA, 551 bp, Homo sapiens
  MAP TO CHR14.3; EXPRESSED IN BONE MARROW, SIGNAL = 1.2; SWISSPROT HIT: O08528, EVALUE 9.00e+00; EST_HUMAN HIT: AU135134.1, EVALUE 5.00e-02; NT HIT: AF159567.1, EVALUE 1.30e-01
agcttccgttccttctagccactttatttcttcatcacgtttaaagtcctttacccctccttgtccttaacacatttccacagatgaaagctgggacctccacgaggctctgagagagctactgcaggactccgttcttcgtttccttcaattgacagtatccagcgggccatactccctaaaggtcacctgggcaggtgacgccagggtcctcttcagaatggggtcatctgagactgctagactcttccctatagagagtcctctcagggcactgcctgactctcaggcctgcaaggctgagtcctggctgctgccaccttgcattgccaatactgattcttgtataaccttcagtggacctgggtgggatgacaggaacattgctgtctaggggatgacattcgtggctccttcagaaacatgctaacatccctctgtgggtaacataatgaggtccagcattcatacaccatagtgtctccagagccaagtcgacgtgcttgtaaacccccttctttgctgaagatccagccagatcacaactgtgc

SEQ ID NO: 13573 - DNA, 543 bp, Homo sapiens
  MAP TO CHR14.3; EXPRESSED IN BONE MARROW, SIGNAL = 1.3; EST_HUMAN HIT: BF739093.1, EVALUE 7.60e-01
gatttaagggcgcatgtctccccctgctggttgtggtggtaggaaaccgaacctagaccacaatggtactggggagaacttgaattggaaaggaccctacagcaagaagaataggtgcttcagaacccactatccatcacagggtccttaccccatccatcatagggtccttactccaaccaagagtaaagagagtaaagtgagtgaaggttaaagaattcgtggcaccagtaaactatcaatagatgctgatttacaaatcttggtaaattaataggaaaggaagaaaaacgtttacggtggtttagctacataaaaatattcactatcaatcttcatgaattgcttattctgtatatctaattatatagaatcatagcataaaataatcataaaaattatgcctatcattagtcttgattcatttggttccattacaatacttgtctgaagcttaagttattggtacagcatggctgtctgctcaagatgtaggtaaagtcaaggaagtttggtttatttgccccttcggaggactaagag

SEQ ID NO: 13574 - DNA, 500 bp, Homo sapiens
  MAP TO CHR16.3; EXPRESSED IN BONE MARROW, SIGNAL =   1; SWISSPROT HIT: Q00400, EVALUE 2.70e+00; EST_HUMAN HIT: N52856.1, EVALUE 7.00e-01; NT HIT: AF305900.1, EVALUE 1.20e-01
gagaatctccctgacccctctgcctcccctgcagactccaacagcaaaacgggggcccacacaggatatgggatccaagagggatttttctgcctgttgtggcctccaaattctccaaataggtccgttcacacaaacaagggtagtttgttctcccagcgacaggtacgtgtgagccaatacttgggtggggggatgtcaatgggggtaaaagaaaacctttgcctagtgggcagcaggcgggggcccccaccagggcgtctctgatgaaaacgttcagcttgatgtggcgtctctggttcctctgaacgcgctcagagacagaggcgttgagcggtgctctctgtgtttgaaggtgtttctctacagcaaacaccaggcggagaagagaaaaacccaaaccacttcaagtggattccgattttgaaagccaccacatgaaaagtgcagagacctaagccccctttagtacgagcccaagagtaacaggctcaggctgg

SEQ ID NO: 13575 - DNA, 580 bp, Homo sapiens
  MAP TO CHR14.3; EXPRESSED IN FETAL LIVER, SIGNAL = 0.79; EXPRESSED IN BONE MARROW, SIGNAL = 0.85; SWISSPROT HIT: Q9Y5A7, EVALUE 7.30e+00
gggggagagatcttcctttgacagtgtagcattttttgataacttgatgctgtaggaaaatgctcagaacagtgtgaagatatgcaatatatcacaaagaatagttggaatgtagatatgggcttaaatgtgtgcagtgctaaaattcctatggagtaaatgtgaactgctgccaagatacagtcaatttaaaggtgacagaagatgatctcacatccaggacttgatcagttattttggccctgagaacaactgatggtttatgatataggctgatattgacataagtggttttgcttgctgatatctgctgtacttctgaatagaacattgctttgttcctaaaacagtagggttggcagtagactctcatttcagtggcattatacatttctttgtactggttgaagtcctgtctgcttagagacagtaagatggtcaaaatgatttcttaagtttccttctaatcctctgattcattaaacacatccaataaagcttaagatacgaccataaaaccattttgttccttctaattctgaatgtatattgtatcttaccaagatcattccaaatgtcc

SEQ ID NO: 13576 - DNA, 511 bp, Homo sapiens
  MAP TO CHR16.3; EXPRESSED IN BONE MARROW, SIGNAL = 0.71; SWISSPROT HIT: P49952, EVALUE 1.60e+00; NT HIT: gi16164740, EVALUE 2.00e-83; EST_HUMAN HIT: AA339783.1, EVALUE 8.00e-07
aagaatcgtcgggtacatcgcctgcacacacctgcatgccccgcaaggtagggttgccgcccacctgtgttttttctaggcatgggatcagtgcctggggcctagctggggtctggggcgaacttcatcatccagtctctgtacttctgccctgcagaggacagcgccatccggtgtgggcagctggacctgcttcaggactggctggctgatttccgaaaatctacctcctcgtccagcgcagccaaccccgaggagctggtggcatttgacgtcgtctgtggagatttcaactttgataactgctcctctggtgaggccgggctcctccccactcaggtctccagctctggggaggctgtgggctcagtcacagctagacagacttcgttaggcagctcaaagaattcctgctcctcgagagcatgtgggcggggtatttagcaagactgatttctctgccccctagaaatcctagaacaggaagagcccacgctctgcctagaaagct

SEQ ID NO: 13577 - DNA, 510 bp, Homo sapiens
  MAP TO CHR18.3; EXPRESSED IN BONE MARROW, SIGNAL = 1.1; EXPRESSED IN FETAL LIVER, SIGNAL = 0.97; SWISSPROT HIT: Q04205, EVALUE 7.10e-01; EST_HUMAN HIT: AW025248.1, EVALUE 7.10e-01
gaaagcactcccagaacagcatcccccagagggagcagctttgctggcagaaggtcccagggtacagccctgcttaccccttggtgtggtccttttgtacattggtgccttttgggccgtgcttggctggccaatcataccgtgaatttgcatgttgattgtactatttgtaggactgttttcctatgttgccgttaatctccttatttttaagaacaagtatgtcatatctgccgcctgagagccagcagtctatgctcttacacagcactcccagcagaatcctctctcaggagaaaaagctcaagtggaaacagacctatttactgatcagcagaggaaatccatgccagctctcaagggtcactggggatatgagggggaccaagagcatggaagagagaaatgaagacaaatgagcgatggagctgatggcgagaagacagaaatactacagagaacgaaatggagctcagatacatcagacccacgtgaaaatcccactgttca

SEQ ID NO: 13578 - DNA, 517 bp, Homo sapiens
  MAP TO CHR19.3; EXPRESSED IN BONE MARROW, SIGNAL = 0.85; NT HIT: gi15627000, EVALUE 2.00e-37; SWISSPROT HIT: O75437, EVALUE 4.00e-12; EST_HUMAN HIT: BF684277.1, EVALUE 1.00e-79
tcttggggatttgtcaatgtagaaaaaaaaaaattcaagatgtttcattgtgatctggactttttatattcctgagctgatctgtatccttcactctaaattagtggtaattccagaaatttagtggcataaaatattgttttctataccttaaaatctaattgtcatctccagtttttgattcagtactactaagtagtaaaattaaggacctacaaatttaaaatagtgtctaaatatttagaaatttgttttaaatttgtattttgtaattaatttagtattctattaattacaccctttttactgagcacattatttaaagaatatgagcaacattcatgttatttatttttaataaaacaggtattgctgtctctaagccagacctgatcacctgtctggagcaaggcaaagagccctggaatatggagagacatgagatggtggccaaacccccaggtaggtgagagtgaatatgacagatgacacagatgagaggtccaaatgtcaagga

SEQ ID NO: 13579 - DNA, 501 bp, Homo sapiens
  MAP TO CHR18.3; EXPRESSED IN BONE MARROW, SIGNAL = 0.99; NT HIT: AF349446.1, EVALUE 1.00e-94; SWISSPROT HIT: Q15849, EVALUE 2.00e-16; EST_HUMAN HIT: AW452158.1, EVALUE 2.00e-96
ccaacatcccttaatgtcgcacaatagatagttatggagattctggcagagaatgaaaatcagcttcagggaaagaaagttacaggtgtgcttggttctacacaggtgcaaggagaggcaaagaaggtgagtgctgcaactgattgaaccagagcagagaacacagggagaggacatcaggtcaggcaaagagcgtttcttccccgaacatggctattcaccgctgggggccttctcttcttcaccgcttttcactgtcaggtagtagatgcggttggcctcggggtaggtgactttgctgagtgggagtctgaagatggctgggttgtttgtcgtcaggagcaggaagatgatggtggcaaggcagaaggcccaggtgcctggtggcacgcccacctggaaacaaaagcattggggactgaagaagtttcctagtttcctgtgttgggctggggactctgggggagaaggatgtgacaggcgttgaggatggagatcctc

SEQ ID NO: 13580 - DNA, 548 bp, Homo sapiens
  MAP TO CHR14.3; EXPRESSED IN BONE MARROW, SIGNAL = 0.7; SWISSPROT HIT: P54779, EVALUE 3.00e+00; NT HIT: M94081.1, EVALUE 0.00e+00
tgggtttcagtaaaggcaggaagtgctgtgggaataacaatgccagactcatgtttggagatggaactcagctggtggtgaagcccagtaagtggccatgttttattgatatttgaccaaacaaataaatcccgtgaagttagtggagatttaatttaatatgtaaacaaatctacttcttgaaaaatgacttttgtgaatacatgaaacactcgtgattattgagactagagcaataatgataaataaaggcaaaatgagaccaccccaaatcacctttaacattgtgcttagccctctttcttctagagagatatggggccatgagctatttacagccgcagtatctcttaaactatgttctgcaatgacttgtgtgtttactctgattttagccacagaatttgttttccattctattaaaaatgagaatctatctcattttaaatgctactaatatttataaggtaccttctttgtctcttgtgcctgcatatatattcatttcaaaaagatctcataagaaacccaaacattgtcgcattttg

SEQ ID NO: 13581 - DNA, 589 bp, Homo sapiens
  MAP TO CHR18.3; EXPRESSED IN BONE MARROW, SIGNAL = 0.72; NT HIT: AF103898.1, EVALUE 9.00e-03
cacccaacctgaaatggttccatgggtaacagggagaaaaatatattataatatacgacaataaaaataataaaacaaccttaccccttctcctctctctgaggagtatcctgacattccccacttgaaattccccctttctcctggttctaccctcattatgtaacagagggcagtaaccaaggtggtgagaactggtaagagagtgaaatcaagatccaggaagcttggagaagtaacaaacaggaaagcagctggtgtagatgagggctttggagagtttcagaggtgggatgtggctgtgagataattagagttctgaggaataactgccctccatgtggcaagggcagccatggggctgggattttcaatgaggttttatggtatattattcatgtctcccctgtccaactactcattagaatgtttttgtaagattacaaaaaaaaaaaaaatagagttttcttctagactgctgttcctagtaatacaactctttcttatatttccagatacatatttttgtatatatttaaaatgattaggagtggttgtatgaaaatctagtttccacattttcgccaag

SEQ ID NO: 13582 - DNA, 587 bp, Homo sapiens
  MAP TO CHR14.3; EXPRESSED IN BONE MARROW, SIGNAL = 0.62; NT HIT: U22434.1, EVALUE 1.40e-01; EST_HUMAN HIT: BI833374.1, EVALUE 2.00e-17; SWISSPROT HIT: P03209, EVALUE 7.60e-02
ccaaagcgaggagcaactacatagcgtctcccggggagctgggaagtgacagtctacacccgcttccgggctccccgtgacataggccagccgggcctccatttacacctcaaagcaaagtcacagagggatccgcccctttcctggctgcctacacagaaagcagccatgggagacttgccgaggactttgtccaccaagtgatgaaagcatgcaaatgcctccgaatcaaaggtaaatcaaaagaaaatggcagcccgcaagaggaggcggcggtgacagcccgtcagccgtacagccacccgacaggcctggtggcagcgtggaggctgccaagagaaccgcctgaggaggctgccgccaagacagatgtcacggcgaggagggcgcgcttccgtcgctttcggcggggcctcatggagcaggaagtggtactacatgtgccacttaagagaataataatactaataaaactgggcgttgtgaagggggagaggtgggggagaaaggctggttagagagagagagagaagaggggaaaggcatgtcacagtgtttggtaaaggaggaactgaattgatggccat

SEQ ID NO: 13583 - DNA, 594 bp, Homo sapiens
  MAP TO CHR14.3; EXPRESSED IN BONE MARROW, SIGNAL = 1.1; SWISSPROT HIT: P42356, EVALUE 5.80e+00; NT HIT: X74957.1, EVALUE 8.90e+00; EST_HUMAN HIT: BG164864.1, EVALUE 3.30e+00
cctgcagaggaagtggactcccaaaagctgccttgccgatgcggctatcaggccctcccggggggcctgggggtgggaggtgaggacaaaggcatggaagggtcttacaggaaccatctaatgaaagtctgcagggccagctggggctcaccaggtgagctttgcattctgcaactgcttcagatctttttatatcctttctctctaagtctcaaaaatattcagggtcaatattattatgttcactttactcgtgagaaaataaaaccaaataattatgagcagttattgatgtgcttaacctaatgccacatattgtccagctctgtcacttagaaatgtcctctgtcccccagagatctactcctggatgcgggtacaggacagcatccccagactgtttgtaaagtctcatgtgatacatggagggcaggcctcctcagctgaagagacctggcaaaatcacaataaatcatgtgatgcaggaggagggcacacagcttggtgtaagggattgtccagctctgtctttagatgccctataatttagttatcacttgagaccacatatacaggaatggggaagagtggtct

SEQ ID NO: 13584 - DNA, 512 bp, Homo sapiens
  MAP TO CHR18.3; EXPRESSED IN BONE MARROW, SIGNAL = 0.75; SWISSPROT HIT: P14547, EVALUE 2.80e+00; NT HIT: AE001011.1, EVALUE 4.90e-01; EST_HUMAN HIT: BF701290.1, EVALUE 1.20e-02
ctgtgttgcgtttgcatttccctaagcaaaggagcacccgctagtactcggcacatcctgcggcttaacaaaggcatgactggagtacagatccgggcagtgggaagtgggccctcgcttccaggagcaatctccctgcccccaaattggaatctgctgtcaggtgcaagggatttcacaatctcctctcccacctttgtctccagtcttctaggtgatttgctgatctcactgtcctgtgggccggggtatggatgtcctgggagaggggcacagctcaggggcctgacagttaaaacactgacactgatgagagccctttcctcccacacagccaaggctgatgccacagggagccgcagcctcaaacccgctggaggtagagggtggaatgaaggttatgatgaaaggaatgcaaaacatgccttcagacccctgcccagactgaagtgagtcccaagaccctacagcatttctccattttgtgggtctcggcactttcaaaactccat

SEQ ID NO: 13585 - DNA, 571 bp, Homo sapiens
  MAP TO CHR18.3; EXPRESSED IN BONE MARROW, SIGNAL = 0.82; NT HIT: gi4505330, EVALUE 5.00e-38; EST_HUMAN HIT: BI084863.1, EVALUE 8.00e-38; SWISSPROT HIT: Q99747, EVALUE 3.00e-08
gccaaattccaggacatgagaattggaaaagtactgttctaggatatttcccctcaggtgtcccgtggaagttactatagcatttataaatctctgtttatacaaacaaagactctgaaagttaaactccaggtgttttcaatactgccaggttattgactttattaaacagatgtaaatttgaccatgatcctctcttttgttttagaaaacaattgctcaagtcttagttcatctacacagaaatgactatgtagctgcagaaagatgtgtccgggagagctataggtaagacgttgtctgggccctcttgacttgcagtggcgacacctctgtgtctacaactaagattgctgctaggacacatgttcctggccatgaaactgtcatttctaaatcttaggagtgctcatctaccatttcatcttttacagtgggtgttttacaccctttttttttttccctttcctgtatttttctctaggggacctccatggaagtgaatgactttagtcattttagtcattttatttgccttctaagaaaaaaagaacaagaaaaagggggaaaa

SEQ ID NO: 13586 - DNA, 557 bp, Homo sapiens
  MAP TO CHR18.3; EXPRESSED IN BONE MARROW, SIGNAL = 1.2; NT HIT: U18774.1, EVALUE 5.30e-01; EST_HUMAN HIT: BF826088.1, EVALUE 3.10e+00
cagcctactgctaccatcagcctcctaatccaactggaggtgttcaagttctgagacatgacctttctcgatagagagcccaagagatttctatgatagtcaagaagggcttctttcccctccccaaccaacaaaattaccagtaataagacagctttggatcctttttggaatgtggagagatgttagtagatgtgtgctcaccaccttgaagcctctctgctccttagagagctccacactgcaggagacctagttaatcctttagggatgacggtagttagctctgatctgtgcagcattcaccatgcattgcattaatctctctgttgttcagaccgtttcctttaggtcctaacgaccgtgatctactctcacttttcacttaatttcaatgactttacatccgtctgttccagcacctgttgtatgaaatctaagttattcttagagataaaggtgagcaaagaatagtgaccttgtccctaggttaaggtctgccttcctgtttcatctttccttccccaggactgtgctgaactctgtgaagcaggcct

SEQ ID NO: 13587 - DNA, 538 bp, Homo sapiens
  MAP TO CHR16.3; EXPRESSED IN BONE MARROW, SIGNAL = 0.72; NT HIT: X54850.1, EVALUE 2.00e+00; SWISSPROT HIT: P28742, EVALUE 6.60e+00
cagcctcaaactggacaagcagtacatcctaaggagtctgttacagacgatcaactctggtgtccctccaaggtgcacacattccctggtaaccagaaagacacttaggcttaaacaagacaacgtctgactgagattgtccctgtttcctggtgagagcatttgaggagacgggtgttgattgatgcggtttgtaataatactcatttttctgcaattactccttgaattccagccaaagtgggccacacggagctgcagctgtacgagatgtctggattctcccagtcagcaaagagttgggaacagggtggtcacagaggagccaagccagggcagaaagatgtctccattcagtgaatacttattgaatccttgctctgcaccagatcttgaagggagggaggaaaaagccttgaagctgacaatgtagttccttcatgtcaattaaatgtttatttaaaagagtgcaaaaatagaaaaagggtggtttcttcctttgagggaagccacgggcacgtgaatgaacaccagcatt

SEQ ID NO: 13588 - DNA, 587 bp, Homo sapiens
  MAP TO CHR14.3; EXPRESSED IN BONE MARROW, SIGNAL = 0.96; EST_HUMAN HIT: BI828869.1, EVALUE 0.00e+00; NT HIT: AF081796.1, EVALUE 1.40e-01; SWISSPROT HIT: Q9WUV4, EVALUE 3.00e-06
tgcctcgtaagtcaggaaggaagtcttgttacagggatcagagtgttggaaatggagacagctggcctgtggtggtagaggttggggagtggctcaggaattaaattcccgaatagagaccagcgatacctattggatcagcttcatacttgcgggagcagagtaggtagagcttctggttggttagggtgctattgtagtagcagctagtgggtggctgttggtggctcagggagcagaccgtgatggggagggaatcctgggtgagtgtgcagtattcattgtaattctcacagaagctgtcactatacttgcagaacttctggatggccttccaaggggcatgtatcacataatggatctttgggcaatctgaattttgcatcttgcctcgcatataggacatcagaccattacaatagccccggaaaccctttgggtagttaaccctgggatagtcaatgcttaaggtatagaagttcctgctgccaatctgcatcttgatgtccatgaccagagttggccccagaacaagctggaggaaaaggagccgggtcacagctggtgccattcctcctgctggtaga

SEQ ID NO: 13589 - DNA, 526 bp, Homo sapiens
  MAP TO CHR14.3; EXPRESSED IN BONE MARROW, SIGNAL = 1.4; EST_HUMAN HIT: T69187.1, EVALUE 1.90e-01; NT HIT: gi15668172, EVALUE 2.00e+00
tcactgaatatcgcaacacagttgtatactcatatataattgacaaataattcaataactttcttattttccagaataaatcttacttaatgcttgctagtaatctacagatggattgttttgaattagaatcacccatcctacatatatgcaagttcaggtaataactaactttggtgaccaggaataaagaatgcttgttgttaaaggagacttaaatataactttgaatggtcttgtttataatttttaaattaggtttaagtattgcttcgattattttcactattttagaaaaggcagagactgggacaatagatatttaataaacacagatactattgacaagtttactaaaacaactattaaatctttaggtttatggaggattcaaaacaattttgtcttagacatgaacctcaccagggacatgagggacaagtaggaagaaacatgtttattggttataattaaatatgtaaggtgttttatcatacaagaaatctccatgtaacctttggtgttt

SEQ ID NO: 13590 - DNA, 564 bp, Homo sapiens
  MAP TO CHR18.3; EXPRESSED IN BONE MARROW, SIGNAL = 1.2; SWISSPROT HIT: P70211, EVALUE 5.00e-15; EST_HUMAN HIT: BG189543.1, EVALUE 1.00e-52; NT HIT: gi14764388, EVALUE 3.00e-55
tgtgagcccacttgaaataccagttgtacttttctcctttatattcacacatactctcttctgttctctatagtcacaccttgggaatcatttgatttccataaaaattattaatttttgtatccttgtttgcttattcaaatccttgaaataaactgtaaatggcaaaatagacatgatatacttcttgatagattctgaatgtcaacatcatgatgaaatttccaacaatgtttattttctttcacatccaatgacaaggccttatctctgtctcacctcacagcccccacctctgctcccaaggacttgacagtcattactagggaagggaagcctcgtgccgtcattgtgagttggcagcctcccttggaagccaatgggaaaattactggtaagcatctccactttctctcccagcatagctctcccttgtcctataattgcttaccccctacatgagctgctcctgcctttcgtgtggcattattctgtccctacatctcagctgactccatgaccctttttgattgtttcttctttccccttttgaccatggaattc

SEQ ID NO: 13591 - DNA, 501 bp, Homo sapiens
  MAP TO CHR18.3; EXPRESSED IN BONE MARROW, SIGNAL = 1.5; SWISSPROT HIT: P09246, EVALUE 2.10e+00; EST_HUMAN HIT: BG403598.1, EVALUE 7.00e-01
caaagacaactctccttcccctgagtccatcatcctttcttatatcacaagaaatggcatagattttggaagaaggaatgggggagaatgtggtcaccatcttgcttcgttagtccattattcacttatttatttttgaaagatattcttccagtggttaaaaatagagtgcctacaaagcaggatgtgagcaaaagagacgatgtttggcataattagctaagtatcagtattagtaagggcatttggaatgtcagaactgcagctggtcagaaatagtacacttctgttcaggaaaatggcagagaatgtgtatgtctcctccaaagctaagacaaattccacagactcttgttttctctgaaggaatagagtgagtacatattgcacattctgactgaaggtctgggaaatgaggaggcttcattatcacagcaggtcagaggtcttatactttttgagcaaatataaagctttgaatgaagggccaagagtatgcag

SEQ ID NO: 13592 - DNA, 516 bp, Homo sapiens
  MAP TO CHR14.3; EXPRESSED IN BONE MARROW, SIGNAL = 0.79
tggcctaggggaagttaatgtatcaggttgactgtagtaaacgctatttaaagcatgatgatatttgctctcaaagttcaggaaaaccagtaatcaaagtatgtctcatagatttagcaagaagttttgaacttactgccaaccaaattggtgtgtgagcctctgggatgcagaaggaccacccagatgtcatgatctgtgatgccaaactagtttttaggaggggctatttacctgagattaggagacatagagaccttaatatggtgaggagaataaactgccaagaaaattctattcataaattccagaggctggatgtgtttctccagaggctggagaaagcatcaaaaaatatagatgttgaataaaaacatcagagggtttcaccttgaattactggaattaataattgcaactcttggcattcgttgaactgtgtaaatatcactaactatagtgaacatctgaagcagtcaatccaattaaatgtttgattccaagacatgttttaaa

SEQ ID NO: 13593 - DNA, 537 bp, Homo sapiens
  MAP TO CHR16.3; EXPRESSED IN BONE MARROW, SIGNAL = 0.63; EST_HUMAN HIT: N70455.1, EVALUE 0.00e+00; SWISSPROT HIT: P20154, EVALUE 5.00e+00; NT HIT: AJ276622.1, EVALUE 2.00e+00
aaccgatgttcatcagtggagttgactatgttctaacccagcccttaccaaattggtattagatgagggattagtctctgattttatgtgaaaatcccaagaggaaaagcagctccaaccacggctttcatatccatttttcagaaataaggcctaaaggctcagcaactgcacctctttaatcaaagcagtgggagactgttcaaccagctccccggtggctcggttccgaaaatcagggcagctaattgcccactgtttgttgacacaatcgatcgtgcagacaggagacaaacagcaagacatccacagaatttccgtaggttgagatactcaatgcttatctgtgcatcacgcagccggggccccctctgctttggaatggtctcatcggctctgtccagtttcccacagtccttctctctatcttccaagtctgtgaggaacacacagtgagggtggcacccctggatttgggggaaccatgcctcaagcagccctagatccttctgccctggacacaaaggaagccgctta

SEQ ID NO: 13594 - DNA, 507 bp, Homo sapiens
  MAP TO CHR14.3; EXPRESSED IN BONE MARROW, SIGNAL = 1.7; NT HIT: AF154413.1, EVALUE 1.20e-01; SWISSPROT HIT: P35336, EVALUE 2.10e+00
ttgttcaataaatagggagggcacttttagaacattctgactcttccttaaccagccatgtcccaacccaggaagttgatgcccatcttacaaggagggccagaaaaagggaacaaggcacacagaggtatcctcagagctgatggatggctgctggcagatgcccagaaacaggtgctgggcctggagggtggaagtatataccatggtagctacatggtttggtgtcaaaatacttgtattttagtgagcatgagaatgagagtaagagtgggacagagagaagagaaaagggagggagaaagatggcttattcacacacaaaaatttagtggttcagaattaatttaacttggaataaatgatttttttttcaaagaaaattttaaagttggaggtatagaggaaaacgtgaaagaatacagagatgtactttgatcctaattgtgaagtctaaatagttaaaactaaaatggaatataaagacaaatgagacgcatcctataa

SEQ ID NO: 13595 - DNA, 537 bp, Homo sapiens
  MAP TO CHR14.3; EXPRESSED IN BONE MARROW, SIGNAL = 0.78; SWISSPROT HIT: P00488, EVALUE 2.90e+00; NT HIT: AF044285.1, EVALUE 2.00e+00; EST_HUMAN HIT: BG422023.1, EVALUE 1.90e-01
tttttgtctttgctgatgcgtgtacagtctatcttttttccatctcaagtctagccatctcgggggaagatgtcccagctctggactcagcactgatcctcatgaagagctgctcgaccccatcgtgtatgtttacagaggaagtgcctccatggcccacttcttccctatctccatcccagaacccttgcttggagaacttgctgaagaagctgccagcctcagggacagagcactggttctggcctcttcactgacctcacggtacctgaaaagggttcagccacactgcatgtcttttccccatgacgtatgtaacatggtctacttcttttgaagtatcccattcagcctggaaagtctccagggaggttatgttaagcttaggagacaaagcaccagttctggtacaagtactgcctcggggtacttagtagaagttggccatgcttcatatgttttacttacaacgcatgttacttcgtccaccttcctataacagcgtgcacctcggggggctttctgtaggcaggaacg

SEQ ID NO: 13596 - DNA, 559 bp, Homo sapiens
  MAP TO CHR18.3; EXPRESSED IN BONE MARROW, SIGNAL = 0.89; SWISSPROT HIT: P29508, EVALUE 2.00e-23; EST_HUMAN HIT: AW382741.1, EVALUE 2.00e-66; NT HIT: AB035089.1, EVALUE 0.00e+00
ttgccttgtgtctcacttggtatttgttggacacattgatttattgtagaatacatacaagtccatacagatgatgaggcaatacacatcttttcattttgcctcgctggaggatgtacaggccaaggtcctggaaataccatacaaaggcaaagatctaagcatgattgtgttgctgccaaatgaaatcgatggtctccagaaggtaagaacttgcatctacaactcttccttctactgcctgacatttttccaaagataccaagtttaaacaaggtaaaagctggtgaccgagttgcctcaaaataatgaaaaattctaaatgaggaatgatgactcaccttcatattacaaagatttaagcatagggcctgacacaaactgaaggcatagttaatgattaatttattagagttacatgcattggatatcaatttaatgatattattatgcagcaatttaaacttgactgggagaaatatatagcaatgtgaggaaagtttacgaatacaccaagtaaaaaagggaatagaaatttaggaatttggggaattgcaat

SEQ ID NO: 13597 - DNA, 536 bp, Homo sapiens
  MAP TO CHR19.3; EXPRESSED IN BONE MARROW, SIGNAL = 0.93; NT HIT: AF044763.1, EVALUE 3.30e-02; SWISSPROT HIT: Q04592, EVALUE 7.60e-01; EST_HUMAN HIT: BI830560.1, EVALUE 3.00e-12
tggatagcttagccctctgcagataagattagaattctgctagtggaattcagaattctaagcatgctctcagaatttaggaaagggagagaaagagagaaaaagagacagaatatcaagaagccgtcacttgcccaggcattccaaatcatgtcagtccacactccagtgtgaaacacctggaggctggagtccctggcttacctgttgttgtccctggcttacctggagtccctggctccgggcttccctccgcgtgctgctgctcctccaggtcccccccggtggctctcgcgcgcccccaggcggccacgtcgcggagcagctccgtcacgttgtgttgagtgatctccccggccgtctaacagtagaaggggcgtggccagacgtcggggccaggatggcggggcggggcttagaacgctgggagtcctcggtccaggactagaactcccgcagctgcttggaggatgtgaagtggggcgggacctatcccgcggggatggggcctgttctctgaatggagtcgttcccac

SEQ ID NO: 13598 - DNA, 598 bp, Homo sapiens
  MAP TO CHR19.3; EXPRESSED IN BONE MARROW, SIGNAL = 1.1; NT HIT: AF288742.1, EVALUE 8.90e+00; SWISSPROT HIT: P42842, EVALUE 2.60e-02; EST_HUMAN HIT: AW297603.1, EVALUE 4.00e-06
gaagaatgatggttgccaggggttgtgggaaggggagaataggaaaacaataccaaacccataggaaaacctgacgttgagtaacgcagccaccgaacctctgtccatcatttcagaaagtctaccaaattctcacgaaattcaagcaaatggagattgtcaagtctctcgccttggtattgaaaatctaagacttacctaactgttaccagggaagaggtccccttatcctccagaaatacagtgtgtctgtcatggccttggcctcagacaacacttgtggaatcaagacattattgcattcccctagactctcatacgccttttgtaaaaatgaattccataagattgaactcacctctccttctggagtttctcccctggcctccagctgcttctgcggacagctcagatctggagtgagagctgcctgccaggggcttttataccagagggtgtctccacccaccttagccacaccctttccctcctttttaatccaatcagattctgatttcattctgccatcattgagattgttactattggacaggtttttaccttaaaggaagacgactgtgttttcagtgttattttt

SEQ ID NO: 13599 - DNA, 589 bp, Homo sapiens
  MAP TO CHR16.3; EXPRESSED IN BONE MARROW, SIGNAL = 0.68; NT HIT: AE001118.1, EVALUE 1.40e-01; SWISSPROT HIT: Q69014, EVALUE 1.90e+00; EST_HUMAN HIT: BG703513.1, EVALUE 2.10e-01
cacagacagcagagatcccccgcatggggagcagcaaacacctactatgcacaggttctttctggaagctacacactgggaaccacaaaatgttgacaaggacctcaccctagtctccttccttgaggaactactgtacctaagactacacctctgccattcaaagaggggtcacccaaggaagggacaaccttaaaggtgctggatctcccaccagattccctaaggagtcagactccccactggagtcagactgtacctagcatcaatgctcctctccatcagaaagccaagcaggaagaggcacccaaggcatcatttctggttttgaaacaggttcccttgtagccattctctgatatggagtctttcactttccttcttgaattgttttcatggcagaagcgcatgccctgtgggtaatttatggaagcaatacaggcataaccaagcttgagtcccactctctcctttttgatgagattcccaaactggccctaacaattacaagtgagaaagacgtggccctttctgtctccaggaccttttgaaacagaaattaaatccctcatttcccttcctgaagctg

SEQ ID NO: 13600 - DNA, 559 bp, Homo sapiens
  MAP TO CHR18.3; EXPRESSED IN BONE MARROW, SIGNAL = 0.77; EST_HUMAN HIT: AL603335.1, EVALUE 3.10e+00; SWISSPROT HIT: O52349, EVALUE 5.40e-02; NT HIT: AJ278435.1, EVALUE 1.30e-01
ttttcaggcaatatgacccccagctttgttttagaaaatattttattcaattcccagactttgttcaagtttttctaattgactacaaaatatgcttatcagatagtttacctggtccagacttacatttcctcattttttttctcttgtaagtttcttaattcatcagagtttcttttttgttgttgttgtttcggggaataacttttgaagacacaggacacttgtccatcctggatgttctgccttcacatttcattgtttgcttgctgtttttgatgttaattgtgttcctttcctttatatctttgattctagaagatataactggtgtaatggactgaatggaatcattctggctagaatatggcataatgttttgttctcttctttgtcggaagatacaccatgcctgctttacccactattaatgatgaaagaattgactcctgggtcaggctttcattccccctttctaaagtaataatttccattttctttttatcgaacagtaagctatgtattaattcatatgaagcatcacactgtacaagttccc

SEQ ID NO: 13601 - DNA, 553 bp, Homo sapiens
  MAP TO CHR16.3; EXPRESSED IN BONE MARROW, SIGNAL = 0.65; NT HIT: M26338.1, EVALUE 1.30e-01; SWISSPROT HIT: P38977, EVALUE 3.00e+00; EST_HUMAN HIT: BF831308.1, EVALUE 2.00e-01
agcagtgtgtttgcaggttgtttgtgagtgttaaagcacacagggcaagctgagaagtaaaggttttgtgttgcatttgatgatcaaacatatgccctcttcggccttctcagggcactggcattaaggctagtaaataatcttgggtttccttgtgtctctccagcgtcccatcttgtagcccagtattacgtgaggcacttaatcaaagcataaaagcaattataaaacgcccctgaaattacattcatatctgtaatcagaattgctaatatctcccctccctccaccatcctggtgtcatctgattttcattcctttgaggtgactaagagtctagtcattaatgtaacacccaccaactttattggaagttaccgtcagaaagatctgtttccaaaaactctgtgagctgaatgcaattacagtgctggttcttcttggccattgcacaagtctgcacatactctttgtactagagtctctttctaaacttaagcaccaatgaggttgctgtctattttctatgtcatggggaggaaagatttggttt

SEQ ID NO: 13602 - DNA, 546 bp, Homo sapiens
  MAP TO CHR14.3; EXPRESSED IN BONE MARROW, SIGNAL = 1.1; NT HIT: X04650.1, EVALUE 1.30e-01; SWISSPROT HIT: P41370, EVALUE 8.80e+00
ttgggcagttaacatgaaacctacctgaattttttcattggagattgcttttcttgagcagtggctagatgaccagaataatagactgggaaaaacataatgttccagtttgttgaaaaccaagtcatgaaaaatgggcaatagaagttcttataagtaatttttacaatctgtgtagttccaacccaagatgatgatactgacaagatgatcaagagtccccagatgcccttcagaaccatggacgtgcaggacaggcagcgagccttgattctgttttcttggctgctgttctcagaatgagtctgtgtcccatcgtctgctggaaacaggaaaggaatacaaatgtgaggaaagcaggttatgaaacagcaatcaaatatatcagctccttaaaaaagatggatgaaaccaaagaggcagacagtagaattaccagtgtttttcttttctaccatcatttgaagagactgataacttcggctcactttttctctggactctgtgctctgcacaatacagtaagcatctgagtcccgatccagt

SEQ ID NO: 13603 - DNA, 594 bp, Homo sapiens
  MAP TO CHR14.3; EXPRESSED IN BONE MARROW, SIGNAL =   1; NT HIT: gi14768847, EVALUE 5.70e-01; EST_HUMAN HIT: BE672498.1, EVALUE 3.30e+00; SWISSPROT HIT: P27636, EVALUE 2.60e+00
aaactggctgtttcccactgttttcctgattgccatgaagccagagagattatttacagattaagggctgctatttgatctgatcatctctgtcctaatttatgctggatctttcaggagaaagaaaaaaagatttgaagcaaaatgttaaggattatgttttcagaaatttgaggcttgtgactttttctccagagaagtaagacttttccgtagtactgagaaggtcacttttcaagcagagaccatccagtgttgaaagtagtccagccactgcctgtaaattacctgccctgtaaaggctggccctttgccagtgctgagcttggggctagatgtaagggtggttctctcactaaaaggcagtgtgagtttgtgaagatgatcatccgaagaggaaatctgcacatgagactttttaaatcctggaagttacttgaaacaaaggattttagtttttctcatcctttactccaaaacacaagattcaagaccttattcactcacggaagtaaaggattgttgagtaaattatgcttgtgtgataggataaggagataattgctgtgtgggccgtcaccctttcattcctga

SEQ ID NO: 13604 - DNA, 577 bp, Homo sapiens
  MAP TO CHR14.3; EXPRESSED IN BONE MARROW, SIGNAL = 1.3; SWISSPROT HIT: P80192, EVALUE 1.00e-72; NT HIT: gi14749516, EVALUE 0.00e+00; EST_HUMAN HIT: AA160611.1, EVALUE 5.00e-76
caaggagtttcactgccctctaaggttccattagaagtccactcctactgacgtcgtgggatacaactgcaactgctctgagcccctccagccccatctcttcatactcactgttgctggacttaaggtcgcggtggatgatgggaacaattgcctcatcatgtaagtagttcatccctctggcaatctgcacagcccaattcaccaggatgtctgggggaatccttttcccagataacactctattcaaaggtcctccacgagcaaactccatgaccaagcagaggttgggctccttcagacatacccctcttagggcaatgatgttggggtgcttcagcatggcgaagagcttggcctcttggcgaacattctctatggtctggctgatgtcctcatcagggtcgtggcgagctgctttcacagcaacctcatcccctatccagaaagcacgatagaccttcccaaagcccccgatgccaataatctcttccaaggtgagctccgcaaaatcaatttctaacactgagaaagggaagaaaaaaagaagcaagtcaaaaacatcttgaaaacatcg

SEQ ID NO: 13605 - DNA, 595 bp, Homo sapiens
  MAP TO CHR19.3; EXPRESSED IN FETAL LIVER, SIGNAL =   1; EST_HUMAN HIT: AL543219.1, EVALUE 6.00e-85; NT HIT: gi16163207, EVALUE 1.00e-100; SWISSPROT HIT: P97384, EVALUE 8.70e-01
cagcactcacctcctgagagatgaatgtacccatcataacaatgagtggcgcccctggggcaggtcattcggggggagccacttgaacaggttccaaggggctgcacacaggtaggacactgccggtctcctgggacaggggcagctggggagcagagggaaggtgggggtacatgactttgtgctcagagcagctggccaccttgggccagagtctctgtgtgtctgggcctcatttctccacggccctggatcccataccttgaggagggagggagttcagcagaacgctgctgctgctggcactattgcacaggtccgaggagcagaagtgggtataggaggccacaagcaccccaggaggggctgagtggatggtggtcttctgggaattttgagccccaacagcgctgcagctttaggtcgccaccagggttgatgtgagtcctgagggtgagagggaaagctgggctggggactgggcagctcccagggcagcaggggctccagagctggactccctgcccttcacaataccccccaggcagagggtgaatgccctgatcacaactgctgggtcatgtttagtgtgggg

SEQ ID NO: 13606 - DNA, 559 bp, Homo sapiens
  MAP TO CHR18.3; EXPRESSED IN FETAL LIVER, SIGNAL = 0.93; SWISSPROT HIT: Q46940, EVALUE 1.80e+00; EST_HUMAN HIT: AW265037.1, EVALUE 7.80e-01
tgtgctggaaattttagtgtggtataagcacagtctcaatgatgtagcctgtgatttcaatggaaaaagtagaatgtatatgttcaaaggaaatactgattatgattcacagcatcttctgcagggagaatttcttcatgtttgtattttgattgtggatctgtaagaggataattttataattcatattttatttacttggtcctcatgataagaatgtctccaaaatgatggtatttctacttcattctgcttgtttggtgagtttggtgcgcagaacttgaaggtaaaagtaggtactgtaaatattacttgaacccaactatttaaaaagcttaaaatataagttaaaaaaaaactcttaagcactttctcctaaaacatattatatagaaatatataaaagaacgttctgccaaagtaaaccaaataactcagaatgaggcatacagaacaagtatcatacctttattcattatatttttggatatgtgccaagtcactagaacagattataggagtagcaaaattcagaagtagccttgggacactttctcac

SEQ ID NO: 13607 - DNA, 548 bp, Homo sapiens
  MAP TO CHR18.3; EXPRESSED IN FETAL LIVER, SIGNAL = 1.3; EST_HUMAN HIT: T78805.1, EVALUE 1.90e-01
catgccccataaatgtttccataagttgactaagtctgtactcattagcacatgaaccagggactccagttcctcactgtagtgggtgtcccagtctaaaataaagtctttttaaagaagatggtgaaaaagggagcagaggtagatagtgaaataccatgtttgaaactataaaacatgtcaaatttgtcaagtttgaataaaagtaacttcatttgtatgtttatatttttaaggcaaatgagaaacacatctacaattagagtcatcaacactagtcctaccaaagcagtgtaagcttcttatctgggcttttaaatgtgtggccaaatggttaagtccggtgacagaataacagtcgatcagtcaaaatctgatactgttacctaggtatgccaacgatgctaagaagaatatgtgcaaaagtaaagaggagagaaatcagaaagatttaagtgaagagaatgatctgttcaagatggtggtgaataggacaccaacaagtagatgtgtaatgtagcatgaagagcacaagtgggttgatttga

SEQ ID NO: 13608 - DNA, 573 bp, Homo sapiens
  MAP TO CHR14.3; EXPRESSED IN FETAL LIVER, SIGNAL = 0.85; EST_HUMAN HIT: BF365425.1, EVALUE 0.00e+00; NT HIT: AB040958.1, EVALUE 1.00e-115
ggcgcacatatgaatgacagagtttgagaggtgtttaaatgattacctgtaggtagtcagactggatagcagtaagcagatggtctttgctgagttcataaaaaacatccgaagtcatgacctgggaaaattcctcacagaggaaatgtaaagcttgtcggtgcacccatttagagccatatggatgagaactccacttgaggatggcaattaaggtatctaatgagatgctctcagcaatgatatcctcacagcctaaaagagaaggcaaatacttcttgagattaatcataaatattacttattgaacattagtgtgctaggcacgatatttaaaagtcacaatagcaaaaaagaactcaaggagataaataaaatctcatgaaaatcaccaagacttggtgggatgggtaaacaatagactatggcatctatagaaaatctgctgccttacagagatggatctacagaaaaaggcagagaatcctcccaagttcaagataataaacatctatgtgcaaaccaataatgtgagtaagtcagtatagaggaagacattggaccaaaagggaa

SEQ ID NO: 13609 - DNA, 567 bp, Homo sapiens
  MAP TO CHR19.3; EXPRESSED IN FETAL LIVER, SIGNAL = 0.87; EST_HUMAN HIT: AI377385.1, EVALUE 0.00e+00; SWISSPROT HIT: P16403, EVALUE 2.40e+00; NT HIT: AF268610.1, EVALUE 0.00e+00
tggagctttgaggtttgagcttcagtgctgtccttctcttctgcccccactagggcccaaagctcagtcggacaagtgcgttcctgaccgagatcctcgctgggaggtgctggatgtcaccaagaaggtggtggccagcccccggatcatctccctggccaagcccaaagtgcgcaagggcctcaacgagggatacgacaggcgtcccctcgcctctatgagcttgccacccccaaaagcatcaccagaaaagtgtgatcaacccaggcctggcctctaagacctccgctcccagtaaacaccctcaggcaccctaaccctgtgtatgtgattattctgagctttttggcctggagaagggagggcgggctagaaggccaaaagaaggatgaggaggacaataatatttatttttgcatccaacctgcgacttgtccagctgtttattttccgagtcactttcattgaccatctcgagcgccttctgaatctcttcagtccagacttattcgtccattcctgagggcccacgggaccgtcggagtcggaacgacagccacagtcaaa

SEQ ID NO: 13610 - DNA, 569 bp, Homo sapiens
  MAP TO CHR14.3; EXPRESSED IN FETAL LIVER, SIGNAL = 0.98; SWISSPROT HIT: O83536, EVALUE 8.20e-01; EST_HUMAN HIT: BG539863.1, EVALUE 5.10e-02
tcggggttcatataccttggcctcacagagagtccctggacatgtgggcagccagaggagaggcaaaatggtggtggaatgggtctgggatggcaaacgtatgtcctggaactactacctccctgctctggcagcctgtggccccagagacaggctcaagagaatatctgcaaagtttccccacccctgcctaatcccaccccatccccacatcactcaaaacaagacgggtgcaggtgaggctgagaatcagctggaagacctggggaagcctcatatgtaagatgagaatgttgaaactgagtaaatgtgttggacacagtgacctgaagccagggaagttgcgagaagtggacacttcagcaatagacagagtgtttagagccaacacagcaaaaagaaacagacacatagcagcagaatccacagaggaaagctctgcccagggccacaggcaggagagtaggacagaaggggagagaagaggcaagtctgaattgcctgagtatttattctaaagatactgagttcaacagaagactctcaaatgtgctttgaattggcaagct

SEQ ID NO: 13611 - DNA, 527 bp, Homo sapiens
  MAP TO CHR19.3; EXPRESSED IN FETAL LIVER, SIGNAL = 2.8; NT HIT: U68398.1, EVALUE 0.00e+00; SWISSPROT HIT: Q05315, EVALUE 3.00e-17; EST_HUMAN HIT: AW292557.1, EVALUE 0.00e+00
aggcattttctggttggatgtttcaggtactatgacaccatagagagcaggctgaaagcttgtttggtgaaatactgtctttctgatgtatttttttccttctgtaggtaatggtcaatggccaatcctcttacacctttgaccatagaatcaagcctgaggctgtgaagatggtgcaagtgtggagagatatctccctgaccaaatttaatgtcagctatttaaagagataaccagacttcatgttgccaaggaatccctgtctctacgtgaacttgggattccaaagccagctaacagcatgatcttttctcacttcaatccttactcctgctcattaaaacttaatcaaacttcacagaatttggttcttgctttcatggggagaaaaagtggtcatcatcaagagggcttgggggattttatagatggtgtgaacaagtcaaggaggataaatcttcctgagacacaaaaagtaagtgaaaaggccactgaaatgtctgagaaggcattagcaaccacatcct

SEQ ID NO: 13612 - DNA, 587 bp, Homo sapiens
  MAP TO CHR19.3; EXPRESSED IN FETAL LIVER, SIGNAL = 2.8; NT HIT: AF059308.1, EVALUE 0.00e+00; SWISSPROT HIT: P36776, EVALUE 7.00e-37; EST_HUMAN HIT: BF761212.1, EVALUE 0.00e+00
aagggcttgtgtctgtctgcagggcagcggcagctgggccttgtagccctgggcgtgtcctctgtggctggcagctgctgggggctgccctgtggggcgtacagagccaggaacccgcaacgcagcaaacgtagaggccagcgttggctcacgatgggacaccaacccctgcccaggggcaccaagatgctaaactggggcaggagcggtcagagtggccccgaggggtggagtgagcaccggcctgggctccgaggcctcccgtgttcacagctccacacctgtttcaggaggctccacgctgtttgtggagacatccctgagacggccacaggacaaggatgccaagggtgacaaggatggcagcctggaggtgacaggccagctgggggaggtgatgaaggagagcgcccgcatagcctacaccttcgccagagccttcctcatgcagcacgcccccgccaatgactacctggtgacctcacacatccacctgcatgtgcccgaggtgaccgcgccatccgctcccacctgctcccgcccagtccctgggctgctggccacctgctcacccactatccccacat

SEQ ID NO: 13613 - DNA, 521 bp, Homo sapiens
  MAP TO CHR18.3; EXPRESSED IN FETAL LIVER, SIGNAL = 0.81; SWISSPROT HIT: P00751, EVALUE 5.60e-01
acctaagtggtggcaggatgcagagaagcctgtttaggaaaccatttatctcacgtagacatgccatctgagatgaccttagtagaaataacaatggcaatgataacagctccgcagccttttccctggcataagaaactagttttgtaatgaaaatggaatttctctggggaatagtcctagaaagagataggtagttgagataaaaataacaaaatataaaatagcattgcattgttttctgtgtatttttccttccacctttgtccttctctgttgtgtaatttaccttgttcccttggccatgggtaggttgggcatcactgtgatttgacttttgtcctttgtcccaaagaaagggatgagtgtgtgcatttagaggtagctatttgcaccttgcctggagcttgccatcaacatagctagctaaaaggaggagaggcccttgagggtaaaccttgctttaggagtcgaagcccttggctttctggaatgaagggtggtgagtttggtttcccaga

SEQ ID NO: 13614 - DNA, 540 bp, Homo sapiens
  MAP TO CHR18.3; EXPRESSED IN FETAL LIVER, SIGNAL = 1.4; SWISSPROT HIT: Q96690, EVALUE 1.00e+00
tgagaaatgcacttgcttggaggaggaggaggatgcaatgcaattgagttaagctcttactgagattgcggtatctccttgggatgaaaaatgatcaaatgtgagacactctagctcaaaactggacaatgctaccagtgaatttatctccaaaaaataatttgctctgattcctggtcctccaagaatactacccaaactagggtcaaatgagagttggatgattaagggtattaatttctgaagttgattttaatctactctgtagcagaaaacctatttacttagatgacgtgagatttgggggacagctctgctttggctggagtcctgggaattgagagttcattgagaggcatttacatttgtggtgttgcctccaggataaacaacgatggcaacaacactgaccacaacaacataaacactgctcgcaattgggctgaagataaactgaatcccttccattggttgtggaagaggaataatgcgggtatggaggggtaggaccactgggcaagcatcatgggaagaaggaaa

SEQ ID NO: 13615 - DNA, 577 bp, Homo sapiens
  MAP TO CHR16.3; EXPRESSED IN FETAL LIVER, SIGNAL = 0.96; SWISSPROT HIT: P98059, EVALUE 7.30e+00; NT HIT: AF237686.1, EVALUE 5.50e-01; EST_HUMAN HIT: AI675522.1, EVALUE 5.20e-02
taacaattcagggtccgtcctagaggagtggggctaccactgggcctcttgcagcaggaaggacacaatcatagcctctcatgggtgcaaacagcaagcggatgttgccctttgcaaacagttgggaaaaccataaaaaatgcacagcctttgccaaacaatgtcagataaaatggcatggagagaggacacatctaccagcctcctacccactgcacgattcagggcatgcagacctcagcctctctcctgagttcagcactccagagcaggctgtggaaagggcacggggtgagcatgtctttatgacattattgatttattctccacctgcagttaaaaaccatgcccagacagacaataaaaataagtacttaaccgtatcgcaagctctgccgactgaaatggattttacacttaaagatacagctgatctgggtgagggctttaatggcatttttgagttttaaatttaaaaaaaatcaaatctttggaaaaattaaatgagaaatcatcagtgttgccctttgtgggattcttctcataacgtctccaggctcaagggattgggggttat

SEQ ID NO: 13616 - DNA, 599 bp, Homo sapiens
  MAP TO CHR16.3; EXPRESSED IN FETAL LIVER, SIGNAL = 0.86; SWISSPROT HIT: P55286, EVALUE 3.00e-54; NT HIT: gi16306538, EVALUE 0.00e+00; EST_HUMAN HIT: AI650367.1, EVALUE 0.00e+00
gaacttaggccaaaaagggggatttggaaatgcaaattagagataaggtggtaataaatgtctttcattcagcaatacaccatccttgatgccaggagctattctaaagatgacttttaatagatctgtgaaattggaagcatacatacccaaaatggacatttctggcacagtagcatgatagggtccattaagaaactctggtgcattgtcattgatgtcttgaactttaataataaattcagaaggaggctccagaggtttgcttgtctcccagtccactgcttgagctgttagggtatactcagccttttcctcccggtcaagtctttttatagcatggatatctccagttacatcatttatttgaaatatggtcccagctccatcacctgataggatatacttgatttttttgctcccaggatccaggtctgtgtgtagctgaaatgaaaaatggcattagttagtgatggagcaatctgaaaagttatttttttaactacctcctttttgaatattaagttggttctttttacataacatcatcaatttctgctaatagtagctgtacaaagtgtatgcagctgtgcggatat

SEQ ID NO: 13617 - DNA, 568 bp, Homo sapiens
  MAP TO CHR16.3; EXPRESSED IN FETAL LIVER, SIGNAL = 0.76; SWISSPROT HIT: P43571, EVALUE 9.30e+00; EST_HUMAN HIT: BG831468.1, EVALUE 5.10e-02
tgccttcaaagcaactaaatgtcctccatggggaaagaaatttccaattcatattttatttcccataacgtgactgtctaatgttgtcttaagcttgttctgtttagttgggattatgctttgaaaggaccaggagaaagaaagacccatttaacaagtttctgccaataagccagtttctgaaaaataaatggttaaataatcccagaagattatccggtcttggtaaaataattttaacacaatatccagctcatcaattgggatggaagcacatcagctggtgaggagtgaacattagtgacttgattgtcatgaaaacatttcttccagaccaggaaaaagacagtcatggggaaacatgccatgtggaaaaataacccatttcttcgtgatctattctctctgttggtcacaggttgacattttactggccctgggagtggagagaaatgcaggcttcctagtcacacagagaaaagaaatgttttcctctgtgcaaagagagacccaagagacacggtttgaacaagaagtgtgcagataaaagttggaaagccaaggtcat

SEQ ID NO: 13618 - DNA, 571 bp, Homo sapiens
  MAP TO CHR19.3; EXPRESSED IN FETAL LIVER, SIGNAL = 0.85; SWISSPROT HIT: P10163, EVALUE 3.70e-01; NT HIT: gi14785849, EVALUE 0.00e+00; EST_HUMAN HIT: BI767400.1, EVALUE 2.00e-78
gtcaggctgaaggcaatagggagctatggtaggtgtgtgagcagagcaggcacatcagcagatctgtggatggcaaagatgcgtctggactggagtgaagggcacagaccaagcgggtcttacctgcttcctaggccttggccactgacctcctccatggggcccagctgctccagcccggagctcaccggaggtggggcaaagctgggcttggagctcccactggctgcctcgacctcctctgaactctcagccacgggatccagttcaccctgcaaatgacccccggggccctgctctgagccaggcaggacaggaccttggggtccccaggatctgggtgtggaggggagagggtgacacttacgggtggagcatgcctccctcgccggcttcggggccgcgtggcccgggcactcattgctgtccagaagccagtgccctctgaatgcttctccttcgtcaacccctaaaaccacagcctgccatgagctcttgcctttgttgtcctggacaaaggacaacctcaatttcctctgctgtgaaatggggcactgactacccctcagga

SEQ ID NO: 13619 - DNA, 504 bp, Homo sapiens
  MAP TO CHR14.3; EXPRESSED IN FETAL LIVER, SIGNAL = 0.79; EST_HUMAN HIT: BG204575.1, EVALUE 1.00e-130; SWISSPROT HIT: P31111, EVALUE 2.40e-01
tgtctgggtagctttcagcctagaagcagagaaattatcaattataatgttgtgacataaaaattattttcatttgctcatttaagtatttattgatttttagaactagagattctaaatggaggtttttgttaaatagatcatagatcactcagtttacattacttatctttaaattttttttaatattttctcagtttacacaaatctttatctcaagaagaaaatctgaaggatcagtttaactatacccttagtacatatgaagaagctttaaaaaacagagagaacattgtttccatcactcaacaacaaaatgaggaactggctactcaactgcaacaagctctgacagagcgagcaaatatggaattacaacttcaacatgccagagaggcctcccaagtggccaatgaaaaagttcaaaagtaagttaaatgatcttgtaataatacttcaaacacatgaaacaaaacaaaacactttcttttgggaactaaacaa

SEQ ID NO: 13620 - DNA, 600 bp, Homo sapiens
  MAP TO CHR16.3; EXPRESSED IN FETAL LIVER, SIGNAL = 0.85; SWISSPROT HIT: Q25206, EVALUE 2.60e+00; NT HIT: gi15318265, EVALUE 3.00e-58; EST_HUMAN HIT: AA325831.1, EVALUE 0.00e+00
gccccacacattctgacactagtatcttactggtttttcacctatgaacagtaataatacttatatttacacaatgcttcaaattttacaaagcattttgatatccattacttcattggagatagagattgtgttgaatgcatttcaaaaatattgaggtcattataagaaggatgaatctataatctatatgcaagctaccagtgattcttttttagggtactgccataacaagcatcgccacatactagaaagatcagacttgggatcacccgaggtctagcaattttgtctctctgccgtttgccttcacacaaatgtacccataaagtaataacccgtatgtgtcaatgtcaggctaacagcgctttcttttgtttcagatcgggcagtacatcatgtccctccccctgaatcttgagccatttgtgactcaggaggactctgccttagagttggcattgcacgctggaaagctgccatttcctcctgagcagggtaagcggggaccgtttctggcgatgttacaagtcaagctgtcagtttccagggtagaaactccagatgacaccttatccttgggctcatttgtcaccaagt

SEQ ID NO: 13621 - DNA, 522 bp, Homo sapiens
  MAP TO CHR18.3; EXPRESSED IN FETAL LIVER, SIGNAL = 0.98; NT HIT: AF157062.1, EVALUE 1.30e-01
gcattcatcactattaacaacaaggaccattaagttaaatatttctttactctaaattcagagttttatctatagtagatttttgtgcctaaaaagctcatgttttggttcttttatgctaagttttacttcagcatttcttctgatgtatggcccaaattctgcttcagtgagtcttgctcaaaactcatttctttggtgaaccatcctctaatctcatatgaccacaggctctccttagaccgaagctcccagacatggtctttgaaaaatgacatcataatcctaaaaagaaatgaaggaaattgaaaccaatctttgtgacatactatttttatttggtcgctcatgctatttagatggagagggcactggatagggactatatcttttccatgttttataccatgcttagtaagttctcagaatataataaatgtttcacaggccaatgaaaaatttcaaagcatataacctactggggaggttgtaaaattattcacggctgacactgatgagaag

SEQ ID NO: 13622 - DNA, 526 bp, Homo sapiens
  MAP TO CHR16.3; EXPRESSED IN FETAL LIVER, SIGNAL = 1.7; SWISSPROT HIT: O43734, EVALUE 2.20e-02; EST_HUMAN HIT: AL525399.1, EVALUE 2.00e-59; NT HIT: gi16166358, EVALUE 2.00e-59
tcttcacatctccccaaaccccagtgtctgagcctccgagtgcggctgcctggtcggcctctggtcccctggccccatcagcacatggcccaggccttgctcccgcccatccacacgtccacctgagcacagactggggcggccgttcccaggtcttatgaaccctggaggaagccaaacacacagaccccactgtgctggccccacccccaaggggagagaattcaggaggagcgaagggcaaggagccgcccagccagcattacctcgtcatccttccattccgagaagtcaatcttgaaggagggcagggagaactgctggctcacccctctcttgtagtggacggtctcggactgtagcgaggggctcttggggctgtatctgcagggagccaggagcaagcagtgaggctgcggcaggaagagggccctccgtgcccgtccctcccactccgacagctggaagggccgcagacacctgtcttttggggaccctctctcatggggaacagcaaacagcctac

SEQ ID NO: 13623 - DNA, 522 bp, Homo sapiens
  MAP TO CHR19.3; EXPRESSED IN FETAL LIVER, SIGNAL = 3.1; SWISSPROT HIT: P09052, EVALUE 6.00e-03; NT HIT: gi15302005, EVALUE 2.00e-52; EST_HUMAN HIT: AW408627.1, EVALUE 3.00e-52
gacagaaatcaggctcccacaccccgagaggctaggtgggcggcactcacccacactaccaacgatcagaagtttgcccaacaggaagaggaagtcagtaactttatccaggacagccactctgcaggggacagtgaggggcaggtgtgaatgctggcttcagggactaggggaagaggcgggtggcaggaggaagatgataatgattcccgacctgatgatgtttctcatgagcaggaagaaggcattcctggccgaggtgcagaaattggtgccgtagatggcaatctggaggagagtgggagggagagatcagacccactgggtgggcatggggggtggtcctctcacccagcaggagctggcgggttggttgggggtcccaggcccactcaccatgatgtaggcattcctattaaggaatttgatgaacttctccaggcaccagaagcagcatttgagacaggtcatgaggcacttggcaaacttgttctctgcagctggaagagaagggaagggatg

SEQ ID NO: 13624 - DNA, 587 bp, Homo sapiens
  MAP TO CHR14.3; EXPRESSED IN FETAL LIVER, SIGNAL = 0.87; EST_HUMAN HIT: AW582001.1, EVALUE 8.30e-01; NT HIT: AP001510.1, EVALUE 5.60e-01; SWISSPROT HIT: P27890, EVALUE 5.70e+00
tttccaaattgagaacccccctccaaatctgcaataattggtccactttctatttgatatgggatagctttctgacctcagtcttttccagaaacatagaatggaccttttaaagacagggcactatgttcagcagctatttgagaagcttacccagctgcttggagtttttaaaatctgactaccaaagaagagccataacagccccaacaatcgcactctatggcaagcacgatgaaaaagctgtagagatccttcgttttacctaccacattgttaaagaggcatgtgaaagaaactgtgggaacatgaaagaaaccctgggtgagaaacaagccaagagaaaacctaaagccgcctgtcacttgcgccactcgccgccaaagctgtgggtgctgatagcattattgtttaatctctctgaagaatatgtgggagcagaaagcacaacatccccaagttgttactttgtcacaactttacagaatacataagcacttcagtaaatacacagattttttttgcaaactgtaaatcatctgtgagccaccactgttcgactaattacagcaagaagctgtgctcat

SEQ ID NO: 13625 - DNA, 554 bp, Homo sapiens
  MAP TO CHR19.3; EXPRESSED IN FETAL LIVER, SIGNAL = 4.5; EST_HUMAN HIT: BF868352.1, EVALUE 0.00e+00; NT HIT: gi13649889, EVALUE 0.00e+00; SWISSPROT HIT: Q14773, EVALUE 5.00e-59
gggcaggaaatacactttgcgctgccacgtgacgcaggtgttcccggtgggctacttggtggtgaccctgaggcatggaagccgggtcatctattccgaaagcctggagcgcttcaccggcctggatctggccaacgtgaccttgacctacgagtttgctgctggaccccgcgacttctggcagcccgtgatctgccacgcgcgcctcaatctcgacggcctggtggtccgcaacagctcggcacccattacactgatgctcggtgaggcacccctgtaaccctggggactaggaggaagggggcagagagagttatgaccccgagagggcgcacagaccaagcgtgagctccacgcgggtcgacagacctccctgtgttccgttcctaattctcgccttctgctcccagcttggagccccgcgcccacagctttggcctccggttccatcgctgcccttgtagggatcctcctcactgtgggcgctgcgtacctatgcaagtgcctagctatgaagtcccaggcgtaaagggggatgttctatgccggctgag

SEQ ID NO: 13626 - DNA, 500 bp, Homo sapiens
  MAP TO CHR14.3; EXPRESSED IN FETAL LIVER, SIGNAL = 0.88; NT HIT: gi15319065, EVALUE 1.20e-01; EST_HUMAN HIT: AW300982.1, EVALUE 1.80e-01
gatgagcaaatacccatggacattttcccattatcctaaatctcctttgtaaaatttgatgcctagtaatggaccacaggatttaatcagctcctgctcttctttcaacagccttaattcttcttctttcttcatgactgagatcactaaagcgaccttaccgtgctcctttgccatcttcctcttctcctcttttcttgcttcttctttttcactctcttgctgaaaaagcacaaagcaacaggtgggcacaatacctgctgagagaagtaaggtggcccatggattgtcaaatcagaaagggtcattcagttctttttgagggagaggaggttctgcccatgggccttctggaaaataccactttgacttttgaggtggtccaactatgataaaagtctgtgaagctttactgtggttgatgttttctgttaatattcagcatccccagttactgttcctgaaggaggatatgatgtgctcatgggtgatgaaaactg

SEQ ID NO: 13627 - DNA, 543 bp, Homo sapiens
  MAP TO CHR19.3; EXPRESSED IN FETAL LIVER, SIGNAL =   2; EST_HUMAN HIT: AA513389.1, EVALUE 1.00e-130; SWISSPROT HIT: Q14145, EVALUE 1.00e-30; NT HIT: AF361891.1, EVALUE 0.00e+00
cacagcaatgaacaccatccgaagcggggcaggtgggtggggacggtagggaggggagcacccaggaacaccccctaccatcctggggtgaaactgagccaggcctgggagagaccccctgttgcaaccctcatgctggggtaaccacagaagccctggattctgatagagtccaagcttctctctctccccgcttcatttctgagggtgagaagggagaggagagaggaaaggtctccctcaaggaggtgatggctggggttcccaaagccagacccccagagtcaccttctctgcatggtgccctttaggcgtctgcgtcctgcacaactgtatctatgctgctgggggctatgatggtcaggaccagctgaacagcgtggagcgctacgatgtggaaacagagacgtggactttcgtagcccccatgaagcaccggcgaagtgccctggggatcactgtccaccaggggagaatctacgtccttggtgaggccctgggggcggggaagagtcctgactagcccatcttttgtggactgct

SEQ ID NO: 13628 - DNA, 508 bp, Homo sapiens
  MAP TO CHR18.3; EXPRESSED IN FETAL LIVER, SIGNAL = 0.78; EST_HUMAN HIT: BF081735.1, EVALUE 1.80e-01; NT HIT: AF159585.1, EVALUE 3.10e-02; SWISSPROT HIT: Q99574, EVALUE 2.10e-02
tgcatcttccacattccttgtccattatataattgggaatgctttacatatttgctcaaaagtcttgtttttggttcatatgaagatatctggtgttaattatatatgccagttaaaaatagatctaaagtcaaaacaaaaccagtgaaaataattcatattcaattgttgattaagtatggtcttgctttgtttcacttcccacgggtgaaatctaggatctcttatcaccccacagcctcatatctcccaatcagctggtgttggttaatgccatctccttcagagagaaccagaaaaatgcacttcagaaagaccaaacaaaagcaatggctttcacgttggatgaggtggtctcatgtagtctcatggcttaatttgtttatctcttaaaagtaatcctcaaaatttttgtccttaagaactgctaaattatttctggccttagggaagcaaattaatttccaagtggctatcctagctacatttgcaataaaaagcagatttt

SEQ ID NO: 13629 - DNA, 557 bp, Homo sapiens
  MAP TO CHR14.3; EXPRESSED IN FETAL LIVER, SIGNAL = 1.2; SWISSPROT HIT: P19703, EVALUE 4.00e+00; EST_HUMAN HIT: AU130622.1, EVALUE 6.00e-88; NT HIT: gi5901891, EVALUE 1.00e-117
caacagggtaatcacatgcacaaagtcaaattcttaccaactgagttttcatcatcttctaggatgtgacttcgctgtctaggacgacctgaagccatcatgaggtcttcatcatcctcatcatcatttataatcccttttgaaaaagaagggatctcaactgcattgtcatttagaaaatcaccagcattactcatatcatctccatcaaaaagatcattataatccttttccactctgctagataccttgaacaaattaatacaaattataaagtaaaagtgaatgatttagaaaaactcaattactaaaaaggtaaacttttaatatgcacctataaattctaccaagcagcaaactcactgaacagataagaataattagtaaatgtatttatgagaattgtatttatatttacacaataagacccagtccttatttcaaatgccttgtagtctggggatgggatgggagtatagggactgacatgtaaacaaatactgtatatgccaaaatataaaataagattttattcctcagaagtcattccctagaaa

SEQ ID NO: 13630 - DNA, 515 bp, Homo sapiens
  MAP TO CHR19.3; EXPRESSED IN FETAL LIVER, SIGNAL = 0.86; EST_HUMAN HIT: BF771112.1, EVALUE 1.00e-70; NT HIT: gi16175862, EVALUE 2.00e-71; SWISSPROT HIT: Q01851, EVALUE 3.00e-03
ggagggagaggaacatagcccagagggccatggacagggcagcgcaggaggcatcctccttggggtctctgaagctgcaagcacccctcccctcgtctactctgtgtgatctgggggtgtctgtgccacaggtgaacgggcagaatgtggtgaaggtcggccaccgacaggtggtgaacatgatccgccaagggggcaacacgctgatggtgaaggtggtgatggtcaccaggcacccggacatggatgaggcagtgcacaagaaaggtgctcctgcggccactctcgcagccaccccactgccaccaggctcagccctgcgggagccccagggctggttgctgctgcccaaggccttcccttccctagcactgcttctccgtgacccttgtggggagaaactgaggcagggagggctccgcacgctggcaatggctattctctgagccctgggagccctgtggtggtagagggtggtgggggcatctcccccatgatactgatgcctcccctca

SEQ ID NO: 13631 - DNA, 510 bp, Homo sapiens
  MAP TO CHR16.3; EXPRESSED IN FETAL LIVER, SIGNAL =   1; SWISSPROT HIT: P48197, EVALUE 1.20e+00; NT HIT: AF399755.1, EVALUE 7.00e-34; EST_HUMAN HIT: AI807351.1, EVALUE 0.00e+00
caatcagtgttggttgcctggatggcgctgatgggtgatcgcctgttctatagggtcatttctgaccaggtgaggaagacgtaccaaagcgaagatgttttgtgtttcctcaggatgccaagtttgtggaggaacggagaaagcagctccagaattacctgcgcagcgtcatgaacaaagtcatccagatggtccccgagttcgctgccagccccaagaaggagaccctcatccagctgatgcccttcttcgtgtaagtactgctcccacggacatgggccgccagccctgccagcatttttttctcggtcgttttggaaggtcagggagcacagcggctctccgtgatgccctgatcgccatgggacccaggcgaactccaggggctgttccaggtgccaaagtggaggttgggtctcagcgctttggagcttctaaagggatgggaagagagcaggcctgcaaatgagcattgttgacttgaggctcacaaagaaacttggggctctg

SEQ ID NO: 13632 - DNA, 574 bp, Homo sapiens
  MAP TO CHR18.3; EXPRESSED IN FETAL LIVER, SIGNAL =  45; SWISSPROT HIT: P29316, EVALUE 7.00e-43; NT HIT: U43701.1, EVALUE 0.00e+00; EST_HUMAN HIT: AV735692.1, EVALUE 0.00e+00
ggtgaattagccagccagactcagtttagatgatcccaattttgttggcaacatccaaagcattgtaatcaggagccagttgaacatatgccttcttctctccatcaggcctaatcagggtgttgactttggccacatcaatgtcatagagcttcttcacagcctgtttgatttggtgtttgttggctttaacatccacaacgaacacaagtgtgttgctgtcttctatcttcttcatggcggactcagtggtcagcagaaacttgatgatagcatagtggtcaagcttgttctcctgggggcgctctgccgaggatatttgggctgcctctggagtcgccgtgtcgtgggccgccggaaggtgggtgacgtgcagatctttttttgtgtggctgtggacacctttaaacactgccttcttggccttcaaaaccttcgttttggcttcagctttaggagggacaggagcttccttcttcgccttcggcgccatcttgtgaaaagaccgcaagtttgattttcaaaagtattgtcaggtattgcccttttaaaaagccccacgaggttatcttct

SEQ ID NO: 13633 - DNA, 569 bp, Homo sapiens
  MAP TO CHR16.3; EXPRESSED IN FETAL LIVER, SIGNAL = 2.3; SWISSPROT HIT: P14943, EVALUE 2.00e-37; NT HIT: gi16164691, EVALUE 0.00e+00; EST_HUMAN HIT: BE880870.1, EVALUE 0.00e+00
tgggcttcttcaggtgagactagggctgggctgggcaacccgggctgagcggggccaggacagccctgtgatccctgtccctgctacttctcagcactggagacaagcacgcaaccggcaactggggctacctggaccaagtggctgcactacgctgggtccagcagaatatcgcccactttggaggcaaccctgaccgtgtcaccatttttggcgagtctgcgggtggcacgagtgtgtcttcgcttgttgtgtcccccatatcccaaggactcttccacggagccatcatggagagtggcgtggccctcctgcccggcctcattgccagctcagctgatgtcatctccacggtgagtgccctcagctgaagaggcctaggcctgctccctcccctcatatccctcagagcctctgtctgttaaacggggatgacaagggccatcgggagcatgctccaggagctgctgcctaccgtggaattgctggggggctccagggtcagaattcacatccttctgccattgcagaggccgagcttgttctgtggctcctgtgcaaagttgtca

SEQ ID NO: 13634 - DNA, 575 bp, Homo sapiens
  MAP TO CHR18.3; EXPRESSED IN FETAL LIVER, SIGNAL = 1.5; NT HIT: gi14744677, EVALUE 8.60e+00
atgggaaaatgttgtcagccagactttggagccatttgaagttacaatatgtcttggtctactcagcatttaattagtcattctgtctgtcttaacttaaaaagtggagcaggcatttgcttaattcaataggctttacaaggacttctttttaatttgtccctttgcttttaaattgttcagagtcttattttcaggacaggctccctttaatcaacagacggtgcagagcagcggcaggaaaacagaatcatcaggagagagaagttacttcaatttccttgtaaatgagtcatgtaaggctgacatcatagtgacaaatgcaaacttacttcagaaaacaccatcatgggtaatgttcctgaggtggtggtggctggtcaagggagctcaggcggcaggtctgccagactcggtagaaagtaaggaaacaccccctcattctaggggtacacccatttactgtgaatgaatgacctgaagaagacaatctggaaactcttagacttctggaagctacttttagcttggggaggatatacacaatatccacaggttcccatgttctccattgg

SEQ ID NO: 13635 - DNA, 597 bp, Homo sapiens
  MAP TO CHR18.3; EXPRESSED IN FETAL LIVER, SIGNAL = 0.96; NT HIT: gi15616630, EVALUE 8.90e+00; EST_HUMAN HIT: AI123622.1, EVALUE 2.10e-01
aatctctatgcccccaagaagtattcatatttcatgtcagtcttaatagtagacatttataaataataatattcatcatgaaatgaagaatagattgaaagaaagtaaggataaacataaaagcttcaaatcattgtattcttattcctctagattttcaacttacgtcagttatgttcacagaatatgaaaattctatgaccacacatgttcggtcagccctgccctttgacaggtaactgataatttctcctctgtgagaacactttcaggaattatttattcacagatttatttgtgtcagattcaaatgaatgttttttctatggtatattattttagcttctaaatttgtttttagaagtgatgacataatcttgacatacttttgttcatttataattatagaattcagtttttctttctttagcgtagctctggtttatgaattaagagaaaaaattagcaaaaatgatattcatgacttctcagagttaaaagaaataacttataatctaaaatatttaatatttgcaatatttcacttacaaaacaatcacactgctaataaaataagctacaatgccacttaccatg

SEQ ID NO: 13636 - DNA, 534 bp, Homo sapiens
  MAP TO CHR14.3; EXPRESSED IN FETAL LIVER, SIGNAL = 0.94; NT HIT: U83743.1, EVALUE 5.10e-01; EST_HUMAN HIT: BG536719.1, EVALUE 7.50e-01
aatcccattaatccaacagcctaacccactaaccataatgtatagtatcagcgcccttatcaatgtcaatcccttgccttcaaaggctggcaatagagaagactaggagaagactagaagttcaagttttaaagtttaggcacctttctctttatggagtgtctagcttcttggccaacctgaatctgggcctgattttattagtaaatcaacagatcattttagtttttactttgtgtaaagtaagcataaaaggttctctcccatgagtcaaatacacatgtcttcacactaggattgaagctattaacatgaatattgaccagttacgtgttttatttacatacatctatgttctcccctgtgacctagataagtccagttgttgggcagctgagctctgcagtaatggcccaaaatggacagagcagactcatcctcaaaatcaaaacacggcaaagggatgaacctttctttcaaatatgaggaaggttaacatgacctaaaaacaaagctcttctgttctttgccaga

SEQ ID NO: 13637 - DNA, 556 bp, Homo sapiens
  MAP TO CHR18.3; EXPRESSED IN FETAL LIVER, SIGNAL = 1.5; NT HIT: AF068295.1, EVALUE 2.00e-62; EST_HUMAN HIT: BG200380.1, EVALUE 0.00e+00; SWISSPROT HIT: Q58285, EVALUE 5.30e+00
tcctgaattccacagaaggcttgtttattattgcaagactatgtctggcataattaatctaacatgaatagtaagtacaatgaagaactaaggattttcctttttggaaagtcagctttaatgaaaaaactgtaaataataggttggttaactgtcctctaattttcaaaagttcagcttaaactaaattttatgtaaagatatgtctatatttaatacaaacgttcacttacttggtctacttaggtagtatataaagtgcgagttaatgaatacaaccagacaaagaagaggcttaagctataatagaacttacaagtggtttgagtatctgaagccactcattaagatactcaacaagacctaatgcatctgggatgttgtccccttctgaaacaaatttcagcagaactgccatttggatttctttagaacagctacaagaaataaaaataagaatcagtattctttcatagggtacaagagctgactctagtgtgtctgtttttacagctacgataacctacctggtttaggaaaggaaaagacgccacac

SEQ ID NO: 13638 - DNA, 500 bp, Homo sapiens
  MAP TO CHR14.3; EXPRESSED IN FETAL LIVER, SIGNAL = 0.9; SWISSPROT HIT: Q9HNI0, EVALUE 2.10e+00; NT HIT: U69610.1, EVALUE 3.00e-02; EST_HUMAN HIT: BE061070.1, EVALUE 7.00e-04
ctgtttgagcaaatgaatgaatgttatgaatgaactgaattatattcctttgaaatggattgaaagtacatagacattcactgtagaagatacatctgttatggaccatatacttttatatcttattagtactctctcaatttatttgcctcctgaaattctgctctaccagcttccttttactaccggggaccaactacccaaccagttgctatcaggaatagctttcagagcatcaagacagttggctattcttctagatccaaacaccgtgcaggcagtagttgacgtggaaagaggccacccagtcctgcagttccagattttaaagggagccagggatgatcagtgggatctccctcccagtgggctgagagaggcaggtagcagtagtgaaagtgtcttcaatttcatccatttgaatttataacactggttatttgttctcaagttacccccattactccaaccaattggaaaccatgtgagaacaacgcttc

SEQ ID NO: 13639 - DNA, 569 bp, Homo sapiens
  MAP TO CHR19.3; EXPRESSED IN FETAL LIVER, SIGNAL =  24; SWISSPROT HIT: P27797, EVALUE 7.00e-37; EST_HUMAN HIT: BF820148.1, EVALUE 1.00e-121; NT HIT: AY047586.1, EVALUE 2.00e-77
ttaaaggggttgctgtgaggacttcacagggacagaccaggaagtactgtttacaagaagtaccatttttgagtcagactcacctggggtgcctaccctgtccctttcctcttgggtgatcttatgcacttgaggtaccccagggatcctcctttttcctccaagtctcacctgccagaggtccaggcccagcacgccaaagttatcataggcatagatactgggatcgggagaatactcggggttgtcaatttctgggtggatccaagtgcccttgtaatctgggttgtcgatctgccggggcttccactcaccctgcagaagggagaaggaaaccgaagggtgagtaaggttggtgcactccccactgtgagccccagccctgctcagagccccaaactcaccttgtactcagggttctgaatcactgggggttcccactctccgtccatctcttcatcccagtcctcgggcttcttagcatcagggtcagggatatgctcgggcttgtcccagtcctggggggtagatgaagagatcagagttggcccagatgtcttccacaccct

SEQ ID NO: 13640 - DNA, 513 bp, Homo sapiens
  MAP TO CHR18.3; EXPRESSED IN FETAL LIVER, SIGNAL =   1; SWISSPROT HIT: P27407, EVALUE 3.60e+00
atgaatggaagcagattgcctagaaacaactcattccatacttctggagtgggaagaaataaatggtaatgaacaattgaatgttacctcacagaaaagtacaaatgatagctgttgccctgccgaagggggacatgttgccagccatgacaaaacaaggctccagcgtcactcttactcctccaaaggatgactggagaacatttacattcatcctggtttatgattcctccatctcttcagccttcaaattaatttaccagaaaaactaaagagtactatagtggaccttaaaagtatttttctctttttaaaaaaataccgaagaatcaatatttctcttgagattatgatgagccttatagcttactggctttaggtatattaattactagaagaacatcttgaaagtttacctctctaatgctctgcttctgaacaatttgttgttaactgttatctgcgagggaaaatagacatggtttacatagtgccaaaaatgtgtcaggctca

SEQ ID NO: 13641 - DNA, 569 bp, Homo sapiens
  MAP TO CHR14.3; EXPRESSED IN FETAL LIVER, SIGNAL = 1.7; EST_HUMAN HIT: AU139169.1, EVALUE 0.00e+00; SWISSPROT HIT: Q62093, EVALUE 2.00e-05; NT HIT: gi12056475, EVALUE 0.00e+00
aggctgagactcacaccaccaccatgtcctgctaccagtatcgctgaacacatctctcttcttcaggaatgtggccgatgacaccaggtatgaagatttacagtgtgaacttggtcattatggtcctatagttgatgtgtatgttccgcttgatttctacattcgctgtccaagaggatttgcttatattcaatttgaggatgtttgtgatgctgaagatgcttacataatttggacagaaagtggatttgtggatggcagattaaaatacagtttgcctagggggatcagaagacactaaatcagatgaaagccaaggaagggaagaatgtgtacagttcttcatgctatgatgatgatgacagatacagacattctagaagccaaagttgtaaaagaaggagatcaagaaggctgtcttctgattacaactatagaaggtcgtatagtcctagaaacagtagaccgactggaagaccacacatagcagaagccattccaaatatgatagattcaaacactgaaattaatctttttcaaaatctaaatccaattcaagatcacggtcc

SEQ ID NO: 13642 - DNA, 535 bp, Homo sapiens
  MAP TO CHR14.3; EXPRESSED IN FETAL LIVER, SIGNAL = 0.9; EST_HUMAN HIT: BG014579.1, EVALUE 1.00e-110; NT HIT: gi15300468, EVALUE 1.00e-114
tttgcagcttagcgctagtaacatagttgttgctttgtgtgtaaatgtgtttattattttagatacagatttatctaattgaatacgatataaaatattttaaaatgtatttccttattttctttctcttaaaggcccttccttctaccatgattatagtagcagtttattgtcctgtgatagctgctgttttcattgttctgaagatggtcaactatcgactacacagagcacttgatgctggagaagttgtagataggactgcaaatgagttcacggatcagcgaaccaaagctgaacaaggcaactgttcaaccaggagaaaagacagcaatggaccgaggtaaggaaacctatgtcattgattgatcgtaatgatttagattgtgttatctgtataatgatgtgattattatattgtacttgttttctttatatggttttaaggcagtgttagatcttaccactgtagatacaatgatgggtacatattttaatattagaacagagctaagctaactggtgtgtttggggg

SEQ ID NO: 13643 - DNA, 567 bp, Homo sapiens
  MAP TO CHR16.3; EXPRESSED IN FETAL LIVER, SIGNAL = 1.5; NT HIT: AF243385.1, EVALUE 9.00e-77; EST_HUMAN HIT: AA653810.1, EVALUE 3.00e-80
cctaccaggcatggtgaaacccagtacaccaccagttgtctcctaattggggatgtgaaacctcacaccagtattatgacatggaataaccttactccatagtgcacttttgcctgtggctttaagttcctaagagtttccatagctctggcacattctttacctaccttaaatttattttgcatcttcgtttattaagttgtctgtatatggtagtgaggtagtgatgcttagtgtcctttctccacagaccatggacctgcactcttgtccgaagccgattgtatttgtgttgcacacgtttttatcggccaaagtcactcgtatgggactgcttgtatgagcaacaaaaaatcagaaaagagccttgactgtcacaagaaatatttccacctcaaaaaaaaaaaagcacaaaaagaaactctttgctctccttcagcacagtgccttcccaaggacctgcaaataactgctgaaccataaccgtgtttaaagaagagcctacctttcacagtctaccttggccagatattctagcactctaaaaggctccaaaatgaagctgtt

SEQ ID NO: 13644 - DNA, 596 bp, Homo sapiens
  MAP TO CHR14.3; EXPRESSED IN FETAL LIVER, SIGNAL = 0.91; NT HIT: AB038488.1, EVALUE 1.40e-01
tctctggaagagggaaggtggttaaacataagggtgtcaaagtacttctttgcataagtaagcttagagattaaggcattaaattagtatcaatgacgacagaaagtaaaactgaaacactgtttgaaatatgaatcaaaaagatataatgaccatagagttcaactgcaaaatcacaggaagcaagaagaaggccactttccacaccagctgctgcaattggagggatgtttgatagtgaggcacaggaaataatcagagagtaagcagactctgagtaacaagacagattatttcaggctgcagtccactgggagttattctagtcttggggaaagactgggaggtttctaaaccccgattttcacagtaatgatgtcattatggagtttataatattgtagggaatggtcataatggaaaagggttgcacttccttagacaagtatatttagataaatctatgcacaacaaaggaagaacaaaattagtcaaaggttgagctttgattaattgggacaaagacctaaaactctaaaatgcatacagcatctctgttgtacaggtggtacaaaccagtgtgaaacatgaaccaa

SEQ ID NO: 13645 - DNA, 580 bp, Homo sapiens
  MAP TO CHR18.3; EXPRESSED IN FETAL LIVER, SIGNAL = 0.85; SWISSPROT HIT: P97680, EVALUE 4.30e+00
gcagacaggcttcttcacgctttattctgctattaggtaacttttttttaaagttaagttttttgttctcatttggagctacacagttctgttttgatggctaatctcccttcctgctgttgcttatcccagaagccccttggacaggctcctctccagctataggtgatttccacatggctgcagttcccttgcaggtggctggataaggacagcggccacagaagcagggcgaggcacgcctcagctgtcaaggcttaggcgtgatggcccccagaggttacccaggtgctgtctcttgcctgtctcttcattttccaggatggcaaagtcctgagcaaatgtaaaggcctccagaggtggccgtgagggatcacttgcttcccgggatggctggtgggggacagcctctgcaggcaggcccggggggttcccatccttgctccaggcagcaccactcctgagtctgtgtgatctggggttgtgttccttcatctcccgccccaattccacctccatctttctaaggtctctaataagaggagttattgtaaaatttgcctacaaaggaatccactga

SEQ ID NO: 13646 - DNA, 510 bp, Homo sapiens
  MAP TO CHR14.3; EXPRESSED IN FETAL LIVER, SIGNAL =  28; NT HIT: gi11437411, EVALUE 0.00e+00; SWISSPROT HIT: P08185, EVALUE 5.00e-29; EST_HUMAN HIT: AA514554.1, EVALUE 0.00e+00
ccctgcccttctctttaaccacaccggtcatcagagtcgcaatgacatttattaaaagatgcctaaagttagacacaactctggttggagggagaagaacttggaggagattgggggaaacctcccgctctccaaaacatttctgtgggatccctggttcccaaagtcagacagtgctgaggctctgggtgggtggtctcttacactgggttcataaccctcgccaggaaaaggctgctccaggtgaagtggtcgaagatcatgatgatgaagggctggttgaaacgcaagatgataggcttggacgtcaggtttagggtgaccccagtggagccagctgtgtccacaccctcctcattgagttgcagcacagctttatggaccacctgttaggtacagaatgaagatgggtagtgagacctgctgtgcgttctcgctttcctgactcattgctgggacccttcacatccttggttttaggaaggtaaatccagggtcagagaaggtcac

SEQ ID NO: 13647 - DNA, 542 bp, Homo sapiens
  MAP TO CHR19.3; EXPRESSED IN FETAL LIVER, SIGNAL = 3.1; NT HIT: gi14767206, EVALUE 0.00e+00; SWISSPROT HIT: Q04499, EVALUE 5.00e-07; EST_HUMAN HIT: BI761466.1, EVALUE 0.00e+00
ctcccgtttccgttactctgaactctgtccccatttgttaataattaattgcccccaaggagcctgtgatcctgaggctttgcccagttaatcagtcactgcccctggtctgggcaaggggcagttggtgaacttgctgcctccagagaaccttccctggtgtggaggcagccagggacccaggatgctccggacctgttacgtgctctgttcccaagctggtcccccctccaggggctggcagtccctgagctttgatggcggggccttccaccttaagggcacaggagagctgacacgggccttgctggttctccggctgtgtgcctggcccccactcgtcactcacgggctgttggtgagcagtgatcctgaggaccagcctggaggctcctcatagcctggcgctgagccctcgctccctgtcacccagctccaggcctggtctcggcgactcctgggctcccggctctcaggcgcatttctccgagcatccgtctatgggcagtttgtggctggtgagacagcagaggaggtgaagg

SEQ ID NO: 13648 - DNA, 581 bp, Homo sapiens
  MAP TO CHR14.3; EXPRESSED IN FETAL LIVER, SIGNAL = 1.1
ttccttggagctccctaaccctaatttaatatgaagtttacaattccttgaatggtctagtctgtattatctcactgattagattatgcacagttctttttttcttcaaacaagtcaacagtctttctgtttgcctattttttatgcctctttcagctccagcattttatttcagaaattctacacatcctcaaccttcttttctctattatttgagccaatagcaatttatgactgttttaaatagagaatctattttgctactgtatgtgttgtttttctgttccccatttcagagagtaagaattttgagaagagaaactcttatcttttaatttttatcccagagcagtggccaaatgacagaaaatataacatgaatatatttttgaatgaatcaaatgaagaagagctagatttaattgggttatggagtttaaggagatgggtaagtaaatagcacatattttggcttttatttcacagcctaaaagggtataaagatatagttagtcctttattcatgtattaacatatataaatatatactgtgttgattctggttgaaacggctggtttta

SEQ ID NO: 13649 - DNA, 508 bp, Homo sapiens
  MAP TO CHR19.3; EXPRESSED IN FETAL LIVER, SIGNAL = 2.3; NT HIT: gi10092612, EVALUE 4.00e-88; EST_HUMAN HIT: AA627122.1, EVALUE 1.00e-125; SWISSPROT HIT: P53566, EVALUE 9.30e-01
cagagtgagctgtggtgaggctgagctgtgcagacttgtgctgggatgggtgatcgggccttctgggtgacgcaggtgtgtgtgacaacacaacctgtagcttcagcgtctctgtgctgggatggatgatcgggccttctgagtgatgcaggtgtgtgtgacagtgcaacttgtagctccagcgtctctgctgcttcccctgccttcacctcctaaccaagcggtacctgcctgagaacaagggccgcggagggacgtgagcgcctgagcctcgcctggaaattcaccagcaagaaggcagaaacagccatgaggtgacgctttcagagccagaagtgctgtgcatgcaggccacctgagtgacaggggacggtggcctcaggagtagaattcctcctgtagagggacaggtccctgatgtgggagacagggaggggggcagctccacgcgtcatcatctcaatcgccacagcgtgctcttcaggaatctcccagaaactccatctcg

SEQ ID NO: 13650 - DNA, 589 bp, Homo sapiens
  MAP TO CHR18.3; EXPRESSED IN FETAL LIVER, SIGNAL =   1; SWISSPROT HIT: Q53586, EVALUE 2.50e+00; NT HIT: AJ243213.1, EVALUE 3.60e-02
agtaattggtccccatgtgccttgtcctgggctgggtagggaaaaagcagatcccgctaacagaggcagggcatgaccaggaagactggatgggagaacgaactagagaaacaagactccaggatgggcctggtaagcttgggctagaggatgagaagagacgacgtcccccaaatgcagatactatgcgcgtgtgcacgagcagaggtatgcgcgccctgggatgtcagcagcaatgagattcatggtttaccaaatctgggtctttctattccagaaagtggaccctgctcttcagccaaaccatttcttcattactttgaaatatctaggatgccacatttttgccttgcttgtctctgttttcatgcctttgcctgtgacacagtccagatttgtcctctcagtagacttgtcattcccataatcaccacccccaggaagccttccttatcccattccattctggcaattcacatgctcaatatagctgtggccccaggcagtatgatttctatttgcacttgtcaatcaaaccttgccagaggtcatcacccctgccacctcctctcttttcccatggactgga

SEQ ID NO: 13651 - DNA, 519 bp, Homo sapiens
  MAP TO CHR19.3; EXPRESSED IN FETAL LIVER, SIGNAL =   1; NT HIT: AB006136.1, EVALUE 0.00e+00; EST_HUMAN HIT: AL531093.1, EVALUE 1.80e-01; SWISSPROT HIT: Q9NSA1, EVALUE 9.00e-14
cgaaccaccttatcgctttcaccccttaggtctcctgcagctgaaagccttgaagccgggagttattcaaatcttgggagtcaagacatccaggttcctgtgccagcggccagatggggccctgtatggatcggtgagtttccaggaccctcctcaccacccaccatgctcctcctatatgtcgccctcacagcctggggtgccttgtcttgctcatcccccccggagccagacttgattctatttgctctgcacgcccccagctgcaacatttggaggttgaagttgtcatcagtgtttgcaagatgaggaaactgaggcccaggccggggcgccagtgacctcaatcatgtgatgtgtggatgctggagcggcctgaggctcaggttattgggagtctcgtgattcagtaacccctgctcctgcccacacggcccctgtgtgcacggctcatgctgggcacagggacactcggggaagccatggccagtaaagtgaccaggaccttgagtgctaggg

SEQ ID NO: 13652 - DNA, 572 bp, Homo sapiens
  MAP TO CHR19.3; EXPRESSED IN FETAL LIVER, SIGNAL = 1.8; NT HIT: gi14763529, EVALUE 1.00e-103; EST_HUMAN HIT: AW249443.1, EVALUE 1.00e-103; SWISSPROT HIT: Q9NXH9, EVALUE 3.00e-38
taggctgtgatgcccagaacctaccgggcatctgcttggctcggctgtaccaggtgggccacgtcattgagctggacattccggcgtatgagatccacagcccgggtggaggcatcgtttgcaaccacagatctgagcccaggcacctctagggcaaatcgaatggaacgtaggcctgaagctgccaggccttccagcacatgcaggccttcctgttggagtaagcagaaaacctccctcacatctccacctccatcctcttctgggccccaaggagcccccaccacccacctcctatagctctccccctccaggagccctctgtctcccgctaaattccagggctgccagctcctatgctcaggccccacctcacagatctcccccacggccgctgtgcgaggttggtctcctgaggccaggttttcactctctttcagttcaaccttttcctcctcttgctctgacaagtccacgaccactttttgcgtgtccttctctcctggaaccttgactgcagccacccagaggcacaagtcagagaataacaaggtcccctctgagaaacctcc

SEQ ID NO: 13653 - DNA, 558 bp, Homo sapiens
  MAP TO CHR18.3; EXPRESSED IN FETAL LIVER, SIGNAL = 1.1; NT HIT: gi14764894, EVALUE 1.00e-66; EST_HUMAN HIT: AI767468.1, EVALUE 4.00e-64
aacgagaggcaccaactcagcaggaaatgtaaacgtctacttgggaacacgatcaacactcatgaaaccactggaaaacattataaaacagtaggaaatccagtggtgaatagtgagggacaaattaagtgctgataggtgttctgaaccctcctggcccattattcaattttactgagtgagtaaaatcattttactccaagcataggaacagtttcgtatcctcaagagaaatgactaaacatgggtttaaacttcagctaggaagactgtcctttgccaaactagggttgttcctttacatatgttctatggagagggaaacaaaatcctccagcccatattggaatttctctttaaaaaatcatatcatactaatgatttctgctacccacatacctttttcacatactcggtttcttcaataatgtgagcggacgtagactcatacaaggcagaattatcttccatcttatcccttgggggaatttctgtggtcactgtcactgttgtcattgtgaattctggctttaggaaaacataaatcagctaagcaaa

SEQ ID NO: 13654 - DNA, 570 bp, Homo sapiens
  MAP TO CHR18.3; EXPRESSED IN FETAL LIVER, SIGNAL = 0.98; SWISSPROT HIT: O61998, EVALUE 6.30e-01
aaccttgacctgtgccaaacttttgctgatctccttcctgtccacttttttctgtttctcattttctaggctgattgctttatttctgtgcagatgtttcaggaacctgatgcagtgtagatcacaggggttataccagtataaaataaataagcctctgatgtcatttttcccacacaaacagcatatagtattattactctccattaccctgtgagcgaaatccttgttggttctatggtaggaggaggttaggtggctaaaggctggtaactacaatatatgcttttcctactaaatatatttatttttggtttgagttttctctcttctgtgtttaaggagatatttttatgaatatccagagataatagtataactaaattggcctggctgataaattgagtacttgtaggagagattcttatagctacgtcttatgtatacaatggtcttcctagttacctttggagcttcagtgttctaaccaaaatgtttgtgaaccatttgtagccattgtaatgaggtgatggcatatccatttctgtggcaggtgaacgacatttgcat

SEQ ID NO: 13655 - DNA, 569 bp, Homo sapiens
  MAP TO CHR14.3; EXPRESSED IN FETAL LIVER, SIGNAL = 1.7; EST_HUMAN HIT: BF895383.1, EVALUE 0.00e+00; SWISSPROT HIT: P47782, EVALUE 4.00e-71; NT HIT: X55989.1, EVALUE 0.00e+00
tcacaaccgagacagaatcggggagtagttacttctcttcttttctcacaggaaacatggttccaaaactgttcacttcccaaatttgtctgcttcttctgttggggcttctggctgtggagggctcactccatgtcaaacctccacagtttacctgggctcaggggtttgacgtccatcagtaggaaccagctccaatgcaccaatgcaatgcgggtaattaacaattatcaacggcgatggaaaaaccaaaatacttttcttcttgcaacttttgctaatgtagttaatgtttgtggtaacccaactataacctgccctcataacagaactctcaacaattgtcatcatagtggagtccaggtgcctttaatgtactgtaacctcacaactccaagtccacagaatatttcaaactgcaggtatgcgcagacaccagcaaacatgttctatatagttgcatgtgacaacagggatcaacgacgggaccctccacagtatccagtggttccagttcacctggataccatcatctaagctcctgtatcagcactcctcgtcatcactca

SEQ ID NO: 13656 - DNA, 599 bp, Homo sapiens
  MAP TO CHR16.3; EXPRESSED IN FETAL LIVER, SIGNAL = 0.95; SWISSPROT HIT: P08619, EVALUE 3.40e+00; NT HIT: gi14778798, EVALUE 0.00e+00; EST_HUMAN HIT: BE074921.1, EVALUE 5.00e-98
ggagcagggaggaaggtaacctgcaccctgacgtcttcaggggaggacacacaagcaccctatcaggtggcctctcttgaaaacccttgcccccacgactggcgccctgctttccccattcactgccttgtctccacccctcgacctccttgctctcctgctgctgactttgggacccctaccctgcaggctgtcctggaatctcctcggggatgaggcagctgccgagctggcccaggtgctgccgcagatgggccggctgaagagagtggagtatgaggggccgggggaggaatgggacgggctaaagggggacctacatcccgggaacaccaagaggccactgggtcagtcccctgcctcccagaaagcccttccttgagttgcacactctggcctgttccaagcccctgccaggcttagttccccctgggttctagccttcagccttcccgctgcacctgccaccagtcccctgttgtcttttgggttccctgagaaggtagtgtgggagactgtgtcccctgaccttggcctgaggaagggacctaggaaactctcacacccattctcatggccgtgtttctctttcccctccc

SEQ ID NO: 13657 - DNA, 537 bp, Homo sapiens
  MAP TO CHR19.3; EXPRESSED IN FETAL LIVER, SIGNAL =  23; SWISSPROT HIT: P81172, EVALUE 3.00e-05; NT HIT: AF309489.1, EVALUE 2.00e-50; EST_HUMAN HIT: AI937227.1, EVALUE 2.00e-50
tgttcagctgccagtactcctgagacgtcctgagctctgctcagtgctcgggtgtctccagtgccctaggctgaggcctggctctcccatccctgctgccctgctaaggacccaggccactgggctctcacctgttgtgggaaaacagagccactggtcaggctggcgaggaggaggaggagcaggaggcaagcggcccagatctgggagctcagtgccatcgtgccgtctgtctggctgtcccactgctgggtcttgagcttgctctggtgtctgggaccgagtgacagtcgcttttatggggcctgccaggggaggcggtggtctgagccccctcccctttgctctgtctcatttccaagaaggtggtggcgccgaaaaggcgggagagataagcgggaacagagcgacagggaacagggttgtgtcaccctcagccggcagaggtgtgttcagggggtggggcagacggggtcacagacacacactgctcaccagccatctggggagccctttccccatcacgatgtcattctg

SEQ ID NO: 13658 - DNA, 534 bp, Homo sapiens
  MAP TO CHR16.3; EXPRESSED IN FETAL LIVER, SIGNAL = 0.97; SWISSPROT HIT: P48998, EVALUE 1.70e+00; NT HIT: U15422.1, EVALUE 0.00e+00; EST_HUMAN HIT: BG720020.1, EVALUE 1.00e-108
gagcctcccctctcaagaacaaggagagaagagtgggatgacttttcaacatttattgacaggcggcattgttccttagcaggctcctgatttttattggatggtggcattttcaagatgtggcaagaggatcttgaagtctggtaacattctcaggcaggagtttggtggatgtgctattttgtgcaattagtgtcttctacatctcggtctgtacctggggcggcagcaccctggtgagaccaagaaaagtggtgagaggaaggctgggccctgagagctcccagcctcagccccagcccaccctcagctgggcccacttactcatggctctcctccgtgtctggcagctccgcctccttcgtctgcgacttctttgtctctggcggtaatatctgctccggctctggctgcgacagcatctgtacctggccatggtgcaggatgggcttggcctgaatgctcagagcagggcaccaccttgctgagccagccaacctgtgagcaggtggaactctgtgggctgtgagtcag

SEQ ID NO: 13659 - DNA, 566 bp, Homo sapiens
  MAP TO CHR19.3; EXPRESSED IN FETAL LIVER, SIGNAL = 2.4; SWISSPROT HIT: Q16617, EVALUE 9.00e-66; NT HIT: AF305941.1, EVALUE 0.00e+00; EST_HUMAN HIT: BG744225.1, EVALUE 1.00e-79
tgttctgcctgattgctttgagcaccgatttctggtttgaggctgtgggtcccacccactcagctcactcgggcctctggccaacagggcatggggacatcatatcaggtaaggggaatgggtgtcctacagaggggttgccagcggggatgggtgctcagtggtcttctcccgatcaggctacatccacgtgacgcagaccttcagcattatggctgttctgtgggccctggtgtccgtgagcttcctggtcctgtcctgcttcccctcactgttccccccaggccacggcccgcttgtctcaaccaccgcagcctttgctgcaggtaaggactctggactggactggggcatcgcgagccagcgaattcctgccgaggagctgagccatctctcttgtccttgtccccagccatctccatggtggtggccatggcggtgtacaccagcgagcggtgggaccagcctccacacccccagatccagaccttcttctcctggtccttctacctgggctgggtctcagctatcctcttgctctgtacaggtgactatcctgcccactg

SEQ ID NO: 13660 - DNA, 538 bp, Homo sapiens
  MAP TO CHR19.3; EXPRESSED IN FETAL LIVER, SIGNAL = 3.6; SWISSPROT HIT: Q15928, EVALUE 2.00e-14; NT HIT: gi14754700, EVALUE 6.00e-93; EST_HUMAN HIT: AL599939.1, EVALUE 2.00e-66
ccactgaatgcctccttctgaatacccaggaaacatggtacatgctgatagaaggctctattccaccaacaacttaatccaaagcagagaggtagaaaacaggaaatctgacatttcaaaagtctaacacaatgtattatgcatacaaaagctctgaaacctcaaatgatgaagtacaaaggaggcagaacatctgagaaaggggaagattaaagtccaggtttcccatgattaagctttccatttcagagtcaacaggacttcaatctcagtcaagcaatgcaggggctctccagggactcgtaagggaaaatgcaacaatagacaagaacagatcttgacttctggaagaaagtcatcctcacccagagaaacaaggttccagtagttctccaacatcacgtccctgtataagatcctctgagcagggtccaggcatttccactcctcctgagagaattctatggccacatccctaaatgtcaaccgtacctaaaatgaaaaacacatttcaccaagtggctaaggggagagttca

SEQ ID NO: 13661 - DNA, 516 bp, Homo sapiens
  MAP TO CHR18.3; EXPRESSED IN FETAL LIVER, SIGNAL = 1.1; SWISSPROT HIT: P16258, EVALUE 5.00e-06; NT HIT: gi15305878, EVALUE 3.00e-70; EST_HUMAN HIT: AU119897.1, EVALUE 4.00e-70
tgggttggtagcaaggtctctaagagttagaccttttcctcccttggctcatacctgcatcctttccacaggatcagagagtgaactggccttgtggatgaggtaagtatgctccatgtattcagttaggcgctgtaggaagctcagaggctcattaaatataactggcatcgtgatcttggatagttcctatttaaccagaaaattgaaagtgttatgtcccatatacataacaaacaaacctattgttatctttacataacatcctcctggaaaggacagaacagaaactagcaacccatgaaatttcatcaatattggttcaatttcacaaattctttccagagcacctaataccatggagtatatccttctaggccttgaaggaggaaatacaaagactgcccaaacattctccttggctccagggagctcactacctgctggtgagcatgagcagatgactcttcatcagtctgccttacatcagaattaggaaatgggagacaaaggcaa

SEQ ID NO: 13662 - DNA, 519 bp, Homo sapiens
  MAP TO CHR14.3; EXPRESSED IN FETAL LIVER, SIGNAL = 5.7; NT HIT: gi15300641, EVALUE 3.00e-61; EST_HUMAN HIT: AA253104.1, EVALUE 9.00e-59; SWISSPROT HIT: Q99538, EVALUE 9.00e-33
tcccgactcactttgtttccatactgcatgacgtggctggtgttggtgtgcgattttaccaggtggtactgcttgtgcagggtctctttagtcagatcttcctgcaaaaagtgagaccattagagacctttgacaatcagagtctgacggttaaaccccagctgaacagccagcccccaaagggctcaccacgtccgaatcttccatccagttgacgctgtaccagtcccccaggtacgtggacctcttctcatcatagtaacaggcgtaggacgactctctggggttggcagcagtagttgcataaactacgaggaattaaagatgatcttttagttgcattttattcctgccttggattacgcttgaagcttgagtccttctttctcccccggtgaaatcgaagcatgctacttatgatccacacaggagggcagggacacgtaactatacccagacttgtgtattcgattacaataactcatctaaaattaaatgcggaagaaagaggagccagct

SEQ ID NO: 13663 - DNA, 514 bp, Homo sapiens
  MAP TO CHR19.3; EXPRESSED IN FETAL LIVER, SIGNAL = 1.2; SWISSPROT HIT: Q13360, EVALUE 1.00e-12; NT HIT: gi13236592, EVALUE 1.00e-66; EST_HUMAN HIT: AV747612.1, EVALUE 2.00e-84
aatgcaggaatgacattaggcttacccagtgaggccaggttcctgcagttctccagcatcacgtccctgtacagtgtcctttgggcagggtccagcaatgcccactcctcctgggtgaactccacggccacatcctcaaaggtcaccaagccctaaagcattgcaaacatcacggcttagccaaggaccacccccaccaatgtgcacaggaagaggggccaggagaacagagccagggctggggaaacctgagcacgagatgtggggggattctgagctcctctcctgaggttctgagctcttctccctggcttctgagctcagccctcaatgcttgtctccttaggctactcccaggtccagcgcacagtaccgcagagcagctgtcttttctcactcaaactgggagctcctatgatcttatttccctcagtctccaggggatcatgggcccgtgacatggcagaaatcagagaaatacttggtaagtgaatgaatgatttccgtatggcct

SEQ ID NO: 13664 - DNA, 513 bp, Homo sapiens
  MAP TO CHR14.3; EXPRESSED IN FETAL LIVER, SIGNAL = 0.78; NT HIT: AL139075.2, EVALUE 2.00e-03; SWISSPROT HIT: P44068, EVALUE 6.20e+00
atcggaccatttctccacactaaattacagaattatcctgaggcaacaaaacttttacatgaatgtttccttgcagttcaaaagtattttaggcactaggtgaatgcctagtgagagtctgtcccgaaatgtacacatcagtattctgtgggacttaatttaagctatgaaagcaaaagataaagaaacattccatcaccaacatggtttcccctgctttgcttcctgtttatcagtgcttcaaggtcacctttcgatatgggcagtgttcagcttattctaagtctccctctattaataatggctcttatgactcctaccccttagcttggcagggtccccctctcaccttctgtgagtgaaaaaacaactaggcagccttgctcttttttccttccatcacttagatttgcttctgaagctctgctgaattatatttgaataattcatccaactcaatttttactgagggactaatgtgctaattaaaagaggcgtcattttaaggttgga

SEQ ID NO: 13665 - DNA, 565 bp, Homo sapiens
  MAP TO CHR16.3; EXPRESSED IN FETAL LIVER, SIGNAL = 0.81; NT HIT: gi15828471, EVALUE 2.10e+00
tgccatcatggaattttaacagttaaaagcaggagtttattttgtatatcacaactcaaacacattccatatgtttttccagtgtatgtaagaagggacagtgtcttattggtatccagggaaagactaggcttttctgcccacttagctagtattaaaactataataaagagtttttgtgaaaatggtcactagatttattgttggaggcttatgaaataaaaggcctgtagcatatgaccatttgctattttttatcttcatttcttcttttttcctcagacaatgaacatcacaaaatctttctgctggaagagctagttctggtcactgtgatacctgggctgtcatttgctttaaaacctggattggttagaatgaatagatttgtctttgccgatgaaacaaatgtcaaactttaaaaagccttttcagctataggcttttcatagaataagctacctctgtcaggaattcttctctcactaccacatattccagtattttctctagtcacaggctctctacattgtagacataggtatgcccacttctcaaaattcca

SEQ ID NO: 13666 - DNA, 531 bp, Homo sapiens
  MAP TO CHR18.3; EXPRESSED IN FETAL LIVER, SIGNAL = 1.9; SWISSPROT HIT: Q13336, EVALUE 3.00e-25; EST_HUMAN HIT: BI765328.1, EVALUE 1.00e-104; NT HIT: gi14765931, EVALUE 1.00e-105
tggttagcacgtaatgccacaagaatctggcatcatttagaccagccatttattcagatatcaagagcaagagactgtaactgattccctgacctctgactaaaaacaaatataaacagttctgtggactaaatgttgtttatcctgggaaggatgtggttttatcactgttgcccacagtaactggtcagcccctgtgtctcagaagggagctgagaaggcttgaaagggtacacctacctgtcctggctgagcaagagggccatcagagtggagaccactgttcccagccagccagtgagagcccaccaggggttctgaacaagaagtcctaccagaatcaggattccactgacggggttgttgacgaacaccacttgggatatgccccggagaatccagtcaatgaactggagcaccacgggtttgtctggaagggatgaggtaaagcagagctaaggaagctgccaagtgatactcttcaaccacaggcccaccctgagcaaaatcagcaaaacctcctggaagtga

SEQ ID NO: 13667 - DNA, 525 bp, Homo sapiens
  MAP TO CHR14.3; EXPRESSED IN FETAL LIVER, SIGNAL = 1.3; EST_HUMAN HIT: AA487359.1, EVALUE 1.00e-54; NT HIT: AB014566.1, EVALUE 1.00e-54
acagaaaggtgccaggaatgaatcttatacccatttaactacttccaagtaaaaatgaaaagatttaatcatttctattgtatcttaacctgtgagcagagcttatacactcaacaagagttaacattttatcttgggacagattaactgaaagggtgaaaaattactacatggatttaagtgataaacctcagttttaatattcgtgtgtacttttcagctcttgaaatttgttcctgaaaaaagtgacattgacctattggaggaacataaacacgaactggatcggatggccaaggctgataggttcctttttgagatgagccggtgagtttgaaaatgctgggaatgtgaagatgtcacttccctttctaagcttcatgaattttcaattcatgttgaattgtttgggccaattaacctggcttaacttgaaagctttttcattctaaaaatcttctcaagtctgagtgatgtggaatttgttctgtttatgtcacttcttgtctatggatgagccacggt

SEQ ID NO: 13668 - DNA, 549 bp, Homo sapiens
  MAP TO CHR14.3; EXPRESSED IN FETAL LIVER, SIGNAL = 0.96; EST_HUMAN HIT: BE503355.1, EVALUE 1.00e-24; NT HIT: AL163284.2, EVALUE 1.00e-07
cctaaggagcaaggtccctcattttcttccatcttcctttcaaaaacgtcttccatctttcataattgcaagggctaaatgattctaaatatagatcactgttgtccttgcagaaaatctttctagcatttgaacataaattattccattgttgttgtagaaccccaaaagccagattcaagtacctggtgcgcagtaagccaaacacagatatgtcagtcttaggagcagagaaggcttattcaatttggccaaattgtgaggataggacaggcaaactctcaaatccaacctgcctttgaacatgattgagtgtttccatgagaaaggtagctacgtggaaggtgagatccctaggccgatcaaacttctgaatgccatcaaggccgatcaaacttctgaatgccatcaaggaggtctgaatgacccaagaatcattgttctttggaaaaacaagttcattaatcttgtgggcagcccctgagggttaggatatgaagttaatcaattagtagtgactaccctctaccgaaatgactatgtgcgagc

SEQ ID NO: 13669 - DNA, 583 bp, Homo sapiens
  MAP TO CHR18.3; EXPRESSED IN FETAL LIVER, SIGNAL = 0.89; SWISSPROT HIT: Q06136, EVALUE 4.00e-06; EST_HUMAN HIT: AW195307.1, EVALUE 1.00e-108; NT HIT: gi4503816, EVALUE 2.00e-25
taccctcaactttggggagcagtacatattaatagagttgttcttgtcttatatcacaactaaataataagacatttattagaactgtagagtcagcctcagcaattagtactgttaactgggattttgaggtttatctgttttctactatctttctctaattaattttcaaacttttatcacttattcatagcttaacatacttcacaacttctttctttcataggctgtggcccagtctgtctatgcaatgtagatactgttttgtgtgttttctggaatttaatacatacatatagaaataattgctttttttctctcctttgcaataaacggacatgcatatagacggtcatcacgactaattattctgtattgctttcaggataagctgctgcaggcaaagaaagaaattgaaatgcactctattaatgacaaacaggtaaatctctgtcttcagaatgcattttctgtataactcagcacagctgtataaaggaaaaacagagttacttcacctgtgaatagttaattgaaagcatatatgtactgttttttaaaaggtggaattgtttgaatggtc

SEQ ID NO: 13670 - DNA, 574 bp, Homo sapiens
  MAP TO CHR18.3; EXPRESSED IN FETAL LIVER, SIGNAL =   1; SWISSPROT HIT: P07393, EVALUE 3.20e+00; EST_HUMAN HIT: BG213885.1, EVALUE 0.00e+00; NT HIT: AJ243213.1, EVALUE 5.50e-01
ttcaacaccaagaacaaagccagtcaaaaataaacaactaaataacaacaataatttgccacctactgctaatattcagtcccaaaccaatggttgatttttgcgatactaagataaaggaccaggttgacaataaggtattcttcggtctctctgatccacaccagctccacgtgcactcttccttccgcatcaacgtagtccacgttgtatgtctgtcccaagaagctagagctgtcagagggtgtggcaggcgatctcaggcacaccggggaactgaaacaccaaaagggtttcccatgttcatccaaaagagttacgtccatcatggaacaactctgcaaaataaacacagattgacaaggataaaaaggccaatcagacctgattttcacagaaaatcgtgactctgtaaaactcactagaaatgctgcgtgtggcatcaaaatccagaatactatcattggtttttcatggcctacttcataacctagattatacttgggcttttgtgtgtctcatcacttaatattcattctcaaatatacacaggagctctcacagggctcagttt

SEQ ID NO: 13671 - DNA, 515 bp, Homo sapiens
  MAP TO CHR14.3; EXPRESSED IN FETAL LIVER, SIGNAL = 0.99; SWISSPROT HIT: P05883, EVALUE 7.20e-01; EST_HUMAN HIT: AW295342.1, EVALUE 0.00e+00; NT HIT: U83880.1, EVALUE 1.90e+00
ttcctctctcccttggttccatcattaaatctttaagggattaattcacaactctgtagtaggtaggggccctgggaccacttgacgggcctttgcaggcagttctgtacagagtcctaacccgtaacgggcctcaaccccggctgtgtgtgcgtgtgcttgtgtctgtgtgtctttgtgtgtaaaagcaacgcataaacatacccagggctttcacttattttattgaagcaaacaaacaaaaacagccactgggtttgtcttttcccctactcctgcctgagcgccgccgggtttctgagctgctccgggcgcggacctagctcacccgcagccggatgtcggagccggagctgctccccacccggcctcgcccgcgggcgacaaaaccgtccctctggccacgggagagcatcgccttgccaaaatcaactcgcattttcatgtattcaaatgagaaagactgagaagggcgatttcccctgctgggcagtcgacagcgttggaaggaagaa

SEQ ID NO: 13672 - DNA, 600 bp, Homo sapiens
  MAP TO CHR16.3; EXPRESSED IN FETAL LIVER, SIGNAL = 2.7; SWISSPROT HIT: P19812, EVALUE 2.60e+00; EST_HUMAN HIT: D20172.1, EVALUE 1.00e-122; NT HIT: gi13648792, EVALUE 3.00e-86
gaggctgcatttttagcacctgaaagatgtcacttatcattagtaagaatacatcaaaaataacattgaacttattttgtcttttccagaccctttggctttgctgagagaggactcagatgatagtgacgaatgtctggcagtgaggacacattttggcattcttgctgactctgacagagtgattctgatggacttgtatttaaattgtatgtgttttactctttgaaaataaatctataaaaccaacattttcccccatcttcagtttttcaatgatgtctataaagtgcttttttatgtttgtatactgacattgcttaatatttttaaaggtctgatttgtcatttgtattcatgcatgtcaaaaacaatggcttccccagccatgtacttgaagtaaggctgtctccccaccttcgtatcaggagtgaatatattcatggaaatggactttttgcttcaaaaaaaactttgttttggtttccattagcttattatcagatgtgtcagctgatatcagcaggtgggactagtttttcatcactgtcctaaagatcccttttaatacagtttaacagttttggagaatgggaggct

SEQ ID NO: 13673 - DNA, 541 bp, Homo sapiens
  MAP TO CHR14.3; EXPRESSED IN FETAL LIVER, SIGNAL = 0.93; SWISSPROT HIT: P25159, EVALUE 5.80e-01; NT HIT: AY051789.1, EVALUE 1.30e-01; EST_HUMAN HIT: BG708193.1, EVALUE 1.90e-01
gacccctcacgctatcagagccccaggagggggttcagtggggagggtgagcttgcgctgaccagacacgccagatggccaatgggcagctccttccaaggacccgggcaccccacccaggcacaccttccccacagggctgctgcacctgctccgcccagctggggttcaacaggaggtcatggtcccgctcatgttcaaagtgcagggctccgagcccccagccagcccagaggaggcctcccctgtttcccaggacgctctgcggtgatgccaaggtcccgggccacctcctcaggcgctccattgctcttctcagccagcgtgggtgtggatgtcacaaccacgtggcactgccaccaaatcacacatgtgcccatgccgtcctcacccaccctcagtgatcagcaggttcctgggcacacggctggctcctgtgcagcacccgcaggctcgggtcctcgcccaaacacaacccaggcactaccgaccgtgctcggcaggaccggccttcacgcattgttcgctcacccaaggttta

SEQ ID NO: 13674 - DNA, 589 bp, Homo sapiens
  MAP TO CHR14.3; EXPRESSED IN FETAL LIVER, SIGNAL = 0.92; EST_HUMAN HIT: BF873506.1, EVALUE 8.30e-01
atagcatcaaagtattgggaatgttttactttattttataagaattctttggtaatttgattatactatataccttttagttctggagtttatgtggaaatgctctgaccccaaaacgaggtgtctttggtaagacgggtgaccttcagacaatactgtgcctagcctgtgcaagggatgaattaacatattctggtgcactcaatggggatatatatgtttggaaaggaatcaatcttatacgaacaatacaaggagcccatgctgtaagtacatttaagtattttaaacactttcatgtgtattacttaaccttgtcttagaatgatagactgcgtaatatagtatattgtttctagtcagtttggttgcttgaaaatgcttttctaactgaattatctatttgttttcaagatttcaatgaagaaatcaattagactcattgatatttattacattagtataattagtatcttgttaaagctattgctttagtatggtgtctttctgaagagtagtgttgaaaaaaagcttgttgacttcaatctaaaagtattctagattaaccacaccagaataaagctagtgc

SEQ ID NO: 13675 - DNA, 565 bp, Homo sapiens
  MAP TO CHR18.3; EXPRESSED IN FETAL LIVER, SIGNAL = 0.94; SWISSPROT HIT: Q9PQI7, EVALUE 4.10e+00; EST_HUMAN HIT: AI940763.1, EVALUE 7.90e-01
ttcaaaatggggctcaaaagcaaaatggctgactcgaagaatgtgagattaaaaattagaagggaaagtatgaaggtgggtaaacgggtcctggaaaaccacgatcttattgaaagtatgactgagaaaatggacaaaagtagtagaggattcagcgataatgtaaagatcaaggaattgaaagccctgaagacaaagactagattcagcagcagtgagagggatggaagaggcataaagttaggtgtgtttatctgattaaatcattctttttgttttcagaaaagaaatgtggaagtaatgaagttggaatttatggattattccaatgaaagcagtcctttgtcctttttggcacacaagtatgcgttactgtttctgggtgataataacttctagttagactagaaagagctgaagaaagcatttttctacatcaatgtgtaacaatgagaagagggaggtggggagtaggggtgggggataacgtcagtcctcatctcaatcattatgatcatggaaattaattgttgggaagggaatctcgagttgaatttcccctgaa

SEQ ID NO: 13676 - DNA, 531 bp, Homo sapiens
  MAP TO CHR14.3; EXPRESSED IN FETAL LIVER, SIGNAL = 1.5; NT HIT: gi16190364, EVALUE 0.00e+00; EST_HUMAN HIT: BG696806.1, EVALUE 0.00e+00; SWISSPROT HIT: O84432, EVALUE 2.50e-01
tgagggtctaaccacaagggagtggttgttttttgttgtccattgctcctgcaatggagaccccatgttccaattccccctttcttgtgatatccaaagggggttataggatgagcatagcttggtgtctggagcattaccatatttcaaggaattgacctctactgcaaacaaaatgcaacattttgacatgtctcaaagaggttatttctttctatttgcagctcaaagaacaacgtgaaagggaacgtaaaatgagaaaagctaaagagaatagtgaagaaagcggagagtttgatgaccttgtttcagctttacgctcaggagaagtgtttgacaaagacctttctaaattgaaacggaatcgcaaacgtattaccaaccagatgactgacagcagcagagagagaccaatcacaaaacttaatttctaattttccatgaatacttttttttagaaagctcattagcagccctctaaagtgactagaacgtttcattacactgccttgcaatccaaacagtggcaat

SEQ ID NO: 13677 - DNA, 546 bp, Homo sapiens
  MAP TO CHR14.3; EXPRESSED IN FETAL LIVER, SIGNAL =  76; NT HIT: gi15431292, EVALUE 0.00e+00; SWISSPROT HIT: P41051, EVALUE 9.00e-68; EST_HUMAN HIT: AU133545.1, EVALUE 0.00e+00
gcattcagggaacaatctgcagactagttttaacagacaaataacacctgtaagcagacatgactgtcgtaaattgtttattagacatgaattttacaaactttacttatattcgcagtaacggtggagctggagagtattgtgccttctccaagctgcccggcaagaactaccaataatgtggtggaacttatggccctttccaaggccacggctctttcggcctgcagatgtcagcccacgcatctccctgtgcttgtggactggtttggtgatccactgggtgtcaggatttcttctgatagctttatggaatggattaatgaggataacctcaaaaaatttgtatgtggaatcttcaccaacccagtgagaattccgggctcttaaagagccccacagtggcgtccagcttgctcctctgcaacggaccgaaggcttcgagcaaactttagctggttaacaccatgatggacagacttgccgtcagttgttcctaagggaactgggtgttttcggccaccacggcgaacacgaatcctacat

SEQ ID NO: 13678 - DNA, 527 bp, Homo sapiens
  MAP TO CHR18.3; EXPRESSED IN FETAL LIVER, SIGNAL = 1.1; EST_HUMAN HIT: BF790352.1, EVALUE 0.00e+00; NT HIT: AB026496.1, EVALUE 3.20e-02; SWISSPROT HIT: Q9MLJ9, EVALUE 1.30e+00
actccaccactgactggaccgagctggcatatgttgtttctttgtgtttctacatcaaaatgttcgtctaagatttgaactgttctgctgataaccttccccgttgtcatagctatttcattgccaaccaactccatcacatggttgttgatatcgtcatataaagccattgcaaggactctggaaactgccgccaatgaccaatttctgactaaccagccaccttttctctctcttagctccacgtcagcactgagaccagactcgagcacccctgtcctgtaagcgagacaaaatggcgtgtgttattttggggttttgtgttttttggtgggtttctttccttggctctccagatttacttttggggcctgttctaagtgcaaacccagcaagtttcacttgtcctgtccattagatacaactacatcttgcgggggttgtttctttcttgttccacaatgaattgcacatccatctccatcagagctgatagcctgttaataagcactggtctaacacagcca

SEQ ID NO: 13679 - DNA, 568 bp, Homo sapiens
  MAP TO CHR14.3; EXPRESSED IN FETAL LIVER, SIGNAL =   3; SWISSPROT HIT: Q9UK55, EVALUE 9.00e-51; NT HIT: gi14748336, EVALUE 0.00e+00; EST_HUMAN HIT: AV681541.1, EVALUE 0.00e+00
caatgaaattgtgctgagcgtttgccagtacagaaaggtagagtttgtatagggtgtgggcaagagttgtacctggttttcatgtttctgagccatgtctccaccaagtctgtggtcaggtagtcttcaagggcgaggtggtcacccattttctccatgaggaccaccagcatggtggcatttccttggtagggcagtttgaggacatgacaacgaaaattcttgtcaaaggtggaggcaaacttgcctgcaccgtacatcatgggcaccttaatggtcttgtacttgtccaggtggaaagtgtcgacttcggtgaagacagggtcaaatggggtcaaccatttccctgaacaagtaagagaagaactcattgcagaaattccctctttgaaaagcattgttcttgctcaaataatagagagggagccttctatctcacttctctcacttctcgtcttctcgttccaactaggaaaggcgttccctaattgggttggcttttccacagctcaggcaggcaaaataaatttccccaaaattttccccgtcctctagcccagctagcaaa

SEQ ID NO: 13680 - DNA, 581 bp, Homo sapiens
  MAP TO CHR18.3; EXPRESSED IN FETAL LIVER, SIGNAL = 1.5; SWISSPROT HIT: P08500, EVALUE 1.50e+00; EST_HUMAN HIT: BI870966.1, EVALUE 5.20e-02
ccatggtattggaaactcgcaggtcgttgactatccctatttaatttgggcagtacaggacatttctaataattaatactgtaataacacttaatgatctgcactcatgcaatctgaaaatccagctaatggtgcagtttttagtgattgcacaaacagcaagttttaaatgtgtcaaatgctgctatttcagcatcccagtgccatggcggagaccctgcccgtgggcgtcccgctgacccccacccagagcccagacatggatttgatggcgatgggcttgttctccagggaacctgcctgtttgaagttggatgcaaggcaggaaactgagggagacaccgagcgtcctccaatgggggtgcattcaaaagctgtgatgatagtcactggagaggcagcggagaaattggaaataaggaacaagattgcagagactcttttataaacttcattggaaaggaattaatattttggaggcctgcccagtagatagtgatgtatccattaaccttacgctcgaccaatcctgccgtgctatttggcacatcacaaaactgtgttcttaggcccttctgcaa

SEQ ID NO: 13681 - DNA, 578 bp, Homo sapiens
  MAP TO CHR16.3; EXPRESSED IN FETAL LIVER, SIGNAL = 0.86; NT HIT: gi14775551, EVALUE 2.00e-83; EST_HUMAN HIT: AV709774.1, EVALUE 4.00e-83; SWISSPROT HIT: O95822, EVALUE 7.00e-26
ttgctggaagacaccagatgagccccctgattgcagcactgacggcttcacagagatcccaaggaaagaaaagacagtgttcaacaccaagcgtttgattaggtttcacgttaaaatctgcatgaatccttccccggagcctcacaaactccttttaaaactggggttaaaactggagcacaattttgtgtgtaaaatggtcattcactgtagttcctctcagtgggtgctgtttctcatgaaaatgactttctttgaattttccagaagagtccattaaagctctatttaaagaacttgtttgacttagacgaatagtatgaataggagtcagcagccgttgcttgtgaattatgcatttgtcttgtctctttataaattccgccccagggctgaggctgtgcatcctgtaaaaaactggatggacatgaagcgccgcgttgggccctacagaaggtgttacttcttttctcactgttcgacccctggggagcccctggtcgttttgcacgtggcactgactggtgacatctccagcaacatccaggtacctgcgatggtcaattcgggacaagatg

SEQ ID NO: 13682 - DNA, 577 bp, Homo sapiens
  MAP TO CHR18.3; EXPRESSED IN FETAL LIVER, SIGNAL = 2.7; SWISSPROT HIT: P42587, EVALUE 7.30e+00; EST_HUMAN HIT: BG760457.1, EVALUE 0.00e+00; NT HIT: gi14773376, EVALUE 0.00e+00
tcctcaaacctaacgatgccgcgggaactgaggagccgaatgaaactgcacagtagaaccgcagcgaagccgaagcgttagcccggaacgagggcggactggaaagccggagcggggccgagcgagccgccccaaaaggctgccgcttcatcccagcgaaaaccgccggccaggccaagcgcggcgagggaagaggagagacggctccggcagcggaaccgcccgacgctggagaagacaaaccggccgtggagtggtgcctggaggagctggtcttcggcgatgtcgaggacgacgaggacacgctgctgcggcgtctgcggggtccgtgggttcaaggacatgaagacttgggagactcagaagcggagaatgaagcaaaaggtaattgtgcacctcaaaagaagccaatttgggtggatgaagaagatgaagatgaggaaatggttgacatgatgaacaatcggtttcggaaagataatgatgaaaaatgctagtgaaagtaaactttagaaagacaaacttaagaagcgactttaagaagaattccagcatgccgtgggaggagtacctgcct

SEQ ID NO: 13683 - DNA, 507 bp, Homo sapiens
  MAP TO CHR18.3; EXPRESSED IN FETAL LIVER, SIGNAL =   1
tggtcatttcctaatccattgaatgtttttttttcagggtggactataaacaaagaataggatgttttgaaaaaagtgacaccttaatgtgtcagccttcctgctgacagagtgttttcatgtacatcctcttacctgatcctcccaacggctctgggaagtggataaatgacgaacataatcaggatatgggcagttatgattaggggctcccactcatggaatttgaggacaaggcctctgaaaatgaagaatggttgaaagtagacacttacagaaataacccatactaaaatgtaaatatatttctatggagacctgaaagctacccaagatcaatcaaagtaattatagtgtatccttaggactagaatgtacctgaggaaagctgcacttttgccaattatagagtaatataactgtctgaaagaaggatgttttagtggaaggactgttaaatttgaagggaaccaaagaataagactttatccacattgtttagcaaaa

SEQ ID NO: 13684 - DNA, 586 bp, Homo sapiens
  MAP TO CHR18.3; EXPRESSED IN FETAL LIVER, SIGNAL = 0.93; EST_HUMAN HIT: C01663.1, EVALUE 2.10e-01; NT HIT: D23691.1, EVALUE 5.60e-01; SWISSPROT HIT: P51665, EVALUE 7.40e+00
ccccttctactcctgggaagagataagatatgcacttggtcactactaaaaagtaggaagcactgtattatattagaaagattcttatatgggagtaaacaaaatccaagccttctcctcaagggctaactggatgttcctgtatcaacatcaatattgaagacaattctgcttcaatgtaaaggggtacaggacagtctactgtgacctacactcagagggtctttgatgtccacactgtcaatgttatacaaccgagctattcctcaaatcttaggaattctacttctgaggcttcctctggcactctctttcacttccttcagaatatgatggcagtgcatgctgatctcctcatttccatccttcttgatggtcagggcacacttaacacttactcctgttaggttattcagccaactggccacatatcattgtggctacacgtaatagggcattttcacatagctcaccagaatcccttttaggccagcctacctctgttccaacagaactctacatgactggctaagcccttatagcatatcaagtctgagcttcgaaaggattttcctagtttgggggc

SEQ ID NO: 13685 - DNA, 594 bp, Homo sapiens
  MAP TO CHR16.3; EXPRESSED IN FETAL LIVER, SIGNAL = 0.84; EST_HUMAN HIT: R64304.1, EVALUE 2.10e-01
tggtctgcctttgttttgtgcacagttgaaaatgcctaagcaaatcttttctaggtttctgcacaacattgtgaataaaaacacctacttacctcttattccaaaaccctcctttgtctctgtcctgaaactccattgcttgcagaatagacgaggtggttgaaaatctgtctgtcaaatctgtgagagaaaactggatttatttgcagtagttgaggatggggaaacaagcaaaatatttagttccatgggccaggcaaagttctagcattgctctgcaatgacatttaaaacccttagcagtcaccatatgatgtgcttgattggtcttctatctacctactcacttctttattctccctttactactctgtagcataagtgttgctatgcacagttaactggtctccaagattcccttcccacacggtggccctttgttttccagtgaagcctcctaccttgtcgattgtatatctgtttacattcacaccgttcttagcattctgcggagagccaagcactgctcttgctaccagggaacaggtgtgggtagaatctgttttgaaaaaatgcacagtgaagatggaacca

SEQ ID NO: 13686 - DNA, 565 bp, Homo sapiens
  MAP TO CHR19.3; EXPRESSED IN FETAL LIVER, SIGNAL = 4.8; SWISSPROT HIT: P13284, EVALUE 2.00e-44; EST_HUMAN HIT: BF843472.1, EVALUE 0.00e+00; NT HIT: gi14766190, EVALUE 1.00e-97
attccacctggcaagttctggaaggcgtgcaagatgaattgcgtatcacagccccctttctacaagactaccaagtggggttgagagaagtggggaactgcccagggctacacctgcctcccacgccttcctaatccacagacaggcaatctatacctgcgggggcccctgaagaagtccaatgcaccgcttgtcaatgtgaccctctactatgaagcactgtgcggtggctgccgagccttcctgatccgggagctcttcccaacatggctgttggtcatggagatcctcaatgtcaccctggtgccctacggaaacgcacaggtgtgtgggcgctggggaaactgaggcacgtgggcaggggagcaggggacccagcctaccagcaggctctcaccctgctgccttgcaggaacaaaatgtcagtggcaggtgggagttcaagtgccagcatggagaagaggagtgcaaattcaacaaggtggaggtgagcggccccagggccccacactggggtgggggaaaactgtcccacgtacaggaggcaaatacgaggatgccagct

SEQ ID NO: 13687 - DNA, 599 bp, Homo sapiens
  MAP TO CHR14.3; EXPRESSED IN FETAL LIVER, SIGNAL = 0.99; NT HIT: AE007647.1, EVALUE 3.70e-02; SWISSPROT HIT: Q15800, EVALUE 7.70e+00; EST_HUMAN HIT: BF885097.1, EVALUE 1.00e-109
tgcaatgaaaggaaaatgagcactgtttatattcctaataaactacaaagtatttcagattaaaaaaacacactggtcagaagctcactgtgaaataccattatctttatattactggccaggctttgctaagctgtcaaatactgccctcaggtggcattaatggctcaatgcaagatgcattatacagcgttgttaatcatgctaacaaaaccatgttaaaacaaataaaatcaaaaccaaccttactgctgaaagttaatagtctatatatgtaaagttattttaactttgactcaagatagagaaaacagttaccataatcttgctttctgttatctgtccatagaggttccatatttaaatcatgagtggctactgtgaaacctttatgcacatttaaaatctcagaaaaaaacaaagtaattaaagtgtttcaaggacataacttgcattctatataaatgaatgcaaaactaaaagcctacagcatgtttggaaatggcttaaatgaaaagtgattaaattcactttgagatttaagaaataatttcctcatcactgatagttaactataatgttggtgctggctgtaggac

SEQ ID NO: 13688 - DNA, 571 bp, Homo sapiens
  MAP TO CHR16.3; EXPRESSED IN FETAL LIVER, SIGNAL = 0.84; SWISSPROT HIT: Q10836, EVALUE 4.20e+00; EST_HUMAN HIT: N94068.1, EVALUE 1.30e-02; NT HIT: AF421888.1, EVALUE 3.50e-02
tctgtcaatggcttaaggggattccacctctaagctgctgctaaagctttttcagtcttttttacatttgtagcattttggagcaatttgctggagtcaaagaaaacagtgaaatttccacaaccaacttcaaagcccccaaatcctgtatcggtggaggggagtctggtagcaacaccacaggggccgtttttcaaagaggtgtgtggagggacgtgccaggcatttttgccctgcatctgcgattgatgttaatggcaggcacgtgaccaaatccccatgtagttctttgaaaaatgcccctccctttcttcccccaacacttttggctgtgacaatgcagatgatacagaaaaatcctagaacagaggaaccgctgccacagctcaatgaacaataccggccttaattcaattaacgcacatacgtctcttttatctggtggagagctcagagcaaattcaggttgatcaggaggaggggctacctggacggtttcacatttgaaaatgttttgcatttgaaaaatgaattctaggcagaagtggcttcagaggagggaaatatgcca

SEQ ID NO: 13689 - DNA, 540 bp, Homo sapiens
  MAP TO CHR19.3; EXPRESSED IN FETAL LIVER, SIGNAL =  40; SWISSPROT HIT: P81172, EVALUE 1.00e-14; EST_HUMAN HIT: BG568102.1, EVALUE 1.00e-112; NT HIT: AF309489.1, EVALUE 1.00e-112
cggcagagagaaaggacaacagacactctggtttggaaaacaaaagaaccagccattttattccaagacctatgttctggggcagcaggaataaataaggaagggaggggacgggggcagggcaggtaggttctacgtcttgcagcacatcccacactttgatcgatgacagcagccgcagcagaaaatgcagatggggaagtgggtgtctcgcctccttcgcctctggaacatgggctgtgggaaggaagggaatgtgagcagggaaccggccttagcatggggagggagcagggggctaggaaaggcatcactgttgcgctcaccatccagctggccctggctccagctctgtcctggggttgcagctctgcaagttgtcccgtctgtgaaagcagaagggggtgcagaggatggcagggggcccagtggacctctgagactggctcccggcaacctgctcctctccaagtggtttaaacccagagctcaaatggactcttaggaggggccttgctttcttgcttctgctcaccttcc

SEQ ID NO: 13690 - DNA, 533 bp, Homo sapiens
  MAP TO CHR14.3; EXPRESSED IN FETAL LIVER, SIGNAL = 0.85; SWISSPROT HIT: P53214, EVALUE 4.40e-01; EST_HUMAN HIT: BG776973.1, EVALUE 0.00e+00; NT HIT: AF151044.1, EVALUE 0.00e+00
gtgtcggtgattttgctgtgaaaaaccactagaaatgtttttagatagtatttttcctaacaattgttagctagtgttttgtactaaggagcaattgtaaggcatagctaattttaatcaaatgtagtagtttgaatgtctttctataaacaaattttataactgcttttttttttttttacagaatggaaacagactgtaatcccatggagctaagcagtatgtcaggatttgaagaaggttcagagctgaacggttttgaaggaactgacatgaaagacatgaggctcgaagctgaagcagttgtaaatgatgttctctttgctgttaacaacatgtttgtctcgaaaagcctgcggtgtgcggatgatgtggcctatatcaatgtggaaacaaaggaaagaaacagatattgcctagaactcactgaagcagggctcaaggtaactcacttttccttttagaaaaaaaaattatttatgtctttaccactttatcaaaaagaggggtagtggggaggggaagagtgttaa

SEQ ID NO: 13691 - DNA, 575 bp, Homo sapiens
  MAP TO CHR14.3; EXPRESSED IN FETAL LIVER, SIGNAL = 0.95; NT HIT: gi14751080, EVALUE 4.00e-85; SWISSPROT HIT: P52067, EVALUE 3.20e+00; EST_HUMAN HIT: AI630305.1, EVALUE 1.00e-119
ttgctcaggtgcagtctttgcagttgatggatttgcatgaaaggacacgtttagggaaacctgcttatagagctgaaataaaaaaattttggtgtaatattttaaataatattgtggataggctatggattcatatctagcatgagggaagttctagcacagagcacatttcattgaggaagctcagtattgagcattcaatatgtccttactaaatactatgttgatctgctgtgaaacttcttgagaactccctgaacaagagatgagtagatacttgggcccaggttgtgggctggagctttccatctccatggtctgagcctgctggaaactgtctttctctggcaggattaactatgaggagagcatgatggtgcgtttgagcgtcagtaagcgagagaaaggacggcgaaaacgagcaaatgtcatgagctcacaacttcattcccttacacacttcagtgacatcagtgctttgacagggggaactgttcatcttgatgaggtgaggttgagatatggttgtagtaggatgtgactttcatgctttcagcaaaatgtatgtggggctt

SEQ ID NO: 13692 - DNA, 505 bp, Homo sapiens
  MAP TO CHR16.3; EXPRESSED IN FETAL LIVER, SIGNAL = 1.1; NT HIT: AJ296920.1, EVALUE 3.10e-02; EST_HUMAN HIT: BI561343.1, EVALUE 2.80e+00; SWISSPROT HIT: Q9WV08, EVALUE 7.00e-01
tgtggccttctgttactcccatatccacaactcacaggaggccacaatagaaagcagttctcacatcaacaagcatttgacctcacaggactcagggctgccacgatcagcagcaggggcgctggggaaactgcagtataggcacatacttcttgctgagtaactgtcagctttccttggtgcagattcatcagcttctatgaggcagtaaaagtgaactctgctgcgactcaccttgtgggcttcccggttctcctggcaactgttcagttatggaacctgctgcgtcatagccccaggctgcgggtcatcagcaggacactgagccgagcctgggacgaggtggtgggctttctgctgatcatcctaatcctgctgacaggctatgccattgccgtaagcccccacgttgctgtctctccttctccgtgtgctgtggtcttggaatcgcatcgcttcccatagaaatggtcacaacacagaaacccgaggtggtacagtagga

SEQ ID NO: 13693 - DNA, 541 bp, Homo sapiens
  MAP TO CHR8.3; EXPRESSED IN FETAL LIVER, SIGNAL = 0.97; EST_HUMAN HIT: AV662131.1, EVALUE 1.00e-119; SWISSPROT HIT: P00918, EVALUE 6.00e-26; NT HIT: M77180.1, EVALUE 0.00e+00
tcacctcattttagtggcagcagtctcactttaaatactgggtgtgatcagctaatgacttaatggggaatgtaagggatcattttagataaaaggccaagatgaaaaatggacatgtgaaaatagtttttttttttttttactacgacttgccacatattttcaagttgaatgtcttctgttaatttctctttattttgtttgccagtgaatatagaacctcttttttaaaaagtgtttttgaccatcagaggggagtatacctatttgtgtctgctgctctcctaccttcctcctactctgtcaatgtgatagtttgaagctgcgtatttgccttgttctagggcaagagtgctgacttcactaacttcgatcctcgtggcctccttcctgaatccttggattactggacctacccaggctcactgaccacccctcctcttctggaatgtgtgacctggattgtgctcaaggaacccatcagcgtcagcagcgagcaggtttgttttgtaatgacaggtctgtttacgggtggagcatt

SEQ ID NO: 13694 - DNA, 546 bp, Homo sapiens
  MAP TO CHR19.3; EXPRESSED IN FETAL LIVER, SIGNAL = 0.63; SWISSPROT HIT: P15498, EVALUE 6.00e-29; EST_HUMAN HIT: AL557286.1, EVALUE 0.00e+00; NT HIT: AF030201.1, EVALUE 0.00e+00
cctctcagggcgacagttacaggcaaagaagaggaagtggtagcactagctgtcgctccacaggcgagcagggcaggcgtgcgggcgggtgggtggtggaggctgcgagggtgcacggccggccctgggcaggcggtagccatggagctgtggcgccaatgcacccactggctcatccagtgccgggtgctgccgcccagccaccgcgtgacctgggatggggctcaggtgtgtgaactggcccaggccctccgggatggtgtccttctgtgtcagctgcttaacaacctgctaccccatgccatcaacctgcgtgaggtcaacctgcgcccccagatgtcccaggtgagccctccgcgggcaggtgtgctgagggttggagacgggggtcctccccggggctgacagtcgaggggctgacgtgctgctccacctctgggcctgcaaaggagagggaatatgcttacaggtccagggctggcccagggggtggtcacaatctgagattctggggtggcctccccaagcttaacaggctccctgtgt

SEQ ID NO: 13695 - DNA, 556 bp, Homo sapiens
  MAP TO CHR1.3; EXPRESSED IN FETAL LIVER, SIGNAL = 0.61; SWISSPROT HIT: O75381, EVALUE 5.00e-19; NT HIT: AF107564.1, EVALUE 8.00e-71; EST_HUMAN HIT: BF127541.1, EVALUE 3.00e-68
ggagaattgcagtaccgagcgacttcaaaagcagcaataaactcaaggataaattaaggaaattgaatgagccacatttggaagcagtgttgaggctaatattctgtcgcttaaggttaaattgcaactgagagaggttccggagaatctgaaatcggggaggcaacttactaggatgcgaggcattctgtggctgtaaaggtctttgctcagtgaagattctgttgcagctatggacactgacaaaaggtactcacctgcaatgatgtcctcttctccccagggctgacagatgaagagattgatatggccttccagcagtcgggcactgctgccgatgagccttcgtccttgggcccagccacacaggtggttcctgtccagccccctcacctcatatctcagccatacagtaagtcacccgctcaaactcctgcttaaccttgattgggattcaggactctggccaaagggcagtgttctgtatctcccagacttagcaaaccaggagaaactgggagcagcagaaagctcttgggtttttcccaaggaatgt

SEQ ID NO: 13696 - DNA, 539 bp, Homo sapiens
  MAP TO CHR1.3; EXPRESSED IN FETAL LIVER, SIGNAL = 1.8; SWISSPROT HIT: P32020, EVALUE 3.00e-20; NT HIT: U11311.1, EVALUE 2.00e-96; EST_HUMAN HIT: BG493290.1, EVALUE 1.00e-67
ttgcttgaggagaaagccagagaaatggacttaatgtaaccccagtgttatttttctttccaggaaggggaacagtttgtgaagaaaatcggtggtatttttgccttcaaggtgaaagatggccctgggggtaaagaggccacctgggtggtggatgtgaagaatggcaaaggatcagtgcttcctaactcaggttagtttgggaatgacttcattctaggagcactgacgagtttacgaaggctgtcagctgggaaaatgggggtctgctttactgttcccaaaaaggactggcttttaatgttaaagaaccagtaaattccagggaacaggaacaggtcaaagccacctcctcccaaggatttggaggctccatcacagagttgccaatcttaggctttggaattaggcaaacttgggttggagtcccatccatgccattcacataatgtgaccttgaacaagttatttaactttctgagactcagttttctcttctgtaaatgggcttaataaatggccccttttcataaggttgg

SEQ ID NO: 13697 - DNA, 503 bp, Homo sapiens
  MAP TO CHR11.3; EXPRESSED IN FETAL LIVER, SIGNAL = 0.4; NT HIT: Y08409.1, EVALUE 0.00e+00; EST_HUMAN HIT: BG740485.1, EVALUE 0.00e+00; SWISSPROT HIT: Q92748, EVALUE 7.00e-54
taaccaagcgttaccccaagaactgcctgctgaccgtcatggaccggtatgcagccgaggtgcacaacatggagcaggtggtgatgatccccagccttctgcgggacgtgcagctgagtgggcctgggggccaggcccaggctgaggcccctgatctctacacctacttcaccatgctcaaggccatctgtgtggatgtggaccatgggctgctgccgcgggaggagtggcaggccaaggtggcaggcagcgaagagaatggaaccgcagagacagaggaagtcgaggacgagagtgcctcaggagagctggacctggaagcccagttccacctgcacttctccagcctccatcacatcctcatgcacctcaccgagaaagcccaggaggtgacaaggaaataccaggaaatgacgggacaagtttggtagaccttggacactagggaaggtaatggtggccatgctggtgggtgtgagtctacaaagggacattccaggaga

SEQ ID NO: 13698 - DNA, 540 bp, Homo sapiens
  MAP TO CHR1.3; EXPRESSED IN FETAL LIVER, SIGNAL = 0.65; SWISSPROT HIT: O35625, EVALUE 1.00e+00; EST_HUMAN HIT: AA021348.1, EVALUE 0.00e+00; NT HIT: U73192.1, EVALUE 0.00e+00
tggtcagaagtcaccagcagaaatcaagcttcacagtggcaaaccctggcttctttcaacagagattggtagaaaccctaggatatgttgatatcagattcctgtatttctgaaagcacagaccacaaagtgaccatcagagagagtcttgcctttgggaacttgctagatggaaaggtaacagagggagctccagcctcaagtcaccaaacttcatggtggtggtgggaggtagggggcagtctatccttccaaccacatggtcctcctaatgtgagtatccaagcatggctgaggccttctaagccacttcagcctaatcccactctttcccccatcctggcttaagggaggtatgtgtattggggcagaagctggggaagtggaaaggggacagtgggaggcgaacctggactccagttggcctaagctaccaacaggccactgggttaaagaagagggagtggaggatgggtgcttcgggggatctccagtaaacccgggtagtattccttaccagggcattggaagagaggaaaa

SEQ ID NO: 13699 - DNA, 597 bp, Homo sapiens
  MAP TO CHR15.3; EXPRESSED IN FETAL LIVER, SIGNAL = 0.52; EST_HUMAN HIT: BF036136.1, EVALUE 4.00e-80; NT HIT: AF068760.1, EVALUE 2.00e-80; SWISSPROT HIT: O60566, EVALUE 9.00e-28
gctttctcctctgccaaaatcagtttttattctaattggattgttacctcctgttctctttccagcttatcctctttccagaatttgttgttattgtgtcttttatagtagatttatgcctttaaaaatatctctttattatttctctatcagaagggctggaaggaatgtgtttcaacctgccagccataaccatagacttaactgaacttatttttaaaatacaatgtcttacaggtatcttctcaacctgtcccatgggacttttatatcaacctcaagttaaaggaacgtttaaatgaagattttgatcatttttgcagctgttatcaatatcaagatggctgtattgtttggcaccaatatataaactgcttcacccttcaggtctgtaatactaaaaacataatttaaagtcctgaagtagagagatttgtgctccatttagcaaaggaatttagtacaaaattcctgtcaatcttctagaaatagaccaattcaagtataagttagaagcattgataattttctcgttattttgaccaaagatctctttggtatttttttaactttttttggtccgttgtcaagcataaa

SEQ ID NO: 13700 - DNA, 539 bp, Homo sapiens
  MAP TO CHR2.3; EXPRESSED IN FETAL LIVER, SIGNAL = 4.7; SWISSPROT HIT: Q61572, EVALUE 2.60e-01; EST_HUMAN HIT: AL563035.1, EVALUE 0.00e+00; NT HIT: gi15298025, EVALUE 0.00e+00
tgtcttcaaccaatcatgccaattttctcccctgcaggcttcctcagcaccttcaagcccccagcctacgaggatgtggttcaccgcccaggcacaccaccccccccttatactgtggccccaggccgccccttgactgcttccagtgaacaaacctgctgttcctcctcatccagctgccctgcccactttgaaggaacaaatgtggaaggtgtttcctcccaccagagtgccccccctcatcaggagggtgagcccggggcaggggtgacccctgcctccacacccccctcctgccgctatcgccgtttaactggcgactccggtattgagctctgcccttgtcctgcctccggtgagggtgagccagtcaaggaggtgagggttagtgccaccctgccagatctggaggactactccccgtgtgcactacccccagagtctgtaccgcagatctttcccatggggctgtcttccagtgaaggggacatcccataagtagttttgagagggtggatgggttacttgcccaccagaaa

SEQ ID NO: 13701 - DNA, 207 bp, Homo sapiens
  MAP TO AL023656.8; EXPRESSED IN HEART, SIGNAL = 3.6; EXPRESSED IN PLACENTA, SIGNAL = 2.1; EXPRESSED IN BONE MARROW, SIGNAL = 1.4; EXPRESSED IN LUNG, SIGNAL = 1.9; EXPRESSED IN ADULT LIVER, SIGNAL = 1.9; EXPRESSED IN HELA, SIGNAL = 1.6; EXPRESSED IN BRAIN, SIGNAL =   2; EXPRESSED IN FETAL LIVER, SIGNAL = 1.8; SWISSPROT HIT: Q9P2J3, EVALUE 3.00e-05; EST_HUMAN HIT: BI915330.1, EVALUE 1.00e-105; EST_HUMAN HIT: AA251503.1, EVALUE 7.30e-01; NT HIT: gi16161981, EVALUE 1.00e-106; SWISSPROT HIT: Q04652, EVALUE 2.00e-03; NT HIT: gi11422501, EVALUE 4.90e-01
aataagtggataagccgtagccccatgctgcagagaagggtctaccattccatggctgctgtacaaaggaagctttatgttcttggaggcaatgacctagactacaataatgaccggatccttgtgcgccatatagattcttacaacatagacactgaccagtggacacgttgtaatttcaacctgctgactggcaagtacctttga

SEQ ID NO: 13702 - DNA, 79 bp, Homo sapiens
  MAP TO AL096794.3; EXPRESSED IN FETAL LIVER, SIGNAL = 0.88; EXPRESSED IN BONE MARROW, SIGNAL = 0.89; EXPRESSED IN PLACENTA, SIGNAL =   1; EXPRESSED IN BRAIN, SIGNAL =   1; EXPRESSED IN LUNG, SIGNAL = 0.96; EXPRESSED IN ADULT LIVER, SIGNAL = 0.88; EXPRESSED IN HELA, SIGNAL = 0.78; NT HIT: U32791.1, EVALUE 1.60e-01; EST_HUMAN HIT: BF350616.1, EVALUE 9.40e-01
acccttacaaatgaaggtaagtttgaagggaaaaacagtgggaaggaccttctatggtggcttctccctttctctgttt

SEQ ID NO: 13703 - DNA, 208 bp, Homo sapiens
  MAP TO AL050339.4; EXPRESSED IN FETAL LIVER, SIGNAL = 3.2; EXPRESSED IN LUNG, SIGNAL = 3.4; EXPRESSED IN HELA, SIGNAL = 2.9; EXPRESSED IN PLACENTA, SIGNAL = 3.7; EXPRESSED IN HEART, SIGNAL = 3.3; EXPRESSED IN ADULT LIVER, SIGNAL = 3.8; EXPRESSED IN BONE MARROW, SIGNAL = 3.6; EXPRESSED IN BRAIN, SIGNAL = 3.5; EST_HUMAN HIT: T87947.1, EVALUE 1.00e-35; SWISSPROT HIT: P31792, EVALUE 3.00e-08; NT HIT: AB030652.1, EVALUE 1.90e+00; NT HIT: AY007704.1, EVALUE 2.90e+00
cacaaggctcttccattatcaatgcctccctaacaaaggccctccttaaggttgctttcctgccagccaaggctggagtcattcattataaagggcaccagaaacctactgatcttattgcaaaaggaaatgcctatgccaacaggacggcaaaagaaatagctgatgcctccacatccactaatattccagccctcactccagaggt

SEQ ID NO: 13704 - DNA, 246 bp, Homo sapiens
  MAP TO AL049647.7; EXPRESSED IN BONE MARROW, SIGNAL = 0.53; EXPRESSED IN ADULT LIVER, SIGNAL = 0.49; EXPRESSED IN BRAIN, SIGNAL = 0.4; SWISSPROT HIT: P34240, EVALUE 8.30e+00; EST_HUMAN HIT: BE904308.1, EVALUE 5.60e-02; NT HIT: AF007560.1, EVALUE 5.00e-01
cagccccaggcaccacgctcctctctccccagagccttccccaagaactgaatccccatgtggaaaatcagccacccaccttgattcagatgactatgatcttcattcatctcctgagcatgattccagtattccccacgaccactggaggtttccacctgaatgttcttacactcgttactcagagtggctgaaatgtagataatcaaatatcttccagtgaaatatagctcccttttaaacgta

SEQ ID NO: 13705 - DNA, 78 bp, Homo sapiens
  MAP TO AL035457.13; EXPRESSED IN BONE MARROW, SIGNAL =   2; EXPRESSED IN PLACENTA, SIGNAL = 2.7; EXPRESSED IN LUNG, SIGNAL = 2.4; EXPRESSED IN ADULT LIVER, SIGNAL = 3.4; EXPRESSED IN HELA, SIGNAL = 0.96; EXPRESSED IN FETAL LIVER, SIGNAL = 2.4; EXPRESSED IN HEART, SIGNAL = 2.1; EXPRESSED IN BRAIN, SIGNAL = 2.4; SWISSPROT HIT: O24160, EVALUE 6.30e+00; EST_HUMAN HIT: BE855780.1, EVALUE 5.30e+00; NT HIT: AL116780.1, EVALUE 5.20e-01; EST_HUMAN HIT: AI819806.1, EVALUE 2.50e+00
gtgaaaggtgctataagtgggttccaggatacagaccttcctaaaggcaccctggagaatcttcccaaggtgaagctt

SEQ ID NO: 13706 - DNA, 93 bp, Homo sapiens
  MAP TO AL023656.8; EXPRESSED IN FETAL LIVER, SIGNAL = 5.1; EXPRESSED IN BONE MARROW, SIGNAL = 4.8; EXPRESSED IN HEART, SIGNAL = 3.6; EXPRESSED IN BRAIN, SIGNAL = 4.6; EXPRESSED IN PLACENTA, SIGNAL = 5.5; EXPRESSED IN ADULT LIVER, SIGNAL = 3.9; EXPRESSED IN HELA, SIGNAL = 3.8; NT HIT: AF227979.1, EVALUE 7.70e-01; NT HIT: AY039544.1, EVALUE 1.10e+00; EST_HUMAN HIT: AW857663.1, EVALUE 1.10e+00; EST_HUMAN HIT: BI862088.1, EVALUE 1.70e+00; SWISSPROT HIT: P41361, EVALUE 9.50e+00
atgacataggtattatcatacttgttttgctgagtatcagtatgttgataaaactgagtatcagcatgttggtttttcataaatgcacaaata

SEQ ID NO: 13707 - DNA, 134 bp, Homo sapiens
  MAP TO AL049647.7; EXPRESSED IN FETAL LIVER, SIGNAL = 0.63; EXPRESSED IN BONE MARROW, SIGNAL = 0.69; EXPRESSED IN BRAIN, SIGNAL = 0.69; EXPRESSED IN PLACENTA, SIGNAL = 0.86; EXPRESSED IN LUNG, SIGNAL = 0.84; EXPRESSED IN ADULT LIVER, SIGNAL = 0.95; NT HIT: gi11431313, EVALUE 7.60e-02; NT HIT: gi16156520, EVALUE 1.10e-01; EST_HUMAN HIT: AW368072.1, EVALUE 7.70e-02; SWISSPROT HIT: P54643, EVALUE 1.80e+00
ttgctgtttattgagtaagctttgtcagtctgtgctaggtctgtttcacaatccactctccatctgccctggtcaaactcttctccattgtgtatctgcttcttatatatcaccagagacaatttctccctcag

SEQ ID NO: 13708 - DNA, 93 bp, Homo sapiens
  MAP TO CHR22_227.0; EXPRESSED IN BONE MARROW, SIGNAL = 1.7; EXPRESSED IN HELA, SIGNAL = 2.5; EXPRESSED IN BRAIN, SIGNAL = 1.5; EXPRESSED IN FETAL LIVER, SIGNAL = 1.4; EXPRESSED IN HEART, SIGNAL = 1.1; EXPRESSED IN LUNG, SIGNAL = 0.86; EXPRESSED IN PLACENTA, SIGNAL = 0.65; EXPRESSED IN ADULT LIVER, SIGNAL = 0.83; NT HIT: gi13655188, EVALUE 8.00e-45; EST_HUMAN HIT: H55243.1, EVALUE 1.00e-44; SWISSPROT HIT: P21179, EVALUE 4.70e+00
gcagtccacggatattttgatccaagagagaattactctgacaaggagtccctgtcgttcatgatagacacaatgaaatccaccctcaaagaa

SEQ ID NO: 13709 - DNA, 101 bp, Homo sapiens
  MAP TO AL139141.1; EXPRESSED IN BRAIN, SIGNAL = 0.51; EXPRESSED IN PLACENTA, SIGNAL = 0.77; EXPRESSED IN LUNG, SIGNAL = 0.64; EXPRESSED IN FETAL LIVER, SIGNAL = 0.67; EXPRESSED IN BONE MARROW, SIGNAL = 0.61; SWISSPROT HIT: O75083, EVALUE 2.70e+00
ctgggttggtgcccatagattatatcatatctcaccactggaatggtcacatcatcatacagcataaatgtaattaatgtccctttgtctgagatggccat

SEQ ID NO: 13710 - DNA, 261 bp, Homo sapiens
  MAP TO CHR22_19.0; EXPRESSED IN BONE MARROW, SIGNAL = 1.8; EXPRESSED IN BRAIN, SIGNAL = 1.8; EXPRESSED IN HELA, SIGNAL = 1.3; EXPRESSED IN HEART, SIGNAL = 1.8; EXPRESSED IN FETAL LIVER, SIGNAL = 1.8; EXPRESSED IN LUNG, SIGNAL = 1.9; EXPRESSED IN PLACENTA, SIGNAL = 1.8; NT HIT: gi14778885, EVALUE 2.00e-29; EST_HUMAN HIT: BF748444.1, EVALUE 1.00e-104; SWISSPROT HIT: P42498, EVALUE 2.30e-01
cagagcactgggcccctgcgaaaacaggcggctattcacgacactgcaaaagatgttagactgctggaggctcagtccgcctccaggttccgagtgccgcagagaacacaggccaggttgattcagggcaagagatttgaggagacagctagggatgtcgacacaaggcccagaaaggtagcctgggctcatacattctcctcccgtggaaaaacgaagggcaaagacctcttcttcttttccctgaagctcaaactgtga

SEQ ID NO: 13711 - DNA, 162 bp, Homo sapiens
  MAP TO AL138995.1; EXPRESSED IN BRAIN, SIGNAL = 1.3; EXPRESSED IN PLACENTA, SIGNAL = 1.5; EXPRESSED IN LUNG, SIGNAL = 1.3; EXPRESSED IN ADULT LIVER, SIGNAL = 1.4; EXPRESSED IN HELA, SIGNAL = 0.67; EXPRESSED IN FETAL LIVER, SIGNAL = 1.8; SWISSPROT HIT: Q92243, EVALUE 5.80e+00; NT HIT: gi8924199, EVALUE 9.00e-03; EST_HUMAN HIT: AW057541.1, EVALUE 2.10e-01
tcagctttggccattgttgagtttcagcatgttggctcctgtgtccttttgacatgccccattgggcacttccttgatttttagcagcatatgatgttttaggctcaccttgtattttccctgtctcagcctgcaatcaaccactttttcacagagcctcat

SEQ ID NO: 13712 - DNA, 162 bp, Homo sapiens
  MAP TO AL138478.1; EXPRESSED IN PLACENTA, SIGNAL = 0.53; EXPRESSED IN BONE MARROW, SIGNAL = 0.47; EXPRESSED IN LUNG, SIGNAL = 0.51; EXPRESSED IN ADULT LIVER, SIGNAL = 0.39; EXPRESSED IN BRAIN, SIGNAL = 0.53; EXPRESSED IN FETAL LIVER, SIGNAL = 0.45; SWISSPROT HIT: P00511, EVALUE 6.70e-01; NT HIT: X62025.1, EVALUE 5.60e-01; EST_HUMAN HIT: BE904412.1, EVALUE 2.10e-01
ttagttcatggagcgttgtggcagtgactgacaggcctgtggtacaggggtcagcccatggtgggcactcgggaaacagtaaccaaaaagcccccaacagcaacgtggctgatttagctggttcatctggggtccagcaggcttccattctggtgggagact

SEQ ID NO: 13713 - DNA, 106 bp, Homo sapiens
  MAP TO AC018667.5; EXPRESSED IN BONE MARROW, SIGNAL = 2.4; EXPRESSED IN BRAIN, SIGNAL = 2.2; EXPRESSED IN HELA, SIGNAL = 0.88; EXPRESSED IN HEART, SIGNAL = 1.9; EXPRESSED IN PLACENTA, SIGNAL = 2.5; EXPRESSED IN LUNG, SIGNAL = 2.4; EXPRESSED IN FETAL LIVER, SIGNAL = 2.2; EXPRESSED IN ADULT LIVER, SIGNAL = 2.2; NT HIT: AF389851.1, EVALUE 3.40e-01; EST_HUMAN HIT: BE872955.1, EVALUE 5.00e-01
atgtgggctcacattaatcacaacggtcttcataagagggaggagcagcatcataatcagaagagacgtgatgatgaaaatagattccagagtgatgcagccatga

SEQ ID NO: 13714 - DNA, 127 bp, Homo sapiens
  MAP TO AL137861.1; EXPRESSED IN HELA, SIGNAL = 0.5; EXPRESSED IN FETAL LIVER, SIGNAL = 0.79; EXPRESSED IN BONE MARROW, SIGNAL = 0.83; EXPRESSED IN PLACENTA, SIGNAL =   1; EXPRESSED IN LUNG, SIGNAL = 0.99; EXPRESSED IN BRAIN, SIGNAL = 0.74; EXPRESSED IN ADULT LIVER, SIGNAL =   1; EST_HUMAN HIT: BG764597.1, EVALUE 3.00e-40; SWISSPROT HIT: O75820, EVALUE 3.00e-08; NT HIT: gi7305646, EVALUE 2.00e-06
gggttggtgtcctttgaagatgtggctctgcacttcacctgggaggagtgtcagggcctggatgatgctcagaggaccctctacagggacgtgattgtggagacctacagcagcctggtatcattgg

SEQ ID NO: 13715 - DNA, 333 bp, Homo sapiens
  MAP TO CHR22_212.0; EXPRESSED IN HELA, SIGNAL = 3.3; EXPRESSED IN FETAL LIVER, SIGNAL = 2.4; EXPRESSED IN LUNG, SIGNAL = 3.9; EXPRESSED IN BONE MARROW, SIGNAL = 2.8; EXPRESSED IN BRAIN, SIGNAL = 2.1; EXPRESSED IN HEART, SIGNAL = 1.8; EST_HUMAN HIT: BG498082.1, EVALUE 4.60e-01
gacacccacaaagaagggaaagagagagagagagaaaagaagaagaagaaggaggaggaggaggagaaggagaaggagaagaagaaggagaagaagaaggagaaggagaaggaggggaaggggaagaggaagaggaggaagaggaagaagatgaggaggaggaggaggagaaggaagaggaagaggaagaaaaacttgtctattttgaattacaggaatttctcatgcatctatttctctactaccctctctacttctttttaagtgaatgtgatttgaaacaaattattagcaatccaaggtgctgtgctgagaaaaatcacatagggatgt

SEQ ID NO: 13716 - DNA, 263 bp, Homo sapiens
  MAP TO CHR21_60.0; EXPRESSED IN HELA, SIGNAL = 3.4; EXPRESSED IN FETAL LIVER, SIGNAL =   2; EXPRESSED IN HEART, SIGNAL = 1.2; EXPRESSED IN LUNG, SIGNAL =   1; EXPRESSED IN BRAIN, SIGNAL = 1.8; EXPRESSED IN BONE MARROW, SIGNAL = 1.9; EXPRESSED IN ADULT LIVER, SIGNAL = 1.1; EXPRESSED IN PLACENTA, SIGNAL = 0.93; NT HIT: AL163278.2, EVALUE 0.00e+00; EST_HUMAN HIT: AU141905.1, EVALUE 9.00e-05; SWISSPROT HIT: P31387, EVALUE 4.10e-01
aaggtggccacggcgcattgctggagctgtgccccatgctccaactgtctctgcagccggctggggagggtgggaacatcaaggaaggctctctggaggaggtggtccctgagcttaacactgatgaatgagtaggagctacctccaatgcttttcacacatgaaggggtagatgaatcacttggagatctttcactaagcaggttcagattatcaggtcttgcagcaggagctgagaccccgggttgctcccaggtgatgcc

SEQ ID NO: 13717 - DNA, 154 bp, Homo sapiens
  MAP TO AC004845.2; EXPRESSED IN BRAIN, SIGNAL = 0.56; EXPRESSED IN BONE MARROW, SIGNAL = 0.57; EXPRESSED IN PLACENTA, SIGNAL = 0.66; EXPRESSED IN LUNG, SIGNAL = 0.59; EXPRESSED IN ADULT LIVER, SIGNAL = 0.64; NT HIT: gi8394518, EVALUE 5.30e-01; EST_HUMAN HIT: AI623779.1, EVALUE 5.00e-05
cctcatgatgcaggctcatgacaacagtgtcatcgtcaccatcatcatcatcatcatcatcatcatcatcatatcatcacagcaaatagttattgagcatctactctatgctggacaagtatactttgcatgttttacattactgagtccttaa

SEQ ID NO: 13718 - DNA, 252 bp, Homo sapiens
  MAP TO CHR21_64.0; EXPRESSED IN PLACENTA, SIGNAL = 0.75; EXPRESSED IN FETAL LIVER, SIGNAL = 1.2; EXPRESSED IN ADULT LIVER, SIGNAL = 0.68; EXPRESSED IN BONE MARROW, SIGNAL = 1.4; EXPRESSED IN HELA, SIGNAL = 3.7; EXPRESSED IN BRAIN, SIGNAL = 1.5; NT HIT: AF276513.1, EVALUE 0.00e+00; EST_HUMAN HIT: BI824247.1, EVALUE 0.00e+00; SWISSPROT HIT: P57071, EVALUE 1.00e-47
gtggacgccagagccggcctgcttcagcatgggcttgtccatcttcttggcatagaaggccgcataccacacgcgcagctcggtacccggggggatgtctctggaggtggtgaagtacacgtcgctgccgtgctggtaggccgtcaggttctggtgctcggcctccgccgctggccgcaccagcatcatccagttgcagtcatcctcgttggaggtgtcgaagcacacggggtgcccgtccttctggaacac

SEQ ID NO: 13719 - DNA, 233 bp, Homo sapiens
  MAP TO CHR22_105.0; EXPRESSED IN HELA, SIGNAL = 1.1; EXPRESSED IN PLACENTA, SIGNAL = 1.9; EXPRESSED IN FETAL LIVER, SIGNAL =   2; EXPRESSED IN LUNG, SIGNAL = 1.8; EXPRESSED IN ADULT LIVER, SIGNAL = 1.9; EXPRESSED IN BONE MARROW, SIGNAL = 2.1; EXPRESSED IN BRAIN, SIGNAL =   2; EXPRESSED IN HEART, SIGNAL =   2; NT HIT: Y19207.1, EVALUE 2.10e-01; EST_HUMAN HIT: BI561134.1, EVALUE 1.00e-101; SWISSPROT HIT: Q61789, EVALUE 3.60e+00
tcattcccagtgcttacacgtagaatttgtacattctgtctccacagccttaggatctgctggattagagcctgtttcccaggtaggaacgcttccacgagggcactcctgctggttgcaggaaggatacctctgctgagcctgaatctgcaaagaccaccaggttactctcagctcctcatactggtggaccagcaggccacaaaggaggggatacttgatcctgataaacg

SEQ ID NO: 13720 - DNA, 210 bp, Homo sapiens
  MAP TO AC021607.4; EXPRESSED IN LUNG, SIGNAL = 2.9; EXPRESSED IN PLACENTA, SIGNAL =   3; EXPRESSED IN ADULT LIVER, SIGNAL = 2.8; EXPRESSED IN BRAIN, SIGNAL = 2.6; EXPRESSED IN HELA, SIGNAL = 1.3; EXPRESSED IN FETAL LIVER, SIGNAL = 2.6; EXPRESSED IN BONE MARROW, SIGNAL = 2.9; NT HIT: AE006844.1, EVALUE 1.90e-01; EST_HUMAN HIT: AW517231.1, EVALUE 2.80e-01; SWISSPROT HIT: Q60115, EVALUE 2.40e+00
gatccttgaaagaagcaaagactaccctatcatggtcctaaataaatggaatttgcgggattatgacaataacccggtaattagtctgagccagcaatggaccaagttcatcattgaaatgtttccaaataggatgataaggacttcttggaagattaaacatagccatgagcccccaacaatgccaatccaggataagatgtttcaaag

SEQ ID NO: 13721 - DNA, 82 bp, Homo sapiens
  MAP TO AL136234.2; EXPRESSED IN PLACENTA, SIGNAL = 1.6; EXPRESSED IN LUNG, SIGNAL = 1.5; EXPRESSED IN ADULT LIVER, SIGNAL = 1.6; EXPRESSED IN BRAIN, SIGNAL = 1.6; EXPRESSED IN FETAL LIVER, SIGNAL = 1.6; EXPRESSED IN BONE MARROW, SIGNAL = 1.4; EXPRESSED IN HELA, SIGNAL = 0.89; EXPRESSED IN HEART, SIGNAL = 1.4; NT HIT: gi16162033, EVALUE 7.00e-08; SWISSPROT HIT: O88796, EVALUE 4.80e+00; EST_HUMAN HIT: BE065543.1, EVALUE 2.00e-06
cagacaccaaatctgctggcacattgatcttagtcttcttagcctccaggtctctgagaaattcccattgtttataaaccat

SEQ ID NO: 13722 - DNA, 158 bp, Homo sapiens
  MAP TO AL135783.6; EXPRESSED IN FETAL LIVER, SIGNAL = 0.55; EXPRESSED IN PLACENTA, SIGNAL = 0.62; EXPRESSED IN BRAIN, SIGNAL = 0.52; EXPRESSED IN LUNG, SIGNAL = 0.51; EST_HUMAN HIT: AU119513.1, EVALUE 9.00e-84; NT HIT: gi14765025, EVALUE 6.00e-84; SWISSPROT HIT: Q14155, EVALUE 1.00e-19
gttctcccatttaatgtgccttcccaccagcctccttcttcaactcgtgtgacgtaaatgatgtcccccttacaaactgacagttcatcctcattagtctgcttaaagttgaatcttgcttttactatcaactgatgacttccattttccgtcatctc

SEQ ID NO: 13723 - DNA, 125 bp, Homo sapiens
  MAP TO CHR21_62.0; EXPRESSED IN BRAIN, SIGNAL = 2.3; EXPRESSED IN FETAL LIVER, SIGNAL = 2.3; EXPRESSED IN PLACENTA, SIGNAL = 1.8; EXPRESSED IN LUNG, SIGNAL = 1.6; EXPRESSED IN BONE MARROW, SIGNAL = 2.6; EXPRESSED IN ADULT LIVER, SIGNAL = 1.7; EXPRESSED IN HELA, SIGNAL = 3.7; SWISSPROT HIT: P41479, EVALUE 4.60e-02; EST_HUMAN HIT: BI828599.1, EVALUE 9.50e+00; NT HIT: AF360214.1, EVALUE 6.50e+00
ctcgaacactgcgtgcagcgtgggggcacgtcggtgagagagagggggtgagagggaggggtgggcacgtcggtgagagggagggggtgagagggaggggtgacctcctccgggaagcttccttt

SEQ ID NO: 13724 - DNA, 126 bp, Homo sapiens
  MAP TO AL136162.4; EXPRESSED IN BRAIN, SIGNAL = 1.1; EXPRESSED IN FETAL LIVER, SIGNAL = 0.94; EXPRESSED IN PLACENTA, SIGNAL = 0.99; EXPRESSED IN LUNG, SIGNAL = 0.86; EXPRESSED IN BONE MARROW, SIGNAL = 0.75; EXPRESSED IN ADULT LIVER, SIGNAL = 0.85; SWISSPROT HIT: O15041, EVALUE 6.00e+00
ctagcgaatgatgacagcaatgacgaagcatttcatcagcttgaacacatccttcaccccagaatttccacctggtacccccacagaagagccctcacaatgtggttggaagagcagaggaaatga

SEQ ID NO: 13725 - DNA, 110 bp, Homo sapiens
  MAP TO AC017072.4; EXPRESSED IN FETAL LIVER, SIGNAL = 1.3; EXPRESSED IN HEART, SIGNAL = 1.4; EXPRESSED IN LUNG, SIGNAL = 1.7; EXPRESSED IN ADULT LIVER, SIGNAL = 1.3; EXPRESSED IN BONE MARROW, SIGNAL = 1.4; EXPRESSED IN HELA, SIGNAL = 1.4; EXPRESSED IN PLACENTA, SIGNAL = 1.9; EXPRESSED IN BRAIN, SIGNAL = 1.7; EST_HUMAN HIT: AA927155.1, EVALUE 3.00e-55; NT HIT: AF090135.1, EVALUE 3.60e-01
ctgctcctgggaattcatcactcgaagcttcatctgcttcaggtaggtggaggtgaggggcatgttgtaatcaataatcccagagaccagtggagatggaggctcgtttt

SEQ ID NO: 13726 - DNA, 173 bp, Homo sapiens
  MAP TO AL133330.5; EXPRESSED IN BRAIN, SIGNAL =   2; EXPRESSED IN HEART, SIGNAL = 1.7; EXPRESSED IN HELA, SIGNAL = 1.2; EXPRESSED IN PLACENTA, SIGNAL = 1.3; EXPRESSED IN FETAL LIVER, SIGNAL = 1.6; EXPRESSED IN BONE MARROW, SIGNAL = 1.9; NT HIT: AE005826.1, EVALUE 1.50e-01; SWISSPROT HIT: Q57893, EVALUE 4.40e+00; EST_HUMAN HIT: BG256166.1, EVALUE 2.20e-01
gagggattcaaatgaagcagaaggcaaggagattaatgatctcaaggggactggagagttttgccaagagctggctaaggaaatacattcaccatttcagaacgcatactacctccattctttgtttgacatttcctggtttagagcttcagattacttgctggagacatgtt

SEQ ID NO: 13727 - DNA, 142 bp, Homo sapiens
  MAP TO AC015930.3; EXPRESSED IN BONE MARROW, SIGNAL =   2; EXPRESSED IN HELA, SIGNAL = 3.9; EXPRESSED IN BRAIN, SIGNAL =   2; EXPRESSED IN HEART, SIGNAL =   2; EXPRESSED IN PLACENTA, SIGNAL = 4.3; EXPRESSED IN LUNG, SIGNAL = 2.5; EXPRESSED IN FETAL LIVER, SIGNAL = 2.9; EXPRESSED IN ADULT LIVER, SIGNAL = 3.1; NT HIT: AF084363.1, EVALUE 8.00e-03; SWISSPROT HIT: Q23495, EVALUE 2.00e+00; EST_HUMAN HIT: AA363053.1, EVALUE 1.10e-02
ctagagctgaaataaccatctgccacagattgttccacatcggttgtttgcttgtttgttttttaattctcagaaagaattcaaaaatggcattggcaaagaaagatgatttcagaaaaatgacccagtttccaacctgcat

SEQ ID NO: 13728 - DNA, 194 bp, Homo sapiens
  MAP TO AL133553.2; EXPRESSED IN BRAIN, SIGNAL = 1.6; EXPRESSED IN HEART, SIGNAL = 1.5; EXPRESSED IN HELA, SIGNAL = 0.94; EXPRESSED IN ADULT LIVER, SIGNAL = 4.2; EXPRESSED IN FETAL LIVER, SIGNAL = 1.8; EXPRESSED IN PLACENTA, SIGNAL = 1.8; EXPRESSED IN LUNG, SIGNAL = 1.8; EXPRESSED IN BONE MARROW, SIGNAL = 1.6; NT HIT: gi5031924, EVALUE 4.00e-61; SWISSPROT HIT: P21128, EVALUE 4.00e-09; EST_HUMAN HIT: BF724457.1, EVALUE 3.00e-47
agctttcctgtaaaggccgctgctttgagtccttcgagagagggagggagtgtgactgcgacgcccaatgtaagaagtatgacaagtgctgtcccgattatgagagtttctgtgcagaaggtaagcatcacagtaccaaccaatgcttctcagtacagccagatctgtgcacctaccttagcatcactgataat

SEQ ID NO: 13729 - DNA, 227 bp, Homo sapiens
  MAP TO AL118512.8; EXPRESSED IN FETAL LIVER, SIGNAL = 0.7; EXPRESSED IN BONE MARROW, SIGNAL = 0.72; EXPRESSED IN BRAIN, SIGNAL = 0.73; EXPRESSED IN PLACENTA, SIGNAL = 1.2; EXPRESSED IN ADULT LIVER, SIGNAL = 0.81; NT HIT: gi15296873, EVALUE 1.00e-86; SWISSPROT HIT: Q62234, EVALUE 4.00e-05
caggcacaatgagagtatttgtgttcagtttgatgggctgttcattcttgagccagctgaggtcaggaggtggaaaaccagagacctcacaggtcaaagagatgaaattgttcaccacgacggtaagattttcagatttaggaccaatgacacttggaggaactataatagtaaatatattaaaagtgaaagcaggtgttatcaacatatattcccatttactaaat

SEQ ID NO: 13730 - DNA, 132 bp, Homo sapiens
  MAP TO CHR22_127.0; EXPRESSED IN PLACENTA, SIGNAL = 0.48; EXPRESSED IN HELA, SIGNAL = 0.75; EXPRESSED IN BRAIN, SIGNAL = 0.77; EXPRESSED IN FETAL LIVER, SIGNAL = 0.61; EXPRESSED IN BONE MARROW, SIGNAL = 0.7; NT HIT: gi15600771, EVALUE 4.40e-01; SWISSPROT HIT: Q11177, EVALUE 7.80e+00; EST_HUMAN HIT: AI767268.1, EVALUE 1.60e-01
tgaatgccaaccgagcagaaaacatgaagaaaaccagaacaaggcatgtcataatccaattgcccaaaactactaatataaagaaaacatcagaagcatccagaggagaagagacaccctgcattacaaagg

SEQ ID NO: 13731 - DNA, 435 bp, Homo sapiens
  MAP TO CHR22_233.0; EXPRESSED IN BONE MARROW, SIGNAL =  19; EXPRESSED IN HEART, SIGNAL =  10; EXPRESSED IN LUNG, SIGNAL =  15; EXPRESSED IN BRAIN, SIGNAL =  15; EXPRESSED IN PLACENTA, SIGNAL =  16; EXPRESSED IN HELA, SIGNAL =  14; EXPRESSED IN FETAL LIVER, SIGNAL =  16; EST_HUMAN HIT: BG014868.1, EVALUE 1.00e-02; NT HIT: U07000.1, EVALUE 6.40e+00; SWISSPROT HIT: Q9Y2L8, EVALUE 2.20e+00
agccaagggaacccacggccaccccagctgcaggaacactgcctctgtcttccagtgggaagcctggcggtctaagaacagggtccgctgtggccgaacatcgccaagtgtccaaactacccgtgggactcacccggacactgcctggctcaggtccacacgtggctccctgtgctccgtccttgggcagcaaagcctggacaaccgacgcagaacagttcgactgcctgatcatgccacgggcctccatttccccagcagcggacatgaccacctctgctcagtatttctctgagaaggggaaactgaagccaaaacctgtgttcatggacagatgcactatggctgggatgctgcaggagggggtctcccttgggccccgtgtgcccacatgccagggctgggccctctgtgttgagtctgtgcaccaagaat

SEQ ID NO: 13732 - DNA, 171 bp, Homo sapiens
  MAP TO AL139021.1; EXPRESSED IN BONE MARROW, SIGNAL = 0.85; EXPRESSED IN PLACENTA, SIGNAL = 0.98; EXPRESSED IN ADULT LIVER, SIGNAL = 1.1; EXPRESSED IN BRAIN, SIGNAL = 0.75; EXPRESSED IN LUNG, SIGNAL = 1.2; EXPRESSED IN HELA, SIGNAL = 0.58; EXPRESSED IN FETAL LIVER, SIGNAL = 0.79; EST_HUMAN HIT: BG956938.1, EVALUE 1.00e-86; NT HIT: gi14753130, EVALUE 5.00e-57; SWISSPROT HIT: P45559, EVALUE 5.70e+00
ttagctgggtatctttgtgtaacagtttttggatctaacatagttgttttgattccacagtgtctcatgcgggagcctccatgtcatctgcttcatcagacactggaatgagtccctcatcatcatctcccccacaaaatgtacttgctgtagaatgcaggtgataaacat

SEQ ID NO: 13733 - DNA, 447 bp, Homo sapiens
  MAP TO AC012360.2; EXPRESSED IN HELA, SIGNAL = 0.87; EXPRESSED IN BRAIN, SIGNAL = 1.2; EXPRESSED IN FETAL LIVER, SIGNAL = 1.1; EXPRESSED IN HEART, SIGNAL = 1.2; EXPRESSED IN PLACENTA, SIGNAL = 1.6; EXPRESSED IN LUNG, SIGNAL = 1.5; EXPRESSED IN BONE MARROW, SIGNAL = 1.2; EXPRESSED IN ADULT LIVER, SIGNAL = 1.4; SWISSPROT HIT: P34992, EVALUE 6.00e-14; EST_HUMAN HIT: BI596421.1, EVALUE 9.70e+00; NT HIT: AF118266.1, EVALUE 0.00e+00
atggcctgcaacagcacgtcccttgaggcttacacatacctgctgctgaacaccagcaacgcctcagactcggggtccacccagttgcccgcacccctcaggatctccttggccatagtgatgctgctgatgaccgtggtggggttcctgggcaacactgtggtctgcatcatcgtgtaccagaggccggctatgcgctcggccatcaacctgctgctggccaccctggccttctccgacatcatgctgtccctctgctgcatgcccttcaccgccgtcaccctcatcaccgtgcgctggcactttggggaccacttctgccgcctctcagccacgctctactggttttttgtcctggagggcgtggccatcctgctcatcatcagcgtggaccgcttcctcatcatcgtccagcgccaggacaagctgaacccgcgcagggccaag

SEQ ID NO: 13734 - DNA, 193 bp, Homo sapiens
  MAP TO CHR22_215.0; EXPRESSED IN FETAL LIVER, SIGNAL = 1.6; EXPRESSED IN BONE MARROW, SIGNAL = 1.7; EXPRESSED IN BRAIN, SIGNAL = 1.6; EXPRESSED IN LUNG, SIGNAL = 0.89; EXPRESSED IN PLACENTA, SIGNAL = 0.84; EXPRESSED IN ADULT LIVER, SIGNAL = 0.77; EXPRESSED IN HELA, SIGNAL = 3.1; NT HIT: M69180.1, EVALUE 4.00e-76; SWISSPROT HIT: P35579, EVALUE 6.00e-23; EST_HUMAN HIT: BE007978.1, EVALUE 6.00e-76
cagccttcctctgccccacactcgaccataggagggccagccctgtacccatttgctcctcttctgggatgcccataatcctcatggcctccatggtctcctggaacatgtccttgtcctgctgcccggggatggtgacgtgtccattggacaggaagcggtatttgttgtacggctccaacaggagatcggc

SEQ ID NO: 13735 - DNA, 188 bp, Homo sapiens
  MAP TO AL136113.1; EXPRESSED IN BRAIN, SIGNAL = 0.44; NT HIT: gi9910321, EVALUE 2.00e-10; SWISSPROT HIT: O54946, EVALUE 8.00e-04; EST_HUMAN HIT: F16353.2, EVALUE 2.50e-01
agcaagtacctctacctctgagacatttgaaccctttgtaagcagcggactgagaaacttcagactggtcaccatttgtagccagacagtaaatggcaagagagttgttacaaagaaagtgctagaagatgtgagggggaagaatgaagcagaaaaagactgtttcatgagattcctccacatcattg

SEQ ID NO: 13736 - DNA, 110 bp, Homo sapiens
  MAP TO AC021260.4; EXPRESSED IN LUNG, SIGNAL = 1.3; EXPRESSED IN BONE MARROW, SIGNAL = 1.2; EXPRESSED IN PLACENTA, SIGNAL = 1.5; EXPRESSED IN HELA, SIGNAL = 0.67; EXPRESSED IN BRAIN, SIGNAL = 1.2; EXPRESSED IN FETAL LIVER, SIGNAL = 1.1; NT HIT: AB025333.1, EVALUE 9.00e-02; SWISSPROT HIT: Q03177, EVALUE 7.90e+00; EST_HUMAN HIT: BF820324.1, EVALUE 1.00e-04
ttgtgaatatttgggagtggtgtcttgttgatcagattcacatgttgatcttttttctcttccccattttcctctcctttactcacactggtattaagggaactttgatc

SEQ ID NO: 13737 - DNA, 493 bp, Homo sapiens
  MAP TO AC025810.1; EXPRESSED IN FETAL LIVER, SIGNAL = 0.55; EXPRESSED IN LUNG, SIGNAL = 0.59; EXPRESSED IN BRAIN, SIGNAL = 0.81; NT HIT: AF200843.1, EVALUE 7.30e+00; SWISSPROT HIT: P13039, EVALUE 6.80e-01
cccattgacaccaagggtatgccctataccagtgtccctttctcaacaagccagccttaccggcccactgggccaaggctgctggggtggctacattgagacagcatggcttagcggttaaaggcgtggatgcccagaactgggctctaatccggctccagctcctgcttgcctggagccttgaacatggagcttcaactccaccagcctcattttctctcttaaataaagtagagacgacagcacgcacctcataaaggttgctgcaaggattagctgggataatgaatggggaagcaccctgaatgctgtgtctgatacattgtgagtgctcagcggagtgagaaagaacaatagtaatggttgccatctttatgattttctcttctttttcatctttaccgtcaccatcatcatcatcatcatcatcatcatcatcatcatcaccatcatcaatcatcactccccacctggccatctcagcctccacagg

SEQ ID NO: 13738 - DNA, 153 bp, Homo sapiens
  MAP TO CHR22_108.0; EXPRESSED IN FETAL LIVER, SIGNAL = 1.4; EXPRESSED IN BONE MARROW, SIGNAL = 1.2; EXPRESSED IN HELA, SIGNAL = 0.7; EXPRESSED IN BRAIN, SIGNAL = 1.3; EXPRESSED IN PLACENTA, SIGNAL = 1.2; EXPRESSED IN LUNG, SIGNAL = 1.1; EXPRESSED IN ADULT LIVER, SIGNAL = 1.1; NT HIT: X52564.2, EVALUE 8.20e+00; SWISSPROT HIT: O66514, EVALUE 5.80e+00; EST_HUMAN HIT: AW167941.1, EVALUE 3.00e-06
ctgatggaagccaggagccaggacaagaaggtccagataaatatacgtgccaagagccacacggtgacgctgctgtgaggctgccagtgcaccagtctcaaaatgacaagacggcagagatggagaacagattagcggtcgcctggggatagg

SEQ ID NO: 13739 - DNA, 324 bp, Homo sapiens
  MAP TO AC020721.4; EXPRESSED IN BRAIN, SIGNAL = 1.1; EXPRESSED IN PLACENTA, SIGNAL =   1; EXPRESSED IN LUNG, SIGNAL = 1.6; EXPRESSED IN ADULT LIVER, SIGNAL = 1.4; EXPRESSED IN FETAL LIVER, SIGNAL = 1.1; EXPRESSED IN BONE MARROW, SIGNAL = 1.5; EXPRESSED IN HEART, SIGNAL = 1.4; NT HIT: AF181897.1, EVALUE 3.00e-44; SWISSPROT HIT: P27316, EVALUE 1.00e+00; EST_HUMAN HIT: BF819915.1, EVALUE 3.00e-51
ctagctgtatttgcccctaacaagagaatcagcctgtcctttgaagctttgaagccaagcattctttctagctatgaaagtcctagatggtactttcttgcagtaaaaggctgccttttctatattgaaaatttgttgattagtgtagtcaaccttaattatctttgctagatattctgaataacttgctgcagcttctccaacagcacatgctgtttcactttgcacctttatgttctggaggtggcttctttccttaaacctaatgaaacaacctctgctagcttccaacttttcttctgcagcttcctcatctctctcagc

SEQ ID NO: 13740 - DNA, 179 bp, Homo sapiens
  MAP TO AL137008.1; EXPRESSED IN BRAIN, SIGNAL =   4; EXPRESSED IN HEART, SIGNAL =   3; EXPRESSED IN LUNG, SIGNAL = 2.1; EXPRESSED IN FETAL LIVER, SIGNAL = 3.3; EXPRESSED IN BONE MARROW, SIGNAL = 4.4; EST_HUMAN HIT: BG104946.1, EVALUE 8.00e-63; NT HIT: AB040903.1, EVALUE 5.00e-63; SWISSPROT HIT: Q58815, EVALUE 4.30e+00
tcacgaagtcccagtgcacatggaaatgacagctgccgccagaggtatggagtcggaggagtctccggaagcatgggagggttcggggttgtattctggcagtttcttgatctctttctcggtctcactttcgtctcttgctatcaccaaggagtgtgagtagcccatggcgaccttct

SEQ ID NO: 13741 - DNA, 153 bp, Homo sapiens
  MAP TO AL136163.3; EXPRESSED IN BRAIN, SIGNAL = 1.1; EXPRESSED IN LUNG, SIGNAL = 1.2; EXPRESSED IN ADULT LIVER, SIGNAL = 0.59; SWISSPROT HIT: Q9UBR2, EVALUE 2.00e+00; EST_HUMAN HIT: BF912368.1, EVALUE 8.00e-81; NT HIT: U82848.1, EVALUE 2.10e+00
ctgattatccatatctttgatgaccaataggacaggactgtctagtgatgccgatttccggtagagcgtctttaagctggtcccgtgctctaacgtgctataggccagtctccatggatacccttgcacccttgcaggaaggcgtcgggccag

SEQ ID NO: 13742 - DNA, 235 bp, Homo sapiens
  MAP TO AL138691.2; EXPRESSED IN BONE MARROW, SIGNAL = 6.8; EXPRESSED IN PLACENTA, SIGNAL = 7.5; EXPRESSED IN LUNG, SIGNAL = 7.2; EXPRESSED IN HELA, SIGNAL =   5; EXPRESSED IN BRAIN, SIGNAL = 5.9; EXPRESSED IN FETAL LIVER, SIGNAL = 6.2; EXPRESSED IN HEART, SIGNAL = 5.8; NT HIT: Y13436.1, EVALUE 2.00e-85; SWISSPROT HIT: P11532, EVALUE 1.60e+00; EST_HUMAN HIT: BG391932.1, EVALUE 1.20e+00
cagtgtcgctccaattcaaattagtggagaaaagattacagtaggccctgagccgactgtgaattcggtgcttggccaaggtaacactcatcgtattcacggagtgaaatactatatgatgatagttattatattatatgacgacttcattcacttcccaaatcacagggtggtgcttctgtcgcttagtccaattatgtttgcaacccgtgtagggaaggcggataggagtctt

SEQ ID NO: 13743 - DNA, 189 bp, Homo sapiens
  MAP TO AF235095.1; EXPRESSED IN HEART, SIGNAL = 1.2; EXPRESSED IN BONE MARROW, SIGNAL = 0.99; EXPRESSED IN LUNG, SIGNAL = 0.98; EXPRESSED IN HELA, SIGNAL = 0.96; EXPRESSED IN BRAIN, SIGNAL = 1.1; EXPRESSED IN ADULT LIVER, SIGNAL = 0.69; EXPRESSED IN FETAL LIVER, SIGNAL = 0.94; NT HIT: AB025557.1, EVALUE 1.70e-01; EST_HUMAN HIT: AA521389.1, EVALUE 3.90e+00
ttcctcgtcctttctttggaatttgcaaactggcagctcctgacctatttcagcctgcagactcattgtgtttggccagcaggacgcctttgcattgttgagaattccgaagtctctgggcgtggcatgagcttggcagtccggaatctttacgtgcgggatcaccttcgccgcgccctcttctctcat

SEQ ID NO: 13744 - DNA, 334 bp, Homo sapiens
  MAP TO AC015889.3; EXPRESSED IN LUNG, SIGNAL = 0.48; EXPRESSED IN ADULT LIVER, SIGNAL = 0.44; EXPRESSED IN BRAIN, SIGNAL = 0.46; EXPRESSED IN FETAL LIVER, SIGNAL = 0.43; SWISSPROT HIT: O73612, EVALUE 4.20e+00; NT HIT: AB040058.1, EVALUE 1.20e+00
tgtgaatgccattagcatagtccttcaagtccttcacccatgtaagctggatatgttcagataagtgtttgcgatgctccagccagatgtaggaagggcagctggtgagtcctggagaacatcgtcctggcaccatcagggctttagatgtggcatgggctttcttgccaactcgtctggtgtcctcagctggcaggaggatctggctgtgtgcagggcccttctgcccactgcacacctctgtgttaatatccttcacactaagcacaccattcagctgctgaagtccatgcctgtgagtccaacaaagtaggtgcatgtcagcatccaggag

SEQ ID NO: 13745 - DNA, 161 bp, Homo sapiens
  MAP TO AL133266.3; EXPRESSED IN BRAIN, SIGNAL = 1.6; EXPRESSED IN HELA, SIGNAL = 1.4; EXPRESSED IN FETAL LIVER, SIGNAL = 1.3; EXPRESSED IN BONE MARROW, SIGNAL = 1.5; EXPRESSED IN HEART, SIGNAL = 1.3; SWISSPROT HIT: O95696, EVALUE 7.60e+00; NT HIT: gi14759941, EVALUE 1.00e-85; EST_HUMAN HIT: BI830553.1, EVALUE 2.00e-81
gttagtggactgtttaagagatttgggtcctactgattggcagctggcctgcttggtttgtaaaactttatggaacttcagtgaaaacatcactaatgcttcgtcatgttttggaaatgaagacaccaacacactcttactcttgctctcatcatttttag

SEQ ID NO: 13746 - DNA, 204 bp, Homo sapiens
  MAP TO AC011803.4; EXPRESSED IN PLACENTA, SIGNAL = 3.9; EXPRESSED IN LUNG, SIGNAL = 3.4; EXPRESSED IN ADULT LIVER, SIGNAL = 3.3; EXPRESSED IN FETAL LIVER, SIGNAL = 3.2; EXPRESSED IN HEART, SIGNAL = 3.1; EXPRESSED IN BRAIN, SIGNAL = 3.5; EXPRESSED IN HELA, SIGNAL = 2.8; EXPRESSED IN BONE MARROW, SIGNAL = 3.5; SWISSPROT HIT: P73540, EVALUE 8.40e-01
acacaactacgtgcatctcctgctggaactaatattccactcaattccttaaggattgccacagtgacagctcctattcgaatcaagccagccaacaaacaggctatttctatcaagaataagctcctcaaatccaaagctgtgacaaaaagagacacgattgcagaaactctgacagacaagaataaaagccaaaagcaggct

SEQ ID NO: 13747 - DNA, 269 bp, Homo sapiens
  MAP TO CHR22_229.0; EXPRESSED IN BONE MARROW, SIGNAL = 2.2; EXPRESSED IN BRAIN, SIGNAL = 1.8; EXPRESSED IN HELA, SIGNAL = 3.3; EXPRESSED IN LUNG, SIGNAL =   1; EXPRESSED IN FETAL LIVER, SIGNAL = 1.8; EXPRESSED IN PLACENTA, SIGNAL =   1
ctatctgagatcatcttggatccatgtctgccacgtccaggtatcatccagatgtttgagaaacgtctcttctagcataatgatgatgatgatggtgattatggtgataatgatgatggtgatgatggcgatgatgataatgatgatggtgatgatggtgatgatggtgatgttgatgatggtgatgatggtgatgatgatgatggtgatggtggtgatgatggtgatggtgatgatggtggtgatgacactcctgtatagcctctgat

SEQ ID NO: 13748 - DNA, 167 bp, Homo sapiens
  MAP TO CHR22_13.0; EXPRESSED IN BRAIN, SIGNAL = 1.7; EXPRESSED IN FETAL LIVER, SIGNAL = 1.4; EXPRESSED IN HEART, SIGNAL = 1.9; EXPRESSED IN PLACENTA, SIGNAL =   1; EXPRESSED IN BONE MARROW, SIGNAL = 1.4; EXPRESSED IN LUNG, SIGNAL = 1.1; NT HIT: U07000.1, EVALUE 3.00e-89; SWISSPROT HIT: P11274, EVALUE 7.00e-20; EST_HUMAN HIT: AL043953.1, EVALUE 1.00e-86
tctcccatgaggccaaggcctccagtgctcaccgatgccctctgcgaagttggggtagaactcgtcagtgaagaggggctcgggcagctcacggaagtacagcttcagcgtgcctgcgatggcgttcacgtccatctcgctcatcatcaccgacacgtccttgttat

SEQ ID NO: 13749 - DNA, 198 bp, Homo sapiens
  MAP TO AF168787.1; EXPRESSED IN PLACENTA, SIGNAL = 1.1; EXPRESSED IN LUNG, SIGNAL = 1.2; EXPRESSED IN ADULT LIVER, SIGNAL = 1.3; EXPRESSED IN HELA, SIGNAL = 2.4; EXPRESSED IN BRAIN, SIGNAL =   1; EXPRESSED IN FETAL LIVER, SIGNAL = 1.2; SWISSPROT HIT: O60931, EVALUE 6.00e-18; EST_HUMAN HIT: BF854861.1, EVALUE 1.00e-77; NT HIT: Y15930.1, EVALUE 5.00e-91
cctgccctacatctctgcccacatggcgtggtggcccggctgcccctcaccacccagcttctcccacccaccaaacaggagcagtttctcctcaaataccccaacggagtgaaccccgtgaacagcaacgacgtcttcttcagcctgcacgcggttgtcctcacgctgatcatcatcgtgcagtgctgcctgtatgag

SEQ ID NO: 13750 - DNA, 252 bp, Homo sapiens
  MAP TO CHR22_218.0; EXPRESSED IN HEART, SIGNAL = 1.1; EXPRESSED IN BONE MARROW, SIGNAL = 1.5; EXPRESSED IN PLACENTA, SIGNAL = 0.66; EXPRESSED IN LUNG, SIGNAL = 0.68; EXPRESSED IN BRAIN, SIGNAL = 1.3; EXPRESSED IN HELA, SIGNAL =   2; EXPRESSED IN FETAL LIVER, SIGNAL = 1.3; SWISSPROT HIT: O43731, EVALUE 3.00e-44; NT HIT: AL035081.1, EVALUE 0.00e+00; EST_HUMAN HIT: AV687239.1, EVALUE 0.00e+00
tcctctggactttctctatctatctggaatcagtggctatcctgccccagctcttcatgatcagcaagactggagaggctgagaccataactactcactacctgttctttctgggtctgtaccgggcactctacctggctaactggatcaggcggtaccagactgagaatttctatgaccaaattgcagtcgtgtctggagtagtacaaaccatcttctactgtgacttcttctacttgtatgtgaccaaag

SEQ ID NO: 13751 - DNA, 128 bp, Homo sapiens
  MAP TO AL136094.1; EXPRESSED IN FETAL LIVER, SIGNAL = 1.3; EXPRESSED IN HEART, SIGNAL = 1.2; EXPRESSED IN BRAIN, SIGNAL = 1.3; EXPRESSED IN HELA, SIGNAL = 1.2; EXPRESSED IN PLACENTA, SIGNAL = 1.1; EXPRESSED IN ADULT LIVER, SIGNAL = 0.4; NT HIT: AL163268.2, EVALUE 3.00e-17; EST_HUMAN HIT: AI670820.1, EVALUE 8.00e-16
ctaggaaggggcaatgaagcaatcatgatgggtgaatgagaggtctctcatctcattgtctgtatgtggtgatgtggtgagtttcagttctttgatactttctttttgagcagcttgaaggtcctttc

SEQ ID NO: 13752 - DNA, 248 bp, Homo sapiens
  MAP TO CHR21_67.0; EXPRESSED IN BONE MARROW, SIGNAL = 1.3; EXPRESSED IN PLACENTA, SIGNAL = 0.71; EXPRESSED IN LUNG, SIGNAL = 0.73; EXPRESSED IN ADULT LIVER, SIGNAL = 0.66; EXPRESSED IN BRAIN, SIGNAL = 1.3; EXPRESSED IN HELA, SIGNAL = 3.1; EXPRESSED IN FETAL LIVER, SIGNAL = 1.1; SWISSPROT HIT: Q31125, EVALUE 4.00e-06; NT HIT: AB017602.1, EVALUE 0.00e+00; EST_HUMAN HIT: BG167114.1, EVALUE 5.20e+00
tggccagagccgtccccctcagtgagcgctcagtagacatggccagtgccgtcctcagcgaggtccccgtgggtgtggccagcgccatccccctcagcgaggtcctcgtgggtgtggccagcaccatcccactcagcgaggtcccagtggacatggccagcgccgcccccctcagtgaggcttcagtgggcatggccagtgccgtccccctcagcgaggtcccagtggacgtgtccagagctgtcctg

SEQ ID NO: 13753 - DNA, 153 bp, Homo sapiens
  MAP TO CHR22_2.0; EXPRESSED IN BONE MARROW, SIGNAL = 2.1; EXPRESSED IN PLACENTA, SIGNAL = 2.2; EXPRESSED IN LUNG, SIGNAL = 2.1; EXPRESSED IN HELA, SIGNAL =   4; EXPRESSED IN BRAIN, SIGNAL = 2.1; EXPRESSED IN ADULT LIVER, SIGNAL =   2; EXPRESSED IN FETAL LIVER, SIGNAL = 2.2; SWISSPROT HIT: Q9PWD5, EVALUE 5.90e-02; NT HIT: AF102989.1, EVALUE 1.30e-01; EST_HUMAN HIT: BF692418.1, EVALUE 3.00e-65
ctgcttcacctccagacgcacagcctctaggcactgggcatggccctcctgcaggatattcagctttgacttggccaggtgcaggggtgtgcgaccagctcggtccagggcatctacacgggcccctgcaggtaccagctgaggtgagcattc

SEQ ID NO: 13754 - DNA, 278 bp, Homo sapiens
  MAP TO AC022525.3; EXPRESSED IN BRAIN, SIGNAL = 1.4; EXPRESSED IN HELA, SIGNAL = 5.4; EXPRESSED IN FETAL LIVER, SIGNAL = 1.5; EXPRESSED IN BONE MARROW, SIGNAL = 1.5; SWISSPROT HIT: P12956, EVALUE 5.00e-40; NT HIT: M32865.1, EVALUE 1.00e-112; EST_HUMAN HIT: BI222708.1, EVALUE 1.00e-112
aatacttcatcttgggtcttttgcttccaaaatcttcattattttgttttctcttggtaaatttcccttcaggattgtaatctggtgggtaaacaagctccttaaactcaaccaccagggagtccaatcttttattcattgcttcaaccttgggcaatgtcaggtccactgcttgttcagtctccatcaaatccaaggccaaggcctccaggttcctgaagtgctgctgcagcccagggttctcaaagctgtcacttctgcatgtgaagcggagcttc

SEQ ID NO: 13755 - DNA, 80 bp, Homo sapiens
  MAP TO CHR22_29.0; EXPRESSED IN BRAIN, SIGNAL =   2; EXPRESSED IN HELA, SIGNAL = 1.7; EXPRESSED IN HEART, SIGNAL =   2; EXPRESSED IN LUNG, SIGNAL = 1.9; EXPRESSED IN BONE MARROW, SIGNAL = 1.9; EST_HUMAN HIT: BE972180.1, EVALUE 1.40e+00; NT HIT: AJ222796.1, EVALUE 2.40e-01
tgtgggactgcaagtttcctctgcaggaggagcaccgccctgactcagttgctctggtcatcggtttcctccggcatatg

SEQ ID NO: 13756 - DNA, 219 bp, Homo sapiens
  MAP TO AC024445.2; EXPRESSED IN BRAIN, SIGNAL = 0.88; EXPRESSED IN PLACENTA, SIGNAL = 0.99; EXPRESSED IN LUNG, SIGNAL = 0.84; EXPRESSED IN FETAL LIVER, SIGNAL = 0.73; EXPRESSED IN ADULT LIVER, SIGNAL = 0.69; EXPRESSED IN BONE MARROW, SIGNAL = 0.66; EST_HUMAN HIT: AA704907.1, EVALUE 2.90e-01
atgtttaaaaatatcataggttccaacttaaaggaagaaatgatggagaggaggaaaaggttgtgcttgagctttattccaaagttcaatcaaacccttactaaatcagtagtttacgttgtcagcagcaaaagaagaaacctcaggacaagcagagaaaagcaagtgagaaacacccagaagagaatagttgagctgagaggacaagaaagggacgat

SEQ ID NO: 13757 - DNA, 242 bp, Homo sapiens
  MAP TO AC013624.4; EXPRESSED IN BONE MARROW, SIGNAL = 1.9; EXPRESSED IN LUNG, SIGNAL = 2.9; EXPRESSED IN BRAIN, SIGNAL = 1.1; EXPRESSED IN PLACENTA, SIGNAL = 1.7; EXPRESSED IN ADULT LIVER, SIGNAL = 3.6; EXPRESSED IN HELA, SIGNAL = 0.75; SWISSPROT HIT: P04933, EVALUE 1.80e+00; EST_HUMAN HIT: BI254991.1, EVALUE 8.20e-02
ggaggacatgggagaagaagatcatggggaagaagatggctccacaggcttttctccatggattttagaaacaccctctaaagctcctcctttgagaactgttagaagcctggaagatgagggaaaggtgagaaaacatataaagacacagaaaaaaattgcaaatcagaatgcagtccatttgaacaagagaatcctaagaaagaacaaagtgggggatggtgaagaagaaaagaggaaag

SEQ ID NO: 13758 - DNA, 212 bp, Homo sapiens
  MAP TO AC016729.5; EXPRESSED IN BONE MARROW, SIGNAL = 0.76; EXPRESSED IN BRAIN, SIGNAL = 0.55; EXPRESSED IN PLACENTA, SIGNAL = 0.53; EXPRESSED IN HELA, SIGNAL = 1.5; EXPRESSED IN FETAL LIVER, SIGNAL = 0.65; EST_HUMAN HIT: AU134242.1, EVALUE 2.00e-64; SWISSPROT HIT: P28948, EVALUE 7.30e-01; NT HIT: gi5453993, EVALUE 1.00e-64
atgacaaacttattagtaataatgatggcggtatctttgatgatccccctgccctctctgaggcaggggtgatgttgccagagcagcctgcacatgacgatatggatgaggatgataatgtatcaagtaagcatttcatgttcagtgattctggggatgattgtatggcatccagaaagatacttaccatagaagatgacaaactaaaagtt

SEQ ID NO: 13759 - DNA, 120 bp, Homo sapiens
  MAP TO AC015478.3; EXPRESSED IN HELA, SIGNAL = 1.1; EXPRESSED IN HEART, SIGNAL =   2; EXPRESSED IN FETAL LIVER, SIGNAL = 1.5; EXPRESSED IN PLACENTA, SIGNAL = 2.4; EXPRESSED IN LUNG, SIGNAL = 1.9; EXPRESSED IN BONE MARROW, SIGNAL = 1.8; EXPRESSED IN BRAIN, SIGNAL = 1.9; SWISSPROT HIT: P33543, EVALUE 6.00e+00; NT HIT: gi9634155, EVALUE 2.50e-02
atgggtcccgccttaatctgctgcagtgccattaagagagaaaacattaactccatggggctcctgatggccttcagaaactgcaagttaaacactaaccaggaagggctgctcaagact

SEQ ID NO: 13760 - DNA, 91 bp, Homo sapiens
  MAP TO AC011731.4; EXPRESSED IN LUNG, SIGNAL = 3.4; EXPRESSED IN ADULT LIVER, SIGNAL = 2.4; EXPRESSED IN HEART, SIGNAL = 2.7; EXPRESSED IN PLACENTA, SIGNAL = 2.9; EXPRESSED IN BRAIN, SIGNAL = 2.4; EXPRESSED IN HELA, SIGNAL = 3.1; EXPRESSED IN FETAL LIVER, SIGNAL = 2.1; EXPRESSED IN BONE MARROW, SIGNAL = 2.5; NT HIT: AL161576.2, EVALUE 2.80e-01; EST_HUMAN HIT: BF219045.1, EVALUE 6.50e+00
tttttcaatgttagatttatcttcttggaatttgaagtcttcagtttcagtgatgcagtcagcagttgctacctgtgccttgccttctgcc

SEQ ID NO: 13761 - DNA, 155 bp, Homo sapiens
  MAP TO AL136230.3; EXPRESSED IN BONE MARROW, SIGNAL = 0.87; EXPRESSED IN BRAIN, SIGNAL = 0.9; EXPRESSED IN HELA, SIGNAL = 0.58; EXPRESSED IN PLACENTA, SIGNAL =   1; EXPRESSED IN ADULT LIVER, SIGNAL = 0.59; EXPRESSED IN FETAL LIVER, SIGNAL = 0.82; SWISSPROT HIT: P18709, EVALUE 5.80e+00; NT HIT: AL163247.2, EVALUE 1.30e-01; EST_HUMAN HIT: BF903796.1, EVALUE 3.00e-37
ctccctggaagaagagggagttctgccagcagactgtctttggacttggactgagtacgtctctgggtctccagcctactggcccaccctgcagattttagacttgcatctccacagtcgtgtgatccagttttaaaaataccccctctctccat

SEQ ID NO: 13762 - DNA, 174 bp, Homo sapiens
  MAP TO AL160168.1; EXPRESSED IN FETAL LIVER, SIGNAL =   1; EXPRESSED IN PLACENTA, SIGNAL = 1.1; EXPRESSED IN ADULT LIVER, SIGNAL = 1.5; EXPRESSED IN BRAIN, SIGNAL = 1.2; SWISSPROT HIT: Q55179, EVALUE 3.30e+00; NT HIT: U92574.1, EVALUE 6.10e-01; EST_HUMAN HIT: BG393045.1, EVALUE 2.30e-01
atgtgtcagtgaatggagcaataaagccagagaattccggatatataaagatccagtgagagatggagagggtaccttcaaaattgcaaagcaggctgcagcatactatattccacagtatttctatctctccaaagaccaggttctgcaatcacaacatgcaaccacaaacag

SEQ ID NO: 13763 - DNA, 179 bp, Homo sapiens
  MAP TO AL137795.2; EXPRESSED IN BRAIN, SIGNAL = 0.7; EXPRESSED IN LUNG, SIGNAL = 0.68; EXPRESSED IN PLACENTA, SIGNAL = 0.61; EXPRESSED IN ADULT LIVER, SIGNAL = 0.62; EXPRESSED IN FETAL LIVER, SIGNAL = 0.56; EXPRESSED IN BONE MARROW, SIGNAL = 0.53; SWISSPROT HIT: Q06846, EVALUE 5.00e-01; NT HIT: AF053768.1, EVALUE 1.60e-01
gttgatgcacaacgtggagaaaggctctgcgctctgccctgcattccccctctctggaaaggctgtggggaggacggtgcttggaatcctaatggtgctggcacagctgcctgggggaaacacagctgtacaatgggcaggccccctggaaaagctccagctgcaggaccttgagcaag

SEQ ID NO: 13764 - DNA, 137 bp, Homo sapiens
  MAP TO AC018692.5; EXPRESSED IN ADULT LIVER, SIGNAL = 0.45; EXPRESSED IN BONE MARROW, SIGNAL = 0.44; EXPRESSED IN BRAIN, SIGNAL = 0.38; EXPRESSED IN FETAL LIVER, SIGNAL = 0.39; EXPRESSED IN PLACENTA, SIGNAL = 0.51; SWISSPROT HIT: P18503, EVALUE 4.00e-01
gaagtaccctgaaggcccccagctccgactccgagagcagagcccagactctcctactttgaacggacatgagctctatgcctcttggggtttctctgcctgcccagtcaccctggataacgtgcttgccctagatt

SEQ ID NO: 13765 - DNA, 198 bp, Homo sapiens
  MAP TO AL138788.1; EXPRESSED IN FETAL LIVER, SIGNAL = 0.52; EXPRESSED IN BRAIN, SIGNAL = 0.6; EXPRESSED IN LUNG, SIGNAL = 0.74; SWISSPROT HIT: P49077, EVALUE 4.90e-01; EST_HUMAN HIT: AW137776.1, EVALUE 3.00e-81; NT HIT: U92288.1, EVALUE 7.00e-01
ctggctggaagtgatggatttctcccttgtactcttctcatacttggcaatgtcactcatattactagtgatcacctctgggaatgtcttactttccatgagctcctgaaaggagacatctttcaattctttgtccccctctctgcagctagcatgctgcccagcgcagagcaggcagtggtaattacgggtaagaaa

SEQ ID NO: 13766 - DNA, 334 bp, Homo sapiens
  MAP TO CHR22_49.0; EXPRESSED IN BONE MARROW, SIGNAL = 1.2; EXPRESSED IN BRAIN, SIGNAL = 0.97; EXPRESSED IN HELA, SIGNAL = 1.4; EXPRESSED IN HEART, SIGNAL = 1.7; EXPRESSED IN LUNG, SIGNAL = 0.53; NT HIT: gi14778050, EVALUE 0.00e+00; SWISSPROT HIT: P98066, EVALUE 1.00e-10; EST_HUMAN HIT: AA506741.1, EVALUE 0.00e+00
ctctcgtgggcgcctgcggtgggaactactcagccatgtcttctgtggtctattcccctgacttccccgacacctatgccacggggagggtctgctactggaccatccgggttccgggggcctcccacatccacttcagcttccccctatttgacatcagggactcggcggacatggtggagcttctggatggctacacccaccgtgtcctagcccgcttccacgggaggagccgcccacctctgtccttcaacgtctctctggacttcgtcatcttgtatttcttctctgatcgcatcaatcaggcccagggatttgctgttttataccaagg

SEQ ID NO: 13767 - DNA, 210 bp, Homo sapiens
  MAP TO CHR22_136.0; EXPRESSED IN PLACENTA, SIGNAL = 0.41; EXPRESSED IN FETAL LIVER, SIGNAL = 0.58; EXPRESSED IN BRAIN, SIGNAL = 0.75; EXPRESSED IN HELA, SIGNAL = 0.7; NT HIT: gi14778494, EVALUE 2.00e-66; EST_HUMAN HIT: T31101.1, EVALUE 2.00e-66; SWISSPROT HIT: P30432, EVALUE 3.70e-01
tttagatcagacacgtctctgtagcactgctcggagcgggtgtggtctgacagctgcacattccagaagcaggggagctggtacacaaggaaggggttttgtttgatgacggcattgaaaatatcctgggggatgaaagccaaagacacagtcaagacagtcggatggtccagctgcccattttggctctcaaggcactgcatcccctgt

SEQ ID NO: 13768 - DNA, 245 bp, Homo sapiens
  MAP TO AL137793.1; EXPRESSED IN HEART, SIGNAL =  12; EXPRESSED IN LUNG, SIGNAL =  14; EXPRESSED IN BRAIN, SIGNAL =  16; EXPRESSED IN ADULT LIVER, SIGNAL =  17; EXPRESSED IN HELA, SIGNAL = 4.7; EXPRESSED IN FETAL LIVER, SIGNAL =  21; EXPRESSED IN BONE MARROW, SIGNAL =  10; SWISSPROT HIT: P01782, EVALUE 1.10e+00; EST_HUMAN HIT: BI458754.1, EVALUE 5.10e+00
catgcgtgacgcatcttgatatgttctcttctttcatgctgatcaccacacactatgggcccttcagcattctgaagaatgctgctcaagccaacagtttcatcaggatgagaaccatgtgcacagatatttacagctctaggttctgcagtagaggtttctcctgagctgggaactggagcagggaggctgggaggggccacctggctcagctggagcaagtgatgaagggcgacccaggccat

SEQ ID NO: 13769 - DNA, 107 bp, Homo sapiens
  MAP TO AL133408.3; EXPRESSED IN HEART, SIGNAL = 2.7; EXPRESSED IN LUNG, SIGNAL = 3.6; EXPRESSED IN FETAL LIVER, SIGNAL = 3.3; EXPRESSED IN PLACENTA, SIGNAL = 3.9; EXPRESSED IN ADULT LIVER, SIGNAL = 3.5; EXPRESSED IN BONE MARROW, SIGNAL = 3.5; EXPRESSED IN HELA, SIGNAL = 2.2; EXPRESSED IN BRAIN, SIGNAL = 3.4; NT HIT: AJ000265.1, EVALUE 1.40e+00; EST_HUMAN HIT: BE891050.1, EVALUE 2.00e+00
atggagactggacgaggccagctgcaaggcgtgacactgcccattctggacaaggggctcatagagctactgggcacacgacccagggtgtggctgatcagaaaagg

SEQ ID NO: 13770 - DNA, 134 bp, Homo sapiens
  MAP TO AC018691.5; EXPRESSED IN BONE MARROW, SIGNAL = 0.43; EXPRESSED IN BRAIN, SIGNAL = 0.48; EXPRESSED IN PLACENTA, SIGNAL = 0.56; EXPRESSED IN LUNG, SIGNAL = 0.51; EXPRESSED IN ADULT LIVER, SIGNAL = 0.47; SWISSPROT HIT: P16557, EVALUE 4.50e+00; NT HIT: U34817.1, EVALUE 1.10e-01; EST_HUMAN HIT: BE971142.1, EVALUE 6.60e-01
taagcgacattgatcaaatcactgccatctttgatgtcaaacttctggactttaccattaagggctcaaattatactttcagacttttgctcattgcctccaacacaaacccccatcccagagagacccacctg

SEQ ID NO: 13771 - DNA, 86 bp, Homo sapiens
  MAP TO AF238280.1; EXPRESSED IN BONE MARROW, SIGNAL = 1.3; EXPRESSED IN HEART, SIGNAL = 1.3; EXPRESSED IN BRAIN, SIGNAL = 1.3; EXPRESSED IN PLACENTA, SIGNAL = 1.2; EXPRESSED IN HELA, SIGNAL = 0.76; EXPRESSED IN ADULT LIVER, SIGNAL = 0.98; SWISSPROT HIT: P17588, EVALUE 8.10e+00; EST_HUMAN HIT: BG746647.1, EVALUE 1.00e-07
catcacgttgactccctgcaccatccttctgccacctttcttcacatcccctttgcagatccccttgaccacaccctcattctcag

SEQ ID NO: 13772 - DNA, 286 bp, Homo sapiens
  MAP TO AC013371.4; EXPRESSED IN BRAIN, SIGNAL = 0.63; EXPRESSED IN PLACENTA, SIGNAL = 2.4; EXPRESSED IN LUNG, SIGNAL = 1.1; EXPRESSED IN ADULT LIVER, SIGNAL = 1.5; EXPRESSED IN HELA, SIGNAL = 2.9; EXPRESSED IN FETAL LIVER, SIGNAL = 1.2; EXPRESSED IN BONE MARROW, SIGNAL = 0.47; SWISSPROT HIT: P21675, EVALUE 1.10e+00; EST_HUMAN HIT: BF325585.1, EVALUE 9.80e-02
aaaaaagagagatcatgacgacaaagggttagaaaaatatgattttggagaaataattgaaataactgagaatgccaacctcaaaaagaaagagcattttcaagatagagaggaaaaggctggtcagagtgtcagcatggagctccagaaagcagaactggaggcagagcagaaacatcacagagggacagatcacaacttcctgcagagtaagcggaaggcgccctcgggaacttgtgaggctcatatcactggaggtttccaaaacgacagttcagaaacccca

SEQ ID NO: 13773 - DNA, 126 bp, Homo sapiens
  MAP TO AC021252.3; EXPRESSED IN BONE MARROW, SIGNAL = 1.4; EXPRESSED IN LUNG, SIGNAL =   2; EXPRESSED IN ADULT LIVER, SIGNAL =   2; EXPRESSED IN BRAIN, SIGNAL = 0.87; EXPRESSED IN FETAL LIVER, SIGNAL = 1.4; EST_HUMAN HIT: BE552461.1, EVALUE 1.00e-05; SWISSPROT HIT: P11215, EVALUE 6.00e+00; NT HIT: U67360.1, EVALUE 2.00e-03
cttattggaaacagagataagggagcagaggaagaagtttatcaacaccgtgatgaaccagttaaacaaatccagaatgtgggacagtctacagcaggggtccccaacccctgggctgtggcctga

SEQ ID NO: 13774 - DNA, 155 bp, Homo sapiens
  MAP TO AL138967.2; EXPRESSED IN BRAIN, SIGNAL = 0.71; EXPRESSED IN LUNG, SIGNAL = 0.78; EXPRESSED IN ADULT LIVER, SIGNAL = 0.77; EXPRESSED IN FETAL LIVER, SIGNAL = 0.72; EXPRESSED IN PLACENTA, SIGNAL = 0.72; EXPRESSED IN BONE MARROW, SIGNAL = 0.71; EST_HUMAN HIT: AW851789.1, EVALUE 5.00e-02; SWISSPROT HIT: P21093, EVALUE 1.10e+00; NT HIT: gi14760307, EVALUE 3.40e-02
atgtcgagtagagaatccaaaattactcagcatattaagaatcagaaaaaattgtccacgtccataaaaaataaacatatgccaaatgccaatatgatgcagttgttgaaattatatgacaaagactttaacgtagctatcaaatgctctatcaa

SEQ ID NO: 13775 - DNA, 532 bp, Homo sapiens
  MAP TO AL136366.3; EXPRESSED IN PLACENTA, SIGNAL = 2.7; EXPRESSED IN LUNG, SIGNAL = 2.4; EXPRESSED IN ADULT LIVER, SIGNAL = 1.8; EXPRESSED IN BRAIN, SIGNAL = 2.5; EXPRESSED IN FETAL LIVER, SIGNAL = 1.8; SWISSPROT HIT: P13622, EVALUE 1.00e-102; NT HIT: gi14743518, EVALUE 0.00e+00; EST_HUMAN HIT: AU121764.1, EVALUE 0.00e+00
cttgctcctgcacgtagtatgccaaaaacaaatcaagctccttaactgatactgtgatatgatgtggctggacacaaagtgctgggtttgtgcaatgtggggatttcatgagccgctctccatcggtactttccaaggggatgcctttgaacaggatcaccatgactagatccagacgccagactttgtctgcctgtcgcaggcagtcgattctcctaatcttacccttctggtcgggattggataagacacagcacgggtgcttcttgccagtcacggtgagcacaaagtcctctcgatactcctggcgaatatctttgcgcagtttggcaaggagcctggatgcccacttctgtttgatttcaggcttttcactgagaagctcatctttgactgctctttcttcatcctttgacattcgcttctcatgctttttaaagtacttgcgttttcgagcctgcaggttgaaccaagtataggcaattgcacggacatgtggaagaagtgcctcgatgaatgggtgaaattcatc

SEQ ID NO: 13776 - DNA, 210 bp, Homo sapiens
  MAP TO AC021635.3; EXPRESSED IN FETAL LIVER, SIGNAL = 0.58; EXPRESSED IN BONE MARROW, SIGNAL = 0.65; EXPRESSED IN PLACENTA, SIGNAL = 0.74; EXPRESSED IN LUNG, SIGNAL = 0.7; EXPRESSED IN ADULT LIVER, SIGNAL = 0.73; EXPRESSED IN BRAIN, SIGNAL = 0.57; NT HIT: U45980.1, EVALUE 2.90e+00; EST_HUMAN HIT: AI205673.1, EVALUE 1.00e-114
ctgaaaaagcaagcctccttagaaaaacctggtaatgatctagaaagcccattgatcaacaacattgaccaaacactccacagagtggcaaccacagcatcagtgatatacaagatctgggagcacaggtctcaccatccttcctctaagaaaattaagcactgcaaattaaagaagaagagtaaagaagaaggagccagaagatactaa

SEQ ID NO: 13777 - DNA, 133 bp, Homo sapiens
  MAP TO CHR22_145.0; EXPRESSED IN HELA, SIGNAL = 2.1; EXPRESSED IN BRAIN, SIGNAL = 0.79; EXPRESSED IN LUNG, SIGNAL = 0.7; EXPRESSED IN PLACENTA, SIGNAL = 0.71; EXPRESSED IN ADULT LIVER, SIGNAL = 0.75; EXPRESSED IN BONE MARROW, SIGNAL = 0.92; SWISSPROT HIT: P38971, EVALUE 3.50e+00; NT HIT: gi14778388, EVALUE 4.00e-69; EST_HUMAN HIT: BF438360.1, EVALUE 6.00e-69
gtgtcagcacagcgggctactcctagggataagcccccggtcccctcatccctggccagtgtccctgacccccatctactccttcctggggacttctcagccaccagggctgggcctggactttcaactgcag

SEQ ID NO: 13778 - DNA, 83 bp, Homo sapiens
  MAP TO AC011225.5; EXPRESSED IN BRAIN, SIGNAL =   1; EXPRESSED IN FETAL LIVER, SIGNAL = 1.4; EXPRESSED IN LUNG, SIGNAL = 1.7; EXPRESSED IN BONE MARROW, SIGNAL = 1.4; EXPRESSED IN ADULT LIVER, SIGNAL = 1.9; NT HIT: AL163279.2, EVALUE 6.40e-02; EST_HUMAN HIT: BI831924.1, EVALUE 9.30e-02
ttctcctgtgcatctggcttgatttttatcttccaaacactgaacgatgtgattgctagcttcttttttgttgttgcagttct

SEQ ID NO: 13779 - DNA, 274 bp, Homo sapiens
  MAP TO AL138895.4; EXPRESSED IN BRAIN, SIGNAL = 1.7; EXPRESSED IN HELA, SIGNAL = 1.5; EXPRESSED IN FETAL LIVER, SIGNAL = 1.5; EXPRESSED IN HEART, SIGNAL = 1.5; EXPRESSED IN PLACENTA, SIGNAL =   2; SWISSPROT HIT: Q06317, EVALUE 4.40e-01
cttctcccgaagtctctcctgactcggaatcctgatgcccatcgggctgcgggtgtgggtcccactccaggggcggcaggtgctgctgggccaggcggaagtcctctaggagctcggggctggtggcattgggaaagagtctctcttcttcccagctttgtgaactacttctatccacatccctcttgtcctcggcccaggcccagcgccgccgctgggggcccttccccaggccaggctcagcccagcggatctcagtctccgagctggccat

SEQ ID NO: 13780 - DNA, 146 bp, Homo sapiens
  MAP TO CHR22_83.0; EXPRESSED IN BONE MARROW, SIGNAL = 0.95; EXPRESSED IN BRAIN, SIGNAL = 0.93; EXPRESSED IN HELA, SIGNAL = 2.3; EXPRESSED IN LUNG, SIGNAL = 0.83; EXPRESSED IN PLACENTA, SIGNAL = 0.95; EXPRESSED IN ADULT LIVER, SIGNAL = 0.8; SWISSPROT HIT: P55194, EVALUE 2.00e-15; NT HIT: gi14778736, EVALUE 8.00e-77; EST_HUMAN HIT: BF769507.1, EVALUE 1.00e-76
accactccccttcgatgacagccacccacttccccagggtgtatggggtgtcgctggcaacccacctgcaagagctgggccgggagattgccctgcccatcgaggcctgcgtcatgatgctgctttctgagggcatgaaggaagag

SEQ ID NO: 13781 - DNA, 412 bp, Homo sapiens
  MAP TO AC015956.3; EXPRESSED IN BONE MARROW, SIGNAL = 0.87; EXPRESSED IN BRAIN, SIGNAL = 1.1; EXPRESSED IN HELA, SIGNAL = 0.79; EXPRESSED IN ADULT LIVER, SIGNAL = 0.74; NT HIT: gi5803144, EVALUE 2.00e-74; EST_HUMAN HIT: BE888073.1, EVALUE 2.00e-74
ctgaaggctatgcagcctttcaggaagatagctctggagatgaggcagaaagtccttctaaaatgaagaggtccaagggaatccatgttttcaagaagcccagcttttctaaaaagaaggaaaaggattttaaaataaaagagaaacccaaagaagaaaagcataaagaagaaaagcacaaagaagaaaaacataaagagaagaagtcaaaagacttgacagcagctgatgttgttaaacagtggaaggaaaagaagaaaaagaaaaagccaattcaggagccagaggtgcctcagattgatgttccaaatctcaaacccatttttggaattcctttggctgatgcagtagagaggaccatgatgtatgatggcattcggctgccagccgttttccgtgaatgtatagatta

SEQ ID NO: 13782 - DNA, 147 bp, Homo sapiens
  MAP TO AL137863.3; EXPRESSED IN BONE MARROW, SIGNAL = 6.3; EXPRESSED IN BRAIN, SIGNAL = 5.6; EXPRESSED IN HEART, SIGNAL = 5.1; EXPRESSED IN PLACENTA, SIGNAL = 7.1; EXPRESSED IN LUNG, SIGNAL = 6.2; EXPRESSED IN FETAL LIVER, SIGNAL = 5.9; EXPRESSED IN ADULT LIVER, SIGNAL = 6.1; SWISSPROT HIT: P14546, EVALUE 3.40e+00; NT HIT: gi16159644, EVALUE 2.00e+00
atgctagcctgggtgttctacaaactggaaacactaatacacacagacaaaaaaaaaatacccaagaaaagcctgcttctggaagcaaacatcatgaaaaaagtggcactgctcctcaaccccaattggcacgcagcagtggagcca

SEQ ID NO: 13783 - DNA, 91 bp, Homo sapiens
  MAP TO AL136478.2; EXPRESSED IN BONE MARROW, SIGNAL = 1.1; EXPRESSED IN HEART, SIGNAL = 1.5; EXPRESSED IN BRAIN, SIGNAL = 1.1; EXPRESSED IN PLACENTA, SIGNAL = 1.2; EXPRESSED IN LUNG, SIGNAL = 1.1; EXPRESSED IN HELA, SIGNAL = 0.79; EXPRESSED IN FETAL LIVER, SIGNAL = 1.1; EST_HUMAN HIT: AL535203.1, EVALUE 1.60e+00; NT HIT: AF196288.1, EVALUE 5.00e-03
actgatgatcctccccaaattgctgaacaactatctggaattgcttgtgctgctgcaaatgaccagtggccatatgctttccccgtatcat

SEQ ID NO: 13784 - DNA, 92 bp, Homo sapiens
  MAP TO AL137159.1; EXPRESSED IN BRAIN, SIGNAL =   2; EXPRESSED IN HELA, SIGNAL =   1; EXPRESSED IN FETAL LIVER, SIGNAL = 1.6; EXPRESSED IN LUNG, SIGNAL = 1.7; EXPRESSED IN BONE MARROW, SIGNAL = 1.7; EXPRESSED IN HEART, SIGNAL = 2.4; EXPRESSED IN ADULT LIVER, SIGNAL = 1.7; NT HIT: gi14770640, EVALUE 3.00e-07; EST_HUMAN HIT: BG769798.1, EVALUE 5.00e-07
cttgtccttgtgtggtcctggctgtctgggtaggtgtcctgggtggactcagtgtttctctgggttgtgtctgagatgactgtctttgacat

SEQ ID NO: 13785 - DNA, 49 bp, Homo sapiens
  MAP TO CHR21_18.0; EXPRESSED IN BRAIN, SIGNAL = 1.2; EXPRESSED IN HEART, SIGNAL = 2.6; EXPRESSED IN LUNG, SIGNAL =   4; EXPRESSED IN HELA, SIGNAL = 9.2; EXPRESSED IN FETAL LIVER, SIGNAL = 1.6; EXPRESSED IN ADULT LIVER, SIGNAL = 1.8
aaaatcattatagtgaagattttcaggataatttgaagttcccagaagg

SEQ ID NO: 13786 - DNA, 283 bp, Homo sapiens
  MAP TO AL137025.2; EXPRESSED IN BRAIN, SIGNAL = 4.3; EXPRESSED IN PLACENTA, SIGNAL = 6.6; EXPRESSED IN LUNG, SIGNAL = 4.6; EXPRESSED IN HELA, SIGNAL =   3; EXPRESSED IN ADULT LIVER, SIGNAL = 5.5; EXPRESSED IN FETAL LIVER, SIGNAL = 6.6; EXPRESSED IN HEART, SIGNAL = 3.8; EXPRESSED IN BONE MARROW, SIGNAL = 3.8; NT HIT: AF120982.1, EVALUE 4.00e-03; EST_HUMAN HIT: F06091.1, EVALUE 3.00e-05; SWISSPROT HIT: P33621, EVALUE 1.60e-01
cttgaagtctgcagggcaggcagttgggaagaaggctgtcagggggtgcaaagcagcaaggacaagatggaacccatctcaggctctctctgtctccaaccttcatgatgtgggtatcctgcaggagaacccggtgctctttgtcacagagataaacacacatctggttgaggatacacagtcagatgaggagtcagtgaagctgagggaagacccagcgaaagatggaacagctgcagcctgcttcctgccccacaccaaggagataagccagcagataaaa

SEQ ID NO: 13787 - DNA, 118 bp, Homo sapiens
  MAP TO AC015938.3; EXPRESSED IN HEART, SIGNAL = 2.2; EXPRESSED IN BONE MARROW, SIGNAL = 2.7; EXPRESSED IN PLACENTA, SIGNAL = 2.9; EXPRESSED IN LUNG, SIGNAL = 2.8; EXPRESSED IN HELA, SIGNAL = 1.7; EXPRESSED IN BRAIN, SIGNAL = 2.8; EXPRESSED IN FETAL LIVER, SIGNAL = 2.6; SWISSPROT HIT: P11378, EVALUE 2.00e+00; NT HIT: AB004608.1, EVALUE 9.80e-02; EST_HUMAN HIT: AL542976.1, EVALUE 5.70e-01
atgccagcaaaagcaaaaggcggcggcatgagtgcgggcagctggaggaccccgtggccctggatgaatggccgaggggagcgcttggatggtgcccgcagtgtggtcggctgcaggg

SEQ ID NO: 13788 - DNA, 277 bp, Homo sapiens
  MAP TO AL132765.16; EXPRESSED IN BONE MARROW, SIGNAL = 2.8; EXPRESSED IN PLACENTA, SIGNAL = 4.8; EXPRESSED IN BRAIN, SIGNAL =   3; EXPRESSED IN LUNG, SIGNAL = 4.1; EXPRESSED IN ADULT LIVER, SIGNAL =   5; EXPRESSED IN FETAL LIVER, SIGNAL = 3.1; NT HIT: gi15304922, EVALUE 3.00e-81; EST_HUMAN HIT: AL044238.1, EVALUE 4.00e-81
tggtcctcgatgaagacagtcacattgggggctggatcatgatcaggtatcttcccattaagtttcttcttccttttcttggactttcctttcttttccaccgttttctccttctttttcttctcgactttctggtggtgagttttcgccatctccttgcgctggttggctagggcttcttcatatgacgtttccttcatggagaaagtcgacaccaggaagatgccaatggcagaaacaaccatgaatcctccaaagaccacaacccccaaggttt

SEQ ID NO: 13789 - DNA, 198 bp, Homo sapiens
  MAP TO AL133263.2; EXPRESSED IN PLACENTA, SIGNAL = 2.6; EXPRESSED IN ADULT LIVER, SIGNAL = 2.7; EXPRESSED IN BONE MARROW, SIGNAL = 2.1; EXPRESSED IN HELA, SIGNAL = 1.3; EXPRESSED IN LUNG, SIGNAL = 2.6; EXPRESSED IN HEART, SIGNAL = 1.9; EXPRESSED IN FETAL LIVER, SIGNAL = 1.8; EXPRESSED IN BRAIN, SIGNAL = 1.9; EST_HUMAN HIT: W02560.1, EVALUE 1.70e-02; SWISSPROT HIT: Q07687, EVALUE 2.90e-01; NT HIT: AJ251973.1, EVALUE 7.00e-01
taaagcagtggaaagtccactctgaggacaaccgtgatgtccagggttgtggcaagggtcaggaggtctactgggatggaggagtgggattcacggagattcacaactatgcttccctgtatggaaatggggaacaaaagaggattctcacctccccatccccggtccatggccatgagggtctgcccaaggccagag

SEQ ID NO: 13790 - DNA, 231 bp, Homo sapiens
  MAP TO U82695.2; EXPRESSED IN BRAIN, SIGNAL = 0.42; EST_HUMAN HIT: AV720814.1, EVALUE 2.00e-05; SWISSPROT HIT: P11369, EVALUE 1.00e-06; NT HIT: U82695.2, EVALUE 1.00e-127
ttacatcaatccctttgtcttgggtaagtatctaggaggggaattgttggctgatgtggtaggtgcatgtttaacattttcggacactgccgaagtgttttcccaagtggctgccccattttcccttcccaccagaaaggcacgggcacccccggtgctccacatctcctccctggtaaaccaacacttggtgtggtcagtggtttttgttttacccattctaatagatgt

SEQ ID NO: 13791 - DNA, 138 bp, Homo sapiens
  MAP TO AL133261.4; EXPRESSED IN FETAL LIVER, SIGNAL = 0.61; EXPRESSED IN PLACENTA, SIGNAL = 0.95; EXPRESSED IN BRAIN, SIGNAL = 0.97; NT HIT: AE001488.1, EVALUE 1.80e+00; EST_HUMAN HIT: BE883786.1, EVALUE 2.70e+00; SWISSPROT HIT: P24837, EVALUE 7.70e+00
atggcagcaaaattaattctgccagaacatgtcaaattaaccaccctcctaaggactggagtcacagccaagctcagaaatggacaaatatccaggatcaatttcttcaatgtcactttaggtttgagtaaagccaag

SEQ ID NO: 13792 - DNA, 221 bp, Homo sapiens
  MAP TO CHR22_180.0; EXPRESSED IN BONE MARROW, SIGNAL = 0.55; EXPRESSED IN HELA, SIGNAL = 0.61; EXPRESSED IN BRAIN, SIGNAL = 0.62; EXPRESSED IN FETAL LIVER, SIGNAL = 0.49; SWISSPROT HIT: Q10707, EVALUE 1.10e+00
gaggaaaccaagatgggaaggaggcagggggccaggtccgtattcctgcaacagcaggacctcctgaaggtcacgccagccctcagggcacctcggggagctgtggattgctgctcagtgtccccaacgtgaagcttcagcaaaagcaaaattgccatgaaaccaaaccacccatcgagattggatatgcagaagccttatggctgtggacagagttctaa

SEQ ID NO: 13793 - DNA, 167 bp, Homo sapiens
  MAP TO AC021619.3; EXPRESSED IN PLACENTA, SIGNAL = 1.2; EXPRESSED IN LUNG, SIGNAL = 1.1; EXPRESSED IN FETAL LIVER, SIGNAL = 1.1; EXPRESSED IN ADULT LIVER, SIGNAL = 1.1; EXPRESSED IN BONE MARROW, SIGNAL = 1.2; EXPRESSED IN BRAIN, SIGNAL = 1.1; EXPRESSED IN HELA, SIGNAL = 0.57; NT HIT: AE001142.1, EVALUE 2.30e+00; EST_HUMAN HIT: AW118720.1, EVALUE 5.50e-02; SWISSPROT HIT: P34814, EVALUE 1.50e+00
gcccagccaaagatcctaagaaaggagaggtaaagctttgccttccctatacaagtaatgatcataattacctctattctaaagagcctcccactgcgatgcagcacagcaatgaggagcagattcgctctgaagaacaacccgagcccattgtttacaagaaatag

SEQ ID NO: 13794 - DNA, 98 bp, Homo sapiens
  MAP TO AL136317.2; EXPRESSED IN BONE MARROW, SIGNAL = 0.44; EXPRESSED IN BRAIN, SIGNAL = 0.52; EXPRESSED IN ADULT LIVER, SIGNAL = 0.3; NT HIT: AL163204.2, EVALUE 3.00e-38
tcaatcattttcctgatcctctgcatgatttacagaagccgagtgggtggctttagcatttccatggtcctccctctccactatcatgacattcttag

SEQ ID NO: 13795 - DNA, 129 bp, Homo sapiens
  MAP TO AL080245.14; EXPRESSED IN BONE MARROW, SIGNAL = 0.69; EXPRESSED IN PLACENTA, SIGNAL = 0.84; EXPRESSED IN LUNG, SIGNAL = 0.71; EXPRESSED IN HELA, SIGNAL = 0.6; EXPRESSED IN BRAIN, SIGNAL = 0.78; EXPRESSED IN FETAL LIVER, SIGNAL = 0.67; SWISSPROT HIT: P54697, EVALUE 3.50e-02; NT HIT: gi16167728, EVALUE 1.00e-66; EST_HUMAN HIT: AA993492.1, EVALUE 1.00e-66
aacccccggcaccagggcaaggaccgggcggccacctttgaggagctgtgccacaactacgcccatgagcgcctgcagctgctgttctaccagcggacctttgtctccacgctacagcgatatcaagag

SEQ ID NO: 13796 - DNA, 144 bp, Homo sapiens
  MAP TO AC013613.3; EXPRESSED IN HELA, SIGNAL = 1.5; EXPRESSED IN HEART, SIGNAL =   6; EXPRESSED IN PLACENTA, SIGNAL =   1; EXPRESSED IN BONE MARROW, SIGNAL = 0.55; EXPRESSED IN BRAIN, SIGNAL = 0.48; SWISSPROT HIT: P38694, EVALUE 1.50e+00; EST_HUMAN HIT: AW157720.1, EVALUE 4.60e-02
tgctctctatggacaatctcatcaatatctatggcttccagtggcatctgtgtagaaatactaaccactcccagatctgcatctgcttctcacaagccacttctgagttcccagccaatacctgcaactgcctactacacatct

SEQ ID NO: 13797 - DNA, 259 bp, Homo sapiens
  MAP TO AC021609.3; EXPRESSED IN FETAL LIVER, SIGNAL = 1.8; EXPRESSED IN BONE MARROW, SIGNAL = 1.9; EXPRESSED IN BRAIN, SIGNAL =   2; EXPRESSED IN PLACENTA, SIGNAL = 2.2; EXPRESSED IN LUNG, SIGNAL = 2.3; EXPRESSED IN ADULT LIVER, SIGNAL = 1.8; SWISSPROT HIT: Q13591, EVALUE 6.00e-12; NT HIT: gi16159220, EVALUE 6.00e-39; EST_HUMAN HIT: AA195334.1, EVALUE 9.00e-39
ctgtccccaactccgccaccagcgccacccccacagagctttgctgaaagtccccgcgtccacttgccttctgtgcacacctggctgctgctgatgctgccaactccttatcttgatggcctccaccgagtcgtacttgtccagtttgttggtgtggttggttatgctggtgttgaggagggtaggcgagacggggtggacgacagtcgcattgtgggattgctgttggtgctgctactgtaggtatagaccagcaggc

SEQ ID NO: 13798 - DNA, 324 bp, Homo sapiens
  MAP TO AL136128.2; EXPRESSED IN HELA, SIGNAL = 1.6; EXPRESSED IN BRAIN, SIGNAL = 2.4; EXPRESSED IN FETAL LIVER, SIGNAL = 2.1; EXPRESSED IN BONE MARROW, SIGNAL = 2.8; EXPRESSED IN HEART, SIGNAL = 2.1; EXPRESSED IN ADULT LIVER, SIGNAL = 1.4; SWISSPROT HIT: O28648, EVALUE 5.20e+00; NT HIT: AL163303.2, EVALUE 4.00e-16; EST_HUMAN HIT: BG028427.1, EVALUE 2.00e-46
atgtacaaagagattaacattgctcacacgtctactaacacaacatccactcttcagcttgtggatcagggagtaattttgactttcaagtcgtattatttaagaaatacatctcataagaaaacagctgccatagatagtgatttttttgttggaactaggcaaaataaattgaaaacattctggaaaggattcaccattctagatgtcattaagaacattcgtaattcatgggaggtggtcaaaatatcaacattaacaggagtttggaagatgtggactccaaccctcctgaatgagtttgaggtgtccaagatgtcagtg

SEQ ID NO: 13799 - DNA, 179 bp, Homo sapiens
  MAP TO AL139152.1; EXPRESSED IN BRAIN, SIGNAL =   1; EXPRESSED IN HELA, SIGNAL = 0.67; EXPRESSED IN FETAL LIVER, SIGNAL = 0.95; EXPRESSED IN PLACENTA, SIGNAL = 1.4; EXPRESSED IN LUNG, SIGNAL = 1.2; EXPRESSED IN BONE MARROW, SIGNAL =   1; EST_HUMAN HIT: AW393468.1, EVALUE 2.00e-91; SWISSPROT HIT: Q9KII6, EVALUE 5.70e+00; NT HIT: gi14729372, EVALUE 2.00e-96
aagagacactatctttttgaccagcagcttgccctccgcaatctgctgtcttagggcactgtagtcatcaatgtggccaatgacatggcggccatgcttactggcaaaggagccatcagtagcatcaccctccagcttgggaggggtcttcattactggagaagtatccaaacccaagc

SEQ ID NO: 13800 - DNA, 123 bp, Homo sapiens
  MAP TO AC015938.3; EXPRESSED IN PLACENTA, SIGNAL = 3.8; EXPRESSED IN BRAIN, SIGNAL = 3.9; EXPRESSED IN HELA, SIGNAL = 2.4; EXPRESSED IN ADULT LIVER, SIGNAL = 3.3; EXPRESSED IN FETAL LIVER, SIGNAL = 3.4; EXPRESSED IN HEART, SIGNAL = 3.4; EXPRESSED IN BONE MARROW, SIGNAL = 3.9; EST_HUMAN HIT: AW005764.1, EVALUE 9.40e+00; SWISSPROT HIT: Q39565, EVALUE 2.70e+00; NT HIT: AJ005577.1, EVALUE 1.60e+00
tcagcaggcagggaggtcccagtccactccctggtcactctgagttgctcctgtgcatgttacagcatcaggatcatcacagatgagccggggagcctcctggcggccaagaggatgagggtg

SEQ ID NO: 13801 - DNA, 83 bp, Homo sapiens
  MAP TO AC011165.3; EXPRESSED IN HEART, SIGNAL =   5; EXPRESSED IN PLACENTA, SIGNAL = 6.8; EXPRESSED IN LUNG, SIGNAL = 6.4; EXPRESSED IN HELA, SIGNAL =   3; EXPRESSED IN BRAIN, SIGNAL = 6.1; EXPRESSED IN ADULT LIVER, SIGNAL = 5.7; EXPRESSED IN FETAL LIVER, SIGNAL = 5.9; EXPRESSED IN BONE MARROW, SIGNAL =   6; NT HIT: AL163278.2, EVALUE 1.60e-02; EST_HUMAN HIT: AI611610.1, EVALUE 5.80e+00
aaggaggaggataaggagaagttgaagcagaagtataaggtgaatttgaaggagaagaaggatgagaaaaaggagaagaaaga

SEQ ID NO: 13802 - DNA, 320 bp, Homo sapiens
  MAP TO CHR22_151.0; EXPRESSED IN BONE MARROW, SIGNAL =  22; EXPRESSED IN BRAIN, SIGNAL = 0.69; EXPRESSED IN LUNG, SIGNAL =  11; EXPRESSED IN FETAL LIVER, SIGNAL = 0.99; NT HIT: X03529.1, EVALUE 0.00e+00; EST_HUMAN HIT: W73790.1, EVALUE 0.00e+00; SWISSPROT HIT: P15814, EVALUE 1.00e-53
gtcagcccaaggccaccccctcggtcactctgttcctgccgtcctctgaggagctccaagccaacaaggccacactggtgtgtctcatgaatgacttctatctgggaatcttgacggtgacctggaaggcagatggtacccccatcacccagggcgtggagatgaccacgccctccaaacagagcaacagcaagtacatggccagcagctacctgagcctgacgcccgagcagtggaggtcccgcagaagctacagctgccaggtcatgcatgaagggagcactgcagagaagacggtggcccctgcagaatgttcatag

SEQ ID NO: 13803 - DNA, 115 bp, Homo sapiens
  MAP TO AC011792.5; EXPRESSED IN ADULT LIVER, SIGNAL = 0.84; EXPRESSED IN HELA, SIGNAL = 0.69; EXPRESSED IN FETAL LIVER, SIGNAL = 0.78; EXPRESSED IN BONE MARROW, SIGNAL = 0.83; EXPRESSED IN PLACENTA, SIGNAL =   1; EXPRESSED IN BRAIN, SIGNAL = 0.96; EXPRESSED IN LUNG, SIGNAL = 0.97; NT HIT: AL163285.2, EVALUE 2.00e-05; EST_HUMAN HIT: N63479.1, EVALUE 2.00e-03; SWISSPROT HIT: O65403, EVALUE 1.20e+00
atttcctctgtctcaccaagtgatacccctgccatgttatgatgcagcaagaagaccttcaccagaagccgagcaggtaccagcaccatgcccttggacttctcaacttccagaa

SEQ ID NO: 13804 - DNA, 295 bp, Homo sapiens
  MAP TO AJ239319.2; EXPRESSED IN BRAIN, SIGNAL = 1.1; EXPRESSED IN FETAL LIVER, SIGNAL = 1.1; EXPRESSED IN PLACENTA, SIGNAL = 1.3; EXPRESSED IN LUNG, SIGNAL = 1.4; EXPRESSED IN BONE MARROW, SIGNAL = 1.2; SWISSPROT HIT: Q14202, EVALUE 5.00e-42; NT HIT: gi14759113, EVALUE 0.00e+00; EST_HUMAN HIT: BE379540.1, EVALUE 0.00e+00
ttcttgcagaaggtacaggtctttttgcccgagggcttcttggagaaagtggtgaggcaggatgacgagcagaagagctgaggcagccccttgcgctgataggcagtctgccccttctgcagtggtgtccggcaatgtgcacaagtcatcttggtgcccactgcagagcgcccggccctttgtgacacacttgagcgtagggacatgcgaggagagcgccggggccggaatggcacaaagtcctcatcattggggtcatctaccatggcatcagaatcctcatctgacactggaa

SEQ ID NO: 13805 - DNA, 184 bp, Homo sapiens
  MAP TO CHR22_104.0; EXPRESSED IN PLACENTA, SIGNAL =   3; EXPRESSED IN HELA, SIGNAL = 8.1; EXPRESSED IN BRAIN, SIGNAL = 5.9; EXPRESSED IN FETAL LIVER, SIGNAL = 5.9; EST_HUMAN HIT: BE061281.1, EVALUE 9.50e-01; SWISSPROT HIT: P52191, EVALUE 1.90e+00
tcctgcgtacaaagatgctggcatgacgatgacacagcaccagcctcagaagcaaagggccacagtttcaccagttagagatgtgggaaagtctgagctcagtgtaaaaccaaacactgcgggtgtccaggagggtcacgtggaagtcaagtttaaaggaccccagatgacatccgttgtatag

SEQ ID NO: 13806 - DNA, 145 bp, Homo sapiens
  MAP TO AL160313.1; EXPRESSED IN PLACENTA, SIGNAL = 1.1; EXPRESSED IN BONE MARROW, SIGNAL = 0.45; EXPRESSED IN LUNG, SIGNAL = 0.55; EXPRESSED IN BRAIN, SIGNAL = 0.67; EXPRESSED IN FETAL LIVER, SIGNAL = 0.77; EST_HUMAN HIT: AA704488.1, EVALUE 2.90e+00; SWISSPROT HIT: O00182, EVALUE 1.20e+00; NT HIT: gi6671496, EVALUE 4.90e-01
atgcgctgtatgggtgataccacattggctttggatcaccttgcagtgtgcatgcctgcactgggtaatgttggcagtgatgtggtagcctttgctggattggtgatggaggctggtgccagcagcttggtcgagctggacccag

SEQ ID NO: 13807 - DNA, 98 bp, Homo sapiens
  MAP TO AC015930.3; EXPRESSED IN HEART, SIGNAL = 5.2; EXPRESSED IN PLACENTA, SIGNAL = 7.8; EXPRESSED IN LUNG, SIGNAL = 6.4; EXPRESSED IN BONE MARROW, SIGNAL = 5.8; EXPRESSED IN BRAIN, SIGNAL = 6.8; EXPRESSED IN HELA, SIGNAL = 4.8; EXPRESSED IN FETAL LIVER, SIGNAL = 5.9; EST_HUMAN HIT: BF242269.1, EVALUE 1.80e+00; NT HIT: AP001204.1, EVALUE 1.20e+00
cttgaaggcactgttggtattgagagaagaaaactcccccagatgaacttcgtgattcttatcacaggaaattaagtctacattaggcttagaaatgt

SEQ ID NO: 13808 - DNA, 84 bp, Homo sapiens
  MAP TO AL137062.3; EXPRESSED IN FETAL LIVER, SIGNAL = 0.61; EXPRESSED IN PLACENTA, SIGNAL = 0.83; EXPRESSED IN LUNG, SIGNAL = 0.8; EXPRESSED IN ADULT LIVER, SIGNAL = 0.77; EXPRESSED IN BRAIN, SIGNAL = 0.69; NT HIT: AJ400879.1, EVALUE 2.60e-01
atcctgcctaaaacacataggctgctgcttagggttgcggaaattctcccaactggtgacagccaagccaagagcaatgtcttc

SEQ ID NO: 13809 - DNA, 79 bp, Homo sapiens
  MAP TO AL137013.2; EXPRESSED IN HELA, SIGNAL = 0.93; EXPRESSED IN FETAL LIVER, SIGNAL = 2.1; EXPRESSED IN PLACENTA, SIGNAL = 1.6; EXPRESSED IN LUNG, SIGNAL = 1.4; EXPRESSED IN BONE MARROW, SIGNAL = 1.2; EXPRESSED IN ADULT LIVER, SIGNAL = 1.5; EXPRESSED IN BRAIN, SIGNAL = 1.3; NT HIT: Z49472.1, EVALUE 9.40e-01; EST_HUMAN HIT: AW104616.1, EVALUE 5.00e-37
cttggttgtcatcctcgttgtcttcccaggtttcttcatttgctagcagtgggttctgtgactcattcatagacctcat

SEQ ID NO: 13810 - DNA, 125 bp, Homo sapiens
  MAP TO AL136317.2; EXPRESSED IN BRAIN, SIGNAL = 1.9; EXPRESSED IN HEART, SIGNAL = 1.5; EXPRESSED IN HELA, SIGNAL = 0.76; EXPRESSED IN PLACENTA, SIGNAL =   2; EXPRESSED IN LUNG, SIGNAL = 1.6; EXPRESSED IN ADULT LIVER, SIGNAL = 1.5; EXPRESSED IN FETAL LIVER, SIGNAL = 1.7; EXPRESSED IN BONE MARROW, SIGNAL = 1.7; NT HIT: gi15296067, EVALUE 1.00e-01; EST_HUMAN HIT: BF208976.1, EVALUE 1.50e-01; SWISSPROT HIT: P54891, EVALUE 3.50e+00
acttcagtcctagagtggtcagtagaagcagttatccaataggagagggggtaagtaaggtgaaaactgctgaaaaggaaaagaaaccaagaatgaccccttcccacagcctacagatgaaagag

SEQ ID NO: 13811 - DNA, 202 bp, Homo sapiens
  MAP TO AL031602.14; EXPRESSED IN HELA, SIGNAL = 1.6; EXPRESSED IN LUNG, SIGNAL = 3.3; EXPRESSED IN FETAL LIVER, SIGNAL = 3.1; EXPRESSED IN PLACENTA, SIGNAL = 3.5; EXPRESSED IN ADULT LIVER, SIGNAL = 3.1; EXPRESSED IN BONE MARROW, SIGNAL =   3; EXPRESSED IN BRAIN, SIGNAL = 2.7; EXPRESSED IN HEART, SIGNAL = 2.2; NT HIT: AF071560.1, EVALUE 2.00e-26; EST_HUMAN HIT: AA340392.1, EVALUE 8.00e-85; SWISSPROT HIT: Q9NV58, EVALUE 6.00e-27
cccctctggctgtacattctggggcaagaagccatggagccgtaagaagaaaattctttggcagctgggcacgttgattggtgctccagtggggatttctctcattgctggcattgccattcctgccatggtcattggcattcctgtttatgttggaaggaaggtaagaaagacatgctggtttctgtgcttgtttcaactt

SEQ ID NO: 13812 - DNA, 211 bp, Homo sapiens
  MAP TO AL136303.3; EXPRESSED IN BRAIN, SIGNAL = 1.9; EXPRESSED IN FETAL LIVER, SIGNAL = 1.8; EXPRESSED IN BONE MARROW, SIGNAL =   2; EXPRESSED IN HEART, SIGNAL = 1.6; EXPRESSED IN PLACENTA, SIGNAL = 2.1; EXPRESSED IN LUNG, SIGNAL =   2; EXPRESSED IN ADULT LIVER, SIGNAL = 2.1; SWISSPROT HIT: P11369, EVALUE 4.00e-12; NT HIT: AL163209.2, EVALUE 5.00e-05; EST_HUMAN HIT: AI792018.1, EVALUE 8.00e-11
aacagaaatcaatgaaattcgaaacaggaactcaatagagaaaatcaataaagccaaaagctggtttatcgaaaagaccaataaaattaataaactccttgccaggttactaaaaaagggggagaaaagaaaaattgccaacagaaatgaaagagtgggcatcactacagatctcatggacattaaaaacataataaaggcatattattaa

SEQ ID NO: 13813 - DNA, 215 bp, Homo sapiens
  MAP TO AC021619.3; EXPRESSED IN BONE MARROW, SIGNAL = 3.7; EXPRESSED IN HELA, SIGNAL = 3.5; EXPRESSED IN BRAIN, SIGNAL = 3.7; EXPRESSED IN HEART, SIGNAL = 3.5; EXPRESSED IN FETAL LIVER, SIGNAL = 3.2; EXPRESSED IN PLACENTA, SIGNAL =   4; EXPRESSED IN LUNG, SIGNAL = 3.6; EXPRESSED IN ADULT LIVER, SIGNAL = 3.2; EST_HUMAN HIT: AA837322.1, EVALUE 1.00e-117; SWISSPROT HIT: P38468, EVALUE 5.00e+00; NT HIT: AB014597.1, EVALUE 1.00e-118
aaatatgaggattttcctgatagcatagattctggtgttgactgagatgaaacaacagatcctccccagaaggcatgagcagaagtagggctgttttcaaacaatgtgctaaagggcccaaatggtaagggggcactgaaattgggagcaataggcttatttgctggatgtactgaattctgacaagcactttgtgtacttaaggtcgaaggtag

SEQ ID NO: 13814 - DNA, 117 bp, Homo sapiens
  MAP TO AL133476.4; EXPRESSED IN BONE MARROW, SIGNAL = 2.7; EXPRESSED IN HEART, SIGNAL = 1.9; EXPRESSED IN BRAIN, SIGNAL = 2.4; EXPRESSED IN LUNG, SIGNAL = 3.1; EXPRESSED IN HELA, SIGNAL = 1.6; EXPRESSED IN FETAL LIVER, SIGNAL = 2.7; EXPRESSED IN PLACENTA, SIGNAL = 2.9; EXPRESSED IN ADULT LIVER, SIGNAL = 3.1; EST_HUMAN HIT: AV703249.1, EVALUE 5.00e-23; NT HIT: AL163203.2, EVALUE 1.00e-10
atgattaaaactcagcgttacaccttcatcccaaacaccaccacccgtaataaaagtataacaaaagcattgcaaggtctgactgctctatccaatgagttagccagcaactcaggg

SEQ ID NO: 13815 - DNA, 342 bp, Homo sapiens
  MAP TO AL139177.1; EXPRESSED IN HEART, SIGNAL =   2; EXPRESSED IN LUNG, SIGNAL = 2.8; EXPRESSED IN ADULT LIVER, SIGNAL = 2.7; EXPRESSED IN BONE MARROW, SIGNAL = 2.5; EXPRESSED IN PLACENTA, SIGNAL = 3.7; EXPRESSED IN BRAIN, SIGNAL = 2.4; EXPRESSED IN FETAL LIVER, SIGNAL = 2.4; SWISSPROT HIT: O67763, EVALUE 2.60e-02; NT HIT: AL161505.2, EVALUE 8.10e-02
cttgtttatttcccagtcttcctccaacttttccactgtagctgattcctgagtagactcctgcacatcagaagtggcctgcttctctctgcctggcagagtaaactttcctttcttttctgttgagcgttttgatttgagaatgttgttgagacaacattccatctcctgcttagcagatgcaagcctgttttccaaatctttttgtttacactgaagtgattttatatcatctttaataatcttctgccccactgaagatgtattttgcttgacggattttgctaaagctaaaatcttctttaatgtgccatcttgtaaactgagtctattctctagttc

SEQ ID NO: 13816 - DNA, 91 bp, Homo sapiens
  MAP TO AL138499.1; EXPRESSED IN FETAL LIVER, SIGNAL = 0.97; EXPRESSED IN BONE MARROW, SIGNAL = 0.89; EXPRESSED IN BRAIN, SIGNAL = 1.1; EXPRESSED IN PLACENTA, SIGNAL =   1; EXPRESSED IN LUNG, SIGNAL = 1.3; EXPRESSED IN ADULT LIVER, SIGNAL = 1.3; NT HIT: Z22551.1, EVALUE 3.00e-44; EST_HUMAN HIT: AL039590.1, EVALUE 4.00e-44
attaaaaggaaaagaggaacagatgaataccatgaaggctgttttggaagagaaagagaaagacctagccaatacagggaagtggttacag

SEQ ID NO: 13817 - DNA, 271 bp, Homo sapiens
  MAP TO CHR22_88.0; EXPRESSED IN BRAIN, SIGNAL = 0.45; EXPRESSED IN PLACENTA, SIGNAL = 0.56; EXPRESSED IN HELA, SIGNAL = 0.6; EXPRESSED IN BONE MARROW, SIGNAL = 0.42; SWISSPROT HIT: P58003, EVALUE 4.90e+00
aatccttgtggttctcagaagcccagaagctggtggactcacctcctgcccttgagaggcatgctgttgtggctgcgcaacagtccttggtacagtgaaaaggaaatgcttttaatgctgatgaactgttcccaacattcctgtgttacctgccccatgtttcattttctaatgagtagaatccttcgcctctgtcattaccactttgctgctgaagttaacatgaaagatattattctcagtatcatgccccactttgatgtgatgggct

SEQ ID NO: 13818 - DNA, 271 bp, Homo sapiens
  MAP TO AL135926.3; EXPRESSED IN BRAIN, SIGNAL = 2.6; EXPRESSED IN BONE MARROW, SIGNAL =   6; EXPRESSED IN LUNG, SIGNAL =  16; EXPRESSED IN ADULT LIVER, SIGNAL =  20; NT HIT: AF116627.1, EVALUE 3.00e-99; EST_HUMAN HIT: AW582267.1, EVALUE 1.00e-130; SWISSPROT HIT: Q95281, EVALUE 5.00e-26
ctcctttggctttatgaggaccttgatagcctcagtacgtgcactcatggccttggcattgttggcctgcatcttctttaggcccttcttgttgcacttcttggcaaagcccatgttcctcaggaacttggggtccacccccttaagagattcatatctttgcaatcggggtttcttgatgccattctgtgccattttcgggactggttgtgtgtggtgtggttcttggacttggccttgtctgcactgtaacacccagctcccaaagcac

SEQ ID NO: 13819 - DNA, 153 bp, Homo sapiens
  MAP TO AC015937.3; EXPRESSED IN HELA, SIGNAL = 1.4; EXPRESSED IN BRAIN, SIGNAL =   1; EXPRESSED IN FETAL LIVER, SIGNAL = 0.7; EXPRESSED IN PLACENTA, SIGNAL = 0.82; EXPRESSED IN BONE MARROW, SIGNAL = 0.62; NT HIT: gi4885492, EVALUE 6.00e-81; EST_HUMAN HIT: AW410691.1, EVALUE 8.00e-81; SWISSPROT HIT: Q14168, EVALUE 2.00e-22
ctggaagtggggctcctggaggatgtgggccagctcggcggctgtgctgctctgctcagccagctgcgccaggtcccgcaggatctcctgcaccagctccaggttgttgtctctcacggcctccagcttcgtctcctccagcctctcatgggc

SEQ ID NO: 13820 - DNA, 170 bp, Homo sapiens
  MAP TO AL137863.3; EXPRESSED IN BRAIN, SIGNAL = 3.8; EXPRESSED IN ADULT LIVER, SIGNAL = 4.2; EXPRESSED IN BONE MARROW, SIGNAL = 4.1; EXPRESSED IN LUNG, SIGNAL = 4.3; EXPRESSED IN PLACENTA, SIGNAL = 4.6; EXPRESSED IN HELA, SIGNAL =   2; EXPRESSED IN FETAL LIVER, SIGNAL = 3.6; EXPRESSED IN HEART, SIGNAL = 3.2; NT HIT: D43619.1, EVALUE 1.50e-01; SWISSPROT HIT: P56783, EVALUE 7.50e+00
tggtagattataattctttgttcaggaatttcatttctcaactgggctatgatgccttgaaagcaaggcccctggcttattctttttctctgttgtgcctcatacagtatctggtatacatgtttgtggaataaatcaaggcccatgagctctgtctcatgacagaggtc

SEQ ID NO: 13821 - DNA, 340 bp, Homo sapiens
  MAP TO CHR22_153.0; EXPRESSED IN BONE MARROW, SIGNAL = 0.43; EXPRESSED IN BRAIN, SIGNAL = 0.32; EXPRESSED IN HELA, SIGNAL =   2; EXPRESSED IN FETAL LIVER, SIGNAL = 0.38; NT HIT: gi14776874, EVALUE 1.00e-101; EST_HUMAN HIT: AW501086.1, EVALUE 2.00e-86; SWISSPROT HIT: O42184, EVALUE 5.70e+00
tgcccgggagctggagctggaagaccggcagagtcgactgcagcaggagctccgggaacgcatggcagtggaaggtgagtggggtaaggcacccatggaggccagggtgggtgccacctccaggcccctcacctcatgccttcttctccttcaagatcaccttaagactgaggaggagctgtcagaagagaagcagattctcaatgagatgctggaggtggtggagcagagagactcactggtggcgctgctggaggagcagcggctccgggagagagaggaggacaaggacctggaggctgccatgctgtccaagggcttcagccttaactggtcctga

SEQ ID NO: 13822 - DNA, 167 bp, Homo sapiens
  MAP TO AL137062.3; EXPRESSED IN ADULT LIVER, SIGNAL = 1.1; EXPRESSED IN BONE MARROW, SIGNAL = 1.2; EXPRESSED IN BRAIN, SIGNAL = 1.1; EXPRESSED IN HELA, SIGNAL = 0.68; EXPRESSED IN PLACENTA, SIGNAL = 1.2; EXPRESSED IN FETAL LIVER, SIGNAL =   1; EXPRESSED IN LUNG, SIGNAL = 1.2; SWISSPROT HIT: Q07108, EVALUE 1.00e-06; NT HIT: gi7019446, EVALUE 6.00e-04; EST_HUMAN HIT: BG569937.1, EVALUE 9.00e-04
ccacatggtccaagcatgctaaacctgtggcatgttcaggggactggcttggagtgagagataagtgtttctatttttctgatgataccagaaattggacagccagtaaaatattttgtagtttgcagaaagcagaacttgctcagattgatacacaagaagacatg

SEQ ID NO: 13823 - DNA, 227 bp, Homo sapiens
  MAP TO AL137008.1; EXPRESSED IN BONE MARROW, SIGNAL = 0.94; EXPRESSED IN BRAIN, SIGNAL = 1.1; EXPRESSED IN HELA, SIGNAL = 0.81; EXPRESSED IN FETAL LIVER, SIGNAL = 0.89; EXPRESSED IN ADULT LIVER, SIGNAL = 0.33; SWISSPROT HIT: P25710, EVALUE 2.00e+00; NT HIT: U29588.1, EVALUE 8.10e-01; EST_HUMAN HIT: BF691669.1, EVALUE 3.00e-01
cctcttctcatggtgtatcccgtgtggaagcttcagaagatccagacttcttatacgtgaacttaaggttcccaaggcttgtggctggcaaagagcagggatggggagggagagaggaaactgtatcacctttcatgacagccttagaagtacacagagtcactagccagtccatttttacagggggtggcggaggactagaatccattcaccttgttggagggagt

SEQ ID NO: 13824 - DNA, 358 bp, Homo sapiens
  MAP TO AL136084.2; EXPRESSED IN HELA, SIGNAL = 3.1; EXPRESSED IN FETAL LIVER, SIGNAL = 1.5; EXPRESSED IN LUNG, SIGNAL = 1.1; EXPRESSED IN BONE MARROW, SIGNAL = 1.6; EXPRESSED IN BRAIN, SIGNAL = 1.8; EST_HUMAN HIT: AA429393.1, EVALUE 4.00e-97; SWISSPROT HIT: Q29121, EVALUE 3.00e-09; NT HIT: gi14738925, EVALUE 1.00e-101
ctgccagggctctgacacggctgcagacacctggaataagagaagcaggtctttctcagatgttcctccctcttattggaaggaagacaagaattcacccttgaatttcccaattgtcttcctgctgcccgtctgcataggagagacggatggatgtcttgggtgctttcaggatccatgaagaggagtcggcagtggtgtgcccggtgattgatgtgatcgactggaacaccttcgaatacctggggaactccggggagccccagatcggcggtttcgactggaggctggtgttcacgtggcacacagttcctgagagggagaggatacggatgcaatcccccgtcgatgtcatcag

SEQ ID NO: 13825 - DNA, 125 bp, Homo sapiens
  MAP TO AL160236.1; EXPRESSED IN BRAIN, SIGNAL = 0.75; EXPRESSED IN HELA, SIGNAL = 0.51; EXPRESSED IN FETAL LIVER, SIGNAL = 0.84; EXPRESSED IN PLACENTA, SIGNAL =   1; EXPRESSED IN LUNG, SIGNAL = 0.75; NT HIT: AB037814.1, EVALUE 2.00e-64; EST_HUMAN HIT: AW249294.1, EVALUE 3.00e-64; SWISSPROT HIT: O67304, EVALUE 7.80e+00
gccaggttatgattgacaaaaatccaggaatcacctcagcagtaaataaaataaataatattgacaatatgtaccgaaatttccaaatggaagtgctatctggagagcagaacatgatgacaaag

SEQ ID NO: 13826 - DNA, 176 bp, Homo sapiens
  MAP TO AL136105.2; EXPRESSED IN HELA, SIGNAL = 1.2; EXPRESSED IN FETAL LIVER, SIGNAL = 1.1; EXPRESSED IN PLACENTA, SIGNAL = 1.1; EXPRESSED IN LUNG, SIGNAL = 1.1; EXPRESSED IN ADULT LIVER, SIGNAL = 1.1; EXPRESSED IN BONE MARROW, SIGNAL = 1.2; EXPRESSED IN BRAIN, SIGNAL = 1.1; NT HIT: gi11427260, EVALUE 4.00e-08; EST_HUMAN HIT: BG116208.1, EVALUE 6.00e-82; SWISSPROT HIT: Q9GM44, EVALUE 1.00e-12
gcatgtcgtggctatcgtggctcacctgggagagaatgccttccagataggggctgatgaagtgcgggagagtctccacaaccttctgcagagcagccaaggcactgagcaggtagacctcgctggagaccagctcgctggtgttcttcattgttgtcagcaacgatggcatcagg

SEQ ID NO: 13827 - DNA, 103 bp, Homo sapiens
  MAP TO AC022117.2; EXPRESSED IN FETAL LIVER, SIGNAL = 5.4; EXPRESSED IN PLACENTA, SIGNAL = 7.3; EXPRESSED IN LUNG, SIGNAL =   7; EXPRESSED IN BONE MARROW, SIGNAL = 6.1; EXPRESSED IN ADULT LIVER, SIGNAL = 6.8; EXPRESSED IN BRAIN, SIGNAL = 6.7; EXPRESSED IN HELA, SIGNAL = 2.9; EXPRESSED IN HEART, SIGNAL = 6.1; NT HIT: U32803.1, EVALUE 3.30e-01
attctctcaaggtgcctgacccttctgctttatcaacaaattcctcttgctggtcatttttgtggtacagaatagtagcttcaatttttgctttctctatttc

SEQ ID NO: 13828 - DNA, 219 bp, Homo sapiens
  MAP TO AB017654.1; EXPRESSED IN PLACENTA, SIGNAL = 2.3; EXPRESSED IN LUNG, SIGNAL = 1.5; EXPRESSED IN ADULT LIVER, SIGNAL = 1.3; EXPRESSED IN BONE MARROW, SIGNAL = 1.6; EXPRESSED IN BRAIN, SIGNAL = 1.4; EXPRESSED IN HELA, SIGNAL = 1.1; EXPRESSED IN HEART, SIGNAL = 1.3; NT HIT: AJ006701.1, EVALUE 2.00e-01; EST_HUMAN HIT: BF525960.1, EVALUE 2.90e-01; SWISSPROT HIT: P13063, EVALUE 4.60e-01
agtcaatggcagtggctccctggagtacactactataggaaggattttgtaaagttttgtctggcctcagtggagggtgaggtaggggaggagttctatgaacagttagtggtgtctgccatggttgaaacaatggagaagggggacaccttttctgtgcagatgttgcttctggtagatataatccacaatgtaatgggagaagtactaagaatcagt

SEQ ID NO: 13829 - DNA, 491 bp, Homo sapiens
  MAP TO AL136304.2; EXPRESSED IN HEART, SIGNAL = 2.1; EXPRESSED IN HELA, SIGNAL =   2; EXPRESSED IN BRAIN, SIGNAL = 2.5; EXPRESSED IN PLACENTA, SIGNAL = 2.5; EXPRESSED IN FETAL LIVER, SIGNAL = 2.2; EXPRESSED IN ADULT LIVER, SIGNAL = 1.6; NT HIT: gi14781548, EVALUE 0.00e+00; SWISSPROT HIT: Q14999, EVALUE 1.00e-92; EST_HUMAN HIT: BI916222.1, EVALUE 0.00e+00
gtgccaggatggtgggagaactccgctacagggaattcagggtgcccctggggcccggcttacatgcctatcctgatgagctgatccgccagcgcgtgggccatgatgggcatcctgagtaccagatccgttggctcatcctgcggcgtggcgatgagggggacgggggctctggccaagtggactgcaaggctgagcacatcctgctgtggatgtccaaggatgagatctatgccaactgccacaagatgctgggcgaggatggccaggtcatcgggccctcccaggagtctgcaggggaggttggggccctggacaaatctgtgctggaggagatggaaaccgacgtgaagtccctcattcagagagcccttcggcagctggaggagtgtgtgggcactatccctcctgctcctctacttcacactgtccacgtgctcagcgcctatgccagcattgagcccctcactggagtattcaaggacccaagg

SEQ ID NO: 13830 - DNA, 354 bp, Homo sapiens
  MAP TO CHR22_53.0; EXPRESSED IN FETAL LIVER, SIGNAL = 0.64; EXPRESSED IN LUNG, SIGNAL = 0.82; EXPRESSED IN BRAIN, SIGNAL = 0.64; EXPRESSED IN PLACENTA, SIGNAL = 0.74; EXPRESSED IN ADULT LIVER, SIGNAL = 0.74; NT HIT: gi14778007, EVALUE 0.00e+00; SWISSPROT HIT: P98161, EVALUE 9.30e-01; EST_HUMAN HIT: BG336065.1, EVALUE 4.90e-01
gacaccctcctgctcctagctgggagatccagcatcctcatgaatgcggggcccaaggccaccaactgttccacctgctgtcagccaggcctgttgccccagccctacacccacagctcacccagcagggactggagtgtgctgctgcactgctggagccggtcgcccgggtcggaggttgggaagaagacagccgctggcaggccactggttggggggtccagccggaagcccacagcggtgaggagggcctgccagccagggatgccgcccactttgttctccacactctgctgggatgtgtacatggcattgcgctgcccattctggatgcgctgcagggatttctccacc

SEQ ID NO: 13831 - DNA, 85 bp, Homo sapiens
  MAP TO CHR21_34.0; EXPRESSED IN HELA, SIGNAL = 3.9; EXPRESSED IN BRAIN, SIGNAL = 1.5; EXPRESSED IN LUNG, SIGNAL = 1.2; EXPRESSED IN HEART, SIGNAL = 1.4; EXPRESSED IN BONE MARROW, SIGNAL = 1.6; NT HIT: AF289235.1, EVALUE 2.60e-01; EST_HUMAN HIT: BI031323.1, EVALUE 1.50e+00
ggactggaaaaaaaccaagtaaagaaatcgtctacaacaagcctgaaatgtggcctgggaacatgggtggccctgatggctcaag

SEQ ID NO: 13832 - DNA, 145 bp, Homo sapiens
  MAP TO CHR22_220.0; EXPRESSED IN BRAIN, SIGNAL = 1.3; EXPRESSED IN LUNG, SIGNAL = 0.69; EXPRESSED IN HELA, SIGNAL = 1.9; EXPRESSED IN ADULT LIVER, SIGNAL = 0.73; EXPRESSED IN FETAL LIVER, SIGNAL = 1.1; EXPRESSED IN BONE MARROW, SIGNAL = 1.2; EXPRESSED IN PLACENTA, SIGNAL = 0.63; SWISSPROT HIT: P14148, EVALUE 7.00e-18; NT HIT: L16558.1, EVALUE 6.00e-50; EST_HUMAN HIT: AA308128.1, EVALUE 2.00e-50
atgttaattgaagccctgttgagcttcacaaacgttccattgaagatttcaggaaggcgaagaagctgcaacacctttcggacctttgggcttaccccattgatacctctgatcctgatggcaaatgccaatttgggttctgcag

SEQ ID NO: 13833 - DNA, 184 bp, Homo sapiens
  MAP TO AC024195.2; EXPRESSED IN BONE MARROW, SIGNAL = 1.1; EXPRESSED IN BRAIN, SIGNAL = 0.99; EXPRESSED IN PLACENTA, SIGNAL = 1.8; EXPRESSED IN LUNG, SIGNAL = 1.5; EXPRESSED IN FETAL LIVER, SIGNAL = 1.1; SWISSPROT HIT: Q03167, EVALUE 7.00e-30; NT HIT: gi16161129, EVALUE 2.00e-99; EST_HUMAN HIT: BI463578.1, EVALUE 8.00e-97
cttcccccactttaatataaatgtttcttgctatcttgagttcggtgaatgaagtaactgctccatactcttttcgggcccaatttaacagatgttcatttccatgggggaagttcctttcttctgtttctgctgtcaaggagaagtttgctgatgaaaactggaccacagaaccctcagacac

SEQ ID NO: 13834 - DNA, 99 bp, Homo sapiens
  MAP TO CHR22_104.0; EXPRESSED IN HELA, SIGNAL = 3.9; EXPRESSED IN FETAL LIVER, SIGNAL = 4.2; EXPRESSED IN HEART, SIGNAL = 4.8; EXPRESSED IN BONE MARROW, SIGNAL = 3.3; EXPRESSED IN ADULT LIVER, SIGNAL = 3.8; EXPRESSED IN BRAIN, SIGNAL = 3.6; EXPRESSED IN LUNG, SIGNAL = 3.3; EXPRESSED IN PLACENTA, SIGNAL = 4.8
cttctcctgcctggaggactctatcagcctcccccttggcctggtccacattggggcaggcatcaactttccaaaatgccactgtaaacatttcatccc

SEQ ID NO: 13835 - DNA, 80 bp, Homo sapiens
  MAP TO AC024445.2; EXPRESSED IN FETAL LIVER, SIGNAL =   4; EXPRESSED IN BONE MARROW, SIGNAL =   3; EXPRESSED IN PLACENTA, SIGNAL = 3.1; EXPRESSED IN LUNG, SIGNAL = 3.3; EXPRESSED IN ADULT LIVER, SIGNAL = 4.1; EXPRESSED IN HELA, SIGNAL = 3.8; EXPRESSED IN BRAIN, SIGNAL = 1.8; EXPRESSED IN HEART, SIGNAL = 2.2; NT HIT: AE006472.1, EVALUE 9.60e-01; EST_HUMAN HIT: BG341288.1, EVALUE 1.40e+00
tcattcaacataggtaccatcatgttggacacaaagtacgacagggttgaaaccataaagtgcaatgtagggtttattac

SEQ ID NO: 13836 - DNA, 214 bp, Homo sapiens
  MAP TO AL138478.1; EXPRESSED IN BONE MARROW, SIGNAL = 0.83; EXPRESSED IN LUNG, SIGNAL = 1.3; EXPRESSED IN ADULT LIVER, SIGNAL = 1.2; EXPRESSED IN BRAIN, SIGNAL = 0.81; EXPRESSED IN FETAL LIVER, SIGNAL = 0.61; EST_HUMAN HIT: BG740732.1, EVALUE 5.00e-86; SWISSPROT HIT: P40986, EVALUE 1.00e-03; NT HIT: gi14761133, EVALUE 4.00e-86
ccggaagtcgtcttcatcctggaggatgtctttgatgaagggaagtggagcacctctgaggcctgggtggatgatgtggagcagtttcggaaaatgttcagacacccaagtcatgtgcagctgaaggtagttgctggaaaccatgacactggcttccactatgagacgaacacatacgaagtagaacggtttgagaaagtgttcatctctgaaa

SEQ ID NO: 13837 - DNA, 168 bp, Homo sapiens
  MAP TO AL137025.2; EXPRESSED IN BRAIN, SIGNAL = 5.2; EXPRESSED IN HELA, SIGNAL = 3.6; EXPRESSED IN BONE MARROW, SIGNAL =   5; EXPRESSED IN HEART, SIGNAL = 4.5; EXPRESSED IN LUNG, SIGNAL =   6; EXPRESSED IN ADULT LIVER, SIGNAL = 5.3; SWISSPROT HIT: O88990, EVALUE 8.70e-01; NT HIT: AJ272133.1, EVALUE 2.30e+00; EST_HUMAN HIT: BG770978.1, EVALUE 8.60e-01
atggagtctggactgcagtaccctgttgcgggcgatgagggggagctgtcacaggaacaagccaaatcctgcattaggaggctcagtgccaaaggtcggagcaggaccagagatgacgtggacctgcatgcctggtccacagcgctccttggggaccttctgttctcc

SEQ ID NO: 13838 - DNA, 194 bp, Homo sapiens
  MAP TO Z98044.13; EXPRESSED IN ADULT LIVER, SIGNAL = 0.73; EXPRESSED IN BONE MARROW, SIGNAL = 0.8; EXPRESSED IN BRAIN, SIGNAL = 0.74; EXPRESSED IN HELA, SIGNAL = 0.6; EXPRESSED IN PLACENTA, SIGNAL =   1; EXPRESSED IN FETAL LIVER, SIGNAL = 0.7; EXPRESSED IN LUNG, SIGNAL =   1; SWISSPROT HIT: Q02926, EVALUE 1.40e+00
ccctacggggaggtcaagggagacaggaacttcacaaatgggtcccggggaagagcagatgactccagtggggcttgtgaaaggaactacacaggatgaaatgaacaagggatggccgccctggcctctacggtcttcatatggccagaggcctccttccctcaggcaggcactgtctgggccaaagccaccac

SEQ ID NO: 13839 - DNA, 81 bp, Homo sapiens
  MAP TO AL138994.1; EXPRESSED IN BONE MARROW, SIGNAL = 1.8; EXPRESSED IN PLACENTA, SIGNAL =   2; EXPRESSED IN LUNG, SIGNAL = 2.2; EXPRESSED IN ADULT LIVER, SIGNAL = 2.1; EXPRESSED IN BRAIN, SIGNAL = 1.8; EXPRESSED IN HELA, SIGNAL = 0.96; EXPRESSED IN FETAL LIVER, SIGNAL = 1.7; EST_HUMAN HIT: AW819791.1, EVALUE 2.30e-02
ctgtagttggatatgatctccttatccttctccctttgattgatctttttctttgagctgatttgagctttcttcttttct

SEQ ID NO: 13840 - DNA, 191 bp, Homo sapiens
  MAP TO AL135932.1; EXPRESSED IN FETAL LIVER, SIGNAL =   5; EXPRESSED IN BONE MARROW, SIGNAL =   6; EXPRESSED IN BRAIN, SIGNAL = 6.1; EXPRESSED IN HEART, SIGNAL = 4.8; EXPRESSED IN PLACENTA, SIGNAL = 4.7; EXPRESSED IN HELA, SIGNAL = 6.2; SWISSPROT HIT: P77434, EVALUE 1.10e+00
atgtctttgcaatttgtgaatttctgctcagctcttgttttagaagtccaaagtgacattgtatctggaagcaagcttgctgtgcataaacctgtagcaatttttggagaagagaagcaagttacagaaccggaagaaaagcaaatgcaagaagatcctctaacaacggaaaatgcttccagtgaaattct

SEQ ID NO: 13841 - DNA, 136 bp, Homo sapiens
  MAP TO AC012661.4; EXPRESSED IN HELA, SIGNAL =   1; EXPRESSED IN PLACENTA, SIGNAL = 1.6; EXPRESSED IN ADULT LIVER, SIGNAL = 1.4; EXPRESSED IN FETAL LIVER, SIGNAL = 1.2; EXPRESSED IN LUNG, SIGNAL = 1.4; EXPRESSED IN BRAIN, SIGNAL = 1.5; EXPRESSED IN HEART, SIGNAL = 1.5; SWISSPROT HIT: Q61139, EVALUE 4.50e+00; NT HIT: U85056.1, EVALUE 3.00e-64; EST_HUMAN HIT: AJ003590.1, EVALUE 4.00e-27
ctcagcacagtcaccaatagcatagtgagatgagcaaggaggtgcaagtaggcacaaatccccatggacatggcctcaggcatgttccacaggctcagggtctccctgatgagctcccagccctccttcagggagc

SEQ ID NO: 13842 - DNA, 277 bp, Homo sapiens
  MAP TO U82695.2; EXPRESSED IN FETAL LIVER, SIGNAL = 0.55; EXPRESSED IN BONE MARROW, SIGNAL = 0.7; EXPRESSED IN BRAIN, SIGNAL = 0.84; EXPRESSED IN PLACENTA, SIGNAL = 0.79; EXPRESSED IN HELA, SIGNAL = 0.8; EXPRESSED IN LUNG, SIGNAL = 0.77; EXPRESSED IN ADULT LIVER, SIGNAL = 0.85; SWISSPROT HIT: Q99871, EVALUE 3.00e-12; NT HIT: U82695.2, EVALUE 0.00e+00; EST_HUMAN HIT: BI767597.1, EVALUE 3.00e-82
cagctccagaactaggaccaagagaagcccgtcaatactgcccacctgggccatccacacctttacctcgagcaactggagcacccaatggtcaggctccggatggtatcgagcaactggtccatgaagtgtagctgcttctgggcgcaggcacagccctgggcaaggaagaccacagacattcactggctccatctaagccaggccaaggccagctgtccccagtgcccctgcccccacatgccacccatgccaggagccaggggaaaggaggggc

SEQ ID NO: 13843 - DNA, 88 bp, Homo sapiens
  MAP TO AL135920.4; EXPRESSED IN FETAL LIVER, SIGNAL = 1.2; EXPRESSED IN ADULT LIVER, SIGNAL = 1.3; EXPRESSED IN BONE MARROW, SIGNAL = 1.3; EXPRESSED IN BRAIN, SIGNAL = 1.1; EXPRESSED IN PLACENTA, SIGNAL =   1; EXPRESSED IN HELA, SIGNAL = 0.61; EXPRESSED IN LUNG, SIGNAL = 1.4; NT HIT: AE008582.1, EVALUE 1.10e+00; EST_HUMAN HIT: BF685074.1, EVALUE 6.20e+00
ctttgtgtccttgttgaggataagcatcatggcttcatcagctgctatattaatggctgatggatggtaatcaccaaacacatttcta

SEQ ID NO: 13844 - DNA, 112 bp, Homo sapiens
  MAP TO AL136140.2; EXPRESSED IN BRAIN, SIGNAL = 4.1; EXPRESSED IN FETAL LIVER, SIGNAL = 4.1; EXPRESSED IN HEART, SIGNAL = 3.8; EXPRESSED IN LUNG, SIGNAL = 4.5; EXPRESSED IN ADULT LIVER, SIGNAL = 5.4; EXPRESSED IN HELA, SIGNAL = 2.6; EXPRESSED IN BONE MARROW, SIGNAL = 3.6; EXPRESSED IN PLACENTA, SIGNAL = 4.6; NT HIT: Y08741.1, EVALUE 1.40e+00; EST_HUMAN HIT: F13133.1, EVALUE 2.10e+00; SWISSPROT HIT: P15265, EVALUE 2.40e-01
cttctagcagcagggcagccccttggtgccagtcctgggcatgcagggctttctctttcactggatgggtgacagcatggtgtctgttcagggctccagcctgatcttggac

SEQ ID NO: 13845 - DNA, 180 bp, Homo sapiens
  MAP TO AL160191.1; EXPRESSED IN PLACENTA, SIGNAL = 0.66; EXPRESSED IN BRAIN, SIGNAL = 0.56; EXPRESSED IN LUNG, SIGNAL = 0.58; EXPRESSED IN ADULT LIVER, SIGNAL = 0.76; EXPRESSED IN FETAL LIVER, SIGNAL = 0.42; EXPRESSED IN BONE MARROW, SIGNAL = 0.55; NT HIT: AF260225.1, EVALUE 1.00e-08; EST_HUMAN HIT: R86255.1, EVALUE 6.00e-08; SWISSPROT HIT: P08547, EVALUE 4.00e-08
gtcagaagactcaatattgttaagatgtcaattctctccaatgtgatctataaattcagtgcaatcttaattaacttcccagctggcatttttacaaaaactgacaagctgattctaaaatttatgtgtaattgcaaagggccaaaaataaccaagatactcatgaagaagaacaaagaa

SEQ ID NO: 13846 - DNA, 399 bp, Homo sapiens
  MAP TO AL137918.1; EXPRESSED IN LUNG, SIGNAL =  10; EXPRESSED IN BONE MARROW, SIGNAL = 8.6; EXPRESSED IN PLACENTA, SIGNAL =  10; EXPRESSED IN ADULT LIVER, SIGNAL =  11; EXPRESSED IN BRAIN, SIGNAL = 9.4; EXPRESSED IN HELA, SIGNAL = 4.1; EXPRESSED IN FETAL LIVER, SIGNAL = 8.5; NT HIT: gi11420521, EVALUE 1.00e-75; EST_HUMAN HIT: BG699802.1, EVALUE 1.00e-75; SWISSPROT HIT: Q09810, EVALUE 2.00e-11
cgccaaattgaggccgcgcagcgaggcggcggccgaagcggccttggcctgtgcagccagtgcctcgccatgcagcacttggtaggccaggttgctcatctctaccacatcataatccacaaggccaaggcggcccacgctggccgctgccaagtactgcgccagtggacagcggagcccaccgcagcccacgactagcacgtgtctgtgcacgcccagctcgggcagcactaactgccggctagagcgcagaatctcatcttggaacacagcggccttccgcggcagctgcaacaccgaaaccagtcgttctggctgcggttcctgctccgccaaaagggccgctgccagcttctgcttcagggaattcaattcctcctcacgttggacaacgtcagc

SEQ ID NO: 13847 - DNA, 195 bp, Homo sapiens
  MAP TO AL121976.2; EXPRESSED IN PLACENTA, SIGNAL = 0.63; EXPRESSED IN LUNG, SIGNAL = 0.7; EXPRESSED IN BRAIN, SIGNAL = 0.73; EXPRESSED IN ADULT LIVER, SIGNAL = 0.71; EXPRESSED IN FETAL LIVER, SIGNAL = 0.65; SWISSPROT HIT: P24153, EVALUE 3.30e+00; NT HIT: gi16161131, EVALUE 6.90e-01; EST_HUMAN HIT: BG572220.1, EVALUE 7.00e-05
ctgcaggtactggtgaacagtcccaagagagtgcaggtggcacactaaccactttgtgtaaatagtcagatcttcctgtgtcaccaagttaggaggattgttttttcccatgaggaagttttctcgagcaacagacaatctttcagctctctgaagggtgtcattgtactcctgcataatgtagccaacttgttt

SEQ ID NO: 13848 - DNA, 374 bp, Homo sapiens
  MAP TO AF168787.1; EXPRESSED IN BONE MARROW, SIGNAL =   8; EXPRESSED IN PLACENTA, SIGNAL =  14; EXPRESSED IN ADULT LIVER, SIGNAL =  30; EXPRESSED IN BRAIN, SIGNAL =  13; EXPRESSED IN LUNG, SIGNAL = 9.9; EXPRESSED IN FETAL LIVER, SIGNAL = 9.6; SWISSPROT HIT: P43633, EVALUE 5.90e-01; NT HIT: gi13994373, EVALUE 0.00e+00; EST_HUMAN HIT: AL530641.1, EVALUE 0.00e+00
ggaacgggatgggattgtggttttctgtgacgtttccatggatgaggacctgtttaccggtgacggtgactaccagtttgacatctacaggctcatgaagaaggagaataacaaccgctggggtgaatatcacccttatagtaatgtgctctggttacattacctgacagacaagatgctgaaacaaatgaccttcaagactaaatgtaacactcctgccatgaagcaaattaagagaaaaatccaggagttccacaggacaatgctgaacttcagctctgccactgacttgctctgccagcacagtctgtttaagtaagctaaatgtatcttactgccccgaaatgagaggagactggtcttgaagcctctgg

SEQ ID NO: 13849 - DNA, 238 bp, Homo sapiens
  MAP TO CHR22_81.0; EXPRESSED IN BONE MARROW, SIGNAL = 0.46; EXPRESSED IN PLACENTA, SIGNAL = 0.67; EXPRESSED IN LUNG, SIGNAL = 0.53; EXPRESSED IN ADULT LIVER, SIGNAL = 0.6; EXPRESSED IN BRAIN, SIGNAL = 0.6; EXPRESSED IN FETAL LIVER, SIGNAL = 0.57; SWISSPROT HIT: P08345, EVALUE 2.20e+00; NT HIT: gi13899349, EVALUE 0.00e+00; EST_HUMAN HIT: BG400812.1, EVALUE 1.00e-129
gattgcccaaaccatggcttcaaggtgggcatgaagctggaggccgtggacctgatggagccccggctcatctgtgtggccacggtgaaacgagtggtgcatcggctcctcagcatccactttgacggctgggacagcgagtacgaccagtgggtggactgcgagtccccagacatctaccccgtcggctggtgtgagctcaccggctaccagctccagcctcctgtggccgcaggtg

SEQ ID NO: 13850 - DNA, 153 bp, Homo sapiens
  MAP TO AL136128.2; EXPRESSED IN HELA, SIGNAL = 1.5; EXPRESSED IN FETAL LIVER, SIGNAL = 2.9; EXPRESSED IN HEART, SIGNAL = 2.9; EXPRESSED IN LUNG, SIGNAL = 2.9; EXPRESSED IN BONE MARROW, SIGNAL = 2.9; EXPRESSED IN PLACENTA, SIGNAL = 3.6; EXPRESSED IN BRAIN, SIGNAL =   3; SWISSPROT HIT: P54197, EVALUE 3.90e-01; NT HIT: AF324892.1, EVALUE 3.40e-02
gggaacagcaacaactctgtggagtacaaaaacccagaagagtaccatagagaggaaagcaaggcatcctccctctgccacactgtctgccacactgtctcccacacagagatcaactgggagtcagagggaacttctttctacaaggaaaag

SEQ ID NO: 13851 - DNA, 115 bp, Homo sapiens
  MAP TO AL133476.4; EXPRESSED IN BRAIN, SIGNAL =   1; EXPRESSED IN HELA, SIGNAL = 1.4; EXPRESSED IN FETAL LIVER, SIGNAL = 1.1; EXPRESSED IN BONE MARROW, SIGNAL = 1.3; EXPRESSED IN PLACENTA, SIGNAL = 0.76; EXPRESSED IN LUNG, SIGNAL = 0.99; EXPRESSED IN ADULT LIVER, SIGNAL = 0.91; EST_HUMAN HIT: BG623215.1, EVALUE 1.00e-41; NT HIT: AF260968.1, EVALUE 1.50e+00
atgttcgctggagtgctgtcagctggtaatgatgaatttagagtgatgctaaatatgctggcctgtacaactttctccagcaaagctgagctatttgagtacagacatggagaag

SEQ ID NO: 13852 - DNA, 137 bp, Homo sapiens
  MAP TO AL136457.1; EXPRESSED IN BRAIN, SIGNAL = 0.84; EXPRESSED IN ADULT LIVER, SIGNAL = 0.9; EXPRESSED IN HELA, SIGNAL = 0.73; EXPRESSED IN FETAL LIVER, SIGNAL = 0.78; EXPRESSED IN PLACENTA, SIGNAL = 0.75; EXPRESSED IN LUNG, SIGNAL = 0.87; EXPRESSED IN BONE MARROW, SIGNAL = 0.98; NT HIT: gi13375884, EVALUE 3.00e-02
atgtgtgtctgtgtcctgaattccttctacaccaagaccaagagccagggtatgtaccctagtcaagggaactgtttcaccaggataaagaaccagaaggaaaaggagaagttggagataacctccttctggcattg

SEQ ID NO: 13853 - DNA, 261 bp, Homo sapiens
  MAP TO CHR21_41.0; EXPRESSED IN BRAIN, SIGNAL = 0.31; SWISSPROT HIT: P03358, EVALUE 2.00e+00; EST_HUMAN HIT: AA443542.1, EVALUE 2.00e-05; NT HIT: AL163278.2, EVALUE 3.00e-07
caaaattcattccaaatatggcaggaagatactgagagtttcaagaagaatttcatgatcgtaaataatgaatggtgtagcattattgcattggtgccgtcgttgccacagtcagtgaattctcgtaagatctggttgcttaaaagtgtgtggcacctccccgcaacctccactctctctattgctcccatcctcaccaggaccctggattcccctttaccttcggccataagtaaaagctccctgaggccaccccagaag

SEQ ID NO: 13854 - DNA, 192 bp, Homo sapiens
  MAP TO CHR22_184_2.0; EXPRESSED IN FETAL LIVER, SIGNAL = 0.53; EXPRESSED IN BONE MARROW, SIGNAL = 0.53; EXPRESSED IN BRAIN, SIGNAL = 0.52; SWISSPROT HIT: Q54243, EVALUE 4.30e+00; EST_HUMAN HIT: AW772425.1, EVALUE 1.00e-09; NT HIT: AL163278.2, EVALUE 4.30e-02
tgggccctgaatccagtgactggtgtccttataagaaggggagagacacagagacacagctgcacaggaaagaaggctgggtgatgacagagacagagattcaagtgatgcagctggaagccaaggatcactggcaaccaccaacgctggaagaggcaaggaagggtcatcccttggagccttcggagacgg

SEQ ID NO: 13855 - DNA, 297 bp, Homo sapiens
  MAP TO AJ239319.2; EXPRESSED IN BONE MARROW, SIGNAL = 0.54; EXPRESSED IN PLACENTA, SIGNAL = 0.65; EXPRESSED IN LUNG, SIGNAL = 0.57; EXPRESSED IN BRAIN, SIGNAL = 0.57; EXPRESSED IN ADULT LIVER, SIGNAL = 0.55; SWISSPROT HIT: Q24753, EVALUE 4.00e-01; EST_HUMAN HIT: BI827666.1, EVALUE 4.00e-75; NT HIT: L17432.1, EVALUE 1.10e+00
tgttcctgtcgcgtggcccgctccgccgggcttggcaggactcggctctccccttctgccgttaccaggacgaccgtctccccgcagcccaggctgcccagactggcgccatgagctcccccgacaaggtagccgtttgtggggccagtttcggcctggagggtggcaagcaggctggctcccgcatggccagccccggagccccacggggccagggccacggcctcgatttgggggcgccaggcagccgcgagggcgagagcagcttcacagatcccgaggtcttcagcttcgagt

SEQ ID NO: 13856 - DNA, 202 bp, Homo sapiens
  MAP TO CHR22_0.0; EXPRESSED IN HEART, SIGNAL = 2.5; EXPRESSED IN PLACENTA, SIGNAL = 2.7; EXPRESSED IN ADULT LIVER, SIGNAL = 2.5; EXPRESSED IN FETAL LIVER, SIGNAL = 2.6; EXPRESSED IN BONE MARROW, SIGNAL = 2.7; EXPRESSED IN BRAIN, SIGNAL = 2.6; EXPRESSED IN HELA, SIGNAL =   2; EXPRESSED IN LUNG, SIGNAL = 2.4; NT HIT: M87858.1, EVALUE 5.00e-45; SWISSPROT HIT: P05162, EVALUE 3.00e-09; EST_HUMAN HIT: BG198115.1, EVALUE 1.00e-40
ccatcagtgccatcggcgatgctgcctgtgatcttcagggttgaccccggcttcatgtccatgttcttaacctcaagttccccctgggccaacagagaaacattccactcgagtccccacagaaaatcaatcccacacttgcccagcagcttcatccacctcatgccaacccagctgcaggtctcaatccccctgcccacgt

SEQ ID NO: 13857 - DNA, 409 bp, Homo sapiens
  MAP TO CHR22_207.0; EXPRESSED IN FETAL LIVER, SIGNAL = 1.8; EXPRESSED IN PLACENTA, SIGNAL = 0.91; EXPRESSED IN HELA, SIGNAL = 3.5; EXPRESSED IN ADULT LIVER, SIGNAL =   1; EXPRESSED IN LUNG, SIGNAL = 1.2; EXPRESSED IN HEART, SIGNAL = 1.4; EXPRESSED IN BONE MARROW, SIGNAL =   2; EXPRESSED IN BRAIN, SIGNAL = 1.9; NT HIT: gi15318439, EVALUE 0.00e+00; SWISSPROT HIT: P08708, EVALUE 5.00e-69; EST_HUMAN HIT: BG752925.1, EVALUE 0.00e+00
atgtgccgcgtttgcaccaaaaccgtgaagaaggcggcccgggtcatcatagaaaagtactacacacgcctgggcaacgacttccacacgaacaagcgcgtgtgcaaggagatcgccattatccccagcaagaagctccgcaacaagatagcaggctatgtcacgcatctgatgaaatggattcagagaggcccagtaagaggtatctccatcaagctgcaggaggaggagagagaaaggagagacaattatgttcctgaggtctcagccttggatcaggagataattgaagtagatcctgacactaaggaaatgctgaagcttttggacttcggcagtctgtccaacctgcaggtcactcagcctacagttgggatgaacttcaaaatgcctcggggacctgtttgaa

SEQ ID NO: 13858 - DNA, 198 bp, Homo sapiens
  MAP TO CHR22_181.0; EXPRESSED IN BRAIN, SIGNAL = 0.91; EXPRESSED IN HELA, SIGNAL = 1.6; EXPRESSED IN FETAL LIVER, SIGNAL = 0.88; EXPRESSED IN HEART, SIGNAL = 1.4; EXPRESSED IN BONE MARROW, SIGNAL = 0.97; EXPRESSED IN LUNG, SIGNAL =   4; EXPRESSED IN ADULT LIVER, SIGNAL = 1.3; EST_HUMAN HIT: BG117046.1, EVALUE 5.00e-95; NT HIT: gi9257248, EVALUE 4.00e-95; SWISSPROT HIT: P35625, EVALUE 2.00e-38
atcaagtcctgctactacctgccttgctttgtgacttccaagaacgagtgtctctggaccgacatgctctccaatttcggttaccctggctaccagtccaaacactacgcctgcatccggcagaagggcggctactgcagctggtaccgaggatgggcccccccggataaaagcatcatcaatgccacagacccctga

SEQ ID NO: 13859 - DNA, 146 bp, Homo sapiens
  MAP TO CHR22_83.0; EXPRESSED IN PLACENTA, SIGNAL =   2; EXPRESSED IN LUNG, SIGNAL = 1.7; EXPRESSED IN BONE MARROW, SIGNAL = 2.5; EXPRESSED IN ADULT LIVER, SIGNAL =   2; EXPRESSED IN HELA, SIGNAL = 6.2; EXPRESSED IN BRAIN, SIGNAL = 1.8; EXPRESSED IN FETAL LIVER, SIGNAL = 2.1; EXPRESSED IN HEART, SIGNAL = 1.6; EST_HUMAN HIT: BE737154.1, EVALUE 9.00e-50; NT HIT: gi15147251, EVALUE 6.00e-50
gctcagtcaggcaaccaagaattcaggcagcagtcaaggcctaggaggcagcccgggtagtcacagccatacgaccatggccaacaaggtggagacgctgaaggaggaggaggaggagctgaagaggaaagtggagcaatgcaggg

SEQ ID NO: 13860 - DNA, 177 bp, Homo sapiens
  MAP TO AC009802.13; EXPRESSED IN PLACENTA, SIGNAL = 2.9; EXPRESSED IN BONE MARROW, SIGNAL =   2; EXPRESSED IN LUNG, SIGNAL = 2.2; EXPRESSED IN ADULT LIVER, SIGNAL =   2; EXPRESSED IN HELA, SIGNAL = 1.1; EXPRESSED IN BRAIN, SIGNAL =   2; EXPRESSED IN FETAL LIVER, SIGNAL = 1.7; EXPRESSED IN HEART, SIGNAL = 1.9; SWISSPROT HIT: P05120, EVALUE 1.00e-26; EST_HUMAN HIT: AL544520.1, EVALUE 5.00e-95; NT HIT: gi4505594, EVALUE 3.00e-95
cttggccatctggtcttcggtgctgcccctggagcccatgtagaccatggccatggtggacgagatgctccatggggagaggaagaggttctgggtggggcttgcttttgccagatgcttgaataaattgagggcaaagagtgtgtttgccacacaaagatcctccattgtttcaat

SEQ ID NO: 13861 - DNA, 121 bp, Homo sapiens
  MAP TO AC020550.2; EXPRESSED IN PLACENTA, SIGNAL = 1.4; EXPRESSED IN LUNG, SIGNAL = 1.3; EXPRESSED IN BONE MARROW, SIGNAL = 1.4; EXPRESSED IN ADULT LIVER, SIGNAL = 1.3; EXPRESSED IN HELA, SIGNAL = 0.75; EXPRESSED IN BRAIN, SIGNAL = 1.2; EXPRESSED IN FETAL LIVER, SIGNAL = 1.2; SWISSPROT HIT: P34349, EVALUE 5.00e-06; EST_HUMAN HIT: BE003670.1, EVALUE 8.00e-62; NT HIT: AF151853.1, EVALUE 5.00e-62
aatgaaacatttttgtgtcatcggtttactaagtttgtgatgaaatacaatttgatgtccaaggataacctgattgtaccaattttagaagaggaagtacagaattcagtttctggggaaa

SEQ ID NO: 13862 - DNA, 337 bp, Homo sapiens
  MAP TO AL136103.2; EXPRESSED IN HELA, SIGNAL =   4; EXPRESSED IN HEART, SIGNAL = 4.6; EXPRESSED IN LUNG, SIGNAL = 4.9; EXPRESSED IN FETAL LIVER, SIGNAL = 4.1; EXPRESSED IN PLACENTA, SIGNAL = 5.8; EXPRESSED IN ADULT LIVER, SIGNAL = 4.8; EXPRESSED IN BONE MARROW, SIGNAL = 4.3; EXPRESSED IN BRAIN, SIGNAL = 4.5; SWISSPROT HIT: Q29076, EVALUE 2.20e-01; EST_HUMAN HIT: AL043810.1, EVALUE 3.00e-08; NT HIT: AB063285.1, EVALUE 4.00e-13
aagtggtaatgttaatggtacttgtgatggcagcggcggcctgtctggagcagccgcttcgaagattagcttcagtggggcaggaagggctggtgggagccaggaacagacaagagccccaccccctacccagttgaaggggcgggagcccgcactccttggtgcagctgcagctcccagccgcactctggaccctggcatccctgtgctctcaggggcctgggaagcccctgccccagcgggcttggaagtgcctgctcctgctcccgggcctctccctgctcccggtgcccactccagtgcagagcaaagttgtggccaagcccgagggctgtcg

SEQ ID NO: 13863 - DNA, 122 bp, Homo sapiens
  MAP TO AL136444.1; EXPRESSED IN HELA, SIGNAL = 0.61; EXPRESSED IN PLACENTA, SIGNAL = 0.99; EXPRESSED IN LUNG, SIGNAL = 0.86; EXPRESSED IN ADULT LIVER, SIGNAL = 0.95; EXPRESSED IN BONE MARROW, SIGNAL = 0.81; EXPRESSED IN BRAIN, SIGNAL = 0.83; SWISSPROT HIT: P55204, EVALUE 2.00e+00; EST_HUMAN HIT: BE255431.1, EVALUE 2.30e+00; NT HIT: AL163206.2, EVALUE 1.00e-01
ctttttacagataaggagagtgaggcgcagagtgccttgaagtcgagccacaactgacacttggggccctgagccagggcaaggtttctcttccttgctgttcttcctttctaaatttgtat

SEQ ID NO: 13864 - DNA, 102 bp, Homo sapiens
  MAP TO CHR22_177.0; EXPRESSED IN HELA, SIGNAL = 0.69; EXPRESSED IN PLACENTA, SIGNAL = 0.67; EXPRESSED IN ADULT LIVER, SIGNAL = 0.67; EXPRESSED IN BRAIN, SIGNAL = 0.66; NT HIT: gi11418322, EVALUE 1.00e-50; EST_HUMAN HIT: AW103136.1, EVALUE 1.00e-50
tagggaatggacaaaaagttccggcacgttccactggctgagggagcatgggacacggacagctcagctgcacgtccgtaaaccgtcccttccacggccacc

SEQ ID NO: 13865 - DNA, 172 bp, Homo sapiens
  MAP TO CHR22_39.0; EXPRESSED IN HELA, SIGNAL = 4.9; EXPRESSED IN HEART, SIGNAL = 5.4; EXPRESSED IN PLACENTA, SIGNAL = 6.5; EXPRESSED IN BONE MARROW, SIGNAL = 7.6; EXPRESSED IN ADULT LIVER, SIGNAL = 4.2; EXPRESSED IN BRAIN, SIGNAL = 6.8; EXPRESSED IN FETAL LIVER, SIGNAL = 6.7; EXPRESSED IN LUNG, SIGNAL = 5.3; EST_HUMAN HIT: AI346511.1, EVALUE 4.00e-92; NT HIT: AF288742.1, EVALUE 1.00e-32; SWISSPROT HIT: P13082, EVALUE 1.50e+00
acactcgaaaattaaacctgaaagactggttcaggccatgatgggaagtgggagtcgaacatgcctcatcataccctccagcattaacatcaacacagaccttaaggctgataagaagcatttacaatctattctctctgaagtcttctacctggaggcttcatctgcatga

SEQ ID NO: 13866 - DNA, 140 bp, Homo sapiens
  MAP TO AC022528.3; EXPRESSED IN BONE MARROW, SIGNAL = 0.86; EXPRESSED IN BRAIN, SIGNAL = 0.9; EXPRESSED IN FETAL LIVER, SIGNAL = 0.88; EXPRESSED IN LUNG, SIGNAL = 0.79; EXPRESSED IN PLACENTA, SIGNAL = 0.84; EST_HUMAN HIT: AI111169.1, EVALUE 2.80e+00; NT HIT: AF229390.1, EVALUE 3.00e-02
aaatatcatagacacactccccactgatcattataagaaagttagaaactttcagaataatatagtagatgaagccatgatttcagttaatgataaaattgtcattgtgaatagcatgttcgtggccaacaaaaacagat

SEQ ID NO: 13867 - DNA, 145 bp, Homo sapiens
  MAP TO AL078623.28; EXPRESSED IN BONE MARROW, SIGNAL = 1.5; EXPRESSED IN BRAIN, SIGNAL = 1.8; EXPRESSED IN HEART, SIGNAL = 1.5; EXPRESSED IN FETAL LIVER, SIGNAL = 1.3; EXPRESSED IN PLACENTA, SIGNAL = 2.1; EXPRESSED IN LUNG, SIGNAL = 1.8; EXPRESSED IN ADULT LIVER, SIGNAL = 1.8
gagaaggaagaaaagaagaagaagaggaagaagaagaagagaagaagagaaggagaagagaaggaagagaaaagaagaagaggaggaggaggagaaggaagaaaagaagaagaagaggaggaagaggaggagacaatggcttatg

SEQ ID NO: 13868 - DNA, 131 bp, Homo sapiens
  MAP TO AC022263.3; EXPRESSED IN BONE MARROW, SIGNAL = 3.3; EXPRESSED IN HELA, SIGNAL = 2.1; EXPRESSED IN BRAIN, SIGNAL = 3.4; EXPRESSED IN HEART, SIGNAL = 2.8; EXPRESSED IN FETAL LIVER, SIGNAL = 2.5; EXPRESSED IN PLACENTA, SIGNAL = 3.4; EXPRESSED IN ADULT LIVER, SIGNAL = 2.7; EST_HUMAN HIT: BG677646.1, EVALUE 6.50e-01; NT HIT: M23605.1, EVALUE 4.40e-01; SWISSPROT HIT: P50488, EVALUE 4.50e+00
ctgatacagatgaatcatttttctgctccctctcgcaattccgtctggtatctgtgatttgtatacgccctcctgctgctctaggtccaatctctgtgcagttggatgtcttgatattggtaactcttgac

SEQ ID NO: 13869 - DNA, 130 bp, Homo sapiens
  MAP TO AL136312.1; EXPRESSED IN BONE MARROW, SIGNAL = 0.74; EXPRESSED IN BRAIN, SIGNAL = 0.66; EXPRESSED IN FETAL LIVER, SIGNAL = 0.66; EXPRESSED IN PLACENTA, SIGNAL = 0.74; EXPRESSED IN LUNG, SIGNAL = 0.73; SWISSPROT HIT: P12980, EVALUE 2.00e+00; EST_HUMAN HIT: AV650481.1, EVALUE 7.00e-07; NT HIT: AF069333.2, EVALUE 3.00e-08
gccatggacaggtaccagtctgtggcccgggggttgtggacccctgccatagaggacactgtggtctatgttaactataataattctacccaccaactaccatcccaggccaatgattggattgcaaatg

SEQ ID NO: 13870 - DNA, 153 bp, Homo sapiens
  MAP TO AL136084.2; EXPRESSED IN FETAL LIVER, SIGNAL = 3.8; EXPRESSED IN BONE MARROW, SIGNAL = 4.4; EXPRESSED IN BRAIN, SIGNAL = 4.2; EXPRESSED IN HEART, SIGNAL = 4.5; EXPRESSED IN HELA, SIGNAL = 2.3; EXPRESSED IN PLACENTA, SIGNAL = 5.4; EXPRESSED IN LUNG, SIGNAL = 4.4; EXPRESSED IN ADULT LIVER, SIGNAL = 3.4; SWISSPROT HIT: Q12968, EVALUE 5.80e+00; EST_HUMAN HIT: AA082670.1, EVALUE 7.70e-01; NT HIT: AF240786.1, EVALUE 1.30e-01
gagctggaagaggagaaaggaggtggcaacatggggcagctttgggtgaccttctcaggggaaataaccacttgtgagcccagagaagctcccctggaggaccacctgcttctgctgtcagcgggaagtcacctccaagctcctctggtcctt

SEQ ID NO: 13871 - DNA, 77 bp, Homo sapiens
  MAP TO CHR22_99.0; EXPRESSED IN HELA, SIGNAL = 1.5; EXPRESSED IN FETAL LIVER, SIGNAL = 2.7; EXPRESSED IN LUNG, SIGNAL = 0.75; EXPRESSED IN PLACENTA, SIGNAL =   1; EXPRESSED IN ADULT LIVER, SIGNAL = 0.46; EXPRESSED IN BONE MARROW, SIGNAL = 3.3; EXPRESSED IN BRAIN, SIGNAL = 3.2; EXPRESSED IN HEART, SIGNAL = 2.8; EST_HUMAN HIT: AW207309.1, EVALUE 8.00e-36; NT HIT: gi14764517, EVALUE 2.30e-01
ttcttcagatatttcatcagagatcagcacgaacaaaggatgatcatggaccagatgccctatgcccatctgattcc

SEQ ID NO: 13872 - DNA, 207 bp, Homo sapiens
  MAP TO CHR22_232.0; EXPRESSED IN HEART, SIGNAL = 1.4; EXPRESSED IN FETAL LIVER, SIGNAL = 1.3; EXPRESSED IN LUNG, SIGNAL =   1; EXPRESSED IN ADULT LIVER, SIGNAL = 1.1; EXPRESSED IN BONE MARROW, SIGNAL = 1.5; EXPRESSED IN BRAIN, SIGNAL = 1.5; EXPRESSED IN HELA, SIGNAL = 2.7; NT HIT: AF410771.1, EVALUE 1.90e-01; SWISSPROT HIT: P40889, EVALUE 2.00e-03; EST_HUMAN HIT: BG286400.1, EVALUE 1.10e+00
ccctgcccatctggtcattggtgctgtgcaacaggaaagactcggggtgctggttgcattgctgcagcaggagagactcggggttctggttgcattgctgcagcaggagagactcagggttctcgttgcattgctgcagtaggagagacttggggttctcgttgcattgctgcaagcaggagagactcggggttctcgttgcattgc

SEQ ID NO: 13873 - DNA, 88 bp, Homo sapiens
  MAP TO CHR21_47.0; EXPRESSED IN BRAIN, SIGNAL = 0.28; NT HIT: AF180079.1, EVALUE 1.10e+00
tttttctttcatgtccatgtcaccaggggctccagtgaatccatgctggagcttcagtttgctctcctgggcgttgtctttaggcata

SEQ ID NO: 13874 - DNA, 287 bp, Homo sapiens
  MAP TO CHR22_211.0; EXPRESSED IN FETAL LIVER, SIGNAL = 1.3; EXPRESSED IN BONE MARROW, SIGNAL = 1.5; EXPRESSED IN BRAIN, SIGNAL = 1.3; EXPRESSED IN HELA, SIGNAL = 2.4; EXPRESSED IN PLACENTA, SIGNAL = 0.7; EXPRESSED IN LUNG, SIGNAL = 0.78; EXPRESSED IN ADULT LIVER, SIGNAL = 0.78; EST_HUMAN HIT: AI831462.1, EVALUE 1.00e-96; NT HIT: AL163227.2, EVALUE 1.00e-104; SWISSPROT HIT: Q01668, EVALUE 1.10e-02
aagatgacaggaaaatgtgggaaagtttggaacttcctagagacttgttgaatgtctttgacaaaaatgctgatggtgatgtgaacaataaggtccaggctgaggtggtctcagatggagatgaggaacctgttgggaactggagcaaatgtgactcttgttatgttttagtaaagaaactggcagcattttgcccctgccctagagatttgtgcaactttaaacttaagagagatgatttagggtatctggtggaagaaatttctaagcagcaaactattcaagag

SEQ ID NO: 13875 - DNA, 80 bp, Homo sapiens
  MAP TO AL158093.3; EXPRESSED IN LUNG, SIGNAL = 2.1; EXPRESSED IN HEART, SIGNAL =   2; EXPRESSED IN BONE MARROW, SIGNAL = 1.8; EXPRESSED IN ADULT LIVER, SIGNAL = 2.5; EXPRESSED IN PLACENTA, SIGNAL = 1.5; EXPRESSED IN BRAIN, SIGNAL = 2.1; EXPRESSED IN HELA, SIGNAL = 1.6; EXPRESSED IN FETAL LIVER, SIGNAL = 2.2; EST_HUMAN HIT: BE544586.1, EVALUE 3.50e-01
gtattttcaaaacatggtaccttttatggctcgaaggcatgtttgtggcgggtgttggcaggttccctgtttatgtttga

SEQ ID NO: 13876 - DNA, 166 bp, Homo sapiens
  MAP TO CHR22_21.0; EXPRESSED IN BONE MARROW, SIGNAL = 1.3; EXPRESSED IN BRAIN, SIGNAL = 1.1; EXPRESSED IN PLACENTA, SIGNAL = 1.4; EXPRESSED IN ADULT LIVER, SIGNAL = 1.7; EXPRESSED IN LUNG, SIGNAL = 1.4; EXPRESSED IN HEART, SIGNAL = 1.2; EXPRESSED IN HELA, SIGNAL = 1.4; EXPRESSED IN FETAL LIVER, SIGNAL = 1.3; EST_HUMAN HIT: BG337214.1, EVALUE 2.00e-88; SWISSPROT HIT: Q9UH06, EVALUE 2.00e-30; NT HIT: gi14249397, EVALUE 1.00e-88
tccttctcctggatggtgcactccttacaataataggcatcagagaccccaggtcctccacagatcacacagcgcccctggtaagatccatagttacactcatcacatatgcgcaccagagtgcagggacgcacataggagtcacaaatcacacacttgccatcac

SEQ ID NO: 13877 - DNA, 318 bp, Homo sapiens
  MAP TO AC016763.5; EXPRESSED IN BRAIN, SIGNAL = 4.8; EXPRESSED IN HELA, SIGNAL =   2; EXPRESSED IN FETAL LIVER, SIGNAL = 4.7; EXPRESSED IN BONE MARROW, SIGNAL = 4.3; EXPRESSED IN PLACENTA, SIGNAL = 6.1; EXPRESSED IN ADULT LIVER, SIGNAL = 4.4; EXPRESSED IN LUNG, SIGNAL = 4.7; EST_HUMAN HIT: BG391934.1, EVALUE 0.00e+00; NT HIT: gi14726783, EVALUE 0.00e+00; SWISSPROT HIT: Q92854, EVALUE 8.70e+00
aacatgacccagtcctgaaacagatagaccctgaaatgctgaatagtttttcaagctcttcccaaactatagacttttcttctaatttctctcggaccaatgcttccagtaaacattgtgaaaatagactgtctctttctgaaatattaagcaatatcagatcatgtcgactacagtgtttccagccaaggctactaaatttacaggacagtgatagtgaagaatgtacctcaagaaaaccagggcagactgtgaacaataaaagagtttctgcagcatctgtagctttattgaacaccagcaagaatggcatatcag

SEQ ID NO: 13878 - DNA, 169 bp, Homo sapiens
  MAP TO CHR22_178.0; EXPRESSED IN FETAL LIVER, SIGNAL = 0.57; EXPRESSED IN PLACENTA, SIGNAL = 0.67; EXPRESSED IN LUNG, SIGNAL = 0.73; EXPRESSED IN ADULT LIVER, SIGNAL = 0.69; EXPRESSED IN BRAIN, SIGNAL = 0.65; EXPRESSED IN HELA, SIGNAL = 0.56; EST_HUMAN HIT: BE927852.1, EVALUE 2.20e-01; NT HIT: AF355273.1, EVALUE 1.50e-01; SWISSPROT HIT: Q00888, EVALUE 9.80e+00
ggaacagcagagaggaaggccatgacgaggatacgagcaaatccctctgcctcttctagatctttaccacccaccactcgcaacagggagcagctggcaaagctgaaatgttgcttgcagaatctcagtcccaggatcacaaagcagaatacataagatatctttgcag

SEQ ID NO: 13879 - DNA, 114 bp, Homo sapiens
  MAP TO AL121993.2; EXPRESSED IN BONE MARROW, SIGNAL = 1.3; EXPRESSED IN BRAIN, SIGNAL =   1; EXPRESSED IN HELA, SIGNAL = 1.4; EXPRESSED IN PLACENTA, SIGNAL = 1.4; EXPRESSED IN LUNG, SIGNAL = 1.4; EXPRESSED IN ADULT LIVER, SIGNAL = 1.4; SWISSPROT HIT: Q9UNX4, EVALUE 1.00e-16; NT HIT: gi14748718, EVALUE 8.00e-58
attgaagacccggaagaaccagaccccaagaaaatcaaaggatcttctcctggaatacaagatactcttgaggcagaggatggtgcctttgagacggatgaagcccctgaggat

SEQ ID NO: 13880 - DNA, 187 bp, Homo sapiens
  MAP TO CHR22_127.0; EXPRESSED IN BRAIN, SIGNAL = 1.2; EXPRESSED IN HELA, SIGNAL = 1.2; EXPRESSED IN HEART, SIGNAL = 1.2; EXPRESSED IN PLACENTA, SIGNAL = 1.3; EXPRESSED IN LUNG, SIGNAL = 1.3; EXPRESSED IN FETAL LIVER, SIGNAL = 0.97; EXPRESSED IN ADULT LIVER, SIGNAL = 1.2; EXPRESSED IN BONE MARROW, SIGNAL =   1; SWISSPROT HIT: P19382, EVALUE 8.50e-01; NT HIT: AB011399.1, EVALUE 1.70e-01
tgcgggacaaactggacgcagcagggtgttttgggggcacagagccaccgtcggagtcacacatcgcacacacccagcaagtgatagtgtgtgaccggacatggtgctgaaggtggcctatgtcagccatgggcttggtgattttgagagccaggatgcggttcctggcgcaggtgcctgggggcgc

SEQ ID NO: 13881 - DNA, 180 bp, Homo sapiens
  MAP TO CHR21_2.0; EXPRESSED IN FETAL LIVER, SIGNAL = 1.2; EXPRESSED IN BONE MARROW, SIGNAL = 1.3; EXPRESSED IN LUNG, SIGNAL = 0.89; EXPRESSED IN ADULT LIVER, SIGNAL = 0.76; EXPRESSED IN HELA, SIGNAL = 3.6; EXPRESSED IN BRAIN, SIGNAL = 1.3; EST_HUMAN HIT: AA912432.1, EVALUE 8.00e-26; SWISSPROT HIT: P10220, EVALUE 1.50e+00; NT HIT: AL163201.2, EVALUE 5.00e-97
tatcggcctgctctgggccacagagactggccctgacgacttctcagctcccggtcagccctgtcaccccgggccagttcttcatcgtacctggagacagaaacagccaggatcatggcaggctctctttcgaaggcaacaggcagggccaccaggctgctgtgtggcgaatacgacatt

SEQ ID NO: 13882 - DNA, 263 bp, Homo sapiens
  MAP TO CHR22_179.0; EXPRESSED IN BONE MARROW, SIGNAL = 0.94; EXPRESSED IN BRAIN, SIGNAL = 1.2; EXPRESSED IN PLACENTA, SIGNAL = 1.1; EXPRESSED IN LUNG, SIGNAL = 1.3; EXPRESSED IN FETAL LIVER, SIGNAL = 0.79; EXPRESSED IN ADULT LIVER, SIGNAL = 1.1; EST_HUMAN HIT: BI770045.1, EVALUE 2.00e-80; SWISSPROT HIT: P77173, EVALUE 2.10e+00; NT HIT: gi16167426, EVALUE 1.00e-80
ctagctggggcaggagagcgggcctcaaagccacctgaggtgggtgccaggaccccttggtggggacctgggagttcactggggagtgaggatgcagcgagtcctcgggcggcatgttgacctcgccgtagtagatgtagcgcagcatggactcgaaggcctgcctgctgggcaccatctccccgatggagatgttcacctgcccatcttcgggcatgaaggaccggaacatggcttcaaagtagctgcagacaacgagcggt

SEQ ID NO: 13883 - DNA, 140 bp, Homo sapiens
  MAP TO AL136381.1; EXPRESSED IN BONE MARROW, SIGNAL = 0.97; EXPRESSED IN HELA, SIGNAL = 0.6; EXPRESSED IN BRAIN, SIGNAL = 0.88; EXPRESSED IN PLACENTA, SIGNAL = 0.81; EXPRESSED IN LUNG, SIGNAL = 0.93; EXPRESSED IN ADULT LIVER, SIGNAL = 1.2; EST_HUMAN HIT: BI602105.1, EVALUE 1.00e-08; NT HIT: AF223391.1, EVALUE 3.00e-11
gtgttgtcaggacctcctgaggctgtgtcacgtatatccttaatcttggcaaaataaacttctaaattgagacctgtctcagatactttttggtttactatatagtcatctggtgtttcaacagacatttcctttaattc

SEQ ID NO: 13884 - DNA, 167 bp, Homo sapiens
  MAP TO CHR22_206.0; EXPRESSED IN BRAIN, SIGNAL = 0.87; EXPRESSED IN HELA, SIGNAL =   1; EXPRESSED IN FETAL LIVER, SIGNAL = 0.84; EXPRESSED IN PLACENTA, SIGNAL = 1.1; EXPRESSED IN BONE MARROW, SIGNAL = 0.94; EXPRESSED IN LUNG, SIGNAL = 1.1; EXPRESSED IN ADULT LIVER, SIGNAL =   2; NT HIT: gi13648116, EVALUE 3.00e-89; EST_HUMAN HIT: BE740086.1, EVALUE 4.00e-89; SWISSPROT HIT: Q9BZC7, EVALUE 2.20e-01
ggccatgcagcagcccgccaccacctggcacacagcaggagtggacgacttcgccagcttccagcgcaagtggtttgaggtggcctttgtggcagaagagctcgtgcactctgagattcctgcctttctcctgccctggctgcctagccggccagcctcctatgcaa

SEQ ID NO: 13885 - DNA, 129 bp, Homo sapiens
  MAP TO AC011676.4; EXPRESSED IN BRAIN, SIGNAL = 0.42; EXPRESSED IN PLACENTA, SIGNAL = 0.73; EXPRESSED IN LUNG, SIGNAL = 0.54; EXPRESSED IN ADULT LIVER, SIGNAL = 0.42; SWISSPROT HIT: P28284, EVALUE 2.70e+00; NT HIT: X58445.1, EVALUE 1.70e+00
ctggggtggcgccaggcccaccgagaggttcagcagcgacagctgtcgttgggtgtagatgcttggtgccaaggcgtgccgccccttccagggaaagcacgtggggcagggcaccttgcgcaccagcat

SEQ ID NO: 13886 - DNA, 92 bp, Homo sapiens
  MAP TO AL133261.4; EXPRESSED IN BRAIN, SIGNAL = 2.1; EXPRESSED IN FETAL LIVER, SIGNAL =   2; EXPRESSED IN HEART, SIGNAL = 1.8; EXPRESSED IN BONE MARROW, SIGNAL = 2.2; EXPRESSED IN PLACENTA, SIGNAL = 2.3; EXPRESSED IN ADULT LIVER, SIGNAL = 2.2; EXPRESSED IN HELA, SIGNAL = 1.1; EXPRESSED IN LUNG, SIGNAL = 2.1; NT HIT: AF223391.1, EVALUE 2.90e-01
ctgtacaggttgctatacttgcattacgtgcaaatagacttagagataatttaaaagttctaagtagtgtatactttgaaaaactttgatcc

SEQ ID NO: 13887 - DNA, 165 bp, Homo sapiens
  MAP TO AC015822.3; EXPRESSED IN BONE MARROW, SIGNAL = 1.5; EXPRESSED IN HEART, SIGNAL = 1.3; EXPRESSED IN LUNG, SIGNAL = 1.4; EXPRESSED IN BRAIN, SIGNAL = 1.4; EXPRESSED IN PLACENTA, SIGNAL = 1.5; EXPRESSED IN HELA, SIGNAL = 0.69; EXPRESSED IN ADULT LIVER, SIGNAL = 1.8; EXPRESSED IN FETAL LIVER, SIGNAL = 1.5; EST_HUMAN HIT: R99164.1, EVALUE 2.10e-01; SWISSPROT HIT: Q9QZZ4, EVALUE 5.10e-01
atgagacttcactatgaagacattatgaaatatggtaaaaacaaatgtcttcataatcatatttatgataaatatagtggtgagtttcatagggatttaaataaaatcatccagtgtagcctgacattgattcaaatcactattgaagaaaatgaattttgtgat

SEQ ID NO: 13888 - DNA, 250 bp, Homo sapiens
  MAP TO CHR22_111.0; EXPRESSED IN BONE MARROW, SIGNAL = 0.94; EXPRESSED IN PLACENTA, SIGNAL = 1.1; EXPRESSED IN ADULT LIVER, SIGNAL = 0.78; EXPRESSED IN BRAIN, SIGNAL = 0.96; EXPRESSED IN FETAL LIVER, SIGNAL = 0.76; EST_HUMAN HIT: BE548505.1, EVALUE 1.00e-56; SWISSPROT HIT: P51825, EVALUE 2.50e-02; NT HIT: gi14777883, EVALUE 0.00e+00
atcaatgaaggagaagtcatctactctcttttcagggcaggcgtccggtggaggcggcccctccatcccatcggtggattccaggtcagtgctggagtggtccacgctggtgctccgctggtccctggagcagtcatactggtcccctgccgaggtgggctccgtttgggaggacagagaagacaaacggctgctggggggctgtttccttgtcgatgtggcactgctatctggggactcagtggccaag

SEQ ID NO: 13889 - DNA, 169 bp, Homo sapiens
  MAP TO AC004846.2; EXPRESSED IN BONE MARROW, SIGNAL = 2.2; EXPRESSED IN PLACENTA, SIGNAL =   3; EXPRESSED IN HEART, SIGNAL = 2.5; EXPRESSED IN LUNG, SIGNAL = 2.5; EXPRESSED IN ADULT LIVER, SIGNAL = 2.8; EXPRESSED IN BRAIN, SIGNAL = 2.5; EXPRESSED IN FETAL LIVER, SIGNAL = 2.6; EST_HUMAN HIT: BG259250.1, EVALUE 5.50e-02; SWISSPROT HIT: Q9UKP5, EVALUE 2.00e-06; NT HIT: AF109907.1, EVALUE 2.00e-90
atgaccaggggctccgaggtggggccccgggcatggagtcgctcaggggccaggtccccctcagcaccccgctcgtaatgcaggatggtgctggctgctggcagggcccgggccgcctcgatggtccagtgcccattgaggtagtattccccacgaacattcttcacag

SEQ ID NO: 13890 - DNA, 54 bp, Homo sapiens
  MAP TO CHR22_20.0; EXPRESSED IN BRAIN, SIGNAL = 0.72; EXPRESSED IN HELA, SIGNAL = 0.59; EXPRESSED IN LUNG, SIGNAL = 0.63; EXPRESSED IN FETAL LIVER, SIGNAL = 0.63; EXPRESSED IN PLACENTA, SIGNAL = 0.74; NT HIT: AJ229041.1, EVALUE 2.20e+00
cctgcgttcaagtcattgtggcccaagactgaactgcagaatggaaaggagtga

SEQ ID NO: 13891 - DNA, 470 bp, Homo sapiens
  MAP TO AL136304.2; EXPRESSED IN FETAL LIVER, SIGNAL = 0.81; EXPRESSED IN BONE MARROW, SIGNAL = 0.77; EXPRESSED IN BRAIN, SIGNAL = 0.73; EXPRESSED IN PLACENTA, SIGNAL = 1.1; EXPRESSED IN LUNG, SIGNAL = 1.2; EST_HUMAN HIT: BG004189.1, EVALUE 9.00e-99; SWISSPROT HIT: Q14999, EVALUE 9.00e-45; NT HIT: gi14781548, EVALUE 2.00e-92
aggaagtcccactgctgcatggtctctccttcatccgtgtttccgtgtgtgtctccgtgttccttctgcccctgtgccccttctctctgatgttctggctgcagatggtgctgggccagatcgaagaccacagacgaacccaccaacccatcaacatccctttctttgatgtgttcctcagatacctgtgccagggttcgtgcctgttgccgtgttgctccacctccccacacctatgtctgtttcccctctacaccctacctgaccgtgaccaccaccccttcccacttgcccccaggctccagtgtggaagtgaaggaggacaagtgctgggagaaggtggaggtgtcctccaacccgcaccgggccagcaagctgacggaccacaaccccaagacctattgggagtccaacggcagcgccggctcccactacatcaccctgcacatgcgccggggcatcctcatcag

SEQ ID NO: 13892 - DNA, 396 bp, Homo sapiens
  MAP TO AL138722.2; EXPRESSED IN BRAIN, SIGNAL = 1.9; EXPRESSED IN HELA, SIGNAL = 0.87; EXPRESSED IN FETAL LIVER, SIGNAL = 1.1; EXPRESSED IN BONE MARROW, SIGNAL = 1.3; EXPRESSED IN HEART, SIGNAL = 1.3; EXPRESSED IN LUNG, SIGNAL = 1.3; EXPRESSED IN ADULT LIVER, SIGNAL = 1.3; EST_HUMAN HIT: BG720179.1, EVALUE 0.00e+00; SWISSPROT HIT: Q09749, EVALUE 4.00e-05; NT HIT: AB040880.1, EVALUE 9.40e-02
gacatcagccctgtggcacaccgtgtggcgctctgtcacctggctggctgccaggagcaagcagcctggtaccacaccctccagatcctcttcttcctggttagcgcttatttcttctcctgccccgtgcctgagaagtacttcccgggttcctgtgacatcgtgggccatgggcatcagatcttccatgcatttctgtccatctgtacgctctcccagctggaggccatcctcctggactaccaggggcggcaggagatcttcctgcagcgccatggacccctatctgtccacatggcctgcctctccttcttcttcctggctgcctgcagtgctgccaccgcagcccttctgaggcacaaagtcaaggccagactgaccaagaaagattcctga

SEQ ID NO: 13893 - DNA, 144 bp, Homo sapiens
  MAP TO AC013614.4; EXPRESSED IN BONE MARROW, SIGNAL = 1.8; EXPRESSED IN BRAIN, SIGNAL =   2; EXPRESSED IN HEART, SIGNAL = 1.8; EXPRESSED IN HELA, SIGNAL = 1.4; EXPRESSED IN PLACENTA, SIGNAL = 2.1; EXPRESSED IN LUNG, SIGNAL =   2; EXPRESSED IN ADULT LIVER, SIGNAL = 1.8; EXPRESSED IN FETAL LIVER, SIGNAL = 1.6; NT HIT: U26358.1, EVALUE 7.60e+00
tagcctcctcgccatcagaactgtcactcccgctgccatcatcctctccttcagcaccatctccattctcatcactcgcatcaccaccacctcacacagaaccatctgcatccttctgctcacccagtggaccctcttctccct

SEQ ID NO: 13894 - DNA, 259 bp, Homo sapiens
  MAP TO U82695.2; EXPRESSED IN BONE MARROW, SIGNAL = 3.6; EXPRESSED IN LUNG, SIGNAL = 8.8; EXPRESSED IN BRAIN, SIGNAL = 4.1; EXPRESSED IN ADULT LIVER, SIGNAL = 8.9; EXPRESSED IN FETAL LIVER, SIGNAL = 7.5; EXPRESSED IN HEART, SIGNAL = 2.8; SWISSPROT HIT: P21810, EVALUE 4.00e-35; NT HIT: gi15314122, EVALUE 0.00e+00; EST_HUMAN HIT: BI050417.1, EVALUE 0.00e+00
gtggtctatctgcactccaacaacatcaccaaagtgggtgtcaacgacttctgtcccatgggcttcggggtgaagcgggcctactacaacggcatcagcctcttcaacaaccccgtgccctactgggaggtgcagccggccactttccgctgcgtcactgaccgcctggccatccagtttggcaactacaaaaagtagaggcagctgcagccaccgcggggcctcagtgggggtctctggggaacacagccagacatcc

SEQ ID NO: 13895 - DNA, 249 bp, Homo sapiens
  MAP TO AL031283.26; EXPRESSED IN BRAIN, SIGNAL = 0.59; EXPRESSED IN PLACENTA, SIGNAL = 0.61; EXPRESSED IN ADULT LIVER, SIGNAL = 0.58; EXPRESSED IN LUNG, SIGNAL = 0.58; EXPRESSED IN FETAL LIVER, SIGNAL = 0.42; SWISSPROT HIT: P39922, EVALUE 1.00e-03; NT HIT: Y19185.2, EVALUE 5.80e-02
gatgaaataattctgctgctgggaaaagaggtcagccgtctctcagattatgaaattgaatccaaatacaaagacgtcataatagcaaacctgcagaatgaagtggctgagctgagtcagaaggtgtcagagaccaccacctccaggcagaatgagaaggagatctcgcagaagtgtcaggttctggatgaagacatcgatgccaaacagaaagagatccagagcttgaaaagccaggtaggcagagcc

SEQ ID NO: 13896 - DNA, 149 bp, Homo sapiens
  MAP TO CHR22_215.0; EXPRESSED IN HEART, SIGNAL = 1.3; EXPRESSED IN BONE MARROW, SIGNAL = 1.8; EXPRESSED IN LUNG, SIGNAL = 0.97; EXPRESSED IN ADULT LIVER, SIGNAL =   1; EXPRESSED IN PLACENTA, SIGNAL = 0.94; EXPRESSED IN HELA, SIGNAL = 2.8; EXPRESSED IN BRAIN, SIGNAL = 1.5; EXPRESSED IN FETAL LIVER, SIGNAL = 1.8; SWISSPROT HIT: P55722, EVALUE 3.00e-01; NT HIT: AE005709.1, EVALUE 8.00e-03; EST_HUMAN HIT: BF000328.1, EVALUE 4.80e-02
gccagcgaaggacatggaggaaatattcctcctggagtgccgagaaggtcatcctcaagcccagcagagggggctgcctggaggaggtgtgcctgtcagggacaaccagcccaggggagatctgagtggcatcgctggggcgccccatg

SEQ ID NO: 13897 - DNA, 409 bp, Homo sapiens
  MAP TO CHR22_130.0; EXPRESSED IN BRAIN, SIGNAL = 0.58; EXPRESSED IN PLACENTA, SIGNAL = 0.54; EXPRESSED IN LUNG, SIGNAL = 0.67; EXPRESSED IN ADULT LIVER, SIGNAL = 0.67; EXPRESSED IN FETAL LIVER, SIGNAL = 0.45; EXPRESSED IN BONE MARROW, SIGNAL = 0.52; SWISSPROT HIT: P53218, EVALUE 2.00e+00; NT HIT: AF224669.1, EVALUE 2.00e-06; EST_HUMAN HIT: AW833902.1, EVALUE 5.00e-26
gagaagagtgaagggaagaaagaagcacaagatagaacacaagcagcacaatgataaagatgaaaacaccctcactttaagttgcaagaaaacacatgcaaaacaatggggaccactggtaagaactgttgacaaaaaagccaaactctgtaaaatatttgaagagacttatcctgagcctaatgtgaggaccatgacccatgacacagccccagggggtcctgacaacatgtgcccaacgtggctgcatcacagcttggttgtatatgttttaaggagacataaaacatcaatcaatgcacgtaaggtatgtattgattcaatccggaaaagcaggacaattcaaagggggaaaaaacaaaaggccgatgacaaaaagagacacattgggaaagcatttgaatcctaa

SEQ ID NO: 13898 - DNA, 126 bp, Homo sapiens
  MAP TO CHR22_91.0; EXPRESSED IN BRAIN, SIGNAL = 0.93; EXPRESSED IN PLACENTA, SIGNAL = 1.5; EXPRESSED IN LUNG, SIGNAL = 1.1; EXPRESSED IN HELA, SIGNAL = 0.58; EXPRESSED IN ADULT LIVER, SIGNAL = 1.1; EXPRESSED IN FETAL LIVER, SIGNAL = 1.2; EXPRESSED IN BONE MARROW, SIGNAL = 0.77; EST_HUMAN HIT: BG010208.1, EVALUE 1.60e-01; SWISSPROT HIT: Q64148, EVALUE 4.60e+00; NT HIT: gi4758507, EVALUE 4.20e-01
tctccatgataagaataatggccaaaatgaggtacatccttctgaaaatgaagctgttagtggctgagaccctcaatgaagaggttcttttgtctgcagagcaaaatccaaatctgctgccttatt

SEQ ID NO: 13899 - DNA, 122 bp, Homo sapiens
  MAP TO CHR21_7.0; EXPRESSED IN LUNG, SIGNAL = 0.98; EXPRESSED IN BONE MARROW, SIGNAL = 1.5; EXPRESSED IN ADULT LIVER, SIGNAL = 0.93; EXPRESSED IN HELA, SIGNAL = 3.7; EXPRESSED IN BRAIN, SIGNAL = 1.4; EXPRESSED IN FETAL LIVER, SIGNAL = 1.4; EST_HUMAN HIT: AI146372.1, EVALUE 3.00e-43; SWISSPROT HIT: P41997, EVALUE 9.00e-03; NT HIT: gi5730038, EVALUE 2.00e-40
ataaaaatccgtgctttgagattcgaggaacttttggaaagcactttctgcatcctgctggttgtggaagcgttttccctgcaaaaagttgtcaagatgcttgaagaagtggtagtcggttg

SEQ ID NO: 13900 - DNA, 106 bp, Homo sapiens
  MAP TO AC021009.3; EXPRESSED IN LUNG, SIGNAL = 0.51; EXPRESSED IN BONE MARROW, SIGNAL = 0.44; EXPRESSED IN PLACENTA, SIGNAL = 0.58; EXPRESSED IN ADULT LIVER, SIGNAL = 0.48; EXPRESSED IN BRAIN, SIGNAL = 0.62; EXPRESSED IN FETAL LIVER, SIGNAL = 0.47; NT HIT: AF109719.2, EVALUE 1.30e+00; SWISSPROT HIT: P36423, EVALUE 4.70e+00
ctatgatccctttttgctctcagagatgtggtggtacccagattgcatgaagaggtacttgagagacacgcccttggcttttggatcacacccagtgtcttcatta

SEQ ID NO: 13901 - DNA, 135 bp, Homo sapiens
  MAP TO AL136115.5; EXPRESSED IN BRAIN, SIGNAL = 2.3; EXPRESSED IN FETAL LIVER, SIGNAL = 2.2; EXPRESSED IN BONE MARROW, SIGNAL = 2.1; EXPRESSED IN HELA, SIGNAL = 1.6; EXPRESSED IN LUNG, SIGNAL = 2.3; EXPRESSED IN PLACENTA, SIGNAL = 2.2; EXPRESSED IN HEART, SIGNAL =   2; EXPRESSED IN ADULT LIVER, SIGNAL =   2; SWISSPROT HIT: O87576, EVALUE 2.60e+00
cccctcctgctcctcaaggcctctctcaactcccacacagccctgctagccagccttgccctagaataccccctcctgggccacctggtggtgaacatcctggactctgtgctgtggcttgatgcggctgagtca

SEQ ID NO: 13902 - DNA, 125 bp, Homo sapiens
  MAP TO AC017112.5; EXPRESSED IN FETAL LIVER, SIGNAL = 0.66; EXPRESSED IN LUNG, SIGNAL = 0.64; EXPRESSED IN BONE MARROW, SIGNAL = 0.61; EXPRESSED IN PLACENTA, SIGNAL = 0.78; EXPRESSED IN BRAIN, SIGNAL = 0.56; EXPRESSED IN ADULT LIVER, SIGNAL = 0.69; SWISSPROT HIT: P34474, EVALUE 2.70e+00; NT HIT: gi14725462, EVALUE 1.00e-01; EST_HUMAN HIT: AW502470.1, EVALUE 1.50e-01
ttagaagtcacttgattcttcttgctcacaagcaaggaagctaagatcaatgaatcttggcttcatgtcgttggaagctatatttttactcagaactgggaagagtgctttagtattgtagctgc

SEQ ID NO: 13903 - DNA, 150 bp, Homo sapiens
  MAP TO AC013718.3; EXPRESSED IN LUNG, SIGNAL = 0.75; EXPRESSED IN PLACENTA, SIGNAL = 0.74; EXPRESSED IN BRAIN, SIGNAL = 0.65; EXPRESSED IN ADULT LIVER, SIGNAL = 0.73; SWISSPROT HIT: Q42713, EVALUE 7.80e-02; EST_HUMAN HIT: AA927245.1, EVALUE 7.60e-01
ctacccttccatctccctcctgcccttgaaccactgattctccatgttaaatattccatcgttcaaaatatggctacacatattgaagactttgtccttcctaacggtgtcataaagctgaagggtttccttgtcaccatgagtgcgcat

SEQ ID NO: 13904 - DNA, 92 bp, Homo sapiens
  MAP TO AL139144.1; EXPRESSED IN BONE MARROW, SIGNAL = 1.8; EXPRESSED IN HEART, SIGNAL = 1.9; EXPRESSED IN PLACENTA, SIGNAL = 2.4; EXPRESSED IN BRAIN, SIGNAL = 1.8; EXPRESSED IN LUNG, SIGNAL = 2.3; EXPRESSED IN ADULT LIVER, SIGNAL = 2.1; EXPRESSED IN FETAL LIVER, SIGNAL = 1.6; NT HIT: AF287146.1, EVALUE 1.10e+00
ccatgtccagtgtggagtcgtaactaccccaaggttccccaggtccaagacagtaaaggcccccaaggagtatgcaagtgctggtgaggaag

SEQ ID NO: 13905 - DNA, 112 bp, Homo sapiens
  MAP TO AL137071.3; EXPRESSED IN HEART, SIGNAL = 1.9; EXPRESSED IN BONE MARROW, SIGNAL = 2.5; EXPRESSED IN PLACENTA, SIGNAL = 2.2; EXPRESSED IN LUNG, SIGNAL = 2.3; EXPRESSED IN ADULT LIVER, SIGNAL = 2.4; EXPRESSED IN HELA, SIGNAL =   2; EXPRESSED IN BRAIN, SIGNAL = 2.3; EXPRESSED IN FETAL LIVER, SIGNAL = 2.6; SWISSPROT HIT: P49906, EVALUE 6.10e+00; NT HIT: L41663.1, EVALUE 1.40e+00; EST_HUMAN HIT: AA909988.1, EVALUE 2.10e+00
tcaaaaatctaaggaaagtgttgcaagaatgatgaggactgtcagtggctgctcacggtatacagattccatctcacaagcactgtccaggattgcattagtcttggtggtt

SEQ ID NO: 13906 - DNA, 76 bp, Homo sapiens
  MAP TO AL133499.1; EXPRESSED IN HELA, SIGNAL = 0.5; EXPRESSED IN FETAL LIVER, SIGNAL = 0.49; EXPRESSED IN LUNG, SIGNAL = 0.92; EXPRESSED IN ADULT LIVER, SIGNAL = 0.84; EXPRESSED IN PLACENTA, SIGNAL = 0.74; EXPRESSED IN BONE MARROW, SIGNAL = 0.92; EXPRESSED IN BRAIN, SIGNAL = 0.65; NT HIT: AL163301.2, EVALUE 2.00e-35; EST_HUMAN HIT: AI695976.1, EVALUE 3.00e-35
actaggtcttctcagccagatcagttcatgtgctctggtgtttttgagcttctggctagtcctcagtttctcagac

SEQ ID NO: 13907 - DNA, 108 bp, Homo sapiens
  MAP TO CHR21_60.0; EXPRESSED IN HELA, SIGNAL = 4.7; EXPRESSED IN FETAL LIVER, SIGNAL = 1.5; EXPRESSED IN LUNG, SIGNAL = 0.84; EXPRESSED IN ADULT LIVER, SIGNAL = 0.29; EXPRESSED IN BONE MARROW, SIGNAL = 1.7; EXPRESSED IN BRAIN, SIGNAL = 1.7; EST_HUMAN HIT: BG221781.1, EVALUE 9.00e-06; NT HIT: AL163278.2, EVALUE 3.00e-54
cttcattttggataaatcccattgctatatctacaagttcattgatcttaaaggaaaccagaatatttcaccccaaaatgtggctgagctaaagaagcagtctcaagg

SEQ ID NO: 13908 - DNA, 93 bp, Homo sapiens
  MAP TO AL137011.1; EXPRESSED IN FETAL LIVER, SIGNAL = 0.4; EXPRESSED IN BONE MARROW, SIGNAL = 0.54; EXPRESSED IN PLACENTA, SIGNAL = 0.72; EXPRESSED IN ADULT LIVER, SIGNAL = 0.42; EXPRESSED IN BRAIN, SIGNAL = 0.52; NT HIT: AF190472.2, EVALUE 1.10e+00
acaactgttgatactctgggttgaactggctgttcttgttctttctctccctccactccatgtgtgtcccctgagtctgtgtactggtaagat

SEQ ID NO: 13909 - DNA, 173 bp, Homo sapiens
  MAP TO AL136147.2; EXPRESSED IN BRAIN, SIGNAL = 1.1; EXPRESSED IN HELA, SIGNAL = 1.1; EXPRESSED IN FETAL LIVER, SIGNAL = 1.5; EXPRESSED IN PLACENTA, SIGNAL = 1.5; EXPRESSED IN LUNG, SIGNAL = 1.4; EXPRESSED IN ADULT LIVER, SIGNAL = 1.4; EXPRESSED IN BONE MARROW, SIGNAL = 1.2; NT HIT: AF389851.1, EVALUE 2.00e-25; EST_HUMAN HIT: AA128285.1, EVALUE 3.00e-31; SWISSPROT HIT: O21247, EVALUE 2.50e+00
atgggttcaggatcatcagtatcactgtctttctcttccacatttggtcccactagaaggtcttcaggggcaataatatacaagaagctgttatctcctataatagcaatgccttcttctggaatacttcctgaaggactttcctggggctgttttacagttaactttttaat

SEQ ID NO: 13910 - DNA, 96 bp, Homo sapiens
  MAP TO AL158093.3; EXPRESSED IN HELA, SIGNAL = 1.4; EXPRESSED IN BRAIN, SIGNAL = 1.7; EXPRESSED IN FETAL LIVER, SIGNAL = 2.1; EXPRESSED IN HEART, SIGNAL = 1.7; EXPRESSED IN LUNG, SIGNAL = 1.8; EXPRESSED IN BONE MARROW, SIGNAL = 1.9; EXPRESSED IN PLACENTA, SIGNAL = 2.1; EXPRESSED IN ADULT LIVER, SIGNAL =   2; NT HIT: AF142329.1, EVALUE 1.20e+00; EST_HUMAN HIT: BE974322.1, EVALUE 4.40e-01
atgttgtgtaagcaccagggggtggtggtgtcagtagggctcctgaacatcaggttttggatagaggtgttggctcaggccagaaacatgccacag

SEQ ID NO: 13911 - DNA, 108 bp, Homo sapiens
  MAP TO CHR22_10.0; EXPRESSED IN BONE MARROW, SIGNAL = 1.7; EXPRESSED IN HELA, SIGNAL = 1.4; EXPRESSED IN BRAIN, SIGNAL =   2; EXPRESSED IN PLACENTA, SIGNAL = 2.4; EXPRESSED IN LUNG, SIGNAL = 1.9; EXPRESSED IN ADULT LIVER, SIGNAL = 1.9; NT HIT: AF246631.1, EVALUE 3.50e-01; EST_HUMAN HIT: N74131.1, EVALUE 8.00e+00
gattcctccccagcaatgcagaagggccccatgagggcccacacagggcatctgcggtctgttgggctcagcccagagccagtagcaccttggaagtctgtggtcaag

SEQ ID NO: 13912 - DNA, 420 bp, Homo sapiens
  MAP TO CHR22_213.0; EXPRESSED IN BONE MARROW, SIGNAL = 1.4; EXPRESSED IN PLACENTA, SIGNAL = 0.82; EXPRESSED IN LUNG, SIGNAL =   1; EXPRESSED IN BRAIN, SIGNAL = 1.3; EXPRESSED IN ADULT LIVER, SIGNAL = 0.83; EXPRESSED IN FETAL LIVER, SIGNAL = 1.2; EST_HUMAN HIT: BI916475.1, EVALUE 3.70e-02; SWISSPROT HIT: P14593, EVALUE 7.00e-22
ctgtgtgaataccagtaagaatacctgtgggaatacctgtggggatacttgtgggaaagcctatagaaatacctttggaaatacctacaggaatacctatggaaatatctgtgggaatgcctatgggaatgcgtgtgggaatgcctgttgggatacctgtgggaatgcctgtataaataccggtgagaatccctgtgggaatacttgagagaatccctgtgtgaataccagtaagaatacctgtggggatgcctgtgggaatacttgagagaatgcctgtgtgaataccagtgagaatacctgtgtgaataccagtaagaatacctgtgggaatacttgtgcggatacttgtgggaaagcctgcagaaatacctttggaaatacctatgggaatacctatggaaatatctgtaagaatac

SEQ ID NO: 13913 - DNA, 389 bp, Homo sapiens
  MAP TO AL137068.1; EXPRESSED IN PLACENTA, SIGNAL = 5.4; EXPRESSED IN LUNG, SIGNAL = 5.3; EXPRESSED IN ADULT LIVER, SIGNAL = 5.1; EXPRESSED IN BONE MARROW, SIGNAL = 6.3; EXPRESSED IN BRAIN, SIGNAL = 4.9; EXPRESSED IN HELA, SIGNAL = 3.9; EXPRESSED IN FETAL LIVER, SIGNAL = 5.2; EXPRESSED IN HEART, SIGNAL = 4.4; EST_HUMAN HIT: AW503396.1, EVALUE 0.00e+00; SWISSPROT HIT: Q9UDY2, EVALUE 3.70e-01; NT HIT: gi6754595, EVALUE 8.00e-67
atgcagacagtggaggagatagtcaggaagagagtgagctggatgaccaagaagaacccccatttgtgcctcctcctggatacatgatgtatactgtgcttcctgatggttctcctgtaccccagggcatggccctgtatgcaccacctcctcccttgccaaacaatagccgacctctcacccctggcactgttgtttatggcccacctcctgctggggcccccatggtgtatgggcctccaccccccaacttctccatccccttcatccctatgggtgtgctgcattgcaacgtccctgaacaccataacttagtaagtggaaagacatacaactctctttccacactgcttccatgggtgactgataaggttatatacttaatgagt

SEQ ID NO: 13914 - DNA, 156 bp, Homo sapiens
  MAP TO AC012482.3; EXPRESSED IN PLACENTA, SIGNAL = 1.8; EXPRESSED IN LUNG, SIGNAL = 2.1; EXPRESSED IN ADULT LIVER, SIGNAL = 2.5; EXPRESSED IN BONE MARROW, SIGNAL = 1.5; EXPRESSED IN HEART, SIGNAL = 2.7; EXPRESSED IN BRAIN, SIGNAL = 1.7; EXPRESSED IN FETAL LIVER, SIGNAL = 1.7; NT HIT: AF033347.1, EVALUE 9.00e-83; SWISSPROT HIT: O43525, EVALUE 3.00e-25
caggccccaccacagggcatctgcataggtctcaaactcctctttcatctcctctccttgtgcatccacctctgggacgtctttctcaaccaggtagacaagaaatgaagaaaggatgagtgtcaggaaaccgatgtaccaggccgtgatgagttc

SEQ ID NO: 13915 - DNA, 71 bp, Homo sapiens
  MAP TO CHR22_23.0; EXPRESSED IN HELA, SIGNAL = 0.67; EXPRESSED IN FETAL LIVER, SIGNAL = 0.92; EXPRESSED IN BONE MARROW, SIGNAL = 0.82; EXPRESSED IN PLACENTA, SIGNAL =   1; EXPRESSED IN LUNG, SIGNAL = 0.84; EXPRESSED IN BRAIN, SIGNAL = 0.77; EXPRESSED IN ADULT LIVER, SIGNAL = 0.93; NT HIT: U43310.1, EVALUE 2.10e-01; EST_HUMAN HIT: BE390113.1, EVALUE 3.00e-01
tgcactttcctggggttgggccgctgtatggtgtggccatatttctccgcaggttgcaggatgaactccat

SEQ ID NO: 13916 - DNA, 145 bp, Homo sapiens
  MAP TO AL136163.3; EXPRESSED IN FETAL LIVER, SIGNAL = 2.9; EXPRESSED IN HEART, SIGNAL = 2.7; EXPRESSED IN LUNG, SIGNAL = 3.7; EXPRESSED IN ADULT LIVER, SIGNAL = 3.9; EXPRESSED IN BONE MARROW, SIGNAL = 3.2; EXPRESSED IN BRAIN, SIGNAL = 3.2; EXPRESSED IN PLACENTA, SIGNAL = 3.7; EXPRESSED IN HELA, SIGNAL =   2; NT HIT: gi15920163, EVALUE 1.20e-01; SWISSPROT HIT: P54116, EVALUE 5.90e+00; EST_HUMAN HIT: AI814615.1, EVALUE 1.80e-01
gaaatttctattttggatgcagaaaacgatatacctattgtcaagatgatattttatcagattaggacaaacccacaaacacactttccatatcctcagtataaaatggaaagaaacatgacactgtatcatgcatatggtcata

SEQ ID NO: 13917 - DNA, 163 bp, Homo sapiens
  MAP TO CHR22_98.0; EXPRESSED IN BONE MARROW, SIGNAL = 1.3; EXPRESSED IN HELA, SIGNAL = 3.5; EXPRESSED IN BRAIN, SIGNAL = 1.2; EXPRESSED IN HEART, SIGNAL = 1.2; EXPRESSED IN PLACENTA, SIGNAL = 1.3; EXPRESSED IN LUNG, SIGNAL = 1.2; EXPRESSED IN ADULT LIVER, SIGNAL = 1.1; NT HIT: AB055742.1, EVALUE 5.60e-01; SWISSPROT HIT: P54027, EVALUE 4.40e+00; EST_HUMAN HIT: H86874.1, EVALUE 8.30e-01
cttctcctgggagtcttggtggcctccttttgtccttggtgtatgttgcatgccaatcatgctgtagagaaggcagtaatatctagaaacacatcttgaactagcgttgggccgtgtgcaagtctcttttggtggggatatgcgagagtcactaactagcaac

SEQ ID NO: 13918 - DNA, 188 bp, Homo sapiens
  MAP TO AL136231.3; EXPRESSED IN FETAL LIVER, SIGNAL = 1.7; EXPRESSED IN HEART, SIGNAL = 1.3; EXPRESSED IN PLACENTA, SIGNAL = 2.3; EXPRESSED IN LUNG, SIGNAL = 2.4; EXPRESSED IN BONE MARROW, SIGNAL = 1.6; EXPRESSED IN BRAIN, SIGNAL = 1.5; EXPRESSED IN ADULT LIVER, SIGNAL =   2; NT HIT: K03021.1, EVALUE 1.70e-01; SWISSPROT HIT: P53261, EVALUE 1.10e+00; EST_HUMAN HIT: AW246578.1, EVALUE 4.00e-80
gttatcaaagagccagatgaacggattgttttaaggagtgactcatcatcatgtttagattcaagtcagtttggaaagtcttcatccagtaaacaaggggatgctgatttccacgggaaagcttcatttgccacctaccagcattccacctctcctggccccttggatcagccccttctcagagaaag

SEQ ID NO: 13919 - DNA, 188 bp, Homo sapiens
  MAP TO AC020759.3; EXPRESSED IN BONE MARROW, SIGNAL = 1.5; EXPRESSED IN BRAIN, SIGNAL = 1.5; EXPRESSED IN PLACENTA, SIGNAL = 1.5; EXPRESSED IN FETAL LIVER, SIGNAL = 1.4; EXPRESSED IN HEART, SIGNAL = 5.1; EXPRESSED IN LUNG, SIGNAL = 1.7; EXPRESSED IN ADULT LIVER, SIGNAL = 1.8; NT HIT: J05109.1, EVALUE 4.20e-02; EST_HUMAN HIT: BG177023.1, EVALUE 5.00e-21; SWISSPROT HIT: Q14157, EVALUE 2.90e-01
ctgtattgctttctccttcagggtcatcagctgaggccggctgaaaccctggacagctcccagcagttccacggtcctgatgaatgtgtcttcctccatgcaccgcaggtcctccagggcccagcaggcgttggcttcggccaacttgaagatgtcatcagaagagggggccacgactccatggcaac

SEQ ID NO: 13920 - DNA, 62 bp, Homo sapiens
  MAP TO CHR22_27.0; EXPRESSED IN FETAL LIVER, SIGNAL = 1.8; EXPRESSED IN HEART, SIGNAL = 1.5; EXPRESSED IN LUNG, SIGNAL = 1.9; EXPRESSED IN PLACENTA, SIGNAL = 1.7; EXPRESSED IN HELA, SIGNAL = 1.2; EXPRESSED IN ADULT LIVER, SIGNAL = 2.3; EXPRESSED IN BONE MARROW, SIGNAL = 1.7; EXPRESSED IN BRAIN, SIGNAL = 1.7; NT HIT: AF369029.1, EVALUE 4.40e-02; EST_HUMAN HIT: BG540767.1, EVALUE 6.40e-02
tcgcctcctgtttcctctttcttttctttgcggtcttgcttttctgtcagaagcctactcat

SEQ ID NO: 13921 - DNA, 168 bp, Homo sapiens
  MAP TO CHR22_220.0; EXPRESSED IN BONE MARROW, SIGNAL = 1.4; EXPRESSED IN BRAIN, SIGNAL = 1.3; EXPRESSED IN HELA, SIGNAL = 1.9; EXPRESSED IN LUNG, SIGNAL = 0.85; EXPRESSED IN ADULT LIVER, SIGNAL = 0.83; EXPRESSED IN PLACENTA, SIGNAL = 0.74; SWISSPROT HIT: P20662, EVALUE 1.90e+00; NT HIT: gi15318770, EVALUE 7.00e-90; EST_HUMAN HIT: AW249047.1, EVALUE 1.00e-89
gtcattgctgtggtcatggacctcttcactgatggtgatatctttcaagacattgtggatgctgcctgtaagcgccgggtcccagtgtacatcatcctggacgaggcaggagtgaagtatttcctggagatgtgtcaggacctgcagctcactgacttccggattcgg

SEQ ID NO: 13922 - DNA, 264 bp, Homo sapiens
  MAP TO AC015937.3; EXPRESSED IN BRAIN, SIGNAL = 7.4; EXPRESSED IN HEART, SIGNAL = 5.8; EXPRESSED IN PLACENTA, SIGNAL = 7.2; EXPRESSED IN LUNG, SIGNAL = 7.5; EXPRESSED IN ADULT LIVER, SIGNAL =   6; EXPRESSED IN HELA, SIGNAL = 3.9; EXPRESSED IN FETAL LIVER, SIGNAL = 6.3; EXPRESSED IN BONE MARROW, SIGNAL = 7.7; SWISSPROT HIT: O60309, EVALUE 2.00e-07; NT HIT: AJ314647.1, EVALUE 9.00e-35; EST_HUMAN HIT: AA758499.1, EVALUE 4.00e-50
ctggaggttgaactgtcacctcatgattcagtagagtttgagctagactctccatagaggactctggagtctgagctggggcctcctgctggatctgagaaggttcaacccccccaggaaactcagaaggctgagccggctgctcctgctcactgggggaaggttcagcctccacaggagaacctagaggctcagctggggtctcttgctgggttgcaggaggttttgtctcctcagggcactctggtgtctgagctggggcct

SEQ ID NO: 13923 - DNA, 151 bp, Homo sapiens
  MAP TO AC018586.3; EXPRESSED IN LUNG, SIGNAL = 0.55; EXPRESSED IN ADULT LIVER, SIGNAL = 0.55; EXPRESSED IN BONE MARROW, SIGNAL = 0.52; EXPRESSED IN BRAIN, SIGNAL = 0.49; SWISSPROT HIT: P31309, EVALUE 2.60e+00; NT HIT: Z28182.1, EVALUE 8.10e+00
tcaaatgctgctggtcaggtcaaatatattctttagggttagatctttagggagctccaaacctattctcccttctctaatggctactaggctgaaggttttcacagttaccatcattgtgaggctgttggtttttaaagctactgcaatg

SEQ ID NO: 13924 - DNA, 42 bp, Homo sapiens
  MAP TO CHR21_62.0; EXPRESSED IN PLACENTA, SIGNAL = 0.73; EXPRESSED IN LUNG, SIGNAL = 0.77; EXPRESSED IN FETAL LIVER, SIGNAL = 1.4; EXPRESSED IN ADULT LIVER, SIGNAL = 0.8; EXPRESSED IN BONE MARROW, SIGNAL = 1.7; EXPRESSED IN HELA, SIGNAL = 4.9; EXPRESSED IN BRAIN, SIGNAL = 1.6; EST_HUMAN HIT: BI020398.1, EVALUE 8.60e+00; NT HIT: X71420.1, EVALUE 5.80e+00
atgcaccgacatgcactcatgaccgctcacatcaaccggaag

SEQ ID NO: 13925 - DNA, 166 bp, Homo sapiens
  MAP TO AL133215.16; EXPRESSED IN FETAL LIVER, SIGNAL =  11; EXPRESSED IN HEART, SIGNAL = 8.5; EXPRESSED IN LUNG, SIGNAL =  10; EXPRESSED IN ADULT LIVER, SIGNAL =  10; EXPRESSED IN HELA, SIGNAL = 5.1; EXPRESSED IN PLACENTA, SIGNAL =  11; EXPRESSED IN BONE MARROW, SIGNAL =  11; EXPRESSED IN BRAIN, SIGNAL = 9.7; SWISSPROT HIT: Q9NTN9, EVALUE 2.00e-23; EST_HUMAN HIT: BI824338.1, EVALUE 2.00e-84; NT HIT: gi14747317, EVALUE 3.00e-83
ccacacgggccacacggtgactgctgcggctctgagtgaagctgccagagccctcctcagtggcacgctccgtgaagaagtagtacaccttgtcatcatcacccactgcactggccttgctctcccgcacgaggacggagaacacaaactccgcatctgtgggtca

SEQ ID NO: 13926 - DNA, 167 bp, Homo sapiens
  MAP TO CHR22_207.0; EXPRESSED IN HELA, SIGNAL = 3.1; EXPRESSED IN FETAL LIVER, SIGNAL = 1.7; EXPRESSED IN PLACENTA, SIGNAL = 0.98; EXPRESSED IN LUNG, SIGNAL = 1.1; EXPRESSED IN BONE MARROW, SIGNAL = 1.9; EXPRESSED IN ADULT LIVER, SIGNAL = 1.2; EXPRESSED IN BRAIN, SIGNAL = 1.6; SWISSPROT HIT: P20144, EVALUE 9.80e+00; EST_HUMAN HIT: N39577.1, EVALUE 5.50e-02; NT HIT: AF271796.1, EVALUE 5.80e-01
ttcccactccacctgctctcatcctgggctctgagttttcagaaaaccaaggtgtttggcagacgatgatgcctacattacactgctgacttttgcctgcatttgttataattaatgactcattgaaatgcctctcactttcgtacagctgggtccaagtgtcaaac

SEQ ID NO: 13927 - DNA, 159 bp, Homo sapiens
  MAP TO AL135920.4; EXPRESSED IN HELA, SIGNAL = 0.74; EXPRESSED IN BRAIN, SIGNAL = 1.1; EXPRESSED IN FETAL LIVER, SIGNAL = 1.3; EXPRESSED IN HEART, SIGNAL = 1.3; EXPRESSED IN LUNG, SIGNAL = 1.2; EXPRESSED IN PLACENTA, SIGNAL = 1.3; EXPRESSED IN BONE MARROW, SIGNAL = 1.3; SWISSPROT HIT: Q64527, EVALUE 5.80e+00; EST_HUMAN HIT: BF382022.1, EVALUE 8.10e-01; NT HIT: AF147757.1, EVALUE 5.50e-01
atgccatggtcctcttttggtcaaggctatggattaggatcttgggcagataacaaattcctacatactactgtgagattttatttgacttatccaaatctcatgaataatgatctaccaatatgctatgagctcacaaagaaagaagggcttgaaaat

SEQ ID NO: 13928 - DNA, 116 bp, Homo sapiens
  MAP TO AB017651.1; EXPRESSED IN HELA, SIGNAL = 2.1; EXPRESSED IN FETAL LIVER, SIGNAL = 2.9; EXPRESSED IN PLACENTA, SIGNAL = 4.4; EXPRESSED IN BONE MARROW, SIGNAL = 3.5; EXPRESSED IN LUNG, SIGNAL =   4; EXPRESSED IN ADULT LIVER, SIGNAL = 3.3; EXPRESSED IN BRAIN, SIGNAL = 3.5; NT HIT: gi14776941, EVALUE 3.80e-01; SWISSPROT HIT: Q10625, EVALUE 4.60e+00; EST_HUMAN HIT: AV647264.1, EVALUE 5.60e-01
ccttgaagcaggtggtgaaagacatcactgatcatctctgtgacagcagtttcactaacactaacaactgtacagtgtttttcagttcatggggagaaaacgtcttcctcatctat

SEQ ID NO: 13929 - DNA, 172 bp, Homo sapiens
  MAP TO AL137019.1; EXPRESSED IN BONE MARROW, SIGNAL = 0.6; EXPRESSED IN BRAIN, SIGNAL = 0.66; EXPRESSED IN LUNG, SIGNAL = 0.61; EXPRESSED IN FETAL LIVER, SIGNAL = 0.65; EXPRESSED IN PLACENTA, SIGNAL = 0.8; SWISSPROT HIT: O33836, EVALUE 7.50e+00; NT HIT: AL163209.2, EVALUE 6.00e-01; EST_HUMAN HIT: BF949147.1, EVALUE 1.40e-02
gtttatcaagaaaattaagagagaaaattttaagaattattattatggttttttagagggagattatttttgtttttgtccaacacctgttggagctgtaactctacctgaagaatttgacattttcatcatgactaataaaagactgctgcttcgaaaagaagaaaaaaaa

SEQ ID NO: 13930 - DNA, 126 bp, Homo sapiens
  MAP TO AC011580.4; EXPRESSED IN FETAL LIVER, SIGNAL = 0.96; EXPRESSED IN BONE MARROW, SIGNAL = 0.85; EXPRESSED IN BRAIN, SIGNAL = 0.94; EXPRESSED IN LUNG, SIGNAL = 1.2; EXPRESSED IN HELA, SIGNAL = 0.64; EXPRESSED IN PLACENTA, SIGNAL = 0.92; EXPRESSED IN ADULT LIVER, SIGNAL = 1.1; NT HIT: gi11436372, EVALUE 2.00e-61; EST_HUMAN HIT: BG547688.1, EVALUE 3.00e-61
gagttgttccagttgttggtgtgacaacatttttctgtaatgattctgtgtttggtgttgttatagatggttttgttgtagtaacaacaagtgaattattagctgcctctaaaacacctgaaaaaa

SEQ ID NO: 13931 - DNA, 87 bp, Homo sapiens
  MAP TO AL138478.1; EXPRESSED IN FETAL LIVER, SIGNAL = 0.5; EXPRESSED IN BONE MARROW, SIGNAL = 0.53; EXPRESSED IN BRAIN, SIGNAL = 0.6; EXPRESSED IN LUNG, SIGNAL = 0.59; EXPRESSED IN ADULT LIVER, SIGNAL = 0.67; EXPRESSED IN PLACENTA, SIGNAL = 0.7; EST_HUMAN HIT: BF837200.1, EVALUE 1.00e-07; NT HIT: gi9256538, EVALUE 6.80e-02
gagatatgtggacacagactcacagggagaataccatgtggagactggagttatgttgccagaatctaagggactaccagaaactag

SEQ ID NO: 13932 - DNA, 117 bp, Homo sapiens
  MAP TO CHR22_216.0; EXPRESSED IN HEART, SIGNAL = 1.2; EXPRESSED IN BONE MARROW, SIGNAL = 1.4; EXPRESSED IN LUNG, SIGNAL = 0.85; EXPRESSED IN ADULT LIVER, SIGNAL = 0.77; EXPRESSED IN BRAIN, SIGNAL = 1.4; EXPRESSED IN HELA, SIGNAL = 2.4; EXPRESSED IN FETAL LIVER, SIGNAL = 1.1; SWISSPROT HIT: O13876, EVALUE 9.00e-03; EST_HUMAN HIT: AA838732.1, EVALUE 2.00e-59; NT HIT: gi14778617, EVALUE 1.00e-59
tgggagagagatgcctggagcctgtgaccgagccttctccagccacttgctgcagttgttgaaggattcttcattggtcacatcatagacgagacataagacattgggactctccca

SEQ ID NO: 13933 - DNA, 336 bp, Homo sapiens
  MAP TO CHR22_162.0; EXPRESSED IN FETAL LIVER, SIGNAL = 0.76; EXPRESSED IN BRAIN, SIGNAL = 1.6; EXPRESSED IN PLACENTA, SIGNAL = 1.4; EXPRESSED IN LUNG, SIGNAL = 1.2; EXPRESSED IN ADULT LIVER, SIGNAL = 0.96; SWISSPROT HIT: O43759, EVALUE 7.00e-37; EST_HUMAN HIT: W52128.1, EVALUE 0.00e+00; NT HIT: gi11418145, EVALUE 0.00e+00
gcgggccaggctgtgctggccttccagcggtaccagattggcgccgactcggccctcttctcccaggactacatggaccccagccaggactccagcatgccttacgcgccctacgtggagcccactgggccggatcccgccggtatgggcggcacctaccagcagccggccaacaccttcgacaccgagccccagggctaccagtcgcagggctactgagccacagtgaccgcctgcccccgcccctccccatctgtcccctctctccacacccagcccctgctcctgcccaggctgccctgcccagcgcctcatcagcctctgccttgtcccact

SEQ ID NO: 13934 - DNA, 148 bp, Homo sapiens
  MAP TO AL121836.9; EXPRESSED IN FETAL LIVER, SIGNAL = 2.4; EXPRESSED IN LUNG, SIGNAL = 2.7; EXPRESSED IN PLACENTA, SIGNAL = 2.5; EXPRESSED IN ADULT LIVER, SIGNAL = 2.7; EXPRESSED IN BONE MARROW, SIGNAL = 2.4; EXPRESSED IN BRAIN, SIGNAL = 2.4; EXPRESSED IN HELA, SIGNAL = 1.3; EXPRESSED IN HEART, SIGNAL = 2.3; EST_HUMAN HIT: AA912623.1, EVALUE 4.80e-02; NT HIT: AL161542.2, EVALUE 2.00e-03
catcattgtcattattgtcattgtcatcaacatcatcatctttgtgactgcttgtaaacccaaattgaaaggcaagaataaatttcaccagtccaatttttggagtgagacaatagacaaagcattgtttcagcttattttcattcat

SEQ ID NO: 13935 - DNA, 154 bp, Homo sapiens
  MAP TO CHR22_210.0; EXPRESSED IN HELA, SIGNAL = 2.8; EXPRESSED IN FETAL LIVER, SIGNAL = 1.6; EXPRESSED IN PLACENTA, SIGNAL = 0.92; EXPRESSED IN LUNG, SIGNAL = 0.73; EXPRESSED IN ADULT LIVER, SIGNAL = 0.84; EXPRESSED IN BONE MARROW, SIGNAL = 1.6; EXPRESSED IN BRAIN, SIGNAL = 1.3; SWISSPROT HIT: Q9ZDB3, EVALUE 3.40e+00; EST_HUMAN HIT: AA227225.1, EVALUE 7.80e-01; NT HIT: AY054167.1, EVALUE 1.30e-01
aatggccacatggcttgtaagagagaaggaggatctagatgtgcttctctcttattctaaagtccatgctgtctccttgtactccactgttttattaatcgagggtgctcaaggtatgtttgctgtttatgatgctgctgccaatattctcagg

SEQ ID NO: 13936 - DNA, 491 bp, Homo sapiens
  MAP TO U82695.2; EXPRESSED IN FETAL LIVER, SIGNAL = 2.7; EXPRESSED IN PLACENTA, SIGNAL = 4.4; EXPRESSED IN ADULT LIVER, SIGNAL =   3; EXPRESSED IN LUNG, SIGNAL = 3.9; EXPRESSED IN BONE MARROW, SIGNAL = 3.5; EXPRESSED IN BRAIN, SIGNAL = 3.8; EXPRESSED IN HELA, SIGNAL = 2.8; EXPRESSED IN HEART, SIGNAL = 3.2; NT HIT: U82695.2, EVALUE 0.00e+00; SWISSPROT HIT: Q64568, EVALUE 8.00e-39; EST_HUMAN HIT: AW611841.1, EVALUE 8.00e-10
ctggtgtgggaggccctgcaggacgtgaccctcatcatcctggaggtggctgccatcgtctctctgggcctctcgttctatgcgccgccaggagaggagagtgaaggtaaggcccgggggcctgggctggaaggaggaagaggaatggggcttgagatgagggacggtcacaggatggtgatgtctcctccactgcttcccttctgtcctccgcacagcctgtgggaatgtgtcgggaggcgcagaagatgagggcgaggccgaagctggctggatcgagggggctgccatcctgctgtccgtcatctgtgtggtgctggtcacggccttcaatgactggagcaaggagaagcagttccgaggcctgcagagccgaattgagcaggagcagaagttcacggtcatccggaacgggcagctcctccaggtccccgtggctgcgctggtggtgggggacattgcccaggtcaagtacggtgagtgccctggtc

SEQ ID NO: 13937 - DNA, 156 bp, Homo sapiens
  MAP TO AL136140.2; EXPRESSED IN BRAIN, SIGNAL = 0.96; EXPRESSED IN PLACENTA, SIGNAL = 1.2; EXPRESSED IN LUNG, SIGNAL = 1.1; EXPRESSED IN ADULT LIVER, SIGNAL = 0.88; EXPRESSED IN FETAL LIVER, SIGNAL = 0.8; EXPRESSED IN BONE MARROW, SIGNAL = 0.79; NT HIT: gi14745075, EVALUE 5.40e-01; SWISSPROT HIT: Q92858, EVALUE 1.50e+00
ggaagggtggtccagcatccagcacacacagattggcagggtgggggtggccattcagacggaggacttcagaatcatggtatggaggaggcggttcagggcatattcaggaatcagcaagtggcctcccagcaaagtgatgggagcaaaggccat

SEQ ID NO: 13938 - DNA, 171 bp, Homo sapiens
  MAP TO AL137062.3; EXPRESSED IN FETAL LIVER, SIGNAL = 1.2; EXPRESSED IN BRAIN, SIGNAL = 1.3; EXPRESSED IN PLACENTA, SIGNAL = 1.3; EXPRESSED IN HELA, SIGNAL = 0.93; EXPRESSED IN HEART, SIGNAL = 1.2; EXPRESSED IN BONE MARROW, SIGNAL = 1.1; EXPRESSED IN ADULT LIVER, SIGNAL = 0.99; EXPRESSED IN LUNG, SIGNAL = 1.1; NT HIT: AF099810.1, EVALUE 5.90e-01; SWISSPROT HIT: Q01149, EVALUE 1.90e+00; EST_HUMAN HIT: BE044430.1, EVALUE 2.00e-07
gaaaacccaaatcatgatattttgaagatcagagatgtggctctccgtcattttggcatcccactgggccgggatctgtatttcactgagaatgctctgctgcacaaactatacaagcccccttccctctaggcccagctactgtcacagaagaggagggggcagaagatt

SEQ ID NO: 13939 - DNA, 131 bp, Homo sapiens
  MAP TO AL133476.4; EXPRESSED IN PLACENTA, SIGNAL = 1.3; EXPRESSED IN LUNG, SIGNAL = 1.3; EXPRESSED IN BONE MARROW, SIGNAL = 0.82; EXPRESSED IN BRAIN, SIGNAL = 0.93; EXPRESSED IN FETAL LIVER, SIGNAL = 0.92; NT HIT: gi15298905, EVALUE 6.00e-68; SWISSPROT HIT: O13285, EVALUE 2.00e+00; EST_HUMAN HIT: AL042446.1, EVALUE 9.00e-68
gcaaagctgggaaacagttctgtgagccccaatgtgggccacctggttctgaagtacttgtgccctgccgtccgcgccgtgctggaggatgggctcaaggcctttgtactggacgtcatcatcgggcagcg

SEQ ID NO: 13940 - DNA, 259 bp, Homo sapiens
  MAP TO AC018608.4; EXPRESSED IN FETAL LIVER, SIGNAL =  10; EXPRESSED IN BONE MARROW, SIGNAL = 8.4; EXPRESSED IN BRAIN, SIGNAL = 4.2; EXPRESSED IN HEART, SIGNAL = 6.4; EXPRESSED IN LUNG, SIGNAL = 7.6; EXPRESSED IN ADULT LIVER, SIGNAL = 8.2; SWISSPROT HIT: P50890, EVALUE 2.00e-22; EST_HUMAN HIT: BG684872.1, EVALUE 3.00e-51; NT HIT: gi9845501, EVALUE 4.00e-49
atgcctctgagaggctggtgctcagccctgggatcagtaatcaccagcagatgtggcttcttggatcttggtagtgaagattccaagagtgaagcagccagtaataggagtggctccagtggaagcaacaaacatcatcacagcttgctggccaggattcctggagggtataacactgacatcaccagagttttcaatggcaacaatggcacaagctgccggcagaagcttctcccagttcctcttgacatttgtgtca

SEQ ID NO: 13941 - DNA, 150 bp, Homo sapiens
  MAP TO AJ132411.1; EXPRESSED IN BRAIN, SIGNAL = 0.8; EXPRESSED IN FETAL LIVER, SIGNAL = 1.2; EXPRESSED IN ADULT LIVER, SIGNAL = 0.87; EXPRESSED IN PLACENTA, SIGNAL = 1.1; EXPRESSED IN LUNG, SIGNAL = 0.93; EXPRESSED IN BONE MARROW, SIGNAL = 1.4; EST_HUMAN HIT: BE246981.1, EVALUE 9.00e-50; NT HIT: AF115393.1, EVALUE 8.00e-03
gctcatgactgcatgtcaagcacagttgtgccaggtgtctacctgctccatttctcctcctcccagcagccctgcaaagtgcccgccaattttctctcctgttttgaagatgggaaaactaaagcagagagccacaaggtcactcacctg

SEQ ID NO: 13942 - DNA, 111 bp, Homo sapiens
  MAP TO AL137844.2; EXPRESSED IN LUNG, SIGNAL = 0.54; EXPRESSED IN ADULT LIVER, SIGNAL = 0.48; EXPRESSED IN PLACENTA, SIGNAL = 0.61; EXPRESSED IN BRAIN, SIGNAL = 0.64; SWISSPROT HIT: P51797, EVALUE 7.90e+00; EST_HUMAN HIT: BG198113.1, EVALUE 1.30e-01; NT HIT: AJ297524.1, EVALUE 3.60e-01
ctaaaacatgttactatagttgctgccatcaacttcctcatcatttttgaagttggtattaatagtagcatctttggaatatttcagcactttttcagtactacatttatg

SEQ ID NO: 13943 - DNA, 143 bp, Homo sapiens
  MAP TO AC016683.4; EXPRESSED IN PLACENTA, SIGNAL = 0.48; EXPRESSED IN LUNG, SIGNAL = 0.54; EXPRESSED IN BRAIN, SIGNAL = 0.37; EXPRESSED IN ADULT LIVER, SIGNAL = 0.54; EXPRESSED IN BONE MARROW, SIGNAL = 0.44; SWISSPROT HIT: Q9V3S0, EVALUE 1.50e+00; EST_HUMAN HIT: BE542262.1, EVALUE 1.20e-02; NT HIT: gi16156244, EVALUE 7.60e+00
ttcctgatccaggcttggactctgcactggaagcaccagcgggtggtcttccttcccacttttcaccaacaccagtcaagtgcaggtcctgccagtcccctgacagagagggccttgaaagtgaatgtcacagagagcacgca

SEQ ID NO: 13944 - DNA, 123 bp, Homo sapiens
  MAP TO AL137070.3; EXPRESSED IN BRAIN, SIGNAL = 0.58; EXPRESSED IN LUNG, SIGNAL = 0.84; EXPRESSED IN ADULT LIVER, SIGNAL = 0.89; EXPRESSED IN BONE MARROW, SIGNAL = 0.6; EXPRESSED IN PLACENTA, SIGNAL = 0.89; NT HIT: AL163204.2, EVALUE 4.00e-32; SWISSPROT HIT: P08923, EVALUE 1.80e-01; EST_HUMAN HIT: AV649917.1, EVALUE 6.00e-44
atgcgcagcgggaccagcgctgcccgcgcctctcaccgcactgcatccgcctcccgccagccaggaagccactgcggcctgaggcttcccgccaccaccgcgcgcgccttcctccggggacat

SEQ ID NO: 13945 - DNA, 291 bp, Homo sapiens
  MAP TO AL136972.1; EXPRESSED IN BONE MARROW, SIGNAL =   3; EXPRESSED IN BRAIN, SIGNAL = 3.1; EXPRESSED IN HEART, SIGNAL = 4.6; EXPRESSED IN HELA, SIGNAL = 2.4; EXPRESSED IN PLACENTA, SIGNAL = 3.4; EXPRESSED IN LUNG, SIGNAL = 3.4; EXPRESSED IN FETAL LIVER, SIGNAL = 3.2; EXPRESSED IN ADULT LIVER, SIGNAL = 3.2; SWISSPROT HIT: Q29554, EVALUE 2.20e-01; EST_HUMAN HIT: BI054142.1, EVALUE 1.00e-01
acacactttattcctactaatgaactgaaggagatcagtctgaatttagagcacataaaacaccaggccaagaaacaaatcagtgcacacttagaagatcattgctacactcacctcagtacctccatgcttcctgaatcccaggctctgtggatgggatccaggaatctcctattgaagcaaaaccactacgtgagtcttgtaaacactagcgtttggacctgcatcaactctgactcctcccagggcagggtctctgtccttttcaccttcgtcatccagtgttcggga

SEQ ID NO: 13946 - DNA, 201 bp, Homo sapiens
  MAP TO AL133547.3; EXPRESSED IN BRAIN, SIGNAL = 3.1; EXPRESSED IN HEART, SIGNAL = 2.3; EXPRESSED IN HELA, SIGNAL = 1.5; EXPRESSED IN PLACENTA, SIGNAL = 2.6; EXPRESSED IN FETAL LIVER, SIGNAL = 2.5; EXPRESSED IN ADULT LIVER, SIGNAL = 0.93; EXPRESSED IN BONE MARROW, SIGNAL = 3.1; NT HIT: gi14741767, EVALUE 1.00e-109; SWISSPROT HIT: P04090, EVALUE 1.00e-31; EST_HUMAN HIT: AA935560.1, EVALUE 1.00e-100
tttgtctattgcgaataagtttcttaaattcttcaaagagaagactggaatcttttaatacaggtacatgttgttgtagctgtggtaatgctggctgcatctcagacagggttaacttcagctcctgtggcaaattagcaacaaattctgacatcatatttatggtttctgtatctttgttgatgaaggatggcacaattt

SEQ ID NO: 13947 - DNA, 76 bp, Homo sapiens
  MAP TO AC013779.3; EXPRESSED IN FETAL LIVER, SIGNAL = 5.5; EXPRESSED IN BONE MARROW, SIGNAL = 4.6; EXPRESSED IN HEART, SIGNAL = 5.2; EXPRESSED IN PLACENTA, SIGNAL = 6.2; EXPRESSED IN LUNG, SIGNAL = 6.1; EXPRESSED IN ADULT LIVER, SIGNAL = 8.3; EXPRESSED IN HELA, SIGNAL = 5.3; EXPRESSED IN BRAIN, SIGNAL = 5.7; EST_HUMAN HIT: BF358954.1, EVALUE 3.30e-01
ggaaagaaaagaattaatcaataaatcaaactcagaattagagaaaggaggaaaaccaagccctcctgaagtttaa

SEQ ID NO: 13948 - DNA, 183 bp, Homo sapiens
  MAP TO AL137785.2; EXPRESSED IN FETAL LIVER, SIGNAL =   1; EXPRESSED IN BONE MARROW, SIGNAL = 1.2; EXPRESSED IN HEART, SIGNAL = 1.2; EXPRESSED IN LUNG, SIGNAL = 1.4; EXPRESSED IN PLACENTA, SIGNAL = 1.2; EXPRESSED IN ADULT LIVER, SIGNAL = 1.2; EXPRESSED IN HELA, SIGNAL = 0.67; EXPRESSED IN BRAIN, SIGNAL = 1.1; NT HIT: AF288787.1, EVALUE 1.00e-02; SWISSPROT HIT: O13731, EVALUE 2.20e-01
atgcgctaccgggaagaagccgggacacctaagaaagccagagtaggatgtggaaattctggaatggagcctgcgtcctggagggtcagctttgaagcagggaaagagaagagcaagaggagaccacagagaacaggggggctccaggatgcccactggaggggcctctgtgtgaccagcaag

SEQ ID NO: 13949 - DNA, 182 bp, Homo sapiens
  MAP TO CHR21_66.0; EXPRESSED IN BONE MARROW, SIGNAL = 1.9; EXPRESSED IN ADULT LIVER, SIGNAL = 0.9; EXPRESSED IN LUNG, SIGNAL = 1.1; EXPRESSED IN PLACENTA, SIGNAL = 0.81; EXPRESSED IN HEART, SIGNAL = 1.3; EXPRESSED IN BRAIN, SIGNAL = 1.9; EXPRESSED IN HELA, SIGNAL = 7.6; EXPRESSED IN FETAL LIVER, SIGNAL = 1.7; EST_HUMAN HIT: BF514916.1, EVALUE 5.00e-98; NT HIT: AY055102.1, EVALUE 9.90e+00; SWISSPROT HIT: P03593, EVALUE 3.30e+00
tattttatcttgtgtgactgttccttccaaatgtatccagtcttaagtggttccccaaattccagctcttcgtgcgatccaaccctaggtctggctgcggaggtggctctccattgttcttggaacgctgcatttttgtctgagtgatgggtgggcaggaagttgttaagcaggtgttctac

SEQ ID NO: 13950 - DNA, 89 bp, Homo sapiens
  MAP TO AL136371.1; EXPRESSED IN FETAL LIVER, SIGNAL = 0.94; EXPRESSED IN BONE MARROW, SIGNAL = 0.87; EXPRESSED IN LUNG, SIGNAL = 0.83; EXPRESSED IN ADULT LIVER, SIGNAL = 0.79; EXPRESSED IN PLACENTA, SIGNAL =   1; EXPRESSED IN HELA, SIGNAL = 0.55; EXPRESSED IN BRAIN, SIGNAL = 0.92; EST_HUMAN HIT: BE743428.1, EVALUE 2.00e-03; NT HIT: X58338.1, EVALUE 7.00e-02
tcagtgaaggaggagagcttgaagctctctcaaaacgtcagtacaatctactttcccataatcttcatgcatttcttggtccagattag

SEQ ID NO: 13951 - DNA, 357 bp, Homo sapiens
  MAP TO AF235094.1; EXPRESSED IN PLACENTA, SIGNAL = 1.5; EXPRESSED IN LUNG, SIGNAL = 1.7; EXPRESSED IN ADULT LIVER, SIGNAL = 1.6; EXPRESSED IN BRAIN, SIGNAL = 1.7; EXPRESSED IN FETAL LIVER, SIGNAL = 1.7; EXPRESSED IN HEART, SIGNAL =   2; EXPRESSED IN BONE MARROW, SIGNAL = 1.5; EXPRESSED IN HELA, SIGNAL = 1.2; SWISSPROT HIT: O14423, EVALUE 1.00e-03; EST_HUMAN HIT: BF568137.1, EVALUE 4.00e-11; NT HIT: AF072469.1, EVALUE 0.00e+00
gaagtccttggccttctcgatgagcatggggcctgacacggggacgccctcggagcgcttccccaggaaccactcgtacaggacgcggtccaggtgctccagcttgggcgtgtgcagcgtgcgccgctgctccagcgccttgttggagtcggagctggcgaagaaccggagcagctgcgccttgtgggccctgatgtcgtaaagggtggacatgcccacattgtactcctgcatcagtgccttccggctctcgcccttctccaggcgcgtgcagatgtcaatcttctccttcagtgtcagcaccaccctcttccgcttctcccctctgctcttcccggcagccggcttggaggccat

SEQ ID NO: 13952 - DNA, 290 bp, Homo sapiens
  MAP TO AL031602.14; EXPRESSED IN BONE MARROW, SIGNAL = 2.8; EXPRESSED IN BRAIN, SIGNAL = 2.8; EXPRESSED IN LUNG, SIGNAL = 3.2; EXPRESSED IN PLACENTA, SIGNAL =   3; EXPRESSED IN ADULT LIVER, SIGNAL = 2.4; EXPRESSED IN FETAL LIVER, SIGNAL = 2.3; SWISSPROT HIT: Q9NV58, EVALUE 1.50e-02; EST_HUMAN HIT: BF798468.1, EVALUE 0.00e+00; NT HIT: AF194974.1, EVALUE 1.70e-02
agaatgcaacaatatggaaatccaagtggacattgaagccaaaccaagccactatcagctggtgagtggaagcagcacggaggactcgctccatgttcatgctcagatggcagagaatgaagaagaaggtagtggtggcggaggcagtgaagaggatcccccctgcagacaccaaagctgtgaacagaaagactgcctggccagcaaaccttgggacatcagcctggcccagcctgaaagcatccgcagtgacctagagagttctgatgcacagtcagacgatgtgccag

SEQ ID NO: 13953 - DNA, 345 bp, Homo sapiens
  MAP TO CHR22_101.0; EXPRESSED IN BONE MARROW, SIGNAL = 2.1; EXPRESSED IN BRAIN, SIGNAL =   2; EXPRESSED IN HELA, SIGNAL = 1.4; EXPRESSED IN HEART, SIGNAL = 1.9; EXPRESSED IN PLACENTA, SIGNAL = 2.1; EXPRESSED IN LUNG, SIGNAL = 2.1; EXPRESSED IN ADULT LIVER, SIGNAL =   2; SWISSPROT HIT: Q63046, EVALUE 5.20e-01; EST_HUMAN HIT: BG682321.1, EVALUE 0.00e+00; NT HIT: AF240775.1, EVALUE 0.00e+00
cagtttggagcaaacttggaagatgctgtggatgtactccctgggccagcatcctctgtaccaaccctgggtgaagctggtgagcaggcctaaccatagggacatgggggacaaggggaacttggtggacagggcggagaaaaggtgttgtaggaactggggatgccaaggtgggtgtttttctcccagttgctttaggtcgataatcttgttctttggtgtaacggttggcctgggacagtggggtggaacacgaagacctctgtaatgctgacagtttggaatttgtagtgggagaagagtctcgatcggcactgggtacagagctggatgacaggaggtttt

SEQ ID NO: 13954 - DNA, 150 bp, Homo sapiens
  MAP TO CHR22_214.0; EXPRESSED IN FETAL LIVER, SIGNAL = 1.5; EXPRESSED IN BONE MARROW, SIGNAL = 1.6; EXPRESSED IN BRAIN, SIGNAL = 1.5; EXPRESSED IN HEART, SIGNAL = 1.4; EXPRESSED IN HELA, SIGNAL = 2.6; EXPRESSED IN PLACENTA, SIGNAL = 0.9; EXPRESSED IN LUNG, SIGNAL = 0.92; EXPRESSED IN ADULT LIVER, SIGNAL = 1.2; SWISSPROT HIT: P46530, EVALUE 2.00e+00; NT HIT: gi13236543, EVALUE 2.00e+00
tgcctgcaggatcttgtccaaacacatcagcttggcattgaggtcttccatgatccatgttccatggatccagttccaaatgactgctctggccttatctcctgctatttctgcacatgcatttcctctaggtatactgtggaagtaacc

SEQ ID NO: 13955 - DNA, 105 bp, Homo sapiens
  MAP TO AL136103.2; EXPRESSED IN BRAIN, SIGNAL = 2.3; EXPRESSED IN HELA, SIGNAL = 1.5; EXPRESSED IN FETAL LIVER, SIGNAL = 2.5; EXPRESSED IN HEART, SIGNAL = 2.4; EXPRESSED IN BONE MARROW, SIGNAL = 2.5; EXPRESSED IN LUNG, SIGNAL = 2.6; EXPRESSED IN ADULT LIVER, SIGNAL = 2.5; NT HIT: X96400.1, EVALUE 1.30e+00; EST_HUMAN HIT: BE867413.1, EVALUE 5.00e-01
agcttccacttggtcacaaactttctggataacaaattcaggggctgtgtttctctgtactgtggctgtggctaccttggaacctttaacttggccaaagtcatc

SEQ ID NO: 13956 - DNA, 320 bp, Homo sapiens
  MAP TO AL133266.3; EXPRESSED IN HELA, SIGNAL = 1.6; EXPRESSED IN BRAIN, SIGNAL = 2.7; EXPRESSED IN FETAL LIVER, SIGNAL = 2.6; EXPRESSED IN BONE MARROW, SIGNAL =   3; EXPRESSED IN LUNG, SIGNAL = 3.4; EXPRESSED IN ADULT LIVER, SIGNAL = 3.1; EXPRESSED IN PLACENTA, SIGNAL = 3.3; NT HIT: gi14759941, EVALUE 0.00e+00; SWISSPROT HIT: O13718, EVALUE 1.30e+00
gatttagtcgtccgtgttgtttttattcttggcaacctgacggcaaaaaataaccaggctcgtgaacaattttccaaagagaaagggagcatccaaactctgctgtcattattccagacgttccatcagctggatctgcattcccagaagccggtgggccaacgaggcgagcagcacagggcgcagaggccgccgtcagaggcagaggacgtgctcatcaagctgactcgtgtgctggccaacattgccatccacccgggcgtgggcccggtgctggccgccaacccggggatagtgggcctgctcctgaccacgctggg

SEQ ID NO: 13957 - DNA, 71 bp, Homo sapiens
  MAP TO CHR21_29.0; EXPRESSED IN PLACENTA, SIGNAL = 0.81; EXPRESSED IN ADULT LIVER, SIGNAL = 0.97; EXPRESSED IN HELA, SIGNAL = 4.3; EXPRESSED IN BONE MARROW, SIGNAL = 1.6; EXPRESSED IN LUNG, SIGNAL = 0.98; EXPRESSED IN HEART, SIGNAL = 1.2; EXPRESSED IN BRAIN, SIGNAL = 1.5; EXPRESSED IN FETAL LIVER, SIGNAL = 1.4; NT HIT: AF048727.1, EVALUE 1.00e-12; EST_HUMAN HIT: H66563.1, EVALUE 2.00e-14
tcgagctgtcccacctttccagaccaaaccaatgttcattttacctatgttgatggatgtctcatgtcttc

SEQ ID NO: 13958 - DNA, 229 bp, Homo sapiens
  MAP TO AL136450.1; EXPRESSED IN BRAIN, SIGNAL =   5; EXPRESSED IN PLACENTA, SIGNAL = 7.3; EXPRESSED IN ADULT LIVER, SIGNAL = 5.7; EXPRESSED IN BONE MARROW, SIGNAL = 6.4; EXPRESSED IN LUNG, SIGNAL = 5.8; EXPRESSED IN HELA, SIGNAL =   4; EXPRESSED IN FETAL LIVER, SIGNAL = 5.1; EXPRESSED IN HEART, SIGNAL = 4.7; EST_HUMAN HIT: BF902121.1, EVALUE 7.00e-70; SWISSPROT HIT: P24328, EVALUE 1.70e-01; NT HIT: AL096777.1, EVALUE 1.00e-126
ggtctcagcgcacaacccaggctgccggtggcaatgtcacctcctgcctgggctccacttcctcgccctttgtcatctttcccgagatcgtgaggaatggggacccgagcacctgggtgaagaactcaactgcactgatcagcaccattcctggcacctacgtgggagtggccaacccagtgcctgcatccctgctgctgaacaaagaccccaacctgggcctcaaccg

SEQ ID NO: 13959 - DNA, 219 bp, Homo sapiens
  MAP TO AJ239319.2; EXPRESSED IN BONE MARROW, SIGNAL = 1.9; EXPRESSED IN LUNG, SIGNAL = 2.3; EXPRESSED IN BRAIN, SIGNAL = 1.9; EXPRESSED IN PLACENTA, SIGNAL = 2.6; EXPRESSED IN ADULT LIVER, SIGNAL = 2.4; EXPRESSED IN FETAL LIVER, SIGNAL =   2; EXPRESSED IN HEART, SIGNAL = 1.9; EST_HUMAN HIT: BF512649.1, EVALUE 1.00e-120; SWISSPROT HIT: Q14202, EVALUE 5.00e-41; NT HIT: gi16162711, EVALUE 1.00e-120
cttcttgtacgcccccaagcaggttgtgttgcagaaccgcttttgttggccctcgtggaagaggagctcagggccaggactcccggtcttggtgtagatgtaagccccacactggtcacaacagttggttttcagtcccttgttggcccggaatttggagaagcaagaatcgctgcagagccggtgtaccacgctgccattgctgacctcgtgcaggac

SEQ ID NO: 13960 - DNA, 83 bp, Homo sapiens
  MAP TO AC013624.4; EXPRESSED IN PLACENTA, SIGNAL = 0.74; EXPRESSED IN BONE MARROW, SIGNAL = 0.61; EXPRESSED IN LUNG, SIGNAL = 0.75; EXPRESSED IN BRAIN, SIGNAL = 0.71; EXPRESSED IN FETAL LIVER, SIGNAL = 0.74; EST_HUMAN HIT: AW268826.1, EVALUE 9.30e-02; NT HIT: gi15791399, EVALUE 1.00e-03
aacctgctgtcttttctcatcttcactatcattatcttcagactgaatcttcccaaaatggatttttttaccaacctcgtcct

SEQ ID NO: 13961 - DNA, 171 bp, Homo sapiens
  MAP TO AF235096.1; EXPRESSED IN PLACENTA, SIGNAL = 1.3; EXPRESSED IN LUNG, SIGNAL =   1; EXPRESSED IN BRAIN, SIGNAL = 0.99; EXPRESSED IN HEART, SIGNAL =   4; EXPRESSED IN ADULT LIVER, SIGNAL = 1.1; EXPRESSED IN FETAL LIVER, SIGNAL =   1; EXPRESSED IN BONE MARROW, SIGNAL = 0.96; EST_HUMAN HIT: BG390704.1, EVALUE 5.00e-70; SWISSPROT HIT: P07224, EVALUE 7.50e+00; NT HIT: gi14748908, EVALUE 4.00e-70
gttcagagcactggtgaaggagaagcacagagatattttgatcatgcacttactctgagaaacacaatactgtttctgcgtcataacaaagatctagttgcgcaaactgcacagccagaccaacccaattatggtatgataaatatatttaattttgaagacatgatcata

SEQ ID NO: 13962 - DNA, 81 bp, Homo sapiens
  MAP TO CHR21_68.0; EXPRESSED IN BONE MARROW, SIGNAL = 1.4; EXPRESSED IN LUNG, SIGNAL = 0.65; EXPRESSED IN BRAIN, SIGNAL = 1.4; EXPRESSED IN HELA, SIGNAL = 3.9; EXPRESSED IN FETAL LIVER, SIGNAL = 1.2; EST_HUMAN HIT: BG323608.1, EVALUE 9.00e-02
caacaatggcaatggtctttcactgagggctgcagccccaccagacagtcatctccatgcagccatctgctccacatccag

SEQ ID NO: 13963 - DNA, 155 bp, Homo sapiens
  MAP TO AB017654.1; EXPRESSED IN FETAL LIVER, SIGNAL = 0.63; EXPRESSED IN PLACENTA, SIGNAL = 0.58; EXPRESSED IN LUNG, SIGNAL = 0.59; EXPRESSED IN BONE MARROW, SIGNAL = 0.6; EXPRESSED IN ADULT LIVER, SIGNAL = 0.81; EXPRESSED IN BRAIN, SIGNAL = 0.69; SWISSPROT HIT: Q00112, EVALUE 5.80e+00; NT HIT: AL161587.2, EVALUE 1.30e-01
aactgaggaagcttcctatggtttaagtggtggtgaggaaaaccattgtctttcttcctcctcatctttgtcttgcctacttcattcactactttcttgggagcagtgcaggaagaggccgtccaattccagagctgcagaggggctcctatgcc

SEQ ID NO: 13964 - DNA, 108 bp, Homo sapiens
  MAP TO AC022619.3; EXPRESSED IN FETAL LIVER, SIGNAL = 2.9; EXPRESSED IN BONE MARROW, SIGNAL = 2.2; EXPRESSED IN LUNG, SIGNAL = 1.9; EXPRESSED IN BRAIN, SIGNAL = 1.5; SWISSPROT HIT: Q08287, EVALUE 9.20e-01; NT HIT: X51937.1, EVALUE 8.80e-02
ttattttacattctccatcaggtatatcatataactcagtttcctctgggtcagcttctggagctgtattttgttcttttgtttggaacatatttcttgtttcttcat

SEQ ID NO: 13965 - DNA, 119 bp, Homo sapiens
  MAP TO CHR22_223.0; EXPRESSED IN BRAIN, SIGNAL =   1; EXPRESSED IN HELA, SIGNAL = 1.5; EXPRESSED IN PLACENTA, SIGNAL = 0.64; EXPRESSED IN LUNG, SIGNAL = 0.58; EXPRESSED IN FETAL LIVER, SIGNAL = 0.85; EXPRESSED IN BONE MARROW, SIGNAL = 1.1; NT HIT: AE001311.1, EVALUE 3.90e-01; EST_HUMAN HIT: BG545700.1, EVALUE 2.30e+00
ataagaggaccagctggacggttttcctgggcgaactgctgatgtcactatctttgggtcttttctcttgagttgcttggactttggaaaaggatgttacaaggccgtacagagggcag

SEQ ID NO: 13966 - DNA, 283 bp, Homo sapiens
  MAP TO AL136304.2; EXPRESSED IN BONE MARROW, SIGNAL = 3.5; EXPRESSED IN HELA, SIGNAL = 2.6; EXPRESSED IN HEART, SIGNAL = 3.6; EXPRESSED IN FETAL LIVER, SIGNAL = 3.7; EXPRESSED IN BRAIN, SIGNAL = 4.3; EXPRESSED IN ADULT LIVER, SIGNAL = 4.5; EXPRESSED IN LUNG, SIGNAL = 3.9; EXPRESSED IN PLACENTA, SIGNAL = 4.2; SWISSPROT HIT: Q9DBS5, EVALUE 1.00e-40; NT HIT: gi16174185, EVALUE 0.00e+00; EST_HUMAN HIT: AL525074.1, EVALUE 0.00e+00
ctgggcctcactcagcccgagctcaatgttttccatagaacggcgaagctgccgggccttctcatgcaccagcccttcctcatggcctccctgctgcagacactcaatggtctgggacaggctttgcagcacggcctggtgttcactgcgtagggcctctagcccttggctgaccagccgtgtgctccccaggatctcctcttggctgagccggtggcctgcaggctcatcccgctgccccaacaccaggcctgacatcctggcctgggggaccttgcccggt

SEQ ID NO: 13967 - DNA, 265 bp, Homo sapiens
  MAP TO CHR22_167.0; EXPRESSED IN BRAIN, SIGNAL = 0.88; EXPRESSED IN HELA, SIGNAL = 0.64; EXPRESSED IN FETAL LIVER, SIGNAL = 0.72; EXPRESSED IN PLACENTA, SIGNAL = 1.2; EXPRESSED IN ADULT LIVER, SIGNAL = 1.1; SWISSPROT HIT: Q98917, EVALUE 1.40e-01; NT HIT: gi12738839, EVALUE 9.00e-35; EST_HUMAN HIT: AA631030.1, EVALUE 9.00e-02
ccggctcatgtgcaaggaaggacagagtcagcatctgagtggccatgggcaaggactcaccgcatttgctgtcctgtagcacctggcctgcgccacatgccccctgcccctccagcgccttggctggcctctgggctacctcgtactcagtgcctgagacctggacatagaactgctgccggccgatggacttgcgcagggtcttgatggcggcctgcaggctctgttctgctcgcttccgcaagcagtccgcttcgcatgtgtc

SEQ ID NO: 13968 - DNA, 172 bp, Homo sapiens
  MAP TO AC011985.3; EXPRESSED IN LUNG, SIGNAL = 1.1; EXPRESSED IN BRAIN, SIGNAL = 0.91; EST_HUMAN HIT: AW897187.1, EVALUE 4.00e-09; SWISSPROT HIT: P42500, EVALUE 5.70e+00; NT HIT: gi8924199, EVALUE 6.00e-01
ttcagcggagaaacctggcagataccgccttaatcaagagatcaaagttaacatcaccagtcatgggactaatcaacagcatggtcgtctgatacactgcatcactctgatattcctgccagaagtacagaatctgaatctaatcattagaacacataagacaaaccccaac

SEQ ID NO: 13969 - DNA, 130 bp, Homo sapiens
  MAP TO AL138995.1; EXPRESSED IN BONE MARROW, SIGNAL =  10; EXPRESSED IN PLACENTA, SIGNAL =  11; EXPRESSED IN LUNG, SIGNAL =  10; EXPRESSED IN BRAIN, SIGNAL = 9.1; EXPRESSED IN HELA, SIGNAL = 5.6; EXPRESSED IN FETAL LIVER, SIGNAL =  10; EST_HUMAN HIT: AA434461.1, EVALUE 3.00e-03; SWISSPROT HIT: P30704, EVALUE 3.50e+00; NT HIT: AF366053.1, EVALUE 5.00e-04
ttattgggagtacgctgagaaacaatacccttcaggaaatgaaggaagcaggactgggcagagggagatgaatggtgatgcagttgcaacagagtcctcttttgatgccgtaggaacctctggagcttga

SEQ ID NO: 13970 - DNA, 148 bp, Homo sapiens
  MAP TO CHR22_228.0; EXPRESSED IN BONE MARROW, SIGNAL =   2; EXPRESSED IN BRAIN, SIGNAL = 1.8; EXPRESSED IN PLACENTA, SIGNAL = 1.1; EXPRESSED IN ADULT LIVER, SIGNAL = 1.3; EXPRESSED IN FETAL LIVER, SIGNAL =   2; EXPRESSED IN LUNG, SIGNAL = 1.1; EXPRESSED IN HEART, SIGNAL = 1.6; EXPRESSED IN HELA, SIGNAL = 3.4; EST_HUMAN HIT: BE612912.1, EVALUE 8.00e-78; SWISSPROT HIT: Q9Y512, EVALUE 9.00e-26; NT HIT: gi14779515, EVALUE 5.00e-78
gagactacctaggtggagaagcgtactgggccggcggcctgcacctctacaccccattacctttccggccaggccagggtggctttggagaacttttccgaacacacttctttctcaacgcaggaaacctctgcaacctcaactatgg

SEQ ID NO: 13971 - DNA, 90 bp, Homo sapiens
  MAP TO CHR22_8.0; EXPRESSED IN FETAL LIVER, SIGNAL = 1.1; EXPRESSED IN BONE MARROW, SIGNAL =   1; EXPRESSED IN BRAIN, SIGNAL =   1; EXPRESSED IN HELA, SIGNAL = 0.64; EXPRESSED IN PLACENTA, SIGNAL = 1.6; EXPRESSED IN ADULT LIVER, SIGNAL = 1.6; EXPRESSED IN LUNG, SIGNAL = 1.3; NT HIT: AB003924.1, EVALUE 4.40e+00; EST_HUMAN HIT: BF795034.1, EVALUE 4.10e-01; SWISSPROT HIT: O83046, EVALUE 8.10e+00
tttgattggtctgacgccattggcacaccagctccatgagataggcagctgttttgctcactgtggtagcaccagcacttagacaagctc

SEQ ID NO: 13972 - DNA, 182 bp, Homo sapiens
  MAP TO CHR22_38.0; EXPRESSED IN LUNG, SIGNAL =   2; EXPRESSED IN ADULT LIVER, SIGNAL = 1.7; EXPRESSED IN BONE MARROW, SIGNAL = 1.8; EXPRESSED IN PLACENTA, SIGNAL = 1.9; EXPRESSED IN BRAIN, SIGNAL = 1.6; EXPRESSED IN HELA, SIGNAL = 1.3; EXPRESSED IN FETAL LIVER, SIGNAL = 1.8; NT HIT: gi14770892, EVALUE 4.00e-05; EST_HUMAN HIT: AA913924.1, EVALUE 4.00e-09; SWISSPROT HIT: O97939, EVALUE 5.00e-01
cttctgatatgcaaggtgttccagctctgcctgaaaccagtcatttttccaaggagccctggttccgtttagtggagaacggtttttagaagccgagttctgggtattgggtgctttcttactattggggcgttgctgctgccaggctctccctgtcagagctagggaacatatctgtatgt

SEQ ID NO: 13973 - DNA, 153 bp, Homo sapiens
  MAP TO AL136362.1; EXPRESSED IN LUNG, SIGNAL = 2.2; EXPRESSED IN BONE MARROW, SIGNAL = 1.7; EXPRESSED IN PLACENTA, SIGNAL = 2.3; EXPRESSED IN ADULT LIVER, SIGNAL = 2.1; EXPRESSED IN HELA, SIGNAL =   1; EXPRESSED IN BRAIN, SIGNAL = 1.9; EXPRESSED IN FETAL LIVER, SIGNAL = 1.6; SWISSPROT HIT: P07858, EVALUE 4.40e+00; NT HIT: U60487.1, EVALUE 5.20e-01
atgtacaatttgctcagttttgacatacgtgaaaacattgccatagtcatgataattaacatatttgtcataactaaaagtttcctcatacccttttgcaatactttccttcttgccttcaccctgacccaaacaaccactaatatgtgtact

SEQ ID NO: 13974 - DNA, 334 bp, Homo sapiens
  MAP TO AJ132411.1; EXPRESSED IN BONE MARROW, SIGNAL = 3.7; EXPRESSED IN HEART, SIGNAL = 3.6; EXPRESSED IN PLACENTA, SIGNAL = 4.6; EXPRESSED IN BRAIN, SIGNAL = 4.9; EXPRESSED IN ADULT LIVER, SIGNAL =   2; EXPRESSED IN FETAL LIVER, SIGNAL = 3.6; SWISSPROT HIT: P93531, EVALUE 2.20e-01; NT HIT: AJ310308.1, EVALUE 7.90e-02; EST_HUMAN HIT: BE264644.1, EVALUE 4.60e-01
aggacaaggtcacggtcctaatatctgggtctggccttggcacctttccaggggaaaactcatgggacaaaggctcattgcaagcaccaggaaagggcctccattgcagctgcttctcttcattcatggggcaattccacagtggaccttggggccagagaagaccaatctgttctggaaacagatttggaggggccagtgttttcctggcctgctctgggccatcagtggaatggaaagagcccaaaggaaccttaattcttaattcttcgtccatgtgctcagctgaaatataaagattcttttcagagccctccctgaagtagccctccag

SEQ ID NO: 13975 - DNA, 131 bp, Homo sapiens
  MAP TO CHR22_216.0; EXPRESSED IN BONE MARROW, SIGNAL = 2.8; EXPRESSED IN PLACENTA, SIGNAL = 1.7; EXPRESSED IN BRAIN, SIGNAL = 2.1; EXPRESSED IN LUNG, SIGNAL = 1.9; EXPRESSED IN ADULT LIVER, SIGNAL = 1.9; EXPRESSED IN HELA, SIGNAL = 3.8; EXPRESSED IN FETAL LIVER, SIGNAL = 2.3; NT HIT: AF181897.1, EVALUE 1.00e-32; EST_HUMAN HIT: AA740532.1, EVALUE 2.00e-31
tgaggtttaaggaaagaagctgtctccataacataaaagtgcaaggtgaagcagcaggtgctgatggagaagctgcagcaagttatccagaagatctggctaaggtcattgatgaaggtggccacactaag

SEQ ID NO: 13976 - DNA, 165 bp, Homo sapiens
  MAP TO CHR22_103.0; EXPRESSED IN BONE MARROW, SIGNAL = 1.8; EXPRESSED IN LUNG, SIGNAL = 2.5; EXPRESSED IN ADULT LIVER, SIGNAL = 2.6; EXPRESSED IN HELA, SIGNAL = 0.77; EXPRESSED IN PLACENTA, SIGNAL = 2.4; EXPRESSED IN HEART, SIGNAL = 2.4; EXPRESSED IN BRAIN, SIGNAL = 2.4; EXPRESSED IN FETAL LIVER, SIGNAL = 2.2; SWISSPROT HIT: P21061, EVALUE 4.40e+00; NT HIT: gi15920163, EVALUE 5.70e-01
ttaattctgagaggggtggtctgagaggggcttgtcaagaagtaacttgagcagagccttgagaatgtagtaatactgtttgttctgagttttaccatccacatggcactcttcatacctgttgtctcctgccctcgttgagttccgggggtaggtctggtatcc

SEQ ID NO: 13977 - DNA, 315 bp, Homo sapiens
  MAP TO AJ239319.2; EXPRESSED IN BRAIN, SIGNAL = 0.62; EXPRESSED IN FETAL LIVER, SIGNAL = 0.91; EXPRESSED IN LUNG, SIGNAL = 0.99; EXPRESSED IN PLACENTA, SIGNAL =   1; EXPRESSED IN BONE MARROW, SIGNAL =   1; EXPRESSED IN ADULT LIVER, SIGNAL = 0.86; EST_HUMAN HIT: AA663213.1, EVALUE 1.00e-101; SWISSPROT HIT: P32594, EVALUE 3.00e-03; NT HIT: AJ278581.1, EVALUE 1.00e-111
ggacggcttgctgactggtagggaatttgtccctttcttcggctgtcattctatcattcacttgactaagataccaggtatctccaagctctcgggctgcagctaaagccacattcttttcattaaaggccagggtttgatctaacaatagcatgacatctctccaagtgagatcgaaggtttgccctagaccctgtaggacatctatatacctatcaggatcatctgaaaacttccccaggtctgccttgatctgctttaaatcagagagggagaaggggatatgtacccgggttgggcaaaattcccctcctc

SEQ ID NO: 13978 - DNA, 148 bp, Homo sapiens
  MAP TO AC020698.2; EXPRESSED IN BRAIN, SIGNAL = 0.74; EXPRESSED IN HELA, SIGNAL = 0.55; EXPRESSED IN FETAL LIVER, SIGNAL = 0.79; EXPRESSED IN LUNG, SIGNAL = 0.83; EXPRESSED IN BONE MARROW, SIGNAL = 0.75; EXPRESSED IN PLACENTA, SIGNAL = 0.95; EXPRESSED IN ADULT LIVER, SIGNAL = 0.87; EST_HUMAN HIT: BG682809.1, EVALUE 1.90e-01; NT HIT: U82695.2, EVALUE 7.90e+00
atggctggaacggtccgactccatgggctccatctgcctaagattggtgtgcactgtgcttcccacctgcaccagcgcagcagcacgtccagcccctcccagcccttcatgctgggctactgggtatgcttttgggatgtcaaggagg

SEQ ID NO: 13979 - DNA, 138 bp, Homo sapiens
  MAP TO AL133378.4; EXPRESSED IN HELA, SIGNAL = 1.5; EXPRESSED IN BRAIN, SIGNAL = 2.6; EXPRESSED IN FETAL LIVER, SIGNAL =   2; EXPRESSED IN BONE MARROW, SIGNAL = 2.5; EXPRESSED IN HEART, SIGNAL = 2.5; EXPRESSED IN LUNG, SIGNAL = 2.8; EXPRESSED IN PLACENTA, SIGNAL = 2.5; EXPRESSED IN ADULT LIVER, SIGNAL = 2.4; EST_HUMAN HIT: AL515437.1, EVALUE 2.70e+00
ctggaatgtttacacgatggctggagcaggagcagccatcttgaatcttgaggtagacattgaaaatttagtatggcagaaaaaaaaatcagttagaaggaaattagttcctaatgatcaggagctacccacatttat

SEQ ID NO: 13980 - DNA, 108 bp, Homo sapiens
  MAP TO AL136317.2; EXPRESSED IN BONE MARROW, SIGNAL = 0.52; EXPRESSED IN HELA, SIGNAL = 0.87; EXPRESSED IN BRAIN, SIGNAL = 0.68; EXPRESSED IN LUNG, SIGNAL = 0.64; EXPRESSED IN ADULT LIVER, SIGNAL = 0.66; NT HIT: gi14757749, EVALUE 9.00e-42; EST_HUMAN HIT: AI589066.1, EVALUE 2.00e-52; SWISSPROT HIT: P11586, EVALUE 4.00e-07
ctgctgagtgtaacgatctattttgacttgtgcctcaggacagagttcgatatctttggctccatagacagcctgggcaatggtccttatcttgtccacaattggaag

SEQ ID NO: 13981 - DNA, 86 bp, Homo sapiens
  MAP TO CHR21_33.0; EXPRESSED IN BONE MARROW, SIGNAL = 1.5; EXPRESSED IN LUNG, SIGNAL = 1.1; EXPRESSED IN ADULT LIVER, SIGNAL = 1.1; EXPRESSED IN PLACENTA, SIGNAL = 0.95; EXPRESSED IN BRAIN, SIGNAL = 1.6; EXPRESSED IN HELA, SIGNAL = 4.2; EXPRESSED IN FETAL LIVER, SIGNAL = 1.5; NT HIT: AJ251154.1, EVALUE 4.10e+00; EST_HUMAN HIT: BF339413.1, EVALUE 1.50e+00; SWISSPROT HIT: P32645, EVALUE 8.10e+00
gctcgtcagctgccccagccacatctcaggactgccaggatcagctacacgcagctgagaatcaatcccacccacttctccagaag

SEQ ID NO: 13982 - DNA, 386 bp, Homo sapiens
  MAP TO CHR22_33.0; EXPRESSED IN FETAL LIVER, SIGNAL = 1.5; EXPRESSED IN BONE MARROW, SIGNAL = 1.6; EXPRESSED IN BRAIN, SIGNAL = 1.6; EXPRESSED IN HEART, SIGNAL = 1.6; EXPRESSED IN LUNG, SIGNAL = 2.1; EXPRESSED IN ADULT LIVER, SIGNAL = 1.7; SWISSPROT HIT: Q12114, EVALUE 8.20e-01; NT HIT: gi14779650, EVALUE 0.00e+00; EST_HUMAN HIT: BE382471.1, EVALUE 0.00e+00
ctgggaattctttcctggctggttttgggtgaagccttcgagcatgtacgagtaaagactgcctttgcattgcagtttgctcaggtccacggccaagatgccgaccacaccagtgaaggccaagagggtcagcaccttccaggagtttgagagcaataccagcgatgcctgggacgctggggaggacgacgatgagctcctggccatggcggcggagagcctgaactccgaggtggtcatggagacggccaaccgtgtgctgcgtaaccacagccagcggcaggggcggcccacgctgcaggaggggccagggcttcagcagaagcccaggcccgaggcagagccgccctcaccccccagcggcgacctccggctggtgaagtcgg

SEQ ID NO: 13983 - DNA, 160 bp, Homo sapiens
  MAP TO CHR22_106.0; EXPRESSED IN BONE MARROW, SIGNAL = 1.8; EXPRESSED IN PLACENTA, SIGNAL = 1.8; EXPRESSED IN LUNG, SIGNAL =   2; EXPRESSED IN ADULT LIVER, SIGNAL = 1.8; EXPRESSED IN HELA, SIGNAL = 1.9; EXPRESSED IN BRAIN, SIGNAL = 2.2; EXPRESSED IN FETAL LIVER, SIGNAL = 1.8; SWISSPROT HIT: P11274, EVALUE 3.00e-17; NT HIT: gi7657020, EVALUE 4.00e-85; EST_HUMAN HIT: AL043953.1, EVALUE 3.00e-65
ataagaaggacatgtcggtgatgatgagcgagacggacatgaacgccatcgcaggcacgctgaagctgtacttccgtgagctgcctgagcccctcttcactgacgagttctaccccagcttcgcagagggcatcggtgagcattggaggccttggcctcg

SEQ ID NO: 13984 - DNA, 187 bp, Homo sapiens
  MAP TO CHR22_219.0; EXPRESSED IN PLACENTA, SIGNAL = 0.9; EXPRESSED IN LUNG, SIGNAL = 0.93; EXPRESSED IN ADULT LIVER, SIGNAL = 1.1; EXPRESSED IN BONE MARROW, SIGNAL = 1.5; EXPRESSED IN HELA, SIGNAL = 2.4; EXPRESSED IN BRAIN, SIGNAL = 1.4; EXPRESSED IN FETAL LIVER, SIGNAL = 1.4; EXPRESSED IN HEART, SIGNAL = 1.2; EST_HUMAN HIT: AW271668.1, EVALUE 6.20e-02; SWISSPROT HIT: Q9PWD5, EVALUE 2.50e+00; NT HIT: AB023642.1, EVALUE 1.70e-01
cagacaaggagacaaagctagcaaacagcagagctggcacctagacccaaacctgggttcctcaccactctgccgcctgcaggtcaccagaggcctcaaatgcacggggctgctgccgggtgtcagttacatccgcctcacctgcacctgccgtctcttggctctgagtgtgcaggtcagggtactt

SEQ ID NO: 13985 - DNA, 114 bp, Homo sapiens
  MAP TO AL121994.3; EXPRESSED IN LUNG, SIGNAL = 1.7; EXPRESSED IN PLACENTA, SIGNAL = 1.2; EXPRESSED IN BONE MARROW, SIGNAL = 2.3; EXPRESSED IN BRAIN, SIGNAL = 0.78; EXPRESSED IN FETAL LIVER, SIGNAL = 2.8; EXPRESSED IN HEART, SIGNAL = 2.4; EST_HUMAN HIT: BG167569.1, EVALUE 2.20e+00; NT HIT: S46011.1, EVALUE 3.70e-01
gtgcatggagaaggacttggtcaaggtgaccttcaccaggacccccggagagaggcgaacctcccagtgggtcagcacctcagatgccttgaccctctctttacctcccctgca

SEQ ID NO: 13986 - DNA, 81 bp, Homo sapiens
  MAP TO AC015896.4; EXPRESSED IN LUNG, SIGNAL = 2.8; EXPRESSED IN PLACENTA, SIGNAL = 2.8; EXPRESSED IN BONE MARROW, SIGNAL = 2.3; EXPRESSED IN ADULT LIVER, SIGNAL = 3.4; EXPRESSED IN HELA, SIGNAL = 1.2; EXPRESSED IN BRAIN, SIGNAL = 2.5; EXPRESSED IN FETAL LIVER, SIGNAL = 2.4; EXPRESSED IN HEART, SIGNAL = 2.4; EST_HUMAN HIT: AW904491.1, EVALUE 5.00e-34; NT HIT: AL161540.2, EVALUE 6.20e-02
ctttcctgtttcatctcttaccactcttctacaagcactcttttttccagtcatgtcaaataactgcagtttcacgaacat

SEQ ID NO: 13987 - DNA, 176 bp, Homo sapiens
  MAP TO CHR22_204.0; EXPRESSED IN HELA, SIGNAL = 1.3; EXPRESSED IN FETAL LIVER, SIGNAL = 0.96; EXPRESSED IN LUNG, SIGNAL = 1.3; EXPRESSED IN BONE MARROW, SIGNAL =   1; EXPRESSED IN PLACENTA, SIGNAL = 1.2; EXPRESSED IN ADULT LIVER, SIGNAL = 1.4; EXPRESSED IN BRAIN, SIGNAL = 0.99; NT HIT: AL163281.2, EVALUE 9.60e+00; EST_HUMAN HIT: AL601798.1, EVALUE 9.10e-01; SWISSPROT HIT: P08547, EVALUE 9.00e-03
cagcctttcctctcctcagctgcctcgccagtatctttctttctttctttgtctgcatagtcatcgccgctctgagtggtgtgggatggtatctcgacctgctcttgattggcatttctctgttgatgagtgagtttgagcatgtttccctctttgttggtcacttgcacattgtc

SEQ ID NO: 13988 - DNA, 92 bp, Homo sapiens
  MAP TO AL139152.1; EXPRESSED IN HEART, SIGNAL = 7.7; EXPRESSED IN PLACENTA, SIGNAL =  10; EXPRESSED IN ADULT LIVER, SIGNAL = 9.2; EXPRESSED IN BONE MARROW, SIGNAL =  11; EXPRESSED IN HELA, SIGNAL = 2.7; EXPRESSED IN FETAL LIVER, SIGNAL = 8.5; EXPRESSED IN LUNG, SIGNAL =  12; EXPRESSED IN BRAIN, SIGNAL = 9.3; NT HIT: X52102.1, EVALUE 7.20e-02; EST_HUMAN HIT: BI039156.1, EVALUE 1.00e-10
gtaaacttttgcttgacacaaagctcccttcctactccaagcattcatacactttcactaacagacacatccaaccttgtctttcttccaag

SEQ ID NO: 13989 - DNA, 101 bp, Homo sapiens
  MAP TO AL121830.11; EXPRESSED IN BRAIN, SIGNAL = 1.3; EXPRESSED IN FETAL LIVER, SIGNAL = 1.2; EXPRESSED IN LUNG, SIGNAL = 1.2; EXPRESSED IN BONE MARROW, SIGNAL = 1.3; NT HIT: gi9838361, EVALUE 8.10e-02; SWISSPROT HIT: Q57768, EVALUE 2.10e+00; EST_HUMAN HIT: BI869251.1, EVALUE 4.70e-01
ccttcaactattctcttttttggctacaatttctattatacctgttctaatggctacagtagtgagggagaaaggaaaatccccatgggaggcagtcgcaa

SEQ ID NO: 13990 - DNA, 195 bp, Homo sapiens
  MAP TO AC016730.4; EXPRESSED IN BONE MARROW, SIGNAL =   1; EXPRESSED IN BRAIN, SIGNAL =   1; EXPRESSED IN HELA, SIGNAL = 0.94; EXPRESSED IN LUNG, SIGNAL = 1.1; EXPRESSED IN FETAL LIVER, SIGNAL = 1.1; EXPRESSED IN PLACENTA, SIGNAL = 1.2; EXPRESSED IN ADULT LIVER, SIGNAL =   1; NT HIT: AF217796.1, EVALUE 4.40e-02; EST_HUMAN HIT: AW935137.1, EVALUE 6.50e-02
ttataattttagcatttgcatgtaggtatttgattttgagttaatttttgtatgtgtgtaaggtttcttcttcttctcctcctcctcctcctcctcctcctccccctcctccttctccttctcctccttccccttctttcttctttcttcttctttttttttttttgcatgtggatttccagtattcccgtacat

SEQ ID NO: 13991 - DNA, 174 bp, Homo sapiens
  MAP TO CHR21_5.0; EXPRESSED IN BRAIN, SIGNAL = 1.1; EXPRESSED IN HELA, SIGNAL = 2.5; EXPRESSED IN FETAL LIVER, SIGNAL = 1.1; EXPRESSED IN LUNG, SIGNAL = 0.81; EXPRESSED IN ADULT LIVER, SIGNAL = 0.81; EXPRESSED IN PLACENTA, SIGNAL = 0.72; SWISSPROT HIT: Q9XSJ7, EVALUE 1.50e+00
ttcatcccttttcttgtgctccctttccctttgcctctcttgagcttccgtttgggcttcaggattacattcatccttgctactggtggggcactggttccaggaacaccactcccctctctcccacgtggatacccaaatcccagcataatcaaatcgtgtagttgaggaacc

SEQ ID NO: 13992 - DNA, 101 bp, Homo sapiens
  MAP TO CHR22_3.0; EXPRESSED IN FETAL LIVER, SIGNAL = 2.5; EXPRESSED IN BONE MARROW, SIGNAL = 2.5; EXPRESSED IN BRAIN, SIGNAL = 2.5; EXPRESSED IN HEART, SIGNAL = 2.2; EXPRESSED IN LUNG, SIGNAL = 2.6; EXPRESSED IN HELA, SIGNAL = 0.9; EXPRESSED IN PLACENTA, SIGNAL = 2.8; EXPRESSED IN ADULT LIVER, SIGNAL = 2.5; SWISSPROT HIT: Q02910, EVALUE 4.70e+00
atcccagaggttctagcacccttcccgctgtactctcaggatccatcaaccccagctgggatggcacccagtgtgacaagtccccggtgaccatcgtggag

SEQ ID NO: 13993 - DNA, 292 bp, Homo sapiens
  MAP TO CHR22_37.0; EXPRESSED IN FETAL LIVER, SIGNAL = 1.8; EXPRESSED IN BONE MARROW, SIGNAL = 1.7; EXPRESSED IN PLACENTA, SIGNAL = 1.8; EXPRESSED IN HEART, SIGNAL = 1.8; EXPRESSED IN BRAIN, SIGNAL = 1.8; EXPRESSED IN LUNG, SIGNAL = 1.7; EXPRESSED IN ADULT LIVER, SIGNAL = 1.5; EST_HUMAN HIT: BG703843.1, EVALUE 0.00e+00; SWISSPROT HIT: O14994, EVALUE 9.00e-22; NT HIT: gi4507332, EVALUE 0.00e+00
ttgagatgcggatggggtggtgctggcttcttggactcttcaccctgctgggaggtactacggccctgcacagggggccggggctgtgaggcgagggtggcacctggcttggaggcctggtttggggagctgccactggatgcccgggatagctgcggagagcctggtgacctttgctgctgtggagatccggactgggggctcaggggctgctggccttgtggggagagcctctgttgggaggggcttccagatctctggggctgaggagactgagcttggcgagggcctc

SEQ ID NO: 13994 - DNA, 51 bp, Homo sapiens
  MAP TO CHR22_207.0; EXPRESSED IN LUNG, SIGNAL =   1; EXPRESSED IN FETAL LIVER, SIGNAL = 1.8; EXPRESSED IN PLACENTA, SIGNAL = 0.78; EXPRESSED IN BONE MARROW, SIGNAL = 1.9; EXPRESSED IN BRAIN, SIGNAL = 1.6; EXPRESSED IN ADULT LIVER, SIGNAL = 1.3; EXPRESSED IN HELA, SIGNAL = 4.3; EXPRESSED IN HEART, SIGNAL = 1.1; EST_HUMAN HIT: AI798783.1, EVALUE 2.00e-20; NT HIT: AB070940.1, EVALUE 3.30e-02
atggggctcgaaggtgctcgccatgctccagaccggccacctggcagtcag

SEQ ID NO: 13995 - DNA, 199 bp, Homo sapiens
  MAP TO CHR22_12.0; EXPRESSED IN BONE MARROW, SIGNAL = 0.85; EXPRESSED IN HEART, SIGNAL = 1.4; EXPRESSED IN BRAIN, SIGNAL = 0.87; EXPRESSED IN PLACENTA, SIGNAL = 1.1; EXPRESSED IN ADULT LIVER, SIGNAL = 1.1; EXPRESSED IN HELA, SIGNAL = 1.6; EXPRESSED IN LUNG, SIGNAL = 0.9; EXPRESSED IN FETAL LIVER, SIGNAL = 0.86; SWISSPROT HIT: Q27991, EVALUE 2.00e-07; NT HIT: gi14777918, EVALUE 1.00e-108
gtgcccaagggccgccgggatggcctgcctgcccacattggctccatggcacagcgggcatactgggcgctgctgaaccagcggagagaccagagcattgtggccctgggctggagtggcgctgggaagaccacctgctgtgagcaggtcctggaacacctggtggggatggcaggcagtgtggatggcagggtctcag

SEQ ID NO: 13996 - DNA, 315 bp, Homo sapiens
  MAP TO CHR22_225.0; EXPRESSED IN BONE MARROW, SIGNAL = 1.9; EXPRESSED IN HELA, SIGNAL = 3.4; EXPRESSED IN BRAIN, SIGNAL = 1.6; EXPRESSED IN LUNG, SIGNAL = 0.93; EXPRESSED IN FETAL LIVER, SIGNAL = 1.7; EXPRESSED IN HEART, SIGNAL = 1.4; EXPRESSED IN PLACENTA, SIGNAL = 0.95; EXPRESSED IN ADULT LIVER, SIGNAL = 1.1; NT HIT: U14632.1, EVALUE 2.90e-01; EST_HUMAN HIT: BE293070.1, EVALUE 6.70e+00
cacatcttgaacaacactgtgatcattgacatcaacatagtgacgatgatgatgatcagatacatcatcatcatcttcttcagcaccatcatcatcaatatcaccatcatcatcaccctcatcaacagcaccataacagcaccatcaacattatcatcaccaccatcaacattatcatcaccaccatcaacattatcatcaccaccatcaacattatcatcgccatcaacattatcatcacccccatcaccctcatcatcaatagcaccgtcatcatcatcacagtaagggcagctagtgcttatatacagcatc

SEQ ID NO: 13997 - DNA, 124 bp, Homo sapiens
  MAP TO CHR22_55.0; EXPRESSED IN BONE MARROW, SIGNAL = 1.1; EXPRESSED IN HELA, SIGNAL = 1.8; EXPRESSED IN BRAIN, SIGNAL = 1.3; EXPRESSED IN FETAL LIVER, SIGNAL = 1.1; EXPRESSED IN HEART, SIGNAL = 1.4; EXPRESSED IN PLACENTA, SIGNAL = 1.5; EXPRESSED IN LUNG, SIGNAL = 1.3; EXPRESSED IN ADULT LIVER, SIGNAL = 1.4; NT HIT: Z73531.1, EVALUE 4.10e-01; EST_HUMAN HIT: BF245271.1, EVALUE 3.00e-18
caaatctgggacatctccagtttggagatcatggctggcagagacctgaagtttgttcatgagtcttacctcaagcagaggaagtgtccaaagctggagagcaccttcgattctctctgccttt

SEQ ID NO: 13998 - DNA, 174 bp, Homo sapiens
  MAP TO AL137859.2; EXPRESSED IN FETAL LIVER, SIGNAL = 0.68; EXPRESSED IN BONE MARROW, SIGNAL = 0.67; EXPRESSED IN BRAIN, SIGNAL = 0.8; EXPRESSED IN HELA, SIGNAL = 0.66; EXPRESSED IN PLACENTA, SIGNAL = 0.78; EXPRESSED IN ADULT LIVER, SIGNAL = 0.82; NT HIT: gi4826867, EVALUE 5.00e-91; SWISSPROT HIT: Q9Z139, EVALUE 1.00e-27; EST_HUMAN HIT: BG386429.1, EVALUE 7.00e-91
ccgagagccatagatggtggaccgaaaggagagcctccggggctcctggaccacaggagcatcatttttgaaccagcggatggtgggaggtggattcccagagactttgcagtgcagttctgctgtctggcccagagacgtggtgatgttattcattggttcatcgagggtcag

SEQ ID NO: 13999 - DNA, 77 bp, Homo sapiens
  MAP TO CHR22_35.0; EXPRESSED IN FETAL LIVER, SIGNAL = 7.7; EXPRESSED IN PLACENTA, SIGNAL = 8.1; EXPRESSED IN ADULT LIVER, SIGNAL = 7.6; EXPRESSED IN BONE MARROW, SIGNAL = 7.6; EXPRESSED IN BRAIN, SIGNAL = 6.7; EXPRESSED IN HELA, SIGNAL = 4.2; EXPRESSED IN HEART, SIGNAL = 6.3; EXPRESSED IN LUNG, SIGNAL = 7.8; NT HIT: L38643.1, EVALUE 1.50e-02; EST_HUMAN HIT: AA405062.1, EVALUE 8.00e-36
tatactttcatgaattttacttccagaaaccccaccaggttctcatgatgaaggccgaagaaaatttcctcaggctc

SEQ ID NO: 14000 - DNA, 151 bp, Homo sapiens
  MAP TO AL139149.1; EXPRESSED IN LUNG, SIGNAL = 1.2; EXPRESSED IN FETAL LIVER, SIGNAL = 0.74; EXPRESSED IN PLACENTA, SIGNAL =   1; EXPRESSED IN ADULT LIVER, SIGNAL = 0.98; EXPRESSED IN BONE MARROW, SIGNAL = 0.97; EXPRESSED IN BRAIN, SIGNAL = 0.96; EXPRESSED IN HELA, SIGNAL = 0.53; EST_HUMAN HIT: BG231719.1, EVALUE 9.00e-10; NT HIT: AF302248.1, EVALUE 1.30e-01; SWISSPROT HIT: P93263, EVALUE 7.70e+00
catctctttcatgattttccttattggctttatcacaaatcttgtgaagttatgcacagcttctggaaacaattttctctggcaggaatttattatttggagcttaatgcctttcacagcattttttgtaacatcaatgacgtccatggtg

SEQ ID NO: 14001 - DNA, 219 bp, Homo sapiens
  MAP TO CHR21_73.0; EXPRESSED IN HELA, SIGNAL = 3.7; EXPRESSED IN BRAIN, SIGNAL = 1.3; EXPRESSED IN PLACENTA, SIGNAL = 0.63; EXPRESSED IN LUNG, SIGNAL = 0.72; EXPRESSED IN ADULT LIVER, SIGNAL = 0.78; EXPRESSED IN FETAL LIVER, SIGNAL = 1.3; EXPRESSED IN BONE MARROW, SIGNAL = 1.2; NT HIT: U56089.1, EVALUE 1.00e-120; EST_HUMAN HIT: BG109173.1, EVALUE 1.00e-120; SWISSPROT HIT: Q15269, EVALUE 2.00e-35
ggcgctgctgggcggccaccaccacggagggactcctcatctactccctggacacccgcgtgctctttgacccgtttgagctggacaccagcgtcacccccgggagggtgcgcgaggcactgcgccagcaggacttcaccagggccatcctcatggccctccggctcaacgagagcaaactggtgcaggaggccctggaggcggtgcccaggggcgaga

SEQ ID NO: 14002 - DNA, 80 bp, Homo sapiens
  MAP TO AL133328.5; EXPRESSED IN BRAIN, SIGNAL = 0.43; EXPRESSED IN ADULT LIVER, SIGNAL = 0.3; NT HIT: gi14575809, EVALUE 1.60e-02; EST_HUMAN HIT: BG434504.1, EVALUE 9.00e-05
gttgggctacattttgactcactttcttgttgctagaagtctcaccatttgcattcccattgttcctatagacaggatct

SEQ ID NO: 14003 - DNA, 154 bp, Homo sapiens
  MAP TO CHR22_229.0; EXPRESSED IN HELA, SIGNAL = 3.7; EXPRESSED IN BRAIN, SIGNAL = 3.1; EXPRESSED IN FETAL LIVER, SIGNAL = 2.5; EXPRESSED IN BONE MARROW, SIGNAL = 2.7; EXPRESSED IN PLACENTA, SIGNAL =   2; EXPRESSED IN HEART, SIGNAL =   2; EXPRESSED IN LUNG, SIGNAL =   2; EXPRESSED IN ADULT LIVER, SIGNAL =   2; SWISSPROT HIT: O95487, EVALUE 1.00e+01; NT HIT: L33472.1, EVALUE 1.30e-01; EST_HUMAN HIT: BG715412.1, EVALUE 3.10e+00
ttctacgtccgtgctgtcagacaatatgccagagtgccacttgatagaggattctgctggtcctttagttttctccccgagcatcacatttggcactaatttgggggttgctttcactacctcctcagcagccacttcacctcctctgctttcg

SEQ ID NO: 14004 - DNA, 333 bp, Homo sapiens
  MAP TO CHR22_3.0; EXPRESSED IN BONE MARROW, SIGNAL = 3.3; EXPRESSED IN BRAIN, SIGNAL = 3.1; EXPRESSED IN HELA, SIGNAL =   2; EXPRESSED IN HEART, SIGNAL = 2.9; EXPRESSED IN FETAL LIVER, SIGNAL =   3; EXPRESSED IN PLACENTA, SIGNAL = 3.2; EXPRESSED IN LUNG, SIGNAL = 3.8; EXPRESSED IN ADULT LIVER, SIGNAL = 3.4; SWISSPROT HIT: P29622, EVALUE 1.10e+00; NT HIT: X65224.1, EVALUE 2.00e-02; EST_HUMAN HIT: BG029586.1, EVALUE 1.20e-01
tcacatggcctctgcttcctctggaagtggcaggagagcaggttcgatggagatgaggatgaaggcctgcggatgaaggagaaaggcgagtactccagggattcctggcagctctgaggatctggctgtgactggagaagatgaccttgtcgtgaccgcagctgttgttgcagtggtggttgtggtcgcgatggtggcttctctccagaagccagagcagctggcatgcaggagtgaagtgcacggagcagcagtgccccagcgatggttttacaggcttggcacaaaaggactcagaccagggctggcacatctccaggtatattgaagctg

SEQ ID NO: 14005 - DNA, 93 bp, Homo sapiens
  MAP TO AL049860.8; EXPRESSED IN BRAIN, SIGNAL = 0.62; EXPRESSED IN LUNG, SIGNAL = 0.63; EXPRESSED IN FETAL LIVER, SIGNAL = 0.45; EXPRESSED IN PLACENTA, SIGNAL = 0.72; EXPRESSED IN ADULT LIVER, SIGNAL = 0.36; EXPRESSED IN BONE MARROW, SIGNAL = 0.62; NT HIT: gi14761903, EVALUE 1.90e-02; EST_HUMAN HIT: BI521625.1, EVALUE 4.00e-04
agtcatactccttttgaagttcttattatcttccaacattttgtcctttcagctttcaatgtcataaaaatctcctagtgtttctttaatgtg

SEQ ID NO: 14006 - DNA, 390 bp, Homo sapiens
  MAP TO CHR22_227.0; EXPRESSED IN BONE MARROW, SIGNAL = 1.8; EXPRESSED IN BRAIN, SIGNAL = 1.6; EXPRESSED IN HEART, SIGNAL = 1.2; EXPRESSED IN LUNG, SIGNAL = 1.1; EXPRESSED IN PLACENTA, SIGNAL =   1; EXPRESSED IN ADULT LIVER, SIGNAL = 1.1; EXPRESSED IN HELA, SIGNAL = 3.2; EXPRESSED IN FETAL LIVER, SIGNAL = 1.7; EST_HUMAN HIT: AW501067.1, EVALUE 0.00e+00; SWISSPROT HIT: Q00955, EVALUE 2.80e+00; NT HIT: gi14779313, EVALUE 0.00e+00
cttaatgccagaccgggagttggaggtgtccgatctcgagttgggatccagcaaggccttctcagccagtcaacacgcacagccaccttccagcagagatttgatgcccggcagaagattggcctctcagatgcccggctcaaactgggagtcaaggatgcccgggagaagcttttgcagaaagatgcccgatttcgaatcaaagggaaagtgcaggatgccagagagatgttgaactctcgcaagcagcagaccacggtgccccagaagccccgccaggttgctgatgcccgggagaagatcagcttgaagaggagttcccctgctgccttcataaacccacccattgggacagtgacccctgctctgaagctcaccaaaaccatccag

SEQ ID NO: 14007 - DNA, 188 bp, Homo sapiens
  MAP TO AF239614.1; EXPRESSED IN BONE MARROW, SIGNAL = 1.9; EXPRESSED IN PLACENTA, SIGNAL =   2; EXPRESSED IN LUNG, SIGNAL =   2; EXPRESSED IN ADULT LIVER, SIGNAL =   2; EXPRESSED IN HELA, SIGNAL = 1.4; EXPRESSED IN BRAIN, SIGNAL =   2; EST_HUMAN HIT: AW072827.1, EVALUE 9.70e-01; SWISSPROT HIT: P54296, EVALUE 2.00e-34; NT HIT: gi15300154, EVALUE 1.00e-102
ccgtcccgtcccatccttatgggattacgctcctcaactgtgacggccactccatgaccctcggctggaaggtcccgaaattcagtggtggctcgcccatcctgggctactacctggacaagcgtgaagttcaccataaaaactggcacgaggtcaattcctcacccagcaaaccgacaatcctaacg

SEQ ID NO: 14008 - DNA, 128 bp, Homo sapiens
  MAP TO CHR22_8.0; EXPRESSED IN BONE MARROW, SIGNAL = 1.8; EXPRESSED IN LUNG, SIGNAL = 1.7; EXPRESSED IN BRAIN, SIGNAL = 1.7; EXPRESSED IN ADULT LIVER, SIGNAL = 1.6; EXPRESSED IN HELA, SIGNAL =   2; EXPRESSED IN FETAL LIVER, SIGNAL = 1.8; NT HIT: AL163249.2, EVALUE 1.10e-01; EST_HUMAN HIT: AW880067.1, EVALUE 6.30e-01
atggctgaacacagtaccagactcacagtggggttcaataattggcaaatcatattgttgctacagtgtggaatgttcaacggcagaagcaggaagaagagaataattaaccaagctgggaggaagtg

SEQ ID NO: 14009 - DNA, 237 bp, Homo sapiens
  MAP TO CHR22_161.0; EXPRESSED IN LUNG, SIGNAL = 0.65; EXPRESSED IN PLACENTA, SIGNAL = 0.69; EXPRESSED IN ADULT LIVER, SIGNAL = 0.66; EXPRESSED IN BRAIN, SIGNAL = 0.55; EXPRESSED IN FETAL LIVER, SIGNAL = 0.42; NT HIT: gi15307969, EVALUE 2.20e-01; SWISSPROT HIT: P13983, EVALUE 2.20e-02; EST_HUMAN HIT: BI023979.1, EVALUE 7.00e-67
gtgtagccacgcccagcgggcagcttcgggagatgagttggggagggagggctttggcgccctgacaggtagggatgttccagagctgctgttgcgtgcccagggcatgccttgacagcatcacagttgaatggagcagtgtctgggtgacatcgatgagaagggagctgaaggaggtgctgcggcccatgttcatgaggagatggaaggagtgcagaatggcagggctgggatcct

SEQ ID NO: 14010 - DNA, 196 bp, Homo sapiens
  MAP TO AC018608.4; EXPRESSED IN BRAIN, SIGNAL = 0.77; EXPRESSED IN HELA, SIGNAL = 0.77; EXPRESSED IN FETAL LIVER, SIGNAL = 0.93; EXPRESSED IN PLACENTA, SIGNAL = 0.67; EXPRESSED IN BONE MARROW, SIGNAL = 0.78; EXPRESSED IN ADULT LIVER, SIGNAL = 0.94; NT HIT: AF167460.1, EVALUE 4.40e-02; SWISSPROT HIT: gi120126, EVALUE 2.90e-01
actttgtgtctggagtttctggagtcttttgcatgccaataatgtcaacatttccaagattaggtatagctccaattacattaatttgtattttattttcggtagatttttgtttgttcgcgtcactttcatttttgttggccagttctctccttcgattatttattctctgcttcatggtatttgggtttctcac

SEQ ID NO: 14011 - DNA, 104 bp, Homo sapiens
  MAP TO AC017050.4; EXPRESSED IN HELA, SIGNAL = 1.7; EXPRESSED IN FETAL LIVER, SIGNAL = 2.6; EXPRESSED IN HEART, SIGNAL = 2.5; EXPRESSED IN BONE MARROW, SIGNAL = 3.1; EXPRESSED IN BRAIN, SIGNAL = 2.8; EXPRESSED IN ADULT LIVER, SIGNAL = 2.9; EXPRESSED IN LUNG, SIGNAL = 2.6; EXPRESSED IN PLACENTA, SIGNAL = 2.9; SWISSPROT HIT: P08548, EVALUE 2.00e-05; NT HIT: AL163213.2, EVALUE 4.00e-07; EST_HUMAN HIT: BE069014.1, EVALUE 5.00e-10
atgattatagttgcaaaaatcctcaacaaagtactaacaagccaaatccatcagaacatcaaaaggatcatacactatgaccaaatgagatttatccatgaaat

SEQ ID NO: 14012 - DNA, 228 bp, Homo sapiens
  MAP TO CHR22_210.0; EXPRESSED IN HELA, SIGNAL = 4.5; EXPRESSED IN HEART, SIGNAL = 2.6; EXPRESSED IN FETAL LIVER, SIGNAL = 3.3; EXPRESSED IN ADULT LIVER, SIGNAL = 2.5; EXPRESSED IN BONE MARROW, SIGNAL = 3.6; EXPRESSED IN LUNG, SIGNAL = 2.7; EXPRESSED IN BRAIN, SIGNAL = 2.6; SWISSPROT HIT: P44951, EVALUE 9.80e-01; EST_HUMAN HIT: BE009410.1, EVALUE 4.00e-16
tacacagccaaggtgtccccagggagctctggggccgaatccacctgcaagctccctcctgtgctggcagaattcatttccttgtgcctgaggtccttgccttcttgctggctgtgggcaggggtcaccctctgctcctcaaagccacccacagttccttgccacatgggctcccccaacatgccaacttcatcaagccaagaaggaaatccttcagggcaagtttgc

SEQ ID NO: 14013 - DNA, 231 bp, Homo sapiens
  MAP TO CHR22_12.0; EXPRESSED IN BONE MARROW, SIGNAL = 3.5; EXPRESSED IN PLACENTA, SIGNAL = 4.1; EXPRESSED IN HELA, SIGNAL =  13; EXPRESSED IN HEART, SIGNAL = 3.2; EXPRESSED IN ADULT LIVER, SIGNAL = 3.9; EXPRESSED IN BRAIN, SIGNAL = 3.7; EXPRESSED IN FETAL LIVER, SIGNAL =   4; EXPRESSED IN LUNG, SIGNAL = 3.8; SWISSPROT HIT: P12882, EVALUE 1.10e-01; NT HIT: AJ310932.1, EVALUE 1.00e-127
gggccgtggaaaaggtggacctgtgtgaggtggcagtggcagcacctgggccatcagtgacatgtggccccatgctgcccccaacagtggagaagatccgagccaccttcactgtcctccgggccttcggctctgtgtccatggcccacagccgcagtgccacccggttctccatggtgatgtcgctggacttcaacgctacaggccgcatcacagctgctcagctccagg

SEQ ID NO: 14014 - DNA, 118 bp, Homo sapiens
  MAP TO CHR22_214.0; EXPRESSED IN PLACENTA, SIGNAL = 1.8; EXPRESSED IN FETAL LIVER, SIGNAL = 2.3; EXPRESSED IN LUNG, SIGNAL =   2; EXPRESSED IN ADULT LIVER, SIGNAL =   2; EXPRESSED IN BONE MARROW, SIGNAL = 2.6; EXPRESSED IN BRAIN, SIGNAL = 2.2; EXPRESSED IN HELA, SIGNAL = 4.4; EXPRESSED IN HEART, SIGNAL = 2.2; NT HIT: X66468.1, EVALUE 6.00e+00; EST_HUMAN HIT: BG911764.1, EVALUE 9.00e-03; SWISSPROT HIT: O26664, EVALUE 1.60e+00
tgaaaacaatgacgttggatgttgattggtggtccacaaagggtggttcctggttctgcaacagcagcattgcctggaaacttgttagaagtgcaaataccaggccccagcccagatc

SEQ ID NO: 14015 - DNA, 208 bp, Homo sapiens
  MAP TO CHR22_47.0; EXPRESSED IN FETAL LIVER, SIGNAL = 1.9; EXPRESSED IN HEART, SIGNAL = 1.4; EXPRESSED IN ADULT LIVER, SIGNAL = 2.1; EXPRESSED IN BONE MARROW, SIGNAL = 1.7; EXPRESSED IN BRAIN, SIGNAL = 1.5; EXPRESSED IN HELA, SIGNAL = 1.4; EXPRESSED IN PLACENTA, SIGNAL = 1.6; EXPRESSED IN LUNG, SIGNAL = 1.9; NT HIT: AF111170.3, EVALUE 4.70e-02; SWISSPROT HIT: P51843, EVALUE 5.80e-01
atggtgtccggacttgcccaaggttgtgcagggggcaggtggcaggtggcagagtcagaacgggaatcttggtccaacaagtgccaaagctcccacaatagtcctggaattgccctcgttgagaactcaaatgcccactgcctccttcctgaggttgttggtgtgcagggctgccggtgtgcggggctgctggtgtgcggggttgctg

SEQ ID NO: 14016 - DNA, 164 bp, Homo sapiens
  MAP TO AL096764.11; EXPRESSED IN BONE MARROW, SIGNAL = 3.5; EXPRESSED IN BRAIN, SIGNAL =   3; EXPRESSED IN HEART, SIGNAL = 2.9; EXPRESSED IN HELA, SIGNAL = 1.5; EXPRESSED IN PLACENTA, SIGNAL =   4; EXPRESSED IN LUNG, SIGNAL = 3.7; EXPRESSED IN ADULT LIVER, SIGNAL = 3.6; EXPRESSED IN FETAL LIVER, SIGNAL = 3.1; NT HIT: U63297.1, EVALUE 2.20e+00; EST_HUMAN HIT: BF891624.1, EVALUE 2.00e-87; SWISSPROT HIT: O57486, EVALUE 9.90e+00
ctgtattgtacgaaattctctataaagatgtgtttgttgtggatgaagaagagttgaagactgcgattaaattgtttcgaagtggttctaagaagaacagaaataatgctgtaactggaagcgaggatgcccatactgattacaagagttcaaatcagaatagg

SEQ ID NO: 14017 - DNA, 121 bp, Homo sapiens
  MAP TO AC020550.2; EXPRESSED IN BONE MARROW, SIGNAL = 0.5; EXPRESSED IN PLACENTA, SIGNAL = 0.64; EXPRESSED IN LUNG, SIGNAL = 0.57; EXPRESSED IN ADULT LIVER, SIGNAL = 0.48; EXPRESSED IN BRAIN, SIGNAL = 0.57; EXPRESSED IN FETAL LIVER, SIGNAL = 0.4; NT HIT: AJ229041.1, EVALUE 1.60e+00; EST_HUMAN HIT: BI114729.1, EVALUE 3.80e-02; SWISSPROT HIT: Q05360, EVALUE 6.90e-01
ctctatttatttggattctcagtatgttcttaaccatccccacttccatgatcaaaagaatttttacaaattccacgtcactgcctatgtttttctctgttttgtctctcttctccaaggc

SEQ ID NO: 14018 - DNA, 180 bp, Homo sapiens
  MAP TO CHR22_192.0; EXPRESSED IN BONE MARROW, SIGNAL = 0.4; EXPRESSED IN PLACENTA, SIGNAL = 0.72; EXPRESSED IN HELA, SIGNAL = 0.54; EXPRESSED IN BRAIN, SIGNAL = 0.48; EXPRESSED IN ADULT LIVER, SIGNAL = 0.65; EXPRESSED IN LUNG, SIGNAL = 0.52; SWISSPROT HIT: P39955, EVALUE 6.50e-01; NT HIT: gi16160531, EVALUE 1.00e-02; EST_HUMAN HIT: BI461499.1, EVALUE 9.00e-69
cccctgtcctaccactctggtcatgctgcagtctctgtcaccaccaccaccaaccacagtgaggcaagccagtgggccacaggctctagcacccagcagccaggcatggagcagctctcgccgatggccagctcctaccactctgaccacgctgctgtctccgtggccatcttctttgac

SEQ ID NO: 14019 - DNA, 133 bp, Homo sapiens
  MAP TO CHR22_38.0; EXPRESSED IN FETAL LIVER, SIGNAL = 1.6; EXPRESSED IN BONE MARROW, SIGNAL = 1.6; EXPRESSED IN LUNG, SIGNAL = 1.6; EXPRESSED IN HEART, SIGNAL = 1.6; EXPRESSED IN HELA, SIGNAL = 1.5; EXPRESSED IN BRAIN, SIGNAL = 1.5; EXPRESSED IN PLACENTA, SIGNAL = 1.8; EXPRESSED IN ADULT LIVER, SIGNAL = 1.9; NT HIT: AF305426.1, EVALUE 7.00e+00
agctcgccagcaagaagagtgccacgctctgccgccaacatcatccctcctcaggggtgccttggatgcacgctgggggagcagctgtgtgtttgataatggaacacagtctgataaaaaaaccctagtgtaa

SEQ ID NO: 14020 - DNA, 249 bp, Homo sapiens
  MAP TO CHR21_61.0; EXPRESSED IN BRAIN, SIGNAL = 1.1; EXPRESSED IN HELA, SIGNAL = 3.3; EXPRESSED IN FETAL LIVER, SIGNAL = 1.2; EXPRESSED IN BONE MARROW, SIGNAL = 1.2; EXPRESSED IN PLACENTA, SIGNAL = 0.67; EXPRESSED IN LUNG, SIGNAL = 0.85; EXPRESSED IN ADULT LIVER, SIGNAL = 0.83; SWISSPROT HIT: P20591, EVALUE 3.00e-35; NT HIT: M30817.1, EVALUE 3.00e-59; EST_HUMAN HIT: H61837.1, EVALUE 4.00e-59
tccaaaattgaagacattagagcagaacaagagagagaaggtgagaagctgatccgcctccacttccagatggaacagattgtctactgccaggaccaggtatacaggggtgcattgcagaaggtcagagagaaggagctggaagaagaaaagaagaagaaatcctgggattttggggctttccaatccagctcggcaacagactcttccatggaggagatctttcagcacctgatggcctatcaccag

SEQ ID NO: 14021 - DNA, 301 bp, Homo sapiens
  MAP TO CHR22_231.0; EXPRESSED IN BONE MARROW, SIGNAL = 1.7; EXPRESSED IN BRAIN, SIGNAL = 1.3; EXPRESSED IN PLACENTA, SIGNAL = 0.81; EXPRESSED IN ADULT LIVER, SIGNAL =   1; EXPRESSED IN HELA, SIGNAL = 2.9; EXPRESSED IN FETAL LIVER, SIGNAL = 1.4; NT HIT: gi11418311, EVALUE 0.00e+00; EST_HUMAN HIT: BF961355.1, EVALUE 4.10e-01; SWISSPROT HIT: P35659, EVALUE 1.40e-01
gacgatccggggctttttcttaagctgctggagatccttttgggaagggtgctgttcggaatggacatcctgatcatcttctatgttgttattggaatttgtatttggcccgagggtctccggggtcttgatttgtgctttcctatgcctgtgcttgggtttggaggttgccttaggagaagcctttggaagcctgggctttcctttagatgcaggttttgcaacctccctggggtgcaccttagcagtttcgtaagcatgccactttctcaagtattcttcccagtgctcacttgcttct

SEQ ID NO: 14022 - DNA, 284 bp, Homo sapiens
  MAP TO AC015855.4; EXPRESSED IN BONE MARROW, SIGNAL = 0.91; EXPRESSED IN PLACENTA, SIGNAL = 0.93; EXPRESSED IN LUNG, SIGNAL = 0.93; EXPRESSED IN BRAIN, SIGNAL = 0.94; EST_HUMAN HIT: BF342971.1, EVALUE 3.80e-01; NT HIT: AB063483.1, EVALUE 0.00e+00; SWISSPROT HIT: O42280, EVALUE 5.00e-20
ctgtctccctcctctcgctctctctagcctgaccgggcgggaagtcctgacgcccttcccaggattgggcactgcggcagccccggcacagggcggggcccacctgaagcagtgtgacctgctgaagctgtcccggcggcagaagcagctctgccggagggagcccggcctggctgagaccctgagggatgctgcgcacctcggcctgcttgagtgccagtttcagttccggcatgagcgctggaactgtagcctggagggcaggatgggcctgctcaagagag

SEQ ID NO: 14023 - DNA, 129 bp, Homo sapiens
  MAP TO AF235096.1; EXPRESSED IN PLACENTA, SIGNAL = 0.94; EXPRESSED IN LUNG, SIGNAL = 0.78; EXPRESSED IN ADULT LIVER, SIGNAL = 0.93; EXPRESSED IN BONE MARROW, SIGNAL = 0.64; EXPRESSED IN BRAIN, SIGNAL = 0.77; EXPRESSED IN HELA, SIGNAL = 0.57; EXPRESSED IN FETAL LIVER, SIGNAL = 0.67; EST_HUMAN HIT: BF094474.1, EVALUE 2.50e+00; NT HIT: X99021.1, EVALUE 1.70e+00
gaacgccttctgtgaatcttcttgggctgacctgcaggtacccaacattcaatatctgctcgcgcactcatgcaatttccacttatgacttgctccaccctgtggactttgtcatcgtgagctttgctg

SEQ ID NO: 14024 - DNA, 289 bp, Homo sapiens
  MAP TO CHR22_233.0; EXPRESSED IN HELA, SIGNAL = 4.2; EXPRESSED IN FETAL LIVER, SIGNAL = 2.3; EXPRESSED IN PLACENTA, SIGNAL = 1.4; EXPRESSED IN LUNG, SIGNAL = 1.5; EXPRESSED IN ADULT LIVER, SIGNAL = 1.7; EXPRESSED IN BONE MARROW, SIGNAL = 2.5; EXPRESSED IN BRAIN, SIGNAL = 2.2; EST_HUMAN HIT: BE256641.1, EVALUE 9.90e-02; SWISSPROT HIT: P35969, EVALUE 1.50e+00
tgggcactggagttcttgggttcttgtctgggggctgctggcagcaggtgggtttgtccacaaggtcgctgtaccaggagatgggcttgagggatcccggtgatgcataaagcccccagcacgggggccgttgcctccctgtgacgccccgtggagcgcacttcaggtccacagcatggtcatgtggatttcgaatgcagatattacaagggggcatctgagtccaggctgtcctgatgggttcagagcccaggacagcccaggggaagggcaggaagggcaggtgcat

SEQ ID NO: 14025 - DNA, 82 bp, Homo sapiens
  MAP TO AL137183.1; EXPRESSED IN BONE MARROW, SIGNAL = 3.1; EXPRESSED IN HELA, SIGNAL = 1.2; EXPRESSED IN BRAIN, SIGNAL = 2.9; EXPRESSED IN HEART, SIGNAL = 2.8; EXPRESSED IN PLACENTA, SIGNAL = 3.4; EXPRESSED IN LUNG, SIGNAL = 3.3; EXPRESSED IN FETAL LIVER, SIGNAL = 3.3; EXPRESSED IN ADULT LIVER, SIGNAL = 3.3; EST_HUMAN HIT: AA815428.1, EVALUE 1.40e+00
gttatacacttgagaaaaaagagacaagagagatggatgaaaaaattgaaaaaggaaaccatatgagacacatgagggagag

SEQ ID NO: 14026 - DNA, 68 bp, Homo sapiens
  MAP TO CHR22_14.0; EXPRESSED IN LUNG, SIGNAL = 0.97; EXPRESSED IN BONE MARROW, SIGNAL =   1; EXPRESSED IN PLACENTA, SIGNAL =   1; EXPRESSED IN HELA, SIGNAL = 0.55; EXPRESSED IN BRAIN, SIGNAL = 0.93; EXPRESSED IN FETAL LIVER, SIGNAL = 1.1; NT HIT: AE006232.1, EVALUE 7.70e-01; EST_HUMAN HIT: AA416944.1, EVALUE 1.00e-03
atgggaatagggacatctgctgcatttggctgttggagaaacacaaggaaatcatggacaagtgccag

SEQ ID NO: 14027 - DNA, 98 bp, Homo sapiens
  MAP TO AC011266.3; EXPRESSED IN HELA, SIGNAL = 0.57; EXPRESSED IN BRAIN, SIGNAL = 1.2; EXPRESSED IN HEART, SIGNAL = 1.2; EXPRESSED IN FETAL LIVER, SIGNAL = 1.2; EXPRESSED IN LUNG, SIGNAL = 1.4; EXPRESSED IN BONE MARROW, SIGNAL = 1.2; EXPRESSED IN ADULT LIVER, SIGNAL = 1.3; NT HIT: Y16945.1, EVALUE 1.20e+00; SWISSPROT HIT: P76015, EVALUE 2.70e+00; EST_HUMAN HIT: R50045.1, EVALUE 7.10e+00
tgaaggtttttctttttttttttttttctttttatccttacaatgactgttggcagaaagctttgaaacagctcattactgacttctaattcaataag

SEQ ID NO: 14028 - DNA, 280 bp, Homo sapiens
  MAP TO CHR22_196.0; EXPRESSED IN ADULT LIVER, SIGNAL = 1.4; EXPRESSED IN HELA, SIGNAL = 1.4; EXPRESSED IN PLACENTA, SIGNAL = 1.2; EXPRESSED IN LUNG, SIGNAL = 1.3; EXPRESSED IN BONE MARROW, SIGNAL = 0.96; EXPRESSED IN BRAIN, SIGNAL =   1; EXPRESSED IN FETAL LIVER, SIGNAL = 1.2; EXPRESSED IN HEART, SIGNAL = 1.2; NT HIT: M64324.1, EVALUE 2.60e-01; SWISSPROT HIT: P31948, EVALUE 2.00e-09; EST_HUMAN HIT: BG311161.1, EVALUE 6.00e-80
attcctctctttggtgctgacactattggccagagaagtcctgatggaccggtactgagcaaagctgaatttgttgagaaagttcgtcagagtaatcaggcctgtcatgatggagatttccacacagctattgttctgtataatgaagccctggctgttgaccctcagaactgcatcttatacagcaatagatctgcagcctacatgaaaatccagcagtatgacaaggcactggatgatgcaatcaaagctcgacttctcaatcccaagtggccaaagg

SEQ ID NO: 14029 - DNA, 204 bp, Homo sapiens
  MAP TO AC024326.2; EXPRESSED IN BRAIN, SIGNAL = 0.53; EXPRESSED IN FETAL LIVER, SIGNAL = 0.58; EXPRESSED IN PLACENTA, SIGNAL = 0.46; EXPRESSED IN ADULT LIVER, SIGNAL = 0.53; SWISSPROT HIT: P48960, EVALUE 1.00e-04; EST_HUMAN HIT: H00259.1, EVALUE 1.00e-92; NT HIT: gi13626872, EVALUE 1.00e-111
ggtattaaagattataatattcttacaaggatcactcaactaggaataattatttcactgatttgtcttgccatatgcatttttaccttctggttcttcagtgaaattcaaagcaccaggacaacaattcacaaaaatctttgctgtagcctatttcttgctgaacttgtttttcttgttgggatcaatacaaatactaataag

SEQ ID NO: 14030 - DNA, 160 bp, Homo sapiens
  MAP TO AL137005.2; EXPRESSED IN BRAIN, SIGNAL = 1.1; EXPRESSED IN HEART, SIGNAL = 1.3; EXPRESSED IN LUNG, SIGNAL = 1.3; EXPRESSED IN ADULT LIVER, SIGNAL = 1.4; EXPRESSED IN FETAL LIVER, SIGNAL = 0.98; EXPRESSED IN BONE MARROW, SIGNAL = 1.1; NT HIT: U64315.1, EVALUE 5.50e-01; SWISSPROT HIT: Q28068, EVALUE 2.00e+00; EST_HUMAN HIT: BG761059.1, EVALUE 2.10e-01
atgagtgagaaatggttcagggaagattcgtggccaggcagggagggcaggacgttgcatgaggagagggggcctcgccagcactggtatctagtcctcttctgttccaagaaacttcgggagtggaacatccatcagctggagctggaaaccctgccct

SEQ ID NO: 14031 - DNA, 171 bp, Homo sapiens
  MAP TO AC022528.3; EXPRESSED IN ADULT LIVER, SIGNAL = 0.29; EXPRESSED IN BONE MARROW, SIGNAL = 0.44; EXPRESSED IN BRAIN, SIGNAL = 0.46; EXPRESSED IN FETAL LIVER, SIGNAL = 0.45; NT HIT: AF271730.2, EVALUE 1.50e-01; EST_HUMAN HIT: BE538631.1, EVALUE 8.80e-01
ctgctggtagcctcgtgctttgccattgtgtctgggatcttgataatcacaatgcattttgtcattgcttttgccactgttgttcatgcagcagctccatggcaggacattcctctgtataaatcattatttatgggccaactgccaataaaaataaccacaggaaatatc

SEQ ID NO: 14032 - DNA, 149 bp, Homo sapiens
  MAP TO AL138832.2; EXPRESSED IN BONE MARROW, SIGNAL = 0.45; EXPRESSED IN BRAIN, SIGNAL = 0.46; EXPRESSED IN ADULT LIVER, SIGNAL = 0.4; SWISSPROT HIT: P11533, EVALUE 3.40e+00; NT HIT: AB018339.1, EVALUE 1.00e-78; EST_HUMAN HIT: BF664230.1, EVALUE 2.00e-78
ctggtggcatagttcttcccactgcctttgcagaagctctacgcgttcattaagaatggagatatcatcagcactgatataggcagagagggtgtccttcagcaggctcaactgggtcaagtcatctgtccagctcccaactgcatttt

SEQ ID NO: 14033 - DNA, 141 bp, Homo sapiens
  MAP TO CHR22_234.0; EXPRESSED IN BONE MARROW, SIGNAL = 3.7; EXPRESSED IN BRAIN, SIGNAL = 2.9; EXPRESSED IN HELA, SIGNAL = 5.1; EXPRESSED IN FETAL LIVER, SIGNAL = 3.2; EXPRESSED IN LUNG, SIGNAL = 2.4; EXPRESSED IN PLACENTA, SIGNAL = 2.2; EXPRESSED IN ADULT LIVER, SIGNAL = 2.3; SWISSPROT HIT: P32644, EVALUE 4.50e+00
cacatgcagaaccttcagggtgttgaaaggggccgcaaagatcacagctctcagcgggggcgcggtcagtcggccacagcggtggagatggcgttgaaagccggggatgatgactgctgcgctgggatgactgacggctga

SEQ ID NO: 14034 - DNA, 441 bp, Homo sapiens
  MAP TO CHR22_23.0; EXPRESSED IN BONE MARROW, SIGNAL = 1.4; EXPRESSED IN BRAIN, SIGNAL = 1.3; EXPRESSED IN HEART, SIGNAL = 1.4; EXPRESSED IN HELA, SIGNAL = 1.4; EXPRESSED IN ADULT LIVER, SIGNAL = 2.1; EXPRESSED IN FETAL LIVER, SIGNAL = 1.6; EXPRESSED IN LUNG, SIGNAL = 1.5; SWISSPROT HIT: Q92452, EVALUE 1.70e+00; NT HIT: gi11417917, EVALUE 0.00e+00; EST_HUMAN HIT: AA937172.1, EVALUE 0.00e+00
ctattttttgctctttaacttgggccatttcttgagtacaggctcctcgtggacacctggctgcttcctgccagggaaccggtccctctgagcaccttcagagatggcaccctgactgcaaagagcctcccagagcttttgtttaatggccttgcccagctccaggctgtacctcttgggggtccctgaaggattccacagcattggctccaccacagcgtggtacagagcctggtaaccctctgtggggagaccatggatggttagcgtgtcctccgacaactgctgtctcttttgggtttcaggaagcaacactcggcccttccaggctgctgtcccactgtcctggggtagcgcttgggtggcagccacatgttcagcatatctgtcctcaagatcttggcggactgttagttttttctcctttgaactttctttact

SEQ ID NO: 14035 - DNA, 203 bp, Homo sapiens
  MAP TO CHR22_26.0; EXPRESSED IN HELA, SIGNAL = 3.3; EXPRESSED IN BRAIN, SIGNAL = 3.4; EXPRESSED IN ADULT LIVER, SIGNAL = 4.3; EXPRESSED IN LUNG, SIGNAL = 3.8; EXPRESSED IN FETAL LIVER, SIGNAL = 3.7; EXPRESSED IN BONE MARROW, SIGNAL = 3.5; EXPRESSED IN HEART, SIGNAL = 2.8; SWISSPROT HIT: Q9WUL6, EVALUE 5.50e+00
aaggggatggggctggaggttgagttccacttccgggctgttgattcagtcagtcatgcccgtggaatggaaccccaatgaaaactctagacacggaagctctggtgaacatcctgatgggcagttccctgtgaatggtcacacacctatgtgccgggagggcaaccggtccctggggctgacggaagctcccaggccttgtt

SEQ ID NO: 14036 - DNA, 190 bp, Homo sapiens
  MAP TO AL136450.1; EXPRESSED IN FETAL LIVER, SIGNAL = 4.8; EXPRESSED IN HEART, SIGNAL = 4.9; EXPRESSED IN PLACENTA, SIGNAL = 6.8; EXPRESSED IN BONE MARROW, SIGNAL = 5.1; EXPRESSED IN LUNG, SIGNAL = 6.5; EXPRESSED IN ADULT LIVER, SIGNAL = 6.3; EXPRESSED IN BRAIN, SIGNAL = 5.5; NT HIT: gi14761469, EVALUE 1.00e-103; SWISSPROT HIT: Q16254, EVALUE 1.70e-01; EST_HUMAN HIT: AU158712.1, EVALUE 1.00e-103
ttctcatctccctgtcgtcgtcattgttatcgtggttgctgatgggggtggaaagttgaactccatgtctgaggacaagaggtcccgggggtggtgggaggtggcgccggggtcccttggactggcctccttgttcatgaccaagaccaaacctgggccctggatggccttggcctgtcccgaggagaaa

SEQ ID NO: 14037 - DNA, 101 bp, Homo sapiens
  MAP TO AL121954.3; EXPRESSED IN BRAIN, SIGNAL = 0.46; EXPRESSED IN FETAL LIVER, SIGNAL = 0.39; SWISSPROT HIT: Q03933, EVALUE 3.00e-13; EST_HUMAN HIT: BG929480.1, EVALUE 6.00e-50; NT HIT: gi6806888, EVALUE 4.00e-50
ttggagggatcagatataacatcctcattagtttctggaataactgggatattttcttcatctgcattatcatcagtaacatcataaataatgatgtcatc

SEQ ID NO: 14038 - DNA, 528 bp, Homo sapiens
  MAP TO AL137118.3; EXPRESSED IN BRAIN, SIGNAL = 0.4; EXPRESSED IN FETAL LIVER, SIGNAL = 0.52; EXPRESSED IN PLACENTA, SIGNAL = 0.71; EXPRESSED IN ADULT LIVER, SIGNAL = 0.64; SWISSPROT HIT: P49652, EVALUE 2.00e-09; NT HIT: AF279611.1, EVALUE 0.00e+00
ttatactcttgtttcctttctcaaccacacactaacagggaaaacacactttgtctttgccttctgtggatggccttttctgagtgcagactttagtctgtccttaaaattctccccagcaaagtaatagagcagaggattgaagcaggcattggctgctgccaaggccagtgtgataaccaaagctttatgcagtctgtctttgcataaacccactttccatgtcgtcaagtggacggtcctcagtgtgtgatagggcaggaaacacaagaagaagatgatcaaggtgatgatgatggtggtcagtgccttcctgtgagaaacccgcagccccgattctgggacctccacttttaacagaacccgaatgatcagcagataacagatgctgagtgtgaaaaatggcagcaggcagcccaccaccaaggcaatatagttcatggtctgcagcttagcaattttatagagattcagctctaagcatgatgtgacactgccgttctgctcagagccactgtccaggagcat

SEQ ID NO: 14039 - DNA, 162 bp, Homo sapiens
  MAP TO AL136103.2; EXPRESSED IN HELA, SIGNAL =  10; EXPRESSED IN BRAIN, SIGNAL =  16; EXPRESSED IN FETAL LIVER, SIGNAL =  18; EXPRESSED IN HEART, SIGNAL =  13; EXPRESSED IN BONE MARROW, SIGNAL =  17; EXPRESSED IN PLACENTA, SIGNAL =  17; EXPRESSED IN LUNG, SIGNAL =  17; EXPRESSED IN ADULT LIVER, SIGNAL =  14; NT HIT: AE006609.1, EVALUE 2.20e+00; EST_HUMAN HIT: N34288.1, EVALUE 5.00e-05; SWISSPROT HIT: P14290, EVALUE 1.50e+00
gttctatctgcaacattaacattttctccatcactttaagtttagcaaataagcacaccaatgaatcaagctctcacttgcagcatttgtcagtttctgctgcaaatacttccacagagggcaatgtcaaactacaaagtgccatcactgaagagttggaaa

SEQ ID NO: 14040 - DNA, 171 bp, Homo sapiens
  MAP TO AJ239319.2; EXPRESSED IN HELA, SIGNAL =   6; EXPRESSED IN FETAL LIVER, SIGNAL =  11; EXPRESSED IN HEART, SIGNAL =  10; EXPRESSED IN BONE MARROW, SIGNAL =  12; EXPRESSED IN LUNG, SIGNAL =  11; EXPRESSED IN ADULT LIVER, SIGNAL = 9.4; EXPRESSED IN BRAIN, SIGNAL =  11; NT HIT: gi6006036, EVALUE 4.00e-79; EST_HUMAN HIT: AU134238.1, EVALUE 6.00e-79; SWISSPROT HIT: P56558, EVALUE 1.00e-29
gcaatgtggctgggataccctgggacgagtggtgcgcttttcatggattatattatcactgatcaggaaacttcgccagctgaagttgctgagcagtattccgagaaattggcttatatgccccacactttttttattggtgatcatgctaatatgttccctcacctgaag

SEQ ID NO: 14041 - DNA, 87 bp, Homo sapiens
  MAP TO CHR22_208.0; EXPRESSED IN BRAIN, SIGNAL = 1.3; EXPRESSED IN HELA, SIGNAL = 2.5; EXPRESSED IN FETAL LIVER, SIGNAL = 1.3; EXPRESSED IN LUNG, SIGNAL = 0.84; EXPRESSED IN PLACENTA, SIGNAL = 0.85; EXPRESSED IN BONE MARROW, SIGNAL = 1.6; EXPRESSED IN ADULT LIVER, SIGNAL = 0.88; NT HIT: AE005890.1, EVALUE 6.80e-02
ctaagccagcgtgtgcaagatgctggcgctgctggaaacatcgcctggaggagcggccctctcatcacccggaacagacaggggtgt

SEQ ID NO: 14042 - DNA, 101 bp, Homo sapiens
  MAP TO CHR21_28.0; EXPRESSED IN HEART, SIGNAL = 1.7; EXPRESSED IN FETAL LIVER, SIGNAL = 1.9; EXPRESSED IN PLACENTA, SIGNAL = 1.2; EXPRESSED IN ADULT LIVER, SIGNAL = 1.4; EXPRESSED IN BONE MARROW, SIGNAL = 1.9; EXPRESSED IN LUNG, SIGNAL = 1.3; EXPRESSED IN HELA, SIGNAL = 4.6; EXPRESSED IN BRAIN, SIGNAL = 1.8; EST_HUMAN HIT: T15799.1, EVALUE 8.00e-03; SWISSPROT HIT: P52746, EVALUE 9.20e-01; NT HIT: AF048729.1, EVALUE 1.00e-09
tcagtacttgtcctcttttgtccttcgccttctgccacgtgaggacacagtaagaaggcccacaacagatgctggtgtcttgatcttgccagcctccagaa

SEQ ID NO: 14043 - DNA, 217 bp, Homo sapiens
  MAP TO AL139158.1; EXPRESSED IN HELA, SIGNAL = 0.74; EXPRESSED IN FETAL LIVER, SIGNAL = 0.79; EXPRESSED IN PLACENTA, SIGNAL =   1; EXPRESSED IN LUNG, SIGNAL = 0.9; EXPRESSED IN ADULT LIVER, SIGNAL = 0.99; EXPRESSED IN BRAIN, SIGNAL = 0.73; SWISSPROT HIT: Q09155, EVALUE 2.20e+00; EST_HUMAN HIT: BF854945.1, EVALUE 2.90e-01; NT HIT: AE002050.1, EVALUE 3.10e+00
cacaaggaggccagagccggatgccagcgcccttcctcccccatcccgcagcacctgggatgggcgtgtgctcgtcgctgtcgccgtgctctcgtctcccactcctggagcagccacagcaggtcccaggggcctggagacaacaaatggctccctgctgatgggctgcttgccgcctcctgtctgccagccagtcctgctgcacaccggcagataa

SEQ ID NO: 14044 - DNA, 118 bp, Homo sapiens
  MAP TO CHR22_99.0; EXPRESSED IN PLACENTA, SIGNAL = 1.6; EXPRESSED IN ADULT LIVER, SIGNAL = 0.83; EXPRESSED IN HELA, SIGNAL = 2.3; EXPRESSED IN FETAL LIVER, SIGNAL = 1.4; EXPRESSED IN LUNG, SIGNAL = 1.2; EXPRESSED IN HEART, SIGNAL = 1.4; EXPRESSED IN BONE MARROW, SIGNAL = 1.4; EXPRESSED IN BRAIN, SIGNAL = 1.6; EST_HUMAN HIT: BG208670.1, EVALUE 5.70e-01; NT HIT: AF224669.1, EVALUE 9.80e-02
gttgtaagcagtgtgaaggaagtgaccgtggatcatttgcttctcactcttcttctagagcctgacactctgcctggtgcacatgagaagtttaataagtatttactgaatgaataaa

SEQ ID NO: 14045 - DNA, 275 bp, Homo sapiens
  MAP TO AL136099.2; EXPRESSED IN BRAIN, SIGNAL = 0.77; EXPRESSED IN LUNG, SIGNAL = 1.1; EXPRESSED IN ADULT LIVER, SIGNAL = 0.88; EXPRESSED IN FETAL LIVER, SIGNAL = 0.84; EXPRESSED IN BONE MARROW, SIGNAL = 0.68; NT HIT: gi14757823, EVALUE 0.00e+00; SWISSPROT HIT: P16975, EVALUE 6.00e-03; EST_HUMAN HIT: AW385785.1, EVALUE 0.00e+00
gctctcagaacccgaccccagccataccctagaggagcgggtggtgcactggtacttcaaactactggataaaaactccagtggagacatcggcaaaaaggaaatcaaacccttcaagaggttccttcgcaaaaaatcaaagcccaaaaaatgtgtgaagaagtttgttgaatactgtgacgtgaataatgacaaatccatctccgtacaagaactgatgggctgcctgggcgtggcgaaagaggacggcaaagcggacaccaagaaacgccaca

SEQ ID NO: 14046 - DNA, 367 bp, Homo sapiens
  MAP TO AC025176.1; EXPRESSED IN BONE MARROW, SIGNAL = 2.6; EXPRESSED IN BRAIN, SIGNAL = 2.2; EXPRESSED IN HELA, SIGNAL = 1.6; EXPRESSED IN LUNG, SIGNAL = 2.9; EXPRESSED IN PLACENTA, SIGNAL = 3.4; EXPRESSED IN ADULT LIVER, SIGNAL = 2.3; EXPRESSED IN FETAL LIVER, SIGNAL = 2.3; EST_HUMAN HIT: AW850837.1, EVALUE 3.00e-95; NT HIT: AL163246.2, EVALUE 7.00e-89; SWISSPROT HIT: Q99665, EVALUE 1.70e+00
ctggattgatagaacggtggaatggccttttgaagtcacaattacaacatcaactaggtgacaatactttgcagggctggcgcagagttctccagaaggctgtgtatgctctgaatcagtgtccaatatatggtacagtttctcccatagccaggattcacgggtccaggaatcaaggggtggaagtggaagtggcaccactcaccatcacccctagtggcccattagaaaaatttttgcttcctgttcccgcaacattacgttctgctggcctaaaagtcttaggtccagagtggagagtgctgccaccaggacacacaacaatgattccattaaactggaagttaatattaccacctggacactt

SEQ ID NO: 14047 - DNA, 128 bp, Homo sapiens
  MAP TO CHR21_11.0; EXPRESSED IN BONE MARROW, SIGNAL = 1.4; EXPRESSED IN BRAIN, SIGNAL = 1.3; EXPRESSED IN HELA, SIGNAL =   3; EXPRESSED IN LUNG, SIGNAL = 0.74; EXPRESSED IN PLACENTA, SIGNAL = 0.69; EXPRESSED IN ADULT LIVER, SIGNAL = 0.73; EXPRESSED IN FETAL LIVER, SIGNAL = 1.4; EST_HUMAN HIT: N98477.1, EVALUE 3.00e-06; NT HIT: AB012113.1, EVALUE 5.00e-07; SWISSPROT HIT: P50830, EVALUE 3.50e+00
tgaaggccaaggagtcccgccatctgccatccgcaagctgggggaccaggaaagccagtggtgtaattcagacggagtccaaaggcattagagctaggggagcctacgatagaagtcttgatctgagt

SEQ ID NO: 14048 - DNA, 121 bp, Homo sapiens
  MAP TO CHR22_73.0; EXPRESSED IN BRAIN, SIGNAL = 0.73; EXPRESSED IN HELA, SIGNAL = 1.6; EXPRESSED IN LUNG, SIGNAL = 0.75; EXPRESSED IN PLACENTA, SIGNAL = 0.93; EXPRESSED IN ADULT LIVER, SIGNAL = 0.61; EXPRESSED IN FETAL LIVER, SIGNAL = 0.91; EST_HUMAN HIT: H55317.1, EVALUE 8.00e-62; NT HIT: Z14314.1, EVALUE 1.60e+00
gcaatgtggagaggtggaaaagtcacaagctttgagtcagaaacacgtgggctgcagtccagactctgctacttacgctatcagcctggacaagtttcttgaccactctgagctgatctag

SEQ ID NO: 14049 - DNA, 144 bp, Homo sapiens
  MAP TO AL121830.11; EXPRESSED IN BONE MARROW, SIGNAL = 1.7; EXPRESSED IN BRAIN, SIGNAL = 1.7; EXPRESSED IN HELA, SIGNAL = 0.8; EXPRESSED IN HEART, SIGNAL = 1.6; EXPRESSED IN PLACENTA, SIGNAL = 1.8; EXPRESSED IN LUNG, SIGNAL = 1.8; EXPRESSED IN ADULT LIVER, SIGNAL = 1.6; EXPRESSED IN FETAL LIVER, SIGNAL = 1.4; EST_HUMAN HIT: BF844205.1, EVALUE 4.60e-02; SWISSPROT HIT: P33311, EVALUE 5.90e+00; NT HIT: U47285.1, EVALUE 1.20e-01
ttgcttttctaaccagctccccggcgatgctgataccactgtccccgtgtctttggggataaacagcaggaggcacacacttagctgtggggagattgtctgttcagtcctcacagaaatgactccagttctgcactcatcagt

SEQ ID NO: 14050 - DNA, 189 bp, Homo sapiens
  MAP TO AL096771.11; EXPRESSED IN BONE MARROW, SIGNAL = 4.1; EXPRESSED IN BRAIN, SIGNAL = 5.2; EXPRESSED IN HEART, SIGNAL = 4.4; EXPRESSED IN FETAL LIVER, SIGNAL = 4.7; EXPRESSED IN PLACENTA, SIGNAL =   6; EXPRESSED IN LUNG, SIGNAL = 5.4; EXPRESSED IN ADULT LIVER, SIGNAL =   6; SWISSPROT HIT: Q99715, EVALUE 3.00e-19; NT HIT: gi14757166, EVALUE 4.00e-67
atagtagtgccaggaaacacgcgcatggtgcatctggagcggctgattccggacacactctattccgtgaaccttgtggctctgtactcggatggagagggaaatcccagccctgcccagggccgaacgcgtgaggcagaaatcctttctccattccattcccttgtagctagattggcagggcttctc

SEQ ID NO: 14051 - DNA, 129 bp, Homo sapiens
  MAP TO AC024066.3; EXPRESSED IN FETAL LIVER, SIGNAL = 1.5; EXPRESSED IN BRAIN, SIGNAL = 1.6; EXPRESSED IN HEART, SIGNAL = 1.4; EXPRESSED IN LUNG, SIGNAL = 1.5; EXPRESSED IN HELA, SIGNAL = 0.93; EXPRESSED IN PLACENTA, SIGNAL = 1.6; EXPRESSED IN ADULT LIVER, SIGNAL = 1.3; EST_HUMAN HIT: BF242367.1, EVALUE 2.50e+00; SWISSPROT HIT: P20127, EVALUE 7.80e+00; NT HIT: U76206.1, EVALUE 1.10e-01
atggcagccacaaattatctctatgacttcgctattgtggacaccattttgggtatgtggcccactcacctctgtttcatgcttgtcatctgtaggaattattcccttattgtactaactggaagagag

SEQ ID NO: 14052 - DNA, 154 bp, Homo sapiens
  MAP TO AL139150.1; EXPRESSED IN PLACENTA, SIGNAL = 2.8; EXPRESSED IN LUNG, SIGNAL = 2.5; EXPRESSED IN ADULT LIVER, SIGNAL = 2.5; EXPRESSED IN BONE MARROW, SIGNAL = 2.2; EXPRESSED IN HELA, SIGNAL = 1.1; EXPRESSED IN HEART, SIGNAL = 1.9; EXPRESSED IN FETAL LIVER, SIGNAL = 2.1; EXPRESSED IN BRAIN, SIGNAL =   2; SWISSPROT HIT: P32451, EVALUE 4.40e+00; NT HIT: gi13386141, EVALUE 2.00e-28; EST_HUMAN HIT: BE670970.1, EVALUE 7.80e-01
cgagctcaacgtcgttgtcaatattcagtgtctcattagaaggaaacatggtccctttcttgtaatgctgcttacagacttttaagccaattctattgtcttcattttctccataaccaagggtccccagggtaatgtcctttagctgatgata

SEQ ID NO: 14053 - DNA, 91 bp, Homo sapiens
  MAP TO CHR21_16.0; EXPRESSED IN BRAIN, SIGNAL = 1.5; EXPRESSED IN PLACENTA, SIGNAL = 0.69; EXPRESSED IN LUNG, SIGNAL = 0.7; EXPRESSED IN HELA, SIGNAL = 2.7; EXPRESSED IN ADULT LIVER, SIGNAL = 0.85; EXPRESSED IN BONE MARROW, SIGNAL = 1.6; EST_HUMAN HIT: AV762230.1, EVALUE 1.60e+00
ttaattcaatagagtttgagtttattatggaatacaaccacatcatagcaccaagctttgtggactggattgtagctgatacaaaaggaat

SEQ ID NO: 14054 - DNA, 210 bp, Homo sapiens
  MAP TO CHR22_224.0; EXPRESSED IN ADULT LIVER, SIGNAL = 1.9; EXPRESSED IN LUNG, SIGNAL = 1.7; EXPRESSED IN HELA, SIGNAL = 4.1; EXPRESSED IN FETAL LIVER, SIGNAL = 2.3; EXPRESSED IN PLACENTA, SIGNAL = 1.9; EXPRESSED IN BONE MARROW, SIGNAL = 2.3; EXPRESSED IN BRAIN, SIGNAL = 2.1; EXPRESSED IN HEART, SIGNAL = 1.8; EST_HUMAN HIT: BI918398.1, EVALUE 1.00e-114; SWISSPROT HIT: P53421, EVALUE 4.80e-01; NT HIT: gi14779373, EVALUE 1.00e-115
ccagatagaggtattttccattttcatctttttctgccagaggactcccttctttctccagctccttcctgtatcttttgatgttcttcaccatcaggtccttccgggtcagttcatagtggtttggaaaatggttgactatttggtcatctgagagccgatatccagcttcaacgctgaacacatttcggatggtttgcacactcatcc

SEQ ID NO: 14055 - DNA, 114 bp, Homo sapiens
  MAP TO CHR22_132.0; EXPRESSED IN HELA, SIGNAL = 1.5; EXPRESSED IN BRAIN, SIGNAL = 1.4; EXPRESSED IN FETAL LIVER, SIGNAL = 1.3; EXPRESSED IN BONE MARROW, SIGNAL = 1.4; EXPRESSED IN HEART, SIGNAL = 1.3; EXPRESSED IN ADULT LIVER, SIGNAL = 1.3; EST_HUMAN HIT: AV725832.1, EVALUE 1.40e-01; SWISSPROT HIT: P55342, EVALUE 1.60e+00; NT HIT: gi14758453, EVALUE 9.40e-02
gtcactttgccatcagtgctggtcctgaaacccaccttcccactgctgctgctacatctggtgaccaacaaaatggtctggctaccagcccagtaaggagccctcataagataa

SEQ ID NO: 14056 - DNA, 260 bp, Homo sapiens
  MAP TO AC015938.3; EXPRESSED IN BRAIN, SIGNAL = 1.5; EXPRESSED IN HELA, SIGNAL = 0.93; EXPRESSED IN FETAL LIVER, SIGNAL = 1.7; EXPRESSED IN HEART, SIGNAL = 1.5; EXPRESSED IN LUNG, SIGNAL = 1.3; EXPRESSED IN BONE MARROW, SIGNAL = 1.4; EXPRESSED IN ADULT LIVER, SIGNAL = 1.5; EST_HUMAN HIT: AI824904.1, EVALUE 2.20e-02; SWISSPROT HIT: P34492, EVALUE 9.00e-01; NT HIT: M81834.1, EVALUE 9.40e-01
gcctcctaaggcctccaagccagagctggtaggagagcggcaggggaggggggagtgggaggaggagagggagcccaaggaagctgggcaggggctggcggcccctgggacccctttctacaaggacagaggcggcaccagctgctccacagaagaaatattccccaaagtcagagtggtcgtctcgtattttaagtggcccttatttatcaccatcctcctgggctccctatcgctgcaaatgatgataaaagacagcg

SEQ ID NO: 14057 - DNA, 126 bp, Homo sapiens
  MAP TO AL121994.3; EXPRESSED IN BRAIN, SIGNAL = 0.57; EXPRESSED IN PLACENTA, SIGNAL = 0.53; EXPRESSED IN LUNG, SIGNAL = 0.57; EXPRESSED IN FETAL LIVER, SIGNAL = 0.43; EXPRESSED IN BONE MARROW, SIGNAL = 0.54; EST_HUMAN HIT: BF438553.1, EVALUE 3.00e-03; SWISSPROT HIT: P15436, EVALUE 3.50e+00; NT HIT: AL163285.2, EVALUE 1.10e-01
ttatgcattctctagttggttgactttctgattgtttccagtttttgctgttacaaacagtgctactatgagcattttgtctacattttctagtgcgtgtgtacagaatttctccagagtaggtac

SEQ ID NO: 14058 - DNA, 301 bp, Homo sapiens
  MAP TO AL136381.1; EXPRESSED IN FETAL LIVER, SIGNAL = 3.3; EXPRESSED IN BONE MARROW, SIGNAL = 3.1; EXPRESSED IN BRAIN, SIGNAL = 3.7; EXPRESSED IN HEART, SIGNAL =   3; EXPRESSED IN PLACENTA, SIGNAL = 3.8; EXPRESSED IN LUNG, SIGNAL = 3.6; EXPRESSED IN ADULT LIVER, SIGNAL = 3.4; EST_HUMAN HIT: BE502469.1, EVALUE 1.00e-102; SWISSPROT HIT: Q16513, EVALUE 4.00e-23; NT HIT: gi5453973, EVALUE 1.00e-102
ctgtaatatcttctggatctgatacaacaatatgtgcatttaattcctgcagcttgtgatgtagttcttctaattttttatttgattttttcaaaatgttgtctacataagccaaactttttttatctgttgtgactttcctcagattttcagctccttctttgattttcagttctttccttatttctctcttaattcgatccttgatatcatccaatttctgctgcaccattgtatctgaaaagtctaatttttgaacagcactcacattctcagaaaacggaagacttcgggaatcccc

SEQ ID NO: 14059 - DNA, 124 bp, Homo sapiens
  MAP TO AL136366.3; EXPRESSED IN FETAL LIVER, SIGNAL =   2; EXPRESSED IN BONE MARROW, SIGNAL = 1.3; EXPRESSED IN HEART, SIGNAL = 1.2; EXPRESSED IN BRAIN, SIGNAL = 1.5; EXPRESSED IN PLACENTA, SIGNAL = 2.1; EXPRESSED IN LUNG, SIGNAL = 1.6; EXPRESSED IN ADULT LIVER, SIGNAL = 1.6; NT HIT: gi15303560, EVALUE 1.60e+00; EST_HUMAN HIT: W90458.1, EVALUE 1.50e-01; SWISSPROT HIT: O15529, EVALUE 2.30e-01
cttttcttgtgctgtttcctgcctccaggacccccatgcctcacatcctcgtctaacaaaacggtgctcatctttcaagctcatttcttgagtcatgagaaccttctttggattcttgtgaatt

SEQ ID NO: 14060 - DNA, 70 bp, Homo sapiens
  MAP TO CHR21_32.0; EXPRESSED IN PLACENTA, SIGNAL =   1; EXPRESSED IN FETAL LIVER, SIGNAL = 1.7; EXPRESSED IN LUNG, SIGNAL = 1.1; EXPRESSED IN ADULT LIVER, SIGNAL = 1.2; EXPRESSED IN BONE MARROW, SIGNAL = 1.7; EXPRESSED IN HELA, SIGNAL = 3.4; EXPRESSED IN BRAIN, SIGNAL = 1.4; NT HIT: AJ400873.1, EVALUE 1.30e-02; EST_HUMAN HIT: BG194375.1, EVALUE 8.00e-05
atgggtagaggtaccaagcaggcagccatgtgtaagccaaggagacaggccagggacagattcatccctt

SEQ ID NO: 14061 - DNA, 82 bp, Homo sapiens
  MAP TO AL133553.2; EXPRESSED IN FETAL LIVER, SIGNAL = 3.2; EXPRESSED IN BONE MARROW, SIGNAL = 3.3; EXPRESSED IN PLACENTA, SIGNAL = 3.8; EXPRESSED IN LUNG, SIGNAL = 3.4; EXPRESSED IN ADULT LIVER, SIGNAL = 2.9; EXPRESSED IN HELA, SIGNAL = 2.9; EXPRESSED IN BRAIN, SIGNAL = 3.2; EST_HUMAN HIT: BE999948.1, EVALUE 7.00e-12; NT HIT: U29185.1, EVALUE 1.00e-06
tggtggtccccaaaatagtccctggaccagcagcatcagcatcatctgagtacttgttagaaatgcaaattctgggccccat

SEQ ID NO: 14062 - DNA, 187 bp, Homo sapiens
  MAP TO AL160058.2; EXPRESSED IN HELA, SIGNAL = 0.97; EXPRESSED IN FETAL LIVER, SIGNAL = 0.99; EXPRESSED IN LUNG, SIGNAL =   1; EXPRESSED IN ADULT LIVER, SIGNAL = 1.1; EXPRESSED IN BRAIN, SIGNAL =   1; EXPRESSED IN BONE MARROW, SIGNAL = 0.96; EXPRESSED IN PLACENTA, SIGNAL = 1.2; EXPRESSED IN HEART, SIGNAL = 1.1; SWISSPROT HIT: Q04650, EVALUE 3.00e-32; EST_HUMAN HIT: BE867183.1, EVALUE 3.80e+00; NT HIT: AF226662.1, EVALUE 2.00e-84
gcagagcggtgagccccaagtctgtctgcgagggctgtcagcgggtcatcttggacaggtttctgctgcggctcaacgacagcttctggcatgagcagtgcgtgcagtgcgcctcctgcaaagagcccctggagaccacctgcttctaccgggacaagaagctgtactgcaagtatgactacgagaa

SEQ ID NO: 14063 - DNA, 355 bp, Homo sapiens
  MAP TO CHR22_102.0; EXPRESSED IN FETAL LIVER, SIGNAL = 0.92; EXPRESSED IN LUNG, SIGNAL = 1.1; EXPRESSED IN PLACENTA, SIGNAL = 0.98; EXPRESSED IN BONE MARROW, SIGNAL =   1; EXPRESSED IN BRAIN, SIGNAL =   1; EXPRESSED IN HELA, SIGNAL = 0.71; SWISSPROT HIT: Q07960, EVALUE 2.00e-05; EST_HUMAN HIT: BE734297.1, EVALUE 5.00e-41; NT HIT: gi14779550, EVALUE 3.00e-41
gtacaagaagaacttgaaggccctctacgtggtgcaccccaccagcttcatcaaggtcctgtggaacatcttgaagcccctcatcaggtatgcgtcactctgggagaggacctcgctggggttggaggtttcacccctcagggtccatgggacggccttccctatccacgcatcatggagggcccgtctccagggtgcctgtgtatctggggctccctacccgccctggggtctgcggggggtcacaaggccagcccaggtcatggacaggagtgcagtgccggcctttggcacctgtggggtttgcacctggtgtttaaaagcccccctttgcctgagcccccacactgtgtga

SEQ ID NO: 14064 - DNA, 92 bp, Homo sapiens
  MAP TO AC018715.3; EXPRESSED IN LUNG, SIGNAL =   2; EXPRESSED IN PLACENTA, SIGNAL = 2.2; EXPRESSED IN ADULT LIVER, SIGNAL = 2.1; EXPRESSED IN HELA, SIGNAL = 1.3; EXPRESSED IN FETAL LIVER, SIGNAL = 2.1; EXPRESSED IN HEART, SIGNAL = 1.8; EXPRESSED IN BONE MARROW, SIGNAL = 2.1; EXPRESSED IN BRAIN, SIGNAL =   2; NT HIT: U08988.1, EVALUE 7.00e-05; EST_HUMAN HIT: AI700303.1, EVALUE 5.00e-07
caagagacaccgtctatgaagcagagaatgaggcttcaccagacactgaatctgctggtgttttaatcttgaaattcacagcctatacaact

SEQ ID NO: 14065 - DNA, 395 bp, Homo sapiens
  MAP TO CHR21_4.0; EXPRESSED IN FETAL LIVER, SIGNAL = 1.9; EXPRESSED IN LUNG, SIGNAL = 1.3; EXPRESSED IN BONE MARROW, SIGNAL = 1.9; EXPRESSED IN HEART, SIGNAL = 1.5; EXPRESSED IN BRAIN, SIGNAL = 1.6; EXPRESSED IN HELA, SIGNAL = 4.3; EXPRESSED IN PLACENTA, SIGNAL = 1.1; EXPRESSED IN ADULT LIVER, SIGNAL = 1.5; NT HIT: AL163203.2, EVALUE 0.00e+00; SWISSPROT HIT: P34420, EVALUE 4.20e+00; EST_HUMAN HIT: BG720647.1, EVALUE 6.00e-87
atgggcacttctggagaccacgacgactcctttatgaagatgctcaggagcaagatgggcaagtgttgccgccactgcttcccctgctgcagggggagcggcacgagcaacgtgggcacttctggagaccatgaaaactcctttatgaagatgctcaggagcaagatgggcaagtggtgctgtcactgcttcccctgctgcagggggagcggcaagagcaacgtgggcgcttggggagactacgaccacagcgccttcatggagccgaggtaccacatccgtcgagaagatctggacaagctccacagagctgcctggtggggtaaagtccccagaaaggatctcatcgtcatgctcagggacactgacatgaacaagagggacaaggaaaagag

SEQ ID NO: 14066 - DNA, 154 bp, Homo sapiens
  MAP TO CHR22_105.0; EXPRESSED IN BONE MARROW, SIGNAL = 6.1; EXPRESSED IN BRAIN, SIGNAL = 6.4; EXPRESSED IN LUNG, SIGNAL = 7.3; EXPRESSED IN HELA, SIGNAL = 3.8; EXPRESSED IN FETAL LIVER, SIGNAL = 6.3; EXPRESSED IN PLACENTA, SIGNAL = 7.6; EXPRESSED IN ADULT LIVER, SIGNAL =   7; EST_HUMAN HIT: AA383113.1, EVALUE 8.00e-81; NT HIT: AB003286.1, EVALUE 1.00e-81; SWISSPROT HIT: Q92523, EVALUE 5.00e-24
ctcagcaaggaaaggagagctgactcctaggtacttggagaccaagtaaaggcagaagaggtgcctgtcgatccctgccccggtcatggccaggcggtacatattctggtgcttcttagcagccttctggaagagatctcgcaggtctgctttc

SEQ ID NO: 14067 - DNA, 227 bp, Homo sapiens
  MAP TO AL133543.2; EXPRESSED IN ADULT LIVER, SIGNAL = 1.1; EXPRESSED IN FETAL LIVER, SIGNAL = 0.73; EXPRESSED IN PLACENTA, SIGNAL = 0.91; EXPRESSED IN LUNG, SIGNAL = 0.88; EXPRESSED IN BONE MARROW, SIGNAL = 0.65; EXPRESSED IN BRAIN, SIGNAL = 0.67; EXPRESSED IN HELA, SIGNAL = 0.99; EST_HUMAN HIT: BE713297.1, EVALUE 1.00e-117; NT HIT: gi15300899, EVALUE 1.00e-125; SWISSPROT HIT: P15924, EVALUE 3.00e-40
tgaccacaactgaaatcactcatcatggaacctgccaagatgtcaaccataataaagtaattgaaaccaacagagaaaatgacaagcaagaaacatggatgctgatggagctgcagaagattcgcaggcagatagagcactgcgagggcaggatgactctcaaaaacctccctctagcagaccagggatcttctcaccacatcacagtgaaaattaacgagcttaag

SEQ ID NO: 14068 - DNA, 95 bp, Homo sapiens
  MAP TO AL139224.1; EXPRESSED IN BRAIN, SIGNAL = 0.76; EXPRESSED IN FETAL LIVER, SIGNAL = 1.1; EXPRESSED IN LUNG, SIGNAL =   1; EXPRESSED IN BONE MARROW, SIGNAL = 1.1; EXPRESSED IN ADULT LIVER, SIGNAL = 1.3; EST_HUMAN HIT: AV761644.1, EVALUE 5.00e-13; NT HIT: gi13385435, EVALUE 1.00e-12; SWISSPROT HIT: P06601, EVALUE 3.60e+00
atggtggccacggtgctcctcagcaccctctgtctcaggattgggatgcaggatcaggaggtgatgggcggcattgggaaaaccatgatgcagag

SEQ ID NO: 14069 - DNA, 275 bp, Homo sapiens
  MAP TO CHR22_81.0; EXPRESSED IN HELA, SIGNAL = 2.3; EXPRESSED IN BRAIN, SIGNAL = 1.3; EXPRESSED IN FETAL LIVER, SIGNAL = 1.1; EXPRESSED IN PLACENTA, SIGNAL = 1.1; EXPRESSED IN ADULT LIVER, SIGNAL =   1; EST_HUMAN HIT: BI550835.1, EVALUE 0.00e+00; NT HIT: gi14779146, EVALUE 0.00e+00; SWISSPROT HIT: Q9Y6A5, EVALUE 6.60e+00
gagaccccatcttcagaaccaatggaggaagaggaagatgacgacttggagctgtttggtggctatgatagtttccggagttataacagcagtgtgggcagtgagagcagctcctatctggaggagtcaagtgaagcagaaaatgaggatcgggaagcaggggaactgccgacctccccgctgcatttgctcagccctgggactcctcgctccttggatggcagtggttctgagccaggtgccttcagagtgtcccctgaggatggagaggagat

SEQ ID NO: 14070 - DNA, 284 bp, Homo sapiens
  MAP TO AL139144.1; EXPRESSED IN FETAL LIVER, SIGNAL = 1.1; EXPRESSED IN BONE MARROW, SIGNAL = 1.1; EXPRESSED IN BRAIN, SIGNAL = 1.2; EXPRESSED IN PLACENTA, SIGNAL = 1.3; EXPRESSED IN LUNG, SIGNAL = 1.3; EXPRESSED IN ADULT LIVER, SIGNAL = 1.3; SWISSPROT HIT: P08607, EVALUE 1.00e-06; EST_HUMAN HIT: AI655665.1, EVALUE 9.70e-02
ctctgcaggaaggcagggggaagtcccacgtggcgctgttctcagagccagcgtggcaggtgagcacggcgtggccctccaggaagaagccaaggttgcagctgtagcggaccttgtcaccgaggttgaaggttgaaccctgctggatgccattgggcagcctccctgggttcccacatgtgtggctggggagaactgtgaggagaaacagagaaagagacgggtaccccgtgagctgggctggagccctgacaccgggcttcctagtagcaactccctaggcc

SEQ ID NO: 14071 - DNA, 170 bp, Homo sapiens
  MAP TO AC013718.3; EXPRESSED IN FETAL LIVER, SIGNAL = 1.3; EXPRESSED IN BONE MARROW, SIGNAL = 1.4; EXPRESSED IN BRAIN, SIGNAL = 1.2; EXPRESSED IN HEART, SIGNAL = 1.2; EXPRESSED IN LUNG, SIGNAL = 1.3; EXPRESSED IN HELA, SIGNAL = 0.66; EXPRESSED IN PLACENTA, SIGNAL = 1.6; EXPRESSED IN ADULT LIVER, SIGNAL = 1.4; SWISSPROT HIT: O35099, EVALUE 6.60e-01; NT HIT: AJ001009.1, EVALUE 5.90e-01
ttacccagaagtacaacacgctgttgaatctggaaagaatcaacatgcctgggacatcttgccccacaaccaaagctgctggactggctaccgagggatctcccacaccctgtctagttcctgagcaatctgtgattctttcaggctcaactggcctgaaagaaaattaa

SEQ ID NO: 14072 - DNA, 141 bp, Homo sapiens
  MAP TO AC017072.4; EXPRESSED IN PLACENTA, SIGNAL =  19; EXPRESSED IN HELA, SIGNAL =  10; EXPRESSED IN FETAL LIVER, SIGNAL =  19; EXPRESSED IN LUNG, SIGNAL =  18; EXPRESSED IN HEART, SIGNAL =  14; EXPRESSED IN ADULT LIVER, SIGNAL =  18; EXPRESSED IN BONE MARROW, SIGNAL =  20; EXPRESSED IN BRAIN, SIGNAL =  17; SWISSPROT HIT: P17101, EVALUE 5.90e+00; EST_HUMAN HIT: BF905034.1, EVALUE 2.80e+00; NT HIT: AF129756.1, EVALUE 3.10e-02
agaaccgcaagtgcaggggccctgggaggggctttgcctgcagtattggaggaacagagaggggccagcgtggctggagcacagcgagccagcgggagagaggtgggaggagaggtcagagaggacggcagcggccagctc

SEQ ID NO: 14073 - DNA, 165 bp, Homo sapiens
  MAP TO CHR22_192.0; EXPRESSED IN PLACENTA, SIGNAL = 1.6; EXPRESSED IN LUNG, SIGNAL = 1.4; EXPRESSED IN BONE MARROW, SIGNAL = 1.6; EXPRESSED IN ADULT LIVER, SIGNAL = 1.5; EXPRESSED IN BRAIN, SIGNAL = 1.3; EXPRESSED IN HELA, SIGNAL = 1.2; EXPRESSED IN FETAL LIVER, SIGNAL = 1.8; SWISSPROT HIT: O50290, EVALUE 1.50e+00; EST_HUMAN HIT: AI654903.1, EVALUE 2.00e-78; NT HIT: AF051371.1, EVALUE 5.70e-01
tgctgtctctcctgctgttgttgtcctttacacaatggtgtcgcaagaaaatggatatggtgttgaggaagacattccaaccttactaatggctgctagcagtatggatgacattctggctatcactggattcaatacatgcttgagcatagtcttctcctcggg

SEQ ID NO: 14074 - DNA, 225 bp, Homo sapiens
  MAP TO CHR22_227.0; EXPRESSED IN LUNG, SIGNAL = 1.1; EXPRESSED IN BONE MARROW, SIGNAL =   2; EXPRESSED IN HELA, SIGNAL = 3.9; EXPRESSED IN BRAIN, SIGNAL = 1.9; EXPRESSED IN HEART, SIGNAL = 1.2; EXPRESSED IN FETAL LIVER, SIGNAL = 2.8; EXPRESSED IN PLACENTA, SIGNAL = 1.5; EXPRESSED IN ADULT LIVER, SIGNAL = 1.3; NT HIT: L43846.1, EVALUE 1.00e-101; SWISSPROT HIT: P98009, EVALUE 5.40e+00; EST_HUMAN HIT: AV763774.1, EVALUE 1.00e-107
ttcgtgggtcccaacgtcaatactgtgggcaaccttagaccggctcaaagcgcagctggggacggtgatgaagtgcagagcgtccacagccagcgacaagactgccaagcaactggcagcctgagtaacggagaaaacaacgaaaaaaacgcattcaccacctaccaacaagaaacaaaaaacacgaccaccccacagtcagtctactttttaggcgtgaataag

SEQ ID NO: 14075 - DNA, 122 bp, Homo sapiens
  MAP TO CHR21_24.0; EXPRESSED IN FETAL LIVER, SIGNAL = 1.5; EXPRESSED IN HEART, SIGNAL = 1.3; EXPRESSED IN LUNG, SIGNAL = 0.87; EXPRESSED IN PLACENTA, SIGNAL = 0.74; EXPRESSED IN BONE MARROW, SIGNAL = 1.5; EXPRESSED IN ADULT LIVER, SIGNAL = 0.96; EXPRESSED IN HELA, SIGNAL = 3.6; EXPRESSED IN BRAIN, SIGNAL = 1.4; NT HIT: AL163227.2, EVALUE 1.00e-62; EST_HUMAN HIT: BE147530.1, EVALUE 1.00e-29
catcaggttgcaaatgttctgaacttttatgctctgcttcctcttgaatgctttgccacttagagatttcttccgccagatacactaaatcatctatctcaagttcaaagttccacagatct

SEQ ID NO: 14076 - DNA, 345 bp, Homo sapiens
  MAP TO AL109804.24; EXPRESSED IN BRAIN, SIGNAL = 0.85; EXPRESSED IN HELA, SIGNAL = 0.73; EXPRESSED IN BONE MARROW, SIGNAL = 0.75; EXPRESSED IN LUNG, SIGNAL = 0.46; EST_HUMAN HIT: AA417116.1, EVALUE 1.20e-01; NT HIT: gi14771560, EVALUE 0.00e+00; SWISSPROT HIT: Q62230, EVALUE 7.00e-35
tcctgacagccttcctggagacccaggcgggacttgtgggcatccttcactgctctgtggtcagtgagcccctggccacactggtgctgtcacatgggggtcatatcctggcctccacctccggggacagtgatcacagcccacgcttcagtggtacctctggtcccaactccctgcgcctggagatccgagacctggaggaaactgacagtggggagtacaagtgctcagccaccaactcccttggaaatgcaacctccaccctggacttccatgccaatggtaagatgggcactggcagccagggagagtggagggagcctgaggaggagcctgctccagtct

SEQ ID NO: 14077 - DNA, 153 bp, Homo sapiens
  MAP TO CHR22_38.0; EXPRESSED IN PLACENTA, SIGNAL = 8.9; EXPRESSED IN ADULT LIVER, SIGNAL = 9.7; EXPRESSED IN FETAL LIVER, SIGNAL = 7.8; EXPRESSED IN LUNG, SIGNAL = 7.4; EXPRESSED IN BONE MARROW, SIGNAL = 7.3; EXPRESSED IN BRAIN, SIGNAL = 6.8; EXPRESSED IN HELA, SIGNAL = 5.6; EXPRESSED IN HEART, SIGNAL = 8.2; EST_HUMAN HIT: T59505.1, EVALUE 1.30e-02; NT HIT: AL163207.2, EVALUE 8.00e-03; SWISSPROT HIT: P54516, EVALUE 8.80e-01
tatccttgataatattccttgttctgaagcctattttgcctgatattaatgtagagtttcagctttcttatgatttgtgtttgcgtagtaggtatcttgttattccttttaacctttttgtcattgtagtgatagtaatttgtacacaacata

SEQ ID NO: 14078 - DNA, 203 bp, Homo sapiens
  MAP TO CHR22_230.0; EXPRESSED IN BONE MARROW, SIGNAL = 1.9; EXPRESSED IN HELA, SIGNAL = 3.7; EXPRESSED IN BRAIN, SIGNAL = 1.4; EXPRESSED IN HEART, SIGNAL = 1.3; EXPRESSED IN PLACENTA, SIGNAL = 0.99; EXPRESSED IN LUNG, SIGNAL = 0.98; EXPRESSED IN ADULT LIVER, SIGNAL = 1.1; EXPRESSED IN FETAL LIVER, SIGNAL = 1.6; EST_HUMAN HIT: BE019481.1, EVALUE 1.00e-110; NT HIT: gi14779622, EVALUE 1.00e-110; SWISSPROT HIT: Q07869, EVALUE 1.00e-32
gattcgttttggacgaatgccaagatctgagaaagcaaaactgaaagcagaaattcttacctgtgaacatgacatagaagattctgaaactgcagatctcaaatctctggccaagagaatctacgaggcctacttgaagaacttcaacatgaacaaggtcaaagcccgggtcatcctctcaggaaaggccagtaacaatccag

SEQ ID NO: 14079 - DNA, 117 bp, Homo sapiens
  MAP TO AL133268.4; EXPRESSED IN HELA, SIGNAL = 1.3; EXPRESSED IN BRAIN, SIGNAL = 1.8; EXPRESSED IN LUNG, SIGNAL = 2.1; EXPRESSED IN FETAL LIVER, SIGNAL = 1.5; EXPRESSED IN BONE MARROW, SIGNAL = 1.5; EXPRESSED IN ADULT LIVER, SIGNAL = 1.3; EST_HUMAN HIT: AL564559.1, EVALUE 2.00e-59; NT HIT: gi14747116, EVALUE 1.00e-59
atccatagccgggtggatgtcatcagacacgtggtgaagaatggtctactctgggatgagttgtatataggattccaaacacggctccagcgggatcctgacatataccatcacctg

SEQ ID NO: 14080 - DNA, 175 bp, Homo sapiens
  MAP TO CHR22_97.0; EXPRESSED IN FETAL LIVER, SIGNAL =   2; EXPRESSED IN HEART, SIGNAL = 1.9; EXPRESSED IN LUNG, SIGNAL = 2.2; EXPRESSED IN ADULT LIVER, SIGNAL = 2.2; EXPRESSED IN BONE MARROW, SIGNAL = 1.9; EXPRESSED IN BRAIN, SIGNAL = 1.8; EXPRESSED IN HELA, SIGNAL =   1; EST_HUMAN HIT: BI913548.1, EVALUE 2.00e-05; NT HIT: AF111168.2, EVALUE 4.00e-05; SWISSPROT HIT: Q9ZJL3, EVALUE 9.80e+00
atgaagaatgcctttggcaggctttctgggagactggacacagctgaggaaagaatctttgagctggaggacatctcaatagaaaccactaaaactgaaaagcaaagagaaaaaccgaatgacaacaacaataacaagaacagaatatccaagaactatgggacaactataaaag

SEQ ID NO: 14081 - DNA, 185 bp, Homo sapiens
  MAP TO AL121993.2; EXPRESSED IN BRAIN, SIGNAL = 2.9; EXPRESSED IN LUNG, SIGNAL = 3.1; EXPRESSED IN ADULT LIVER, SIGNAL = 3.5; EXPRESSED IN BONE MARROW, SIGNAL = 2.6; EXPRESSED IN HEART, SIGNAL = 2.5; SWISSPROT HIT: P22806, EVALUE 1.90e+00; EST_HUMAN HIT: BG219024.1, EVALUE 1.00e-92; NT HIT: S76771.1, EVALUE 1.60e-01
gtgcaagattctgttggaggaaaagtgaacacatcctctgttgcatctgctgccattaataatgcaaagtcatccctttttgggttccatcttctcccatcatcagtcaagtttggagtgcttaaggaaggacatacctatgccacagttgtaaagctcaagaatgttggagtggacttctgcag

SEQ ID NO: 14082 - DNA, 141 bp, Homo sapiens
  MAP TO AL136978.3; EXPRESSED IN BRAIN, SIGNAL = 0.88; EXPRESSED IN PLACENTA, SIGNAL = 1.3; EXPRESSED IN ADULT LIVER, SIGNAL = 1.5; EXPRESSED IN FETAL LIVER, SIGNAL =   1; EXPRESSED IN BONE MARROW, SIGNAL = 0.89; EST_HUMAN HIT: BE831174.1, EVALUE 1.00e-17; NT HIT: AL163249.2, EVALUE 6.00e-13
ttaatggctcagtgggacagccctctgtatcttgagctctggtttggcatccaggaggaataaggtcacaggaacgaattgaagatggtaaatgtggaggattttattgccgatgaaagtggctgtcattgggatggggag

SEQ ID NO: 14083 - DNA, 50 bp, Homo sapiens
  MAP TO CHR22_103.0; EXPRESSED IN HELA, SIGNAL = 1.3; EXPRESSED IN BONE MARROW, SIGNAL = 0.93; EXPRESSED IN PLACENTA, SIGNAL = 1.1; EXPRESSED IN BRAIN, SIGNAL = 0.79; EXPRESSED IN LUNG, SIGNAL = 1.1; EXPRESSED IN ADULT LIVER, SIGNAL = 1.2; NT HIT: AE007479.1, EVALUE 2.00e+00; EST_HUMAN HIT: BG676622.1, EVALUE 2.90e+00
ctcagcctcaagctccttacggacatgtctgtcgttccttgcataccacc

SEQ ID NO: 14084 - DNA, 173 bp, Homo sapiens
  MAP TO AL133499.1; EXPRESSED IN BRAIN, SIGNAL = 0.46; EXPRESSED IN FETAL LIVER, SIGNAL = 0.42; EXPRESSED IN BONE MARROW, SIGNAL = 0.44; EXPRESSED IN PLACENTA, SIGNAL = 0.46; EXPRESSED IN LUNG, SIGNAL = 0.45; EXPRESSED IN ADULT LIVER, SIGNAL = 0.53; SWISSPROT HIT: P14097, EVALUE 4.40e+00; NT HIT: AL163301.2, EVALUE 3.00e-83; EST_HUMAN HIT: AA604389.1, EVALUE 8.90e-01
ccactagtttgtgtcagcactggattctggcatatataatagatgaggagtttgctgttatgtatatgggaattctgagatacacaggagttttctgtgcacatctctctataacgcagctgtcccgtcacatcctgcatgtcagtacaggtagtgccgttctcttcgtagga

SEQ ID NO: 14085 - DNA, 111 bp, Homo sapiens
  MAP TO AL135909.3; EXPRESSED IN BRAIN, SIGNAL =   1; EXPRESSED IN FETAL LIVER, SIGNAL = 0.92; EXPRESSED IN BONE MARROW, SIGNAL = 0.82; EXPRESSED IN PLACENTA, SIGNAL = 1.1; EXPRESSED IN LUNG, SIGNAL = 0.98; EXPRESSED IN ADULT LIVER, SIGNAL = 1.1; EST_HUMAN HIT: AA424204.1, EVALUE 1.30e-01; NT HIT: AL161581.2, EVALUE 5.60e+00
ctacatggctactacttttgctttagtcattccattatctttcagggcaattatcaacttaaaaatgtctttgatatttaccttccttttcagcatttctgtaatcttcat

SEQ ID NO: 14086 - DNA, 213 bp, Homo sapiens
  MAP TO AC019287.3; EXPRESSED IN HEART, SIGNAL = 9.9; EXPRESSED IN HELA, SIGNAL = 4.7; EXPRESSED IN BRAIN, SIGNAL =  11; EXPRESSED IN PLACENTA, SIGNAL =  13; EXPRESSED IN ADULT LIVER, SIGNAL =  13; EXPRESSED IN FETAL LIVER, SIGNAL =  13; EXPRESSED IN BONE MARROW, SIGNAL =  14; EXPRESSED IN LUNG, SIGNAL =  13; EST_HUMAN HIT: BG007894.1, EVALUE 7.10e-02; SWISSPROT HIT: P32940, EVALUE 8.30e+00; NT HIT: L43557.1, EVALUE 1.90e-01
ttaatccatgttctgaggaagaataaagtccttgaaaatggccttgatatttactttcatttccttttgtctggtcagctcttctgggcagttcccatttgtttttctatccttctccactttccttgtgctcaagaggctaatctttatagacagcatgaaaggacccacttgtcctttagggtccatttggatatggctgttgagaagcac

SEQ ID NO: 14087 - DNA, 157 bp, Homo sapiens
  MAP TO AC022619.3; EXPRESSED IN BRAIN, SIGNAL = 1.5; EXPRESSED IN HELA, SIGNAL = 0.79; EXPRESSED IN HEART, SIGNAL = 1.3; EXPRESSED IN PLACENTA, SIGNAL = 1.6; EXPRESSED IN ADULT LIVER, SIGNAL = 1.2; EXPRESSED IN FETAL LIVER, SIGNAL = 1.3; SWISSPROT HIT: Q29442, EVALUE 3.40e+00; EST_HUMAN HIT: AW419134.1, EVALUE 2.00e-07; NT HIT: gi8923002, EVALUE 9.00e-03
ggtgcagggcttccacctgttcctggcccccactggcttcatggagtgcatggcccaggctgcagctcgcatcctcacagtggctgctccagatgggctgctgcagccatcaatgataaaaacagatcacagtgatatcagggcagtgatacacaag

SEQ ID NO: 14088 - DNA, 49 bp, Homo sapiens
  MAP TO CHR22_180.0; EXPRESSED IN PLACENTA, SIGNAL = 0.75; EXPRESSED IN FETAL LIVER, SIGNAL = 0.57; EXPRESSED IN ADULT LIVER, SIGNAL = 0.96; EXPRESSED IN LUNG, SIGNAL = 0.63; EXPRESSED IN BONE MARROW, SIGNAL = 0.5; EXPRESSED IN BRAIN, SIGNAL = 0.57; EXPRESSED IN HELA, SIGNAL = 0.6; EST_HUMAN HIT: AA566041.1, EVALUE 3.00e-03; NT HIT: AJ277662.1, EVALUE 1.90e+00
aaactagaaatagaagattactttctcaacctgaaaagcggcatctaag

SEQ ID NO: 14089 - DNA, 288 bp, Homo sapiens
  MAP TO AL133547.3; EXPRESSED IN BONE MARROW, SIGNAL = 5.3; EXPRESSED IN BRAIN, SIGNAL = 4.7; EXPRESSED IN HELA, SIGNAL = 1.6; EXPRESSED IN FETAL LIVER, SIGNAL = 5.3; EXPRESSED IN LUNG, SIGNAL =   6; EXPRESSED IN PLACENTA, SIGNAL = 5.6; EXPRESSED IN HEART, SIGNAL = 4.5; EXPRESSED IN ADULT LIVER, SIGNAL = 5.9; SWISSPROT HIT: O51226, EVALUE 9.80e-02; EST_HUMAN HIT: AL134715.1, EVALUE 5.00e-19; NT HIT: AF009660.1, EVALUE 8.00e-14
ttatagtgagtttttcagctctattagattagtttggttgtttcttaaaatggctattttatttttcagcttttgtttcattttattggattcttggtatttcttggattcgggtttcactttgtcctgaatcttgattatcttcactgctatccagacttttaattctatgtctataatttcaatcattttatcctggttaagaacaactgctgggtagctagtgtggtcatttggaggtaagaagacactgtggctttttgagttgccaaggttcttttgctgacc

SEQ ID NO: 14090 - DNA, 187 bp, Homo sapiens
  MAP TO AL137855.1; EXPRESSED IN FETAL LIVER, SIGNAL = 0.48; EXPRESSED IN ADULT LIVER, SIGNAL = 0.52; EXPRESSED IN BONE MARROW, SIGNAL = 0.46; EXPRESSED IN BRAIN, SIGNAL = 0.44; NT HIT: AL116209.1, EVALUE 1.70e-01; SWISSPROT HIT: O43711, EVALUE 1.90e+00; EST_HUMAN HIT: BG119285.1, EVALUE 2.50e-01
tgccacataggtggcactaaggagtgggggatagtcaccctccagaattccagggagatggggcagtaggagaattaagggaagcaggcaagcttggtagagctgctccccttcttctttcttgaccagcaggaggctgggctgcattctcagagaggtctgctcatggcagaagttcttaggatgg

SEQ ID NO: 14091 - DNA, 528 bp, Homo sapiens
  MAP TO AC013648.3; EXPRESSED IN FETAL LIVER, SIGNAL = 1.6; EXPRESSED IN LUNG, SIGNAL = 1.4; EXPRESSED IN PLACENTA, SIGNAL = 1.6; EXPRESSED IN ADULT LIVER, SIGNAL = 1.4; EXPRESSED IN HELA, SIGNAL = 1.2; EXPRESSED IN HEART, SIGNAL = 1.2; EXPRESSED IN BONE MARROW, SIGNAL = 1.7; EXPRESSED IN BRAIN, SIGNAL = 1.6; NT HIT: AF060568.1, EVALUE 3.20e-02; SWISSPROT HIT: P51780, EVALUE 1.70e+00
ccctgctaggtagttgccccagctccacacctactggctgggtccccttgggtaagtggctcccctcccccagcctcagttttcacatatgttacccaccttggggattgagcggcagggtctgggcagagcaggaagggaaactgaggccagagagtggcttacctgccattgcccttggcttagcggtgggcaggctctggccagattcctgtccctttccttggcaccaccccgtcccacgaatttgttgtgggtctggtgtggctggagctccaggcagctccagaggggctggggtggccccagctggtggtccctcagggttgtggggtgcactggggagccctggcagggccacgtggagggagtgggagggggcaggtgggcaaggagtggagggtttggcagccatctgggaggcagagcggtggggctggccaagttctgtctgtgcaggttgggggtgcgtccaggtgggagcagcaggggccctgtcaggtggtggggcagtgtctgaatgcaaag

SEQ ID NO: 14092 - DNA, 167 bp, Homo sapiens
  MAP TO AL121830.11; EXPRESSED IN HEART, SIGNAL = 1.4; EXPRESSED IN BRAIN, SIGNAL = 1.3; EXPRESSED IN PLACENTA, SIGNAL = 1.1; EXPRESSED IN ADULT LIVER, SIGNAL = 1.2; EXPRESSED IN HELA, SIGNAL = 0.59; EXPRESSED IN FETAL LIVER, SIGNAL = 1.1; EXPRESSED IN BONE MARROW, SIGNAL = 1.1; EXPRESSED IN LUNG, SIGNAL = 1.1; NT HIT: gi10518346, EVALUE 3.00e-89; SWISSPROT HIT: O27123, EVALUE 1.10e+00; EST_HUMAN HIT: AA393627.1, EVALUE 4.00e-89
cgggtaaactggaaacagtgaaatgggcgttcacctggccgctgagtttcgtcttatacttcactgtacccaactgcaacaagccgcgctgggagaaatggttcatggtgacgtttgcttcctccacgctgtggatcgcagccttctcctacatgatggtgtggatg

SEQ ID NO: 14093 - DNA, 203 bp, Homo sapiens
  MAP TO CHR22_133.0; EXPRESSED IN BRAIN, SIGNAL = 0.4; EXPRESSED IN PLACENTA, SIGNAL = 0.56; EXPRESSED IN FETAL LIVER, SIGNAL = 0.41; EXPRESSED IN LUNG, SIGNAL = 0.46; SWISSPROT HIT: P34913, EVALUE 1.90e+00; EST_HUMAN HIT: BE162314.1, EVALUE 2.00e-69; NT HIT: Z49410.1, EVALUE 7.20e-01
ttggctgcagaaagtggttagttacgtggtccagggctgaccaatcacagcatccaatacctctgatgacagtgattggtccgtgaggcaagcacatgacccaagcagagccaatgagagccttatccgtgagatgggtatttgaacctggcagcacaaactctttttccattgaggtttgtagggagggtaccagacacatt

SEQ ID NO: 14094 - DNA, 169 bp, Homo sapiens
  MAP TO CHR22_105.0; EXPRESSED IN HELA, SIGNAL =  27; EXPRESSED IN FETAL LIVER, SIGNAL = 1.7; EXPRESSED IN HEART, SIGNAL = 1.8; EXPRESSED IN ADULT LIVER, SIGNAL = 2.6; EXPRESSED IN BONE MARROW, SIGNAL = 1.6; EXPRESSED IN LUNG, SIGNAL = 2.4; EXPRESSED IN BRAIN, SIGNAL = 1.3; SWISSPROT HIT: Q9Y259, EVALUE 4.00e-21; EST_HUMAN HIT: AV723436.1, EVALUE 3.00e-90; NT HIT: AB029885.1, EVALUE 2.00e-90
cgctccatggtcccaaacagccagtggggctccttggtgaaaggcatctccatgccatgaaattgcgccatcttcgtggcaatggctgctgacaacactggctctcgaagctcttgagttttcaatggccgactctgcacccaggaagctatcagggtggtgatggggc

SEQ ID NO: 14095 - DNA, 241 bp, Homo sapiens
  MAP TO AC018432.4; EXPRESSED IN BRAIN, SIGNAL = 0.37; EXPRESSED IN FETAL LIVER, SIGNAL = 0.46; EXPRESSED IN PLACENTA, SIGNAL = 0.39; SWISSPROT HIT: P20908, EVALUE 2.90e+00; NT HIT: AE005146.1, EVALUE 3.40e+00
ttctttctttcttggctttctgggtgcctgtgagacttgccttggttttttgcaagatgtgatttaatatttgattcagttaagggagctgaagagtaacttgttctgctcttggtagtccatgaaatcttctcttcactgaatgatacactagatgacctagactgaatttccgcagtatttgatgaactatgacacaaccagtcaggagatttcattttggaagatgatctatatttcc

SEQ ID NO: 14096 - DNA, 45 bp, Homo sapiens
  MAP TO CHR22_197.0; EXPRESSED IN BONE MARROW, SIGNAL = 2.7; EXPRESSED IN BRAIN, SIGNAL = 2.2; EXPRESSED IN HELA, SIGNAL = 2.7; EXPRESSED IN LUNG, SIGNAL = 2.9; EXPRESSED IN FETAL LIVER, SIGNAL = 2.5; EXPRESSED IN PLACENTA, SIGNAL = 3.9; EXPRESSED IN ADULT LIVER, SIGNAL = 2.9; EST_HUMAN HIT: AW847320.1, EVALUE 6.20e-01; NT HIT: U37846.1, EVALUE 4.20e-01
acatagctaattacattaaagactacgatatgcagaaagcttaac

SEQ ID NO: 14097 - DNA, 157 bp, Homo sapiens
  MAP TO AC018735.5; EXPRESSED IN BONE MARROW, SIGNAL =   1; EXPRESSED IN BRAIN, SIGNAL = 0.95; EXPRESSED IN LUNG, SIGNAL = 0.83; EXPRESSED IN FETAL LIVER, SIGNAL = 0.93; EXPRESSED IN PLACENTA, SIGNAL = 0.9; EXPRESSED IN ADULT LIVER, SIGNAL = 0.85; SWISSPROT HIT: O05514, EVALUE 8.80e-01; NT HIT: AB044496.1, EVALUE 8.40e+00
caattatatctttgttgttggtttttcttctgacataactaaaagtcaagggataatgtttagccccgcattcctgaggagaagctttgcttgcagaatgataactgactttactcttcttggtggtgtttatcacacccttcttcaaaaaaccttc

SEQ ID NO: 14098 - DNA, 93 bp, Homo sapiens
  MAP TO AC020588.4; EXPRESSED IN FETAL LIVER, SIGNAL = 0.45; EXPRESSED IN BRAIN, SIGNAL = 0.32; NT HIT: gi13194196, EVALUE 2.00e-45; EST_HUMAN HIT: AU185749.1, EVALUE 3.00e-45; SWISSPROT HIT: P33173, EVALUE 8.00e-06
gtcaagatattgttttcaagtgccttggagagaatatcctgcagaatgcttttgatggctacaatgcatgtatctttgcctatggacagactg

SEQ ID NO: 14099 - DNA, 169 bp, Homo sapiens
  MAP TO CHR21_28.0; EXPRESSED IN LUNG, SIGNAL = 1.1; EXPRESSED IN FETAL LIVER, SIGNAL =   2; EXPRESSED IN PLACENTA, SIGNAL =   1; EXPRESSED IN ADULT LIVER, SIGNAL = 1.2; EXPRESSED IN BONE MARROW, SIGNAL = 2.1; EXPRESSED IN BRAIN, SIGNAL = 1.9; EXPRESSED IN HELA, SIGNAL = 4.4; EXPRESSED IN HEART, SIGNAL = 1.2; NT HIT: X16239.1, EVALUE 1.50e-01; SWISSPROT HIT: P36096, EVALUE 1.50e+00
ttctggaactataaaaggctttttgcctggcaaattctttctggaacaaagactttttgtctttctaatcttggcaagtactcttctggcttcagttttattctgagttgtgtatttacacttgtacctttggctgttgatggacctttcttctctgtttctggacatt

SEQ ID NO: 14100 - DNA, 435 bp, Homo sapiens
  MAP TO AL139227.1; EXPRESSED IN HELA, SIGNAL = 3.9; EXPRESSED IN BRAIN, SIGNAL = 1.5; EXPRESSED IN FETAL LIVER, SIGNAL = 1.6; EXPRESSED IN LUNG, SIGNAL = 1.5; EXPRESSED IN PLACENTA, SIGNAL = 1.3; SWISSPROT HIT: Q99439, EVALUE 6.00e-60; NT HIT: gi4758017, EVALUE 1.00e-126; EST_HUMAN HIT: BG823822.1, EVALUE 1.00e-130
atgtgcaagccagtcgggtatgaccatgtacggcacaaggaggcatctctacagccccaagaaccatatcctgcccccgtggaccactcgaccatcagcctccagatgggtacaaacaagtgcgccagccacatgggcatgacggctccctggacccagctgcacatctatgacaccaagctgggcaccaacaagtatgacaactcctccgtgtccctgcagatgggctacctgcagggtgctaaccagagcagccaggtctttggcctgggccggcagatatacaattccaactactgcccacaaggcccagtggccaacagggctccctcgggcaccaacgactgcccaggcccagggaaggcccctgaatatcccccttactaccaggaggaggccagctactaaggctcccagcacgctctctccccacat

SEQ ID NO: 14101 - DNA, 138 bp, Homo sapiens
  MAP TO AB017651.1; EXPRESSED IN FETAL LIVER, SIGNAL = 0.78; EXPRESSED IN BONE MARROW, SIGNAL = 0.86; EXPRESSED IN PLACENTA, SIGNAL = 1.1; EXPRESSED IN ADULT LIVER, SIGNAL = 0.88; EXPRESSED IN BRAIN, SIGNAL = 0.88; EXPRESSED IN LUNG, SIGNAL = 0.93; SWISSPROT HIT: O27090, EVALUE 4.50e+00; EST_HUMAN HIT: BG758235.1, EVALUE 2.70e+00; NT HIT: AF421855.1, EVALUE 7.30e+00
caaaagctggactctcctccgcccccaagcactcccaggctcctgggcagggccatcaactccactccagccatccctccagactggcgcctgaaaaatagaatttctgcttcaggtaatacagctgcttctctctga

SEQ ID NO: 14102 - DNA, 198 bp, Homo sapiens
  MAP TO CHR22_150.0; EXPRESSED IN PLACENTA, SIGNAL = 1.5; EXPRESSED IN HELA, SIGNAL = 1.5; EXPRESSED IN BRAIN, SIGNAL = 1.5; EXPRESSED IN LUNG, SIGNAL =   2; EXPRESSED IN FETAL LIVER, SIGNAL = 1.1; EXPRESSED IN ADULT LIVER, SIGNAL = 1.8; EXPRESSED IN BONE MARROW, SIGNAL = 1.4; EST_HUMAN HIT: BG111003.1, EVALUE 7.00e-48; SWISSPROT HIT: P46734, EVALUE 3.20e+00; NT HIT: AL163227.2, EVALUE 1.00e-33
gatctgtggaactttgaacttgagaaagatgatttggggtatctggcagaagaagcttctaagcggcaaagtgttcaagaggaagcagagcataaaagttcaggaaatttgcagcctgacaatgtgatagaaaagaaaaagccattttctggggagaaattcaagctgcctacagaaatttgcctaatgaagagctga

SEQ ID NO: 14103 - DNA, 199 bp, Homo sapiens
  MAP TO AL135926.3; EXPRESSED IN HEART, SIGNAL = 1.6; EXPRESSED IN BONE MARROW, SIGNAL = 1.7; EXPRESSED IN BRAIN, SIGNAL = 1.8; EXPRESSED IN HELA, SIGNAL = 1.1; EXPRESSED IN FETAL LIVER, SIGNAL = 1.6; EXPRESSED IN LUNG, SIGNAL = 1.2; EST_HUMAN HIT: AU152688.1, EVALUE 1.00e-06; SWISSPROT HIT: Q09332, EVALUE 7.30e+00; NT HIT: U49016.1, EVALUE 2.00e-10
acttgatgtctccttacatatatgcaaatattccaaaatcgagaaaaatccaaaatcagaaacacttttggtctcaagcattttgggcaagggatattcaaactgtcctaatacaaaaagaagaaagaaggaggaggaagaaggaagaagaagaaagaaggaagaagaaagcagaagaagatataaaaaatgtgataaa

SEQ ID NO: 14104 - DNA, 161 bp, Homo sapiens
  MAP TO CHR22_208.0; EXPRESSED IN BONE MARROW, SIGNAL = 5.2; EXPRESSED IN BRAIN, SIGNAL = 3.7; EXPRESSED IN PLACENTA, SIGNAL = 3.5; EXPRESSED IN ADULT LIVER, SIGNAL = 3.4; EXPRESSED IN HELA, SIGNAL = 7.4; EXPRESSED IN LUNG, SIGNAL = 3.6; EXPRESSED IN FETAL LIVER, SIGNAL = 4.1; EXPRESSED IN HEART, SIGNAL = 3.2; NT HIT: gi15674250, EVALUE 8.70e+00; SWISSPROT HIT: Q62203, EVALUE 3.00e-04
tctcagactgcacccaaacagtgctccctgactgtacacaaacagtgctcccggactgcacccagacagtgctcccggactgcacccaaacagtgctcctgggctgcacccaaacagtgctctcggactgcacccaaacagtgctctcggactgcacctaa

SEQ ID NO: 14105 - DNA, 108 bp, Homo sapiens
  MAP TO AL139022.1; EXPRESSED IN BRAIN, SIGNAL = 2.5; EXPRESSED IN HELA, SIGNAL = 1.7; EXPRESSED IN LUNG, SIGNAL =   2; NT HIT: gi14752287, EVALUE 3.00e-54; EST_HUMAN HIT: AI655674.1, EVALUE 4.00e-54; SWISSPROT HIT: P52164, EVALUE 3.00e-15
gctgacaaacgggctcatcataatgcactggaacgaaaacgtagggaccacatcaaagacagctttcacagtttgcgggactcagtcccatcactccaaggagagaag

SEQ ID NO: 14106 - DNA, 193 bp, Homo sapiens
  MAP TO AL137178.3; EXPRESSED IN LUNG, SIGNAL = 1.1; EXPRESSED IN HELA, SIGNAL = 0.61; EXPRESSED IN FETAL LIVER, SIGNAL = 0.87; EXPRESSED IN PLACENTA, SIGNAL = 1.3; EXPRESSED IN BONE MARROW, SIGNAL = 0.96; EXPRESSED IN BRAIN, SIGNAL = 0.81; EXPRESSED IN ADULT LIVER, SIGNAL = 1.1; NT HIT: gi10835090, EVALUE 1.00e-104; EST_HUMAN HIT: AU118306.1, EVALUE 1.00e-104; SWISSPROT HIT: P22003, EVALUE 3.00e-32
ctatttgtgtattccttgatgatttgatatatgctaatcttaattgtttcattttcaaatcggttgttgctccggtccttgtatatccggaattcagctgctgtcactgcctctccatgaggaatttgggtaagatcaaatcgaaattctttgtaatgccttcgctggtgagaaaaatccttgtctctttcaa

SEQ ID NO: 14107 - DNA, 145 bp, Homo sapiens
  MAP TO AC012661.4; EXPRESSED IN HELA, SIGNAL = 0.82; EXPRESSED IN FETAL LIVER, SIGNAL = 1.2; EXPRESSED IN BRAIN, SIGNAL = 1.2; EXPRESSED IN ADULT LIVER, SIGNAL = 0.98; EXPRESSED IN BONE MARROW, SIGNAL =   1; EXPRESSED IN LUNG, SIGNAL =   1; EXPRESSED IN PLACENTA, SIGNAL = 1.1; EXPRESSED IN HEART, SIGNAL = 1.1; SWISSPROT HIT: Q05793, EVALUE 4.60e-02; NT HIT: gi13937343, EVALUE 8.00e-03; EST_HUMAN HIT: AA077473.1, EVALUE 3.00e-15
gggagaggatatgactcccaatatcgcagaaaatgtacacccctctatgatgttactcctaatagccagggggtagaggatgacattatggaaaatatcgcagtgggtgtacatcccttcggtcatcttgttcctaatatcctgg

SEQ ID NO: 14108 - DNA, 111 bp, Homo sapiens
  MAP TO AL138478.1; EXPRESSED IN ADULT LIVER, SIGNAL = 3.5; EXPRESSED IN PLACENTA, SIGNAL = 2.5; EXPRESSED IN LUNG, SIGNAL = 3.1; EXPRESSED IN FETAL LIVER, SIGNAL = 2.5; EXPRESSED IN BONE MARROW, SIGNAL = 2.2; EXPRESSED IN BRAIN, SIGNAL = 2.4; EST_HUMAN HIT: AW883189.1, EVALUE 1.30e-01; NT HIT: gi5835526, EVALUE 1.40e+00
ctgcggtcaggcgtgtgtgcagtttttgcagtctggtttcggggttctcagctgcatttattgtgcccatcctcacacgtgcgtaggcttgggtgggcatcacacactgct

SEQ ID NO: 14109 - DNA, 79 bp, Homo sapiens
  MAP TO AL133476.4; EXPRESSED IN BRAIN, SIGNAL = 1.2; EXPRESSED IN HELA, SIGNAL = 0.72; EXPRESSED IN LUNG, SIGNAL = 1.9; EXPRESSED IN FETAL LIVER, SIGNAL = 1.6; EXPRESSED IN PLACENTA, SIGNAL = 1.8; EXPRESSED IN ADULT LIVER, SIGNAL =   2; SWISSPROT HIT: P11369, EVALUE 5.00e-04; EST_HUMAN HIT: AA513876.1, EVALUE 3.00e-26; NT HIT: L11910.1, EVALUE 5.00e-24
atggcaaacaggtatatgacaaggtgctcaacatcactgatcatcagagaaatgcaaatcaaaactacaatgaagccag

SEQ ID NO: 14110 - DNA, 89 bp, Homo sapiens
  MAP TO AL136140.2; EXPRESSED IN BRAIN, SIGNAL = 2.2; EXPRESSED IN ADULT LIVER, SIGNAL = 2.1; EXPRESSED IN PLACENTA, SIGNAL = 2.2; EXPRESSED IN LUNG, SIGNAL =   2; EXPRESSED IN FETAL LIVER, SIGNAL = 2.2; EXPRESSED IN BONE MARROW, SIGNAL =   2
ggcacctggggttaacacattgtcctttactacctgttatctgcttattagaaccaattttctccccccagttgcacaacaaacactga

SEQ ID NO: 14111 - DNA, 174 bp, Homo sapiens
  MAP TO CHR21_14.0; EXPRESSED IN PLACENTA, SIGNAL = 0.99; EXPRESSED IN BONE MARROW, SIGNAL = 1.3; EXPRESSED IN ADULT LIVER, SIGNAL = 1.2; EXPRESSED IN BRAIN, SIGNAL = 1.3; EXPRESSED IN LUNG, SIGNAL =   1; EXPRESSED IN HELA, SIGNAL = 2.8; EXPRESSED IN FETAL LIVER, SIGNAL = 1.4; EST_HUMAN HIT: BI858348.1, EVALUE 2.00e-88; SWISSPROT HIT: P28380, EVALUE 1.50e+00; NT HIT: AL163218.2, EVALUE 2.00e-93
cttggagaagagggtgctggtgtgagtggtgatgaggctggtaaggctggtatagtaaatgttggaaaaactgcaacctggatttagttgcaaccgcagggaggaactgctgctgccagggtgaagaaacactgctatagtggaagctgcgggagcgagagaatgtaagcaagc

SEQ ID NO: 14112 - DNA, 227 bp, Homo sapiens
  MAP TO CHR22_115.0; EXPRESSED IN BRAIN, SIGNAL = 0.96; EXPRESSED IN PLACENTA, SIGNAL = 1.1; EXPRESSED IN HELA, SIGNAL = 0.56; EXPRESSED IN LUNG, SIGNAL = 1.1; EXPRESSED IN ADULT LIVER, SIGNAL = 1.3; EXPRESSED IN FETAL LIVER, SIGNAL = 0.87; EXPRESSED IN BONE MARROW, SIGNAL = 0.84; EST_HUMAN HIT: BG819730.1, EVALUE 3.00e-63; SWISSPROT HIT: O35375, EVALUE 4.00e-03; NT HIT: gi14777930, EVALUE 1.00e-107
atgactctccctcttctctgccctccaagcctgaatctgagcaacagtgacatcttgaccatctacgatggcgacgaggtcatgccccacatcttggggcagtaccttgggaacagtggcccccagaaactgtactcctccacgccagacttaaccatccagttccattcggaccctgctggcctcatctttggaaagggccagggatttatcatgaactacatagg

SEQ ID NO: 14113 - DNA, 352 bp, Homo sapiens
  MAP TO AL160313.1; EXPRESSED IN FETAL LIVER, SIGNAL = 0.61; EXPRESSED IN BONE MARROW, SIGNAL = 0.68; EXPRESSED IN HELA, SIGNAL = 0.63; EXPRESSED IN BRAIN, SIGNAL = 0.63; EXPRESSED IN LUNG, SIGNAL = 0.69; EXPRESSED IN ADULT LIVER, SIGNAL = 0.72; EST_HUMAN HIT: BG115080.1, EVALUE 1.20e-01; SWISSPROT HIT: P31249, EVALUE 3.30e-01
agagagcttctgcaggccagggcgccatccccaggagagggcacagcacccacagaggtggtggcggaagtggcaagggcatcaggatgggggtgagacgctcgtgggggacagtggccccaaccccctcaacaaacccgggccacacgttgaccacgcccacgccagggccccctgctttcactgccccggggacaacacaaaggagcactgaccgggacagatgcctctccaccttggtaccccgacaagggtgcagctgctcggggtgggacgctgaggggtcgactccaggggactggggcagaagagcccccaacctctgaggaaatgatgacatcatctgtccgtc

SEQ ID NO: 14114 - DNA, 210 bp, Homo sapiens
  MAP TO AL138788.1; EXPRESSED IN ADULT LIVER, SIGNAL =   1; EXPRESSED IN FETAL LIVER, SIGNAL =   1; EXPRESSED IN PLACENTA, SIGNAL = 1.1; EXPRESSED IN LUNG, SIGNAL = 0.99; EXPRESSED IN BONE MARROW, SIGNAL =   1; EXPRESSED IN HELA, SIGNAL = 0.74; EXPRESSED IN BRAIN, SIGNAL =   1; NT HIT: AL445564.1, EVALUE 7.50e-01; EST_HUMAN HIT: AW103198.1, EVALUE 1.00e-112; SWISSPROT HIT: P46901, EVALUE 4.00e-03
ataaagattgaactaaagcatgcccaacagaagttattagacagcacaaagatgtgctcttcactcacggcagagtacaagcactgtcagcagaaaatcaaggaactggagttggaagtacttaaacacactcagagcattaaatcacagaacaacctacaggaaaagctggttcaggagaaatctaaagttgctgatgcagaggaaaag

SEQ ID NO: 14115 - DNA, 177 bp, Homo sapiens
  MAP TO AC018704.5; EXPRESSED IN BONE MARROW, SIGNAL = 0.47; EXPRESSED IN BRAIN, SIGNAL = 0.56; EXPRESSED IN FETAL LIVER, SIGNAL = 0.56; EXPRESSED IN LUNG, SIGNAL = 0.47; NT HIT: AP003105.2, EVALUE 6.20e-01; EST_HUMAN HIT: AI926167.1, EVALUE 9.10e-01; SWISSPROT HIT: P29275, EVALUE 5.70e+00
aagagcagcagcaggagtacccaaaacagcagaaacagcagcctctggtgttaacaatctattctcaaatctcatgctccacatttccctggcaaacaaggctaaaaatacaagacatgcaacaaatagtctcgtgggatctgccgttccatggatggcgtattcaatcagagtcat

SEQ ID NO: 14116 - DNA, 130 bp, Homo sapiens
  MAP TO AL137800.2; EXPRESSED IN BONE MARROW, SIGNAL = 0.89; EXPRESSED IN BRAIN, SIGNAL = 0.64; EXPRESSED IN LUNG, SIGNAL = 0.98; EXPRESSED IN PLACENTA, SIGNAL = 0.94; EXPRESSED IN FETAL LIVER, SIGNAL = 0.79; EXPRESSED IN ADULT LIVER, SIGNAL = 1.1; NT HIT: gi6005925, EVALUE 1.10e-01; EST_HUMAN HIT: BF115963.1, EVALUE 4.10e-02; SWISSPROT HIT: P10269, EVALUE 6.90e-01
atcactctggaatatgaatggaggggacaagagcagtggctggaaaatcagtttggaagtgactgcagtagtcctggtgaaaaatgagggtctcaaccaaggcagtgctagtggggatggagagaaatag

SEQ ID NO: 14117 - DNA, 94 bp, Homo sapiens
  MAP TO AC011731.4; EXPRESSED IN BONE MARROW, SIGNAL = 0.86; EXPRESSED IN BRAIN, SIGNAL = 0.8; EXPRESSED IN LUNG, SIGNAL = 1.1; EXPRESSED IN ADULT LIVER, SIGNAL = 0.91; EST_HUMAN HIT: BF752860.1, EVALUE 2.00e-43; NT HIT: M74094.1, EVALUE 1.20e+00
ctgagggtccgtccttgcaaagcctccgctcttcatcgccatccctgaacaccgtgttccttcctccttgtgctccttttgccttttcatgcat

SEQ ID NO: 14118 - DNA, 180 bp, Homo sapiens
  MAP TO CHR22_52.0; EXPRESSED IN FETAL LIVER, SIGNAL = 1.4; EXPRESSED IN HEART, SIGNAL = 1.4; EXPRESSED IN HELA, SIGNAL = 1.3; EXPRESSED IN ADULT LIVER, SIGNAL = 2.1; EXPRESSED IN PLACENTA, SIGNAL = 1.8; EXPRESSED IN LUNG, SIGNAL = 1.9; EXPRESSED IN BONE MARROW, SIGNAL = 1.3; EXPRESSED IN BRAIN, SIGNAL = 1.3; SWISSPROT HIT: P11274, EVALUE 7.00e-20; EST_HUMAN HIT: AL043953.1, EVALUE 2.00e-94; NT HIT: U07000.1, EVALUE 5.00e-97
ataacaaggacgtgtcggtgatgatgagcgagatggacgtgaacgccatcgcaggcacgctgaagctgtacttccgtgagctgcccgagcccctcttcactgacgagttctaccccaacttcgcagagggcatcggtgagcactggaggccttggcctcatgggagacgtctcctccacg

SEQ ID NO: 14119 - DNA, 308 bp, Homo sapiens
  MAP TO CHR22_174.0; EXPRESSED IN FETAL LIVER, SIGNAL = 0.85; EXPRESSED IN BONE MARROW, SIGNAL = 0.8; EXPRESSED IN BRAIN, SIGNAL = 0.72; EXPRESSED IN PLACENTA, SIGNAL = 0.99; EXPRESSED IN ADULT LIVER, SIGNAL = 1.4; EXPRESSED IN LUNG, SIGNAL = 0.93; SWISSPROT HIT: Q08696, EVALUE 8.20e+00; NT HIT: U65099.1, EVALUE 2.80e-01
catctccggtgtcatgaggtcttcaagagagacagataggctttcactgagacctgatgtcatgaagtcttcaagagagacagataggctttcactgagatccgatgtcatgaagtcttcaagacagacagataggctttcactgagatcttcgaccaaatctaggagaacatagtgacagtcagtgcattggtgctgctgaggaatcccacaaggagccttgggggatgtggaccagggctggatcatgtgcaggtgggcggttgacaggcatggactgagctgctgctggaccattctccttggtg

SEQ ID NO: 14120 - DNA, 241 bp, Homo sapiens
  MAP TO AC018464.4; EXPRESSED IN BRAIN, SIGNAL = 0.74; EXPRESSED IN PLACENTA, SIGNAL = 0.77; EXPRESSED IN LUNG, SIGNAL = 0.63; EXPRESSED IN HELA, SIGNAL = 0.67; EXPRESSED IN FETAL LIVER, SIGNAL = 0.97; EXPRESSED IN ADULT LIVER, SIGNAL = 0.72; EXPRESSED IN BONE MARROW, SIGNAL = 0.85; SWISSPROT HIT: P35951, EVALUE 1.70e+00; EST_HUMAN HIT: AW084557.1, EVALUE 8.10e-02; NT HIT: AF084363.1, EVALUE 8.70e-01
ctagaatgaaagactgaacactttgataccatcaggagttgagctgtattggagctggatgacctctttaggtggtttcaattcacttctggtctcaagtgctttgatagtgaatgaatcctgttctgtgagtattacaggtgcaactctcttgcaggacataagcctaatgtttttctgctttttagttccactcgcagccaccagtgctgttgctgccttcacatactcataaatagac

SEQ ID NO: 14121 - DNA, 99 bp, Homo sapiens
  MAP TO AL121962.4; EXPRESSED IN HELA, SIGNAL = 2.2; EXPRESSED IN BONE MARROW, SIGNAL = 3.2; EXPRESSED IN LUNG, SIGNAL = 3.4; EXPRESSED IN PLACENTA, SIGNAL = 3.8; EXPRESSED IN HEART, SIGNAL = 2.6; EXPRESSED IN BRAIN, SIGNAL = 2.9; EXPRESSED IN ADULT LIVER, SIGNAL = 3.8; EXPRESSED IN FETAL LIVER, SIGNAL = 3.2; EST_HUMAN HIT: BG910713.1, EVALUE 3.00e-02
atgaagttgaaagacagacataacaataataataatgtcaactgccaactcactaaaaagaccaccaaaataaagaaaactgcatttattcttaaccca

SEQ ID NO: 14122 - DNA, 207 bp, Homo sapiens
  MAP TO AC013341.3; EXPRESSED IN LUNG, SIGNAL = 0.78; EXPRESSED IN FETAL LIVER, SIGNAL = 0.6; EXPRESSED IN BONE MARROW, SIGNAL = 0.61; EXPRESSED IN BRAIN, SIGNAL = 0.47; NT HIT: AL163209.2, EVALUE 2.00e-63; SWISSPROT HIT: Q05654, EVALUE 1.00e-05; EST_HUMAN HIT: AA984295.1, EVALUE 2.00e-51
aagacagatggatcttggagaatgacactggactatcgtaagcttaaccaagtggtgactccaaatccagctgctgtaccagatgtggtttcattgcttgagcaaattaacacatcttctggtacctggtatgcagccattgacttggcaaatgccttttcctccattgctgtccataaggcccagcagaagcaatttgccttccac

SEQ ID NO: 14123 - DNA, 210 bp, Homo sapiens
  MAP TO CHR21_4.0; EXPRESSED IN FETAL LIVER, SIGNAL = 1.5; EXPRESSED IN BONE MARROW, SIGNAL = 1.9; EXPRESSED IN PLACENTA, SIGNAL = 0.88; EXPRESSED IN LUNG, SIGNAL = 0.9; EXPRESSED IN BRAIN, SIGNAL = 1.6; EXPRESSED IN HELA, SIGNAL = 3.9; EXPRESSED IN ADULT LIVER, SIGNAL =   1; NT HIT: AL163203.2, EVALUE 1.00e-115; SWISSPROT HIT: Q15149, EVALUE 7.00e-04; EST_HUMAN HIT: AW614036.1, EVALUE 1.00e-24
cataagaaagaagaagatctcttgcgtgaaaacagcgtgttgcaggaagaaattgccatgctaagactggaactagatgaaacaaaacatcagaaccagctaagggaaaataaaattttggaggaaattgaaagtgtgaaagaaaagactgataaacttctaagggctatgcaattgaatgaagaagcattaacgaaaaccaatatttaa

SEQ ID NO: 14124 - DNA, 382 bp, Homo sapiens
  MAP TO CHR22_91.0; EXPRESSED IN BONE MARROW, SIGNAL = 0.85; EXPRESSED IN PLACENTA, SIGNAL = 0.92; EXPRESSED IN BRAIN, SIGNAL =   1; EXPRESSED IN LUNG, SIGNAL = 1.1; EXPRESSED IN ADULT LIVER, SIGNAL = 1.3; EXPRESSED IN FETAL LIVER, SIGNAL = 0.8; NT HIT: gi16185303, EVALUE 0.00e+00; SWISSPROT HIT: Q16795, EVALUE 9.00e-51; EST_HUMAN HIT: BE264651.1, EVALUE 0.00e+00
caaaaggtggcaaggggtacgggaggaagtacccctttgctgtgagccacagcaaagatgtacttcaccaggtcaaagaggagatatcgatttggcccaacgaaagcaaaggttttcccattggcatcaggatccttaactgcattaacaattcctttggatacatctacgacgtatactggttgtttaactgccttccagcccaaggaaacaaggggtatagcaccaaaccaacacatatttgcaaaataattaaggaatctatcctctcttccaaagatgtccaacagctttacgataatggcttctggaaatgtgtctctcactgctttctctccaacagccttctttctcaaatatctagaagagcttttaatattca

SEQ ID NO: 14125 - DNA, 200 bp, Homo sapiens
  MAP TO AL138895.4; EXPRESSED IN BONE MARROW, SIGNAL = 0.88; EXPRESSED IN PLACENTA, SIGNAL = 0.91; EXPRESSED IN BRAIN, SIGNAL = 0.72; EXPRESSED IN ADULT LIVER, SIGNAL = 0.61; EXPRESSED IN FETAL LIVER, SIGNAL = 0.86; NT HIT: D78023.1, EVALUE 4.50e-02; SWISSPROT HIT: Q02113, EVALUE 4.20e+00; EST_HUMAN HIT: AW810439.1, EVALUE 2.60e-01
gcaccactggctaccggcagggctatgggcaagacagcaaccttctctggcccctgagcgtcccatatgtaatacaagaatgggagagggaggagtctaaggaaccattcagcaaatacttgctgaggatctactgtgggctcatccttgggctgaacactgggcacagagagataaaggagctgtggcttcgcccttga

SEQ ID NO: 14126 - DNA, 145 bp, Homo sapiens
  MAP TO AL137798.1; EXPRESSED IN BONE MARROW, SIGNAL = 5.9; EXPRESSED IN LUNG, SIGNAL = 6.2; EXPRESSED IN HEART, SIGNAL =   4; EXPRESSED IN PLACENTA, SIGNAL = 5.9; EXPRESSED IN HELA, SIGNAL =   4; EXPRESSED IN BRAIN, SIGNAL = 5.1; EXPRESSED IN ADULT LIVER, SIGNAL =   6; EXPRESSED IN FETAL LIVER, SIGNAL = 5.4; EST_HUMAN HIT: BI113831.1, EVALUE 9.00e-16; NT HIT: gi16161780, EVALUE 2.00e-18; SWISSPROT HIT: P16252, EVALUE 6.80e-01
ctgggccaggctggcactcctgaatggggcacaggggatcagtaggcgctcgcccagggggccatgctgccagccctggccctccctgctgctcctcctccagccagatgagggcactctccaggtcttggctgtgctctgcgtc

SEQ ID NO: 14127 - DNA, 88 bp, Homo sapiens
  MAP TO CHR22_16.0; EXPRESSED IN ADULT LIVER, SIGNAL = 1.3; EXPRESSED IN BONE MARROW, SIGNAL = 0.93; EXPRESSED IN LUNG, SIGNAL =   1; EXPRESSED IN BRAIN, SIGNAL =   1; EXPRESSED IN HELA, SIGNAL = 1.3; NT HIT: D17675.1, EVALUE 2.70e-01
atgcagaaggagtttcaagaaggtcaaacagctgcaggggctggcgagtcactggaggcagggatggacacagatcagcccaggcctg

SEQ ID NO: 14128 - DNA, 110 bp, Homo sapiens
  MAP TO AL135786.2; EXPRESSED IN PLACENTA, SIGNAL = 0.86; EXPRESSED IN FETAL LIVER, SIGNAL = 0.7; EXPRESSED IN LUNG, SIGNAL = 0.85; EXPRESSED IN BONE MARROW, SIGNAL = 0.69; EXPRESSED IN BRAIN, SIGNAL = 0.7; EST_HUMAN HIT: AI422019.1, EVALUE 2.00e-46; NT HIT: gi8923931, EVALUE 2.00e-46
ctttcattctttctaaaagggttccatagcccaagtcatactggtaggtgaggataaagcttaatggaacaatcgggaccaggaaggctggcttcttttttttaatcgct

SEQ ID NO: 14129 - DNA, 128 bp, Homo sapiens
  MAP TO AL136113.1; EXPRESSED IN ADULT LIVER, SIGNAL =  30; EXPRESSED IN HELA, SIGNAL =  22; EXPRESSED IN PLACENTA, SIGNAL =  36; EXPRESSED IN LUNG, SIGNAL =  35; EXPRESSED IN BRAIN, SIGNAL =  32; EXPRESSED IN FETAL LIVER, SIGNAL =  33; EXPRESSED IN BONE MARROW, SIGNAL =  35; EST_HUMAN HIT: AI432980.1, EVALUE 2.50e+00; NT HIT: AE000731.1, EVALUE 1.70e+00
atgtagcttccagtaagtacttcggaaagttaaacaaggatcatttccagtttcactgcattatcctgggacactctgcacagaatatcttctttaatcaggacatattcaatcagcagatctaccac

SEQ ID NO: 14130 - DNA, 93 bp, Homo sapiens
  MAP TO AC025753.1; EXPRESSED IN PLACENTA, SIGNAL = 0.83; EXPRESSED IN LUNG, SIGNAL = 0.68; EXPRESSED IN HELA, SIGNAL = 1.3; EXPRESSED IN BRAIN, SIGNAL = 0.56; EXPRESSED IN ADULT LIVER, SIGNAL = 0.61; EXPRESSED IN FETAL LIVER, SIGNAL = 0.72; EXPRESSED IN BONE MARROW, SIGNAL = 0.62; NT HIT: gi6715592, EVALUE 2.90e-01; EST_HUMAN HIT: BG766509.1, EVALUE 1.10e-01
gactgctgttatgacaattaaaggagatgagtcatttaaagtccatgacacagtgctggcagtagacccagaaggaaccagccattgtacaaa

SEQ ID NO: 14131 - DNA, 142 bp, Homo sapiens
  MAP TO AL137793.1; EXPRESSED IN HELA, SIGNAL = 1.1; EXPRESSED IN BRAIN, SIGNAL = 1.7; EXPRESSED IN ADULT LIVER, SIGNAL = 1.7; EXPRESSED IN PLACENTA, SIGNAL = 1.8; EXPRESSED IN LUNG, SIGNAL = 1.6; EXPRESSED IN FETAL LIVER, SIGNAL = 1.5; EXPRESSED IN BONE MARROW, SIGNAL = 1.7; SWISSPROT HIT: P12625, EVALUE 5.20e-01; NT HIT: AB038965.1, EVALUE 4.80e-01; EST_HUMAN HIT: AV657279.1, EVALUE 1.80e-01
cagcgggagcctcccagccctccgctgcagtgtcttccgggctgctaatgggtttcacgtgtgcagaggccaatgcctcagtcctggggatggggtctgggacagctcctgtggctgtctcctcagccgtgagcagccgcat

SEQ ID NO: 14132 - DNA, 78 bp, Homo sapiens
  MAP TO AL139158.1; EXPRESSED IN BRAIN, SIGNAL = 1.2; EXPRESSED IN HELA, SIGNAL = 1.1; EXPRESSED IN LUNG, SIGNAL = 1.3; EXPRESSED IN PLACENTA, SIGNAL = 1.5; EXPRESSED IN FETAL LIVER, SIGNAL = 1.2; EXPRESSED IN ADULT LIVER, SIGNAL = 1.5; EXPRESSED IN BONE MARROW, SIGNAL = 1.3; SWISSPROT HIT: P51446, EVALUE 8.20e+00; EST_HUMAN HIT: AA309300.1, EVALUE 1.30e+00
ttattcttcatgacccagcttgatggtaccaccctgcatgaggccttccctgaccctctgagtgctgtcttccagaac

SEQ ID NO: 14133 - DNA, 169 bp, Homo sapiens
  MAP TO AL137008.1; EXPRESSED IN FETAL LIVER, SIGNAL = 0.46; EXPRESSED IN LUNG, SIGNAL = 0.88; EXPRESSED IN BRAIN, SIGNAL = 0.65; SWISSPROT HIT: O94833, EVALUE 2.00e-25; NT HIT: gi14759704, EVALUE 3.00e-83; EST_HUMAN HIT: BI757081.1, EVALUE 4.00e-83
agtttccaaccagtcgcttggagatgagcgcagttgcagacatctttgacagagatggcgatggatatattgactactatgaatttgtagcagcccttcacccaaataaagatgcatataaacctatcacagatgccgacaaaatcgaagatgaggtactcattatctt

SEQ ID NO: 14134 - DNA, 171 bp, Homo sapiens
  MAP TO AL133406.3; EXPRESSED IN PLACENTA, SIGNAL = 1.9; EXPRESSED IN LUNG, SIGNAL = 1.7; EXPRESSED IN ADULT LIVER, SIGNAL = 1.5; EXPRESSED IN HELA, SIGNAL = 1.2; EXPRESSED IN HEART, SIGNAL = 1.4; EXPRESSED IN BONE MARROW, SIGNAL = 1.3; EXPRESSED IN BRAIN, SIGNAL = 1.4; EXPRESSED IN FETAL LIVER, SIGNAL = 1.3; SWISSPROT HIT: P54577, EVALUE 6.60e-01; NT HIT: gi7305618, EVALUE 1.00e-02
atgctgcatgactgtatcttggatgaattgcagcatttcacactccaaggcaagaccagagtagtgacagagcagggggtggccctggtgttcaggttcctgcatcttctggggcctgaggttgcaggcaacctggtcctctggaaaaatgccaatcacagcgccaacacc

SEQ ID NO: 14135 - DNA, 146 bp, Homo sapiens
  MAP TO AL136099.2; EXPRESSED IN BONE MARROW, SIGNAL = 0.72; EXPRESSED IN LUNG, SIGNAL = 0.98; EXPRESSED IN ADULT LIVER, SIGNAL = 1.1; EXPRESSED IN BRAIN, SIGNAL = 0.8; EXPRESSED IN HELA, SIGNAL = 0.69; EXPRESSED IN PLACENTA, SIGNAL = 1.2; SWISSPROT HIT: P45989, EVALUE 4.50e+00; NT HIT: gi11421399, EVALUE 8.00e-03; EST_HUMAN HIT: BI118004.1, EVALUE 1.20e-02
acatctcatactcacattccttgttcaattgcttccatgagaaaaagcttgcagctatcttgttcatctttaacgcccaggactgggtgcccagctcagtgcctgctacacagaagatgcttaatgtcaatttgctgattgaataa

SEQ ID NO: 14136 - DNA, 168 bp, Homo sapiens
  MAP TO AC013371.4; EXPRESSED IN ADULT LIVER, SIGNAL = 0.69; EXPRESSED IN FETAL LIVER, SIGNAL = 0.64; EXPRESSED IN BONE MARROW, SIGNAL = 0.49; EXPRESSED IN BRAIN, SIGNAL = 0.5; EST_HUMAN HIT: AI948644.1, EVALUE 8.60e-01; SWISSPROT HIT: P97677, EVALUE 2.60e+00
atctgatatgttagcaatggctggtggtgcccccattcccaaatttatacacatggctttatttgcacaaacctttgacattaggcagggtgaaaccaggtacgtgcagagaagaataggccaagagggtaaggagtggacaaccaaggtcctggtgtgctctagcat

SEQ ID NO: 14137 - DNA, 269 bp, Homo sapiens
  MAP TO CHR22_219.0; EXPRESSED IN FETAL LIVER, SIGNAL = 1.2; EXPRESSED IN BONE MARROW, SIGNAL = 1.3; EXPRESSED IN PLACENTA, SIGNAL = 0.72; EXPRESSED IN ADULT LIVER, SIGNAL = 0.85; EXPRESSED IN BRAIN, SIGNAL = 1.2; EXPRESSED IN HELA, SIGNAL = 2.3; EXPRESSED IN LUNG, SIGNAL = 0.7; EST_HUMAN HIT: BE546641.1, EVALUE 2.00e-61; SWISSPROT HIT: P71300, EVALUE 2.20e+00; NT HIT: gi14781306, EVALUE 2.00e-54
tggaaatctgtccctcgtgctggaagccaaccagtggtgatgactctgtgtgccactccgcctcctacagcgcggatcctctgcgtgtgtcctcgcaagacaagctcgatgaaatggccgagtccagtcaagcaaactttgagggaaattttgagtcgctggaccttgtggaatttgctaagaaacagccatggtggtgtaagctgttcaggcaggaatctggaccttccccgaaaagtgaagggtggcaacccagccgttcattgggg

SEQ ID NO: 14138 - DNA, 147 bp, Homo sapiens
  MAP TO AL160236.1; EXPRESSED IN FETAL LIVER, SIGNAL =   9; EXPRESSED IN BONE MARROW, SIGNAL = 8.9; EXPRESSED IN HEART, SIGNAL = 8.1; EXPRESSED IN PLACENTA, SIGNAL =  11; EXPRESSED IN LUNG, SIGNAL = 9.5; EXPRESSED IN ADULT LIVER, SIGNAL = 9.3; EXPRESSED IN HELA, SIGNAL = 7.9; EXPRESSED IN BRAIN, SIGNAL = 8.5; SWISSPROT HIT: Q64674, EVALUE 3.00e-10; NT HIT: AF337636.1, EVALUE 2.00e-22; EST_HUMAN HIT: BG675481.1, EVALUE 1.00e-14
atgatggcgttggatggcatcatccagtatacagagaggaacaagttctcctaccaggagattatagtcaacctgcctctctgcagccaccccaacctacaaatggcggtgattattgaggacaggaacaagggcatcctgtgcaag

SEQ ID NO: 14139 - DNA, 277 bp, Homo sapiens
  MAP TO AL136094.1; EXPRESSED IN HELA, SIGNAL = 2.6; EXPRESSED IN BRAIN, SIGNAL = 5.5; EXPRESSED IN FETAL LIVER, SIGNAL = 5.9; EXPRESSED IN BONE MARROW, SIGNAL = 5.3; EXPRESSED IN PLACENTA, SIGNAL = 6.2; EXPRESSED IN ADULT LIVER, SIGNAL = 5.5; EXPRESSED IN LUNG, SIGNAL = 5.9; NT HIT: AL163303.2, EVALUE 2.00e-26; SWISSPROT HIT: P56671, EVALUE 1.00e+00; EST_HUMAN HIT: AW241958.1, EVALUE 2.00e-36
ctttgctccagttcccagtaagttccccatttccatctgagacctcatcagcctggagttcactgtccatatcactgtcagcattttggtcacatttaactagtctctgagaaattccaaactttccctcatcttcccgtcttatgctgagccctccaaattcttccagcttctgcctgttacccaattccaaaattgcttccacattttcaggtatttttatagcaatgccataatcctcagtaccaattttctgtgttaggcggttcttgcagtg

SEQ ID NO: 14140 - DNA, 247 bp, Homo sapiens
  MAP TO AC023120.3; EXPRESSED IN HELA, SIGNAL = 5.1; EXPRESSED IN FETAL LIVER, SIGNAL =   8; EXPRESSED IN HEART, SIGNAL = 7.9; EXPRESSED IN LUNG, SIGNAL = 8.2; EXPRESSED IN BONE MARROW, SIGNAL = 8.4; EXPRESSED IN BRAIN, SIGNAL = 7.2; EXPRESSED IN ADULT LIVER, SIGNAL = 7.5; NT HIT: gi7657394, EVALUE 0.00e+00; SWISSPROT HIT: Q9Y5X4, EVALUE 3.00e-41
gtgatcctgctggaagaggcgtggagtgaactctttctcctcggggccatccagtggtctctgcctctggacagctgtcctctgctggcaccgcccgaggcctctgctgccggtggtgcccagggccggctcacgctggccagcatggagacgcgtgtcctgcaggaaactatctctcggttccgggcattggcggtggaccccacggagtttgcctgcatgaaggccttggtcctcttcaagccag

SEQ ID NO: 14141 - DNA, 294 bp, Homo sapiens
  MAP TO CHR22_155.0; EXPRESSED IN BRAIN, SIGNAL = 0.52; EXPRESSED IN BONE MARROW, SIGNAL = 5.6; EXPRESSED IN LUNG, SIGNAL = 1.2; EXPRESSED IN ADULT LIVER, SIGNAL = 0.53; NT HIT: Z85032.1, EVALUE 0.00e+00; SWISSPROT HIT: P01705, EVALUE 3.00e-47; EST_HUMAN HIT: BG754419.1, EVALUE 0.00e+00
ctgcatatgagcagcagtaataatcagcctcgtcctcagcctggagcccagagattgtcagggaggccgtgttgccagacttggagccagagaagcgattagaaacccctgagggccgcttactgccctcataaatcatgagtttgggggctttgcctgggtgctgttggtaccaggagacaaggttataactcccaacatcactgctggttccagtgcaggagatggtgatcgactgtccaggagacccagacacggaggcaggctgagtcagggcagactgggcccaggacc

SEQ ID NO: 14142 - DNA, 121 bp, Homo sapiens
  MAP TO AL080248.7; EXPRESSED IN HELA, SIGNAL = 2.6; EXPRESSED IN FETAL LIVER, SIGNAL = 2.2; EXPRESSED IN PLACENTA, SIGNAL = 1.8; EXPRESSED IN LUNG, SIGNAL = 2.3; EXPRESSED IN ADULT LIVER, SIGNAL = 2.7; EXPRESSED IN BONE MARROW, SIGNAL = 1.6; EXPRESSED IN BRAIN, SIGNAL = 1.2; SWISSPROT HIT: P71318, EVALUE 1.60e+00
gcacagaggggtagataagcatgttgaggaggcagcaagagtccagccagccaaggagaaaggtgtggaagcagacccgtcccctggggtccccacaggaaatcacccttgctggaacctt

SEQ ID NO: 14143 - DNA, 159 bp, Homo sapiens
  MAP TO AC022215.2; EXPRESSED IN FETAL LIVER, SIGNAL = 0.99; EXPRESSED IN BONE MARROW, SIGNAL = 0.86; EXPRESSED IN ADULT LIVER, SIGNAL = 1.2; EXPRESSED IN HELA, SIGNAL = 1.5; EXPRESSED IN BRAIN, SIGNAL = 0.99; EXPRESSED IN PLACENTA, SIGNAL = 1.3; EXPRESSED IN LUNG, SIGNAL = 1.1; EST_HUMAN HIT: BI830132.1, EVALUE 2.00e-84
cttccatgctgcgctcggccacgctggggatgttgcagtacaaaagagcttcataaacggggtctgtcacagggggctccgtcacagggtcgggcatgattctctttcgactcttgctactcattccattcttaggagtcgacaccgggatcaggtgga

SEQ ID NO: 14144 - DNA, 120 bp, Homo sapiens
  MAP TO AC022117.2; EXPRESSED IN HELA, SIGNAL = 0.52; EXPRESSED IN BRAIN, SIGNAL = 0.68; EXPRESSED IN FETAL LIVER, SIGNAL = 0.61; EXPRESSED IN BONE MARROW, SIGNAL = 0.55; EXPRESSED IN PLACENTA, SIGNAL = 0.58; EXPRESSED IN LUNG, SIGNAL = 0.46; EXPRESSED IN ADULT LIVER, SIGNAL = 0.52; NT HIT: AY054485.1, EVALUE 3.90e-01; EST_HUMAN HIT: BF314567.1, EVALUE 1.50e-01
gctagaaagagaaatgataaagccatccacagtgatcataatgaaaacatggagagcctacacgttccaggctttctcacacatgctacctggtataattctcactacaaccctgaagga

SEQ ID NO: 14145 - DNA, 145 bp, Homo sapiens
  MAP TO CHR22_94.0; EXPRESSED IN PLACENTA, SIGNAL = 0.61; EXPRESSED IN LUNG, SIGNAL = 0.52; EXPRESSED IN ADULT LIVER, SIGNAL = 0.53; EXPRESSED IN BRAIN, SIGNAL = 0.39; EXPRESSED IN HELA, SIGNAL =   7; SWISSPROT HIT: P10645, EVALUE 2.00e+00; NT HIT: gi13376647, EVALUE 7.70e+00
aggggagcacattgtacagggccttgtagaccaaaataaggacttggaactggctacgggatgggaagccaaagaagtttgcacaaaagcacgtcacaatccgattgaacaggctgtcgagagaacaaacttcggcgatggagag

SEQ ID NO: 14146 - DNA, 84 bp, Homo sapiens
  MAP TO AL138801.1; EXPRESSED IN FETAL LIVER, SIGNAL = 5.6; EXPRESSED IN LUNG, SIGNAL = 6.2; EXPRESSED IN HEART, SIGNAL = 5.4; EXPRESSED IN PLACENTA, SIGNAL =   6; EXPRESSED IN BONE MARROW, SIGNAL =   6; EXPRESSED IN ADULT LIVER, SIGNAL = 5.9; EXPRESSED IN HELA, SIGNAL =   4; EXPRESSED IN BRAIN, SIGNAL = 4.8; SWISSPROT HIT: P08548, EVALUE 4.80e+00; NT HIT: AL163300.2, EVALUE 2.60e-01; EST_HUMAN HIT: BE063434.1, EVALUE 2.40e-02
atcctgcaaacttgccaaattcatttactagttctagtagcttatgtgtagatttcatcacattttccaaggtgatcatgtcat

SEQ ID NO: 14147 - DNA, 106 bp, Homo sapiens
  MAP TO AC023120.3; EXPRESSED IN FETAL LIVER, SIGNAL = 0.57; EXPRESSED IN BONE MARROW, SIGNAL = 0.45; EXPRESSED IN PLACENTA, SIGNAL = 0.6; EXPRESSED IN ADULT LIVER, SIGNAL = 0.53; EXPRESSED IN BRAIN, SIGNAL = 0.57; SWISSPROT HIT: P87000, EVALUE 6.10e+00; NT HIT: AL161572.2, EVALUE 1.30e+00; EST_HUMAN HIT: BF446108.1, EVALUE 5.00e-01
cgcgcctccacatgatcgacctcaccttgtatactcacagccacctcaacagctgggtgctgcaggtctctctgctttacagcggggaaaacaaagcctcagccag

SEQ ID NO: 14148 - DNA, 217 bp, Homo sapiens
  MAP TO AC020699.2; EXPRESSED IN BRAIN, SIGNAL = 4.5; EXPRESSED IN HELA, SIGNAL =   2; EXPRESSED IN HEART, SIGNAL = 4.6; EXPRESSED IN FETAL LIVER, SIGNAL = 5.2; EXPRESSED IN PLACENTA, SIGNAL = 6.6; EXPRESSED IN LUNG, SIGNAL = 5.8; EXPRESSED IN ADULT LIVER, SIGNAL = 7.2; EXPRESSED IN BONE MARROW, SIGNAL = 5.5; NT HIT: AE007700.1, EVALUE 5.00e-02; SWISSPROT HIT: P33244, EVALUE 1.30e+00; EST_HUMAN HIT: BF313325.1, EVALUE 7.30e-02
agcagcggctgagagtggataaaatcagacccacaaatgagaatcccatagtgatactgagaataggtctaaggaaatattgagcacagatataagaacagatgaaatagaaaagaaggtgtttgaaattatgtgagactaaatataacagtcttgggaagatatggtttctggggcaaattagaagtgtatggaaaattctttggtggctctgtgg

SEQ ID NO: 14149 - DNA, 170 bp, Homo sapiens
  MAP TO CHR21_22.0; EXPRESSED IN BRAIN, SIGNAL = 2.1; EXPRESSED IN HELA, SIGNAL = 5.3; EXPRESSED IN PLACENTA, SIGNAL = 1.2; EXPRESSED IN FETAL LIVER, SIGNAL = 1.8; EXPRESSED IN ADULT LIVER, SIGNAL = 1.5; EXPRESSED IN LUNG, SIGNAL = 1.4; EXPRESSED IN BONE MARROW, SIGNAL =   2; SWISSPROT HIT: P17699, EVALUE 7.50e+00; EST_HUMAN HIT: AW835544.1, EVALUE 5.60e-02
cattttacatcacagttgaatttttctttcttctcaatccttgcttcctgccctcctttccacaggggttgattcttgagcactagatgtttcttggactctacttcacaaagaatccaaattgtgacataagatgtatggatctcatccacaaatgtatagtctaggcc

SEQ ID NO: 14150 - DNA, 204 bp, Homo sapiens
  MAP TO CHR22_5.0; EXPRESSED IN BONE MARROW, SIGNAL = 0.77; EXPRESSED IN PLACENTA, SIGNAL = 0.93; EXPRESSED IN HELA, SIGNAL = 0.53; EXPRESSED IN BRAIN, SIGNAL = 0.71; EXPRESSED IN ADULT LIVER, SIGNAL = 1.4; EXPRESSED IN LUNG, SIGNAL = 1.1; EXPRESSED IN FETAL LIVER, SIGNAL = 0.83; NT HIT: AJ298105.1, EVALUE 8.00e-47; SWISSPROT HIT: Q9ZCN6, EVALUE 1.40e+00; EST_HUMAN HIT: BE350127.1, EVALUE 1.00e-46
tgtactcattctaattacaaaataaataagttaactgtaaaacagcctcaggtaggtccttcagggggtattccagaagaaggcactgttatcacaggagatgacagctccatgcatgttatcgcctctgaagcccttccagtgggacaagatgtggaggtggaagacagtgatattgatgagcctgaccctgtggaggcctag

SEQ ID NO: 14151 - DNA, 97 bp, Homo sapiens
  MAP TO AL139112.1; EXPRESSED IN BONE MARROW, SIGNAL =   3; EXPRESSED IN HELA, SIGNAL = 2.7; EXPRESSED IN BRAIN, SIGNAL =   3; EXPRESSED IN HEART, SIGNAL = 3.4; EXPRESSED IN PLACENTA, SIGNAL = 3.7; EXPRESSED IN FETAL LIVER, SIGNAL = 3.6; EXPRESSED IN LUNG, SIGNAL = 4.1; EXPRESSED IN ADULT LIVER, SIGNAL = 4.6; NT HIT: X17069.2, EVALUE 1.20e+00; EST_HUMAN HIT: AA845747.1, EVALUE 1.80e+00
ctgggcattgtcaaggatcccagtagtggtagccttagatcctaaatcagcatcagttgtttccactttattgttatgccaggggttgcaggaatca

SEQ ID NO: 14152 - DNA, 195 bp, Homo sapiens
  MAP TO AL135932.1; EXPRESSED IN BRAIN, SIGNAL = 0.61; EXPRESSED IN FETAL LIVER, SIGNAL = 0.76; EXPRESSED IN ADULT LIVER, SIGNAL = 0.57; EXPRESSED IN BONE MARROW, SIGNAL = 0.58; EXPRESSED IN PLACENTA, SIGNAL = 0.66; EXPRESSED IN LUNG, SIGNAL = 0.7; EST_HUMAN HIT: BF957112.1, EVALUE 8.00e-20; SWISSPROT HIT: P21399, EVALUE 3.30e+00
agcatgcatggagctgagaggcaacacagtgctaagtggcacagagggagatctaatctggtcatgctactttgtaatgtggctaatcctgttttcccaaggacctttcaccttgtgagtaaccctgaccttgtgctggcagtgtctatgaccaagactagaaatgaagtttgtggctatccagttattgttcag

SEQ ID NO: 14153 - DNA, 110 bp, Homo sapiens
  MAP TO AC016672.4; EXPRESSED IN BONE MARROW, SIGNAL = 0.74; EXPRESSED IN BRAIN, SIGNAL = 0.66; EXPRESSED IN PLACENTA, SIGNAL = 0.73; EXPRESSED IN LUNG, SIGNAL = 0.63; EXPRESSED IN ADULT LIVER, SIGNAL = 0.71; EXPRESSED IN FETAL LIVER, SIGNAL = 0.75; EST_HUMAN HIT: BG528457.1, EVALUE 2.10e+00; SWISSPROT HIT: Q9HK31, EVALUE 9.20e-01
caagaggctgcttcaggtacgcacggccgtcctgcctgcgtctgagcaccagatcctgttgagcggaagtttctgccctgctccttcacggcgtgggcacggtcgttcat

SEQ ID NO: 14154 - DNA, 145 bp, Homo sapiens
  MAP TO CHR22_176.0; EXPRESSED IN BONE MARROW, SIGNAL = 1.6; EXPRESSED IN LUNG, SIGNAL = 1.7; EXPRESSED IN HELA, SIGNAL =   1; EXPRESSED IN BRAIN, SIGNAL = 1.4; EXPRESSED IN HEART, SIGNAL = 1.5; EXPRESSED IN FETAL LIVER, SIGNAL = 1.6; EXPRESSED IN PLACENTA, SIGNAL = 1.7; EXPRESSED IN ADULT LIVER, SIGNAL = 1.9; EST_HUMAN HIT: BF769004.1, EVALUE 1.00e-73; NT HIT: X65556.1, EVALUE 4.90e-01; SWISSPROT HIT: P08678, EVALUE 3.40e+00
tctcaacgtgggttctctgaccagcaggaacagcgcttaggaacctacacaaaatgcagattatcagggctcaaggagaccacgctgaatgggaactctggaagtggggtacagcaacctgtgttgaagaagccctccatccacg

SEQ ID NO: 14155 - DNA, 222 bp, Homo sapiens
  MAP TO AL139021.1; EXPRESSED IN LUNG, SIGNAL = 0.44; EXPRESSED IN PLACENTA, SIGNAL = 0.49; EXPRESSED IN BRAIN, SIGNAL = 0.4; EXPRESSED IN FETAL LIVER, SIGNAL = 0.49; SWISSPROT HIT: P36417, EVALUE 1.40e-02; EST_HUMAN HIT: AL042761.1, EVALUE 5.00e-86; NT HIT: gi7662189, EVALUE 1.00e-122
gtgcagagtgatttggaagcaaaagtcaattctgttacagaattacttagtaaattacaggagactgataaacacctgcaacgtgttacagagcagcaaacaagcattcagaggaaacaagagaaattacattgtcatgatcacgaaaagcaaatgaatgtgtttatggagcagcacataaggcatcttgaaaagttacaacaacaacaaatagatattcag

SEQ ID NO: 14156 - DNA, 343 bp, Homo sapiens
  MAP TO AC021635.3; EXPRESSED IN BRAIN, SIGNAL = 0.35; EXPRESSED IN PLACENTA, SIGNAL = 0.47; EXPRESSED IN LUNG, SIGNAL = 0.51; EXPRESSED IN ADULT LIVER, SIGNAL = 0.35; EXPRESSED IN FETAL LIVER, SIGNAL = 0.39; EXPRESSED IN BONE MARROW, SIGNAL = 0.41; SWISSPROT HIT: P16157, EVALUE 1.50e-02; EST_HUMAN HIT: AV728969.1, EVALUE 0.00e+00; NT HIT: K00918.1, EVALUE 1.30e+00
ctctggtggttttttcattcagattcacaccatattttgccaaagctctaatcacgtcactttgcccagccatgcaagctgcatacaacaaatttctcccaacgatgtcttcttctaagagaagctgcatggcctgttcatgatgaggattctcaggatcctcaaatatcttctgcaaaccctctacatcccctgtgagagcaggttgtaaaagggggttcttagggcctgtttcctctggttcttgggcttcttcttcttcattttcctcttcttgctgtgagaaaaattctgaactctctgactctggaggtccttctgactccattaactccaaaaatac

SEQ ID NO: 14157 - DNA, 238 bp, Homo sapiens
  MAP TO AC012360.2; EXPRESSED IN BONE MARROW, SIGNAL = 3.1; EXPRESSED IN BRAIN, SIGNAL =   3; EXPRESSED IN HELA, SIGNAL = 1.7; EXPRESSED IN FETAL LIVER, SIGNAL = 3.1; EXPRESSED IN PLACENTA, SIGNAL = 3.4; EXPRESSED IN LUNG, SIGNAL = 2.8; EXPRESSED IN ADULT LIVER, SIGNAL =   3; NT HIT: gi14743325, EVALUE 0.00e+00; SWISSPROT HIT: P46875, EVALUE 1.70e+00; EST_HUMAN HIT: AU118757.1, EVALUE 0.00e+00
tttttgtgcttctctagccaggcagcactgtccgtcagaagacagaagttctcagtgaccaggaggtccagcaggctgtcgtggtcagcctctgcatacagtttgagcaaggctgtgtcgatgtcctccttgtagccatttgctacctctgtgctgcggacctcgttcaggtagctcatgaggaagcgtttgcacttggccatcttctcctggtccccctgggtcagctggttcaggt

SEQ ID NO: 14158 - DNA, 264 bp, Homo sapiens
  MAP TO AL137795.2; EXPRESSED IN HELA, SIGNAL = 2.2; EXPRESSED IN LUNG, SIGNAL = 4.4; EXPRESSED IN ADULT LIVER, SIGNAL = 4.9; EXPRESSED IN BONE MARROW, SIGNAL = 3.7; EXPRESSED IN BRAIN, SIGNAL = 3.5; EXPRESSED IN FETAL LIVER, SIGNAL = 3.7; EXPRESSED IN PLACENTA, SIGNAL = 5.1; EXPRESSED IN HEART, SIGNAL = 3.6; NT HIT: M90488.1, EVALUE 4.00e-03; EST_HUMAN HIT: BF344217.1, EVALUE 9.00e-02
aatggcagccctggtttcagaggagcctgggtctttgggaagaaaaggccattgtctccttggcaaaaaggtcaaaggagctgtctcctcctccttctcctcctttttcttctcctcttcttctcccttctcctcctcctctctcttctcttccttccctgcctcctcttcattttcccctctcctggtcctcttcctcctcctcatctccctactccttctcctcctcttcttcctcatgtttgtcctcctctatctcctcct

SEQ ID NO: 14159 - DNA, 77 bp, Homo sapiens
  MAP TO CHR22_35.0; EXPRESSED IN HELA, SIGNAL = 1.2; EXPRESSED IN PLACENTA, SIGNAL = 1.6; EXPRESSED IN ADULT LIVER, SIGNAL = 1.5; EXPRESSED IN LUNG, SIGNAL = 1.3; EXPRESSED IN BONE MARROW, SIGNAL = 1.2; EXPRESSED IN BRAIN, SIGNAL = 1.2; NT HIT: AL163201.2, EVALUE 1.00e-33; EST_HUMAN HIT: BI462624.1, EVALUE 8.50e-02
agatgtggcccaagcacatctttggacgtgaatcagggcaacccaaggcagagctggatttctgggagtttctccct

SEQ ID NO: 14160 - DNA, 197 bp, Homo sapiens
  MAP TO AC012348.4; EXPRESSED IN FETAL LIVER, SIGNAL = 2.3; EXPRESSED IN BONE MARROW, SIGNAL = 2.6; EXPRESSED IN HEART, SIGNAL =   2; EXPRESSED IN PLACENTA, SIGNAL = 2.6; EXPRESSED IN LUNG, SIGNAL = 2.4; EXPRESSED IN HELA, SIGNAL = 1.1; EXPRESSED IN BRAIN, SIGNAL = 2.2; EXPRESSED IN ADULT LIVER, SIGNAL = 2.6; EST_HUMAN HIT: BG119134.1, EVALUE 4.10e+00; SWISSPROT HIT: Q19272, EVALUE 3.20e+00; NT HIT: AF019116.1, EVALUE 2.70e+00
ttgtgctattcggaaacaagggtccatccctccatagaaataagactaagtatgtgttattaaggtagtggtctgcaatgctgatatcttggctttccaagtgatactcacagcatgaatatatggatacatggcagatttgcttcagggagtggctgtccaggccgtgtgcttttggaggtggtgagctcttgatg

SEQ ID NO: 14161 - DNA, 119 bp, Homo sapiens
  MAP TO CHR21_26.0; EXPRESSED IN PLACENTA, SIGNAL = 2.1; EXPRESSED IN ADULT LIVER, SIGNAL = 2.2; EXPRESSED IN LUNG, SIGNAL = 2.2; EXPRESSED IN BONE MARROW, SIGNAL = 2.8; EXPRESSED IN BRAIN, SIGNAL = 2.2; EXPRESSED IN HELA, SIGNAL = 4.2; EXPRESSED IN FETAL LIVER, SIGNAL = 2.4; EXPRESSED IN HEART, SIGNAL = 1.7; EST_HUMAN HIT: AW026528.1, EVALUE 2.00e-22; NT HIT: AJ229043.1, EVALUE 1.00e-19
aaacgtagctccttctcgtgctgttaacatcgttctcgaacagctgttcgcggaagattcatttgatgaatctgatttttccaaaatagatgattctcatgattcagatgattctgatg

SEQ ID NO: 14162 - DNA, 154 bp, Homo sapiens
  MAP TO AL138784.1; EXPRESSED IN FETAL LIVER, SIGNAL = 8.1; EXPRESSED IN LUNG, SIGNAL =  10; EXPRESSED IN PLACENTA, SIGNAL = 9.3; EXPRESSED IN ADULT LIVER, SIGNAL =  10; EXPRESSED IN BONE MARROW, SIGNAL = 9.5; EXPRESSED IN HELA, SIGNAL =   6; EXPRESSED IN BRAIN, SIGNAL = 7.2; EXPRESSED IN HEART, SIGNAL = 5.9; EST_HUMAN HIT: BE168273.1, EVALUE 2.00e-81; NT HIT: gi7705416, EVALUE 1.00e-81
tcctttttggtttcctcagaagacttattttcttccttctcttcattctcaggttccccctttggctgctctgcctcactcgaagtagcaggtggagtttcattctcttgttcttctacagtggagacagattcctctgaacttatgtctggtt

SEQ ID NO: 14163 - DNA, 130 bp, Homo sapiens
  MAP TO AC016683.4; EXPRESSED IN BONE MARROW, SIGNAL = 3.5; EXPRESSED IN BRAIN, SIGNAL = 3.8; EXPRESSED IN HELA, SIGNAL =   2; EXPRESSED IN PLACENTA, SIGNAL = 4.2; EXPRESSED IN LUNG, SIGNAL =   4; EXPRESSED IN FETAL LIVER, SIGNAL = 4.1; EXPRESSED IN ADULT LIVER, SIGNAL = 3.4; SWISSPROT HIT: Q9R0S3, EVALUE 1.20e+00; EST_HUMAN HIT: BG402095.1, EVALUE 1.60e-01; NT HIT: X16183.1, EVALUE 6.80e+00
tcaggtctcagctcttaagattttcttctgggattccaagacagtgtcctctgctgcttctttccgctggctggactctgcctgtaattcaggcaggagccaccaggtggagaaatgtgtagatgacatc

SEQ ID NO: 14164 - DNA, 220 bp, Homo sapiens
  MAP TO AC024066.3; EXPRESSED IN BONE MARROW, SIGNAL = 1.2; EXPRESSED IN HEART, SIGNAL = 1.2; EXPRESSED IN PLACENTA, SIGNAL = 1.3; EXPRESSED IN LUNG, SIGNAL = 1.3; EXPRESSED IN ADULT LIVER, SIGNAL = 1.3; EXPRESSED IN HELA, SIGNAL = 0.95; EXPRESSED IN BRAIN, SIGNAL = 1.3; EXPRESSED IN FETAL LIVER, SIGNAL = 1.3; SWISSPROT HIT: P45052, EVALUE 1.60e-01; EST_HUMAN HIT: BG535374.1, EVALUE 1.00e-120; NT HIT: gi14784786, EVALUE 1.00e-121
catgaattcgatgacttcagcagttccggtggccaattctgtgttggtggtggcaccccacaatggttatcctgtgaccccaggaattatgtctcacgtgcccctgtatccaaacagccagccgcaagtccacctagttcctgggaacccacctagtttggtgtcgaatgtgaatgggcagcctgtgcagaaagctctgaaagaaggcaaaaccttgggg

SEQ ID NO: 14165 - DNA, 79 bp, Homo sapiens
  MAP TO AL137009.2; EXPRESSED IN FETAL LIVER, SIGNAL = 3.8; EXPRESSED IN BONE MARROW, SIGNAL = 3.7; EXPRESSED IN HEART, SIGNAL = 2.9; EXPRESSED IN BRAIN, SIGNAL = 2.8; EXPRESSED IN LUNG, SIGNAL = 3.9; EXPRESSED IN ADULT LIVER, SIGNAL = 4.7; NT HIT: gi14757431, EVALUE 4.00e-37; SWISSPROT HIT: P33908, EVALUE 2.00e-09; EST_HUMAN HIT: AW148453.1, EVALUE 5.00e-37
ctaatattttctgacgacgatcttcttccactggagcattggatcttcaatagcgaggcacatcttctccctatcctcc

SEQ ID NO: 14166 - DNA, 138 bp, Homo sapiens
  MAP TO CHR22_216.0; EXPRESSED IN LUNG, SIGNAL = 1.3; EXPRESSED IN BONE MARROW, SIGNAL =   2; EXPRESSED IN BRAIN, SIGNAL = 1.7; EXPRESSED IN PLACENTA, SIGNAL = 0.99; EXPRESSED IN ADULT LIVER, SIGNAL = 1.3; EXPRESSED IN HELA, SIGNAL = 3.9
aatgattcttcttcttcttgttaatatgattcttcttcttcttcttcttcttcttcttcttcttcttcttcttcttcttcttcttctcttcttcttcttcctcttcttcttcttcttcttcttcttcttcttcttctt

SEQ ID NO: 14167 - DNA, 116 bp, Homo sapiens
  MAP TO AC018715.3; EXPRESSED IN BONE MARROW, SIGNAL = 0.69; EXPRESSED IN BRAIN, SIGNAL = 0.85; EXPRESSED IN FETAL LIVER, SIGNAL = 0.71; EXPRESSED IN PLACENTA, SIGNAL = 0.88; EXPRESSED IN LUNG, SIGNAL = 0.75; EXPRESSED IN ADULT LIVER, SIGNAL = 0.67; SWISSPROT HIT: P28669, EVALUE 3.50e+00; EST_HUMAN HIT: BI752346.1, EVALUE 1.40e-01
atggtagctctaaggaagacagcagcaatactcaaggtacagccattcttctggaacaagtcccaccaatctgaagctggagtcaatggtggtgacagtggtgacattgcagaaaa

SEQ ID NO: 14168 - DNA, 254 bp, Homo sapiens
  MAP TO AC022263.3; EXPRESSED IN PLACENTA, SIGNAL = 1.4; EXPRESSED IN BONE MARROW, SIGNAL = 1.3; EXPRESSED IN HEART, SIGNAL = 1.4; EXPRESSED IN ADULT LIVER, SIGNAL = 1.5; EXPRESSED IN BRAIN, SIGNAL = 1.5; EXPRESSED IN HELA, SIGNAL = 0.62; EXPRESSED IN FETAL LIVER, SIGNAL = 1.1; NT HIT: AL163303.2, EVALUE 1.00e-12; SWISSPROT HIT: O43747, EVALUE 1.50e+00; EST_HUMAN HIT: AW991989.1, EVALUE 2.00e-36
gtcatgattcctttgatggatctgggcaaagtcaattggaaaccttctggaaaggattcactatggtagatgccactaagaacatttatgattcaccagaggaggtaaaaatagcagcattaataggagtttgtaagaagttgattctgaccctcataaatgactttgaggggttcaagaccttagcagaggaagtaaccacagttgtggtgaagatagcaagagaactagaattacaagtggagcctgaagat

SEQ ID NO: 14169 - DNA, 106 bp, Homo sapiens
  MAP TO AC011225.5; EXPRESSED IN BONE MARROW, SIGNAL = 0.42; EXPRESSED IN BRAIN, SIGNAL = 0.49; EXPRESSED IN PLACENTA, SIGNAL = 0.63; EXPRESSED IN LUNG, SIGNAL = 0.71; EXPRESSED IN ADULT LIVER, SIGNAL = 0.67; EXPRESSED IN FETAL LIVER, SIGNAL = 0.5; EST_HUMAN HIT: BI062345.1, EVALUE 5.00e-01; NT HIT: AB031070.1, EVALUE 1.30e+00
atgagagcactgagaatgaagctacatttcagactccacaggtcctgctccccagtcttgagtgcatcacagtatgcctggagaggcactgctttcctgacctctg

SEQ ID NO: 14170 - DNA, 87 bp, Homo sapiens
  MAP TO AC018678.5; EXPRESSED IN BONE MARROW, SIGNAL = 0.84; EXPRESSED IN LUNG, SIGNAL = 0.88; EXPRESSED IN BRAIN, SIGNAL = 0.93; EXPRESSED IN ADULT LIVER, SIGNAL = 7.7; EXPRESSED IN FETAL LIVER, SIGNAL =   7; EST_HUMAN HIT: AV684166.1, EVALUE 2.50e-02; NT HIT: X58452.1, EVALUE 6.80e-02
aaagaaaacaaagttgaaagcaaactttaaattaaatttgcacaagcagttatcatcactgccctcagaagaaccattattaaactg

SEQ ID NO: 14171 - DNA, 140 bp, Homo sapiens
  MAP TO AL138691.2; EXPRESSED IN BONE MARROW, SIGNAL = 0.48; EXPRESSED IN BRAIN, SIGNAL = 0.88; EXPRESSED IN FETAL LIVER, SIGNAL = 0.43; EXPRESSED IN ADULT LIVER, SIGNAL = 0.65; EXPRESSED IN PLACENTA, SIGNAL = 0.6; SWISSPROT HIT: O88799, EVALUE 2.60e+00; EST_HUMAN HIT: H52681.1, EVALUE 4.50e-02; NT HIT: gi14861871, EVALUE 2.00e-03
tgagctcctgcacagacagcaaagcatgcagttgtaccacctcctcatctcccagggacacccctacggcattgtgcagagatgcattctcaacagaggggattggctggcaaaggcagagtgcaccaaagaactggaaa

SEQ ID NO: 14172 - DNA, 525 bp, Homo sapiens
  MAP TO AL133418.2; EXPRESSED IN PLACENTA, SIGNAL =  25; EXPRESSED IN LUNG, SIGNAL =  25; EXPRESSED IN HELA, SIGNAL =  12; EXPRESSED IN FETAL LIVER, SIGNAL =  21; EXPRESSED IN ADULT LIVER, SIGNAL =  23; EXPRESSED IN HEART, SIGNAL =  17; EXPRESSED IN BONE MARROW, SIGNAL =  23; EXPRESSED IN BRAIN, SIGNAL =  19; SWISSPROT HIT: P29374, EVALUE 8.00e-05; EST_HUMAN HIT: BF058966.1, EVALUE 0.00e+00; NT HIT: AF083249.1, EVALUE 0.00e+00
ctttttcaggatgttctggttctggctgattactactgcttgagctcacactggcatcaaaacctgctggcgagctattcccttcagactggaggtcttggagctccccagcaacactatccacctcaattgtgctatcagtttcactcttgatacttcgaacctcttcttggtttggagccagtggttctgatactgttacagaagactgctgccggctgccttctgttacagtgactgatgaaggcgattcaggtgtagtaggaggggtatttagcactgaattactgccactacttggaaattctgcttttctgtcattgacctctactgttttttcttcaatgggtttactatcgacattgactggaggtggtttttctagttctacactgggtgaacaactctcctcttcagccacagtctgcagtgactcctctgccaccccctcctctggggcaggatgcggtggggaagctgcagcctcagtatcagagtctgaaaaaagctctttcagcgtttttt

SEQ ID NO: 14173 - DNA, 166 bp, Homo sapiens
  MAP TO AC022579.3; EXPRESSED IN FETAL LIVER, SIGNAL = 3.6; EXPRESSED IN HEART, SIGNAL = 3.1; EXPRESSED IN PLACENTA, SIGNAL = 3.7; EXPRESSED IN LUNG, SIGNAL = 3.5; EXPRESSED IN BONE MARROW, SIGNAL = 3.6; EXPRESSED IN HELA, SIGNAL = 1.9; EXPRESSED IN BRAIN, SIGNAL = 3.2; EXPRESSED IN ADULT LIVER, SIGNAL = 3.7; SWISSPROT HIT: Q91684, EVALUE 8.70e-01; EST_HUMAN HIT: BF923605.1, EVALUE 2.00e-88; NT HIT: AB011128.2, EVALUE 1.00e-88
gttaattgatggcaccaacatcaccatggaggatgagcatatgtggctgatccccttctcgccggggctggaccatgtggtcacgatccgcctggacagggccgaaagcatcgcaggcctgcgcttctggaactacaataaatctcccgaggacacctatcgcggg

SEQ ID NO: 14174 - DNA, 93 bp, Homo sapiens
  MAP TO AL137185.3; EXPRESSED IN HEART, SIGNAL = 3.8; EXPRESSED IN LUNG, SIGNAL = 5.9; EXPRESSED IN PLACENTA, SIGNAL =   5; EXPRESSED IN ADULT LIVER, SIGNAL = 5.6; EXPRESSED IN FETAL LIVER, SIGNAL = 4.3; EXPRESSED IN BONE MARROW, SIGNAL = 4.6; EXPRESSED IN HELA, SIGNAL = 3.5; EXPRESSED IN BRAIN, SIGNAL = 4.4; EST_HUMAN HIT: AA131942.1, EVALUE 1.10e-01; NT HIT: AF308810.1, EVALUE 4.50e+00
gcccagtgatcaacattgataaccttctggtttggaaaaggttgaattcgaccattgccattaattccttagttcagaggaactctctgatgg

SEQ ID NO: 14175 - DNA, 95 bp, Homo sapiens
  MAP TO AL137855.1; EXPRESSED IN PLACENTA, SIGNAL = 2.2; EXPRESSED IN LUNG, SIGNAL = 2.9; EXPRESSED IN HELA, SIGNAL = 1.6; EXPRESSED IN BRAIN, SIGNAL = 1.9; EXPRESSED IN ADULT LIVER, SIGNAL = 2.2; EXPRESSED IN FETAL LIVER, SIGNAL =   2; EXPRESSED IN HEART, SIGNAL = 1.8; EXPRESSED IN BONE MARROW, SIGNAL = 2.1; NT HIT: Z46771.1, EVALUE 1.20e+00; EST_HUMAN HIT: AA226498.1, EVALUE 1.70e+00
ttcttaatcaacttcttcttgtctggattcacctttatttcttccaagtgccgctctctctcctctagaagggaatttatgctctcttctagcat

SEQ ID NO: 14176 - DNA, 208 bp, Homo sapiens
  MAP TO CHR22_179.0; EXPRESSED IN BRAIN, SIGNAL = 0.84; EXPRESSED IN PLACENTA, SIGNAL = 1.1; EXPRESSED IN ADULT LIVER, SIGNAL = 1.2; EXPRESSED IN LUNG, SIGNAL = 1.1; EXPRESSED IN FETAL LIVER, SIGNAL = 0.91; EXPRESSED IN BONE MARROW, SIGNAL = 0.94; NT HIT: gi15317879, EVALUE 1.00e-111; SWISSPROT HIT: P34391, EVALUE 5.00e-03; EST_HUMAN HIT: BE391170.1, EVALUE 1.00e-111
ctgcttggtcattcagctggttgtagctcaggtccagggacttcaggtctgtgtgggccagcaggagttcggcaaggtgctgggccgcctgctcctccaggccattccctgacagctgcatcttccgcatggcctggttcactgtgagggcggcacagagggcctgggctcctgccactcccagctggttctccgacaggtccacatc

SEQ ID NO: 14177 - DNA, 96 bp, Homo sapiens
  MAP TO AL138843.2; EXPRESSED IN HEART, SIGNAL = 5.2; EXPRESSED IN PLACENTA, SIGNAL = 6.8; EXPRESSED IN BONE MARROW, SIGNAL = 6.1; EXPRESSED IN LUNG, SIGNAL = 6.8; EXPRESSED IN BRAIN, SIGNAL = 5.4; EXPRESSED IN HELA, SIGNAL = 3.7; EXPRESSED IN ADULT LIVER, SIGNAL = 7.2; EXPRESSED IN FETAL LIVER, SIGNAL =   6; EST_HUMAN HIT: AW589952.1, EVALUE 5.00e-47; NT HIT: gi14733037, EVALUE 3.00e-47; SWISSPROT HIT: Q9UL18, EVALUE 8.00e-11
attgtgcgtaaggtatcttggtgaatctgtacagccttggcaagagcttgtggatctcgcccattgctttgtcctgaaacgtgacttccttcagca

SEQ ID NO: 14178 - DNA, 87 bp, Homo sapiens
  MAP TO AC019277.4; EXPRESSED IN BONE MARROW, SIGNAL = 0.49; EXPRESSED IN PLACENTA, SIGNAL = 0.64; EXPRESSED IN LUNG, SIGNAL = 0.47; EXPRESSED IN BRAIN, SIGNAL = 0.56; EXPRESSED IN ADULT LIVER, SIGNAL = 0.53; EST_HUMAN HIT: AW063564.1, EVALUE 5.00e-25; NT HIT: AF288742.1, EVALUE 6.00e-27
gcagttacttcctccactgaagtctttaacctctcaaagtcatccatgagggttggaatcaacttcttccaaactccagttaatgtc

SEQ ID NO: 14179 - DNA, 267 bp, Homo sapiens
  MAP TO AL138996.1; EXPRESSED IN HELA, SIGNAL = 1.4; EXPRESSED IN PLACENTA, SIGNAL = 2.5; EXPRESSED IN BRAIN, SIGNAL =   2; EXPRESSED IN ADULT LIVER, SIGNAL = 2.3; EXPRESSED IN LUNG, SIGNAL = 2.2; EXPRESSED IN HEART, SIGNAL = 1.6; EXPRESSED IN FETAL LIVER, SIGNAL = 1.9; EXPRESSED IN BONE MARROW, SIGNAL =   2; SWISSPROT HIT: P54971, EVALUE 7.20e-01
atgggcttagttactgtggtctttgttaatgagaatgagaatactcctaatgttaccatcattatcatcacccatagaatatatttgggagaggcaaagatggaagtggtgggcctgaagggcatattgtggcagcaactctgcccacctgtggactccaggggtgatatggacacagggacaagggcaggtcccctgggacaggcagctgcggtagactcatctgtgcacttccacagtgtatctgtgtccgtttacttcagcatc

SEQ ID NO: 14180 - DNA, 166 bp, Homo sapiens
  MAP TO AL137846.1; EXPRESSED IN BRAIN, SIGNAL = 0.45; EXPRESSED IN ADULT LIVER, SIGNAL = 0.56; EXPRESSED IN FETAL LIVER, SIGNAL = 0.53; EXPRESSED IN PLACENTA, SIGNAL = 0.62; EXPRESSED IN LUNG, SIGNAL = 0.5; EXPRESSED IN BONE MARROW, SIGNAL = 0.44; EST_HUMAN HIT: BE880044.1, EVALUE 2.10e-01; NT HIT: AE006621.1, EVALUE 5.70e-01; SWISSPROT HIT: P06182, EVALUE 6.60e-01
cagatcatccctaacactgagtattatcattacagaaaaggtctttgtcagacctgatggccccatggacacagttctgtcctcctcttgcttgctggagtctgtggtgctggactcaggtgctctccctgcatctccgggcactctgatcttggcggctgtgatg

SEQ ID NO: 14181 - DNA, 235 bp, Homo sapiens
  MAP TO CHR22_128.0; EXPRESSED IN BRAIN, SIGNAL = 1.1; EXPRESSED IN HEART, SIGNAL = 1.2; EXPRESSED IN HELA, SIGNAL = 1.1; EXPRESSED IN LUNG, SIGNAL = 1.4; EXPRESSED IN ADULT LIVER, SIGNAL = 1.4; EXPRESSED IN FETAL LIVER, SIGNAL = 1.1; EXPRESSED IN BONE MARROW, SIGNAL = 1.2; NT HIT: gi4506222, EVALUE 8.40e-01; SWISSPROT HIT: P04352, EVALUE 1.00e-02
taagtatgtacaacatacagcacctgagccaacacgtcctgaaactgttctcgtgtgagcggcatcaggaagtctgtgatgattcttctcagttcactttttgacacagtcaagttctgaccagtatccagcagctgaaaggctttttgcaactcatcccctctgtcggtaattttttgaaataaaatccgtttaacatctaaggaggacagtgttggatttgcaacagctgtgg

SEQ ID NO: 14182 - DNA, 159 bp, Homo sapiens
  MAP TO AC021609.3; EXPRESSED IN PLACENTA, SIGNAL = 0.48; EXPRESSED IN LUNG, SIGNAL = 0.67; EXPRESSED IN BONE MARROW, SIGNAL = 0.45; EXPRESSED IN BRAIN, SIGNAL = 0.68; SWISSPROT HIT: Q08462, EVALUE 4.00e-17; EST_HUMAN HIT: R15999.1, EVALUE 7.00e-60; NT HIT: gi16159207, EVALUE 5.00e-60
gagcccgagcggcagtacatgcacattggcaccatggtggagtttgcttttgccctggtagggaagctggatgccatcaacaagcactccttcaacgacttcaaattgcgagtgggtacgttctgcaaaagaggtctcggtttcagttgtggcaaagat

SEQ ID NO: 14183 - DNA, 141 bp, Homo sapiens
  MAP TO AL136134.1; EXPRESSED IN HEART, SIGNAL = 1.5; EXPRESSED IN PLACENTA, SIGNAL = 2.1; EXPRESSED IN BONE MARROW, SIGNAL = 2.2; EXPRESSED IN BRAIN, SIGNAL = 1.7; EXPRESSED IN LUNG, SIGNAL = 2.4; EXPRESSED IN ADULT LIVER, SIGNAL = 2.4; EXPRESSED IN HELA, SIGNAL = 1.4; EXPRESSED IN FETAL LIVER, SIGNAL =   2; SWISSPROT HIT: P51813, EVALUE 7.70e+00; EST_HUMAN HIT: BE076232.1, EVALUE 7.00e-01; NT HIT: AY014963.1, EVALUE 4.80e-01
atgctgatcatgacctgggttctgggtgggaagatcatccctgaaatgtgccagggaaagaaggtcccgagtcccatcagcctaggaaatggccctgtcagtgtgaagagggccaaggtcatgactaggaaggcaaacaag

SEQ ID NO: 14184 - DNA, 207 bp, Homo sapiens
  MAP TO AC018709.5; EXPRESSED IN BRAIN, SIGNAL = 1.1; EXPRESSED IN PLACENTA, SIGNAL = 1.2; EXPRESSED IN LUNG, SIGNAL = 1.4; EXPRESSED IN FETAL LIVER, SIGNAL = 1.1; EXPRESSED IN BONE MARROW, SIGNAL = 1.1; EXPRESSED IN ADULT LIVER, SIGNAL = 1.2; NT HIT: AF060568.1, EVALUE 7.30e-01; SWISSPROT HIT: Q05470, EVALUE 7.20e+00; EST_HUMAN HIT: BF085070.1, EVALUE 2.70e-01
ctgctctccatgccgcagctgcagctgtgttgtccgggtcacttccaagatgctgctgctgctgctgctgctgcaggacagggctgcagaggctcccctttcttctgcagcctcttctgagttcgggccctgagcccattgctttgatcccgccacaaaggccacacttctgctaggctcatttccaagcttgcatgctgccagcat

SEQ ID NO: 14185 - DNA, 113 bp, Homo sapiens
  MAP TO CHR22_205.0; EXPRESSED IN BONE MARROW, SIGNAL = 1.7; EXPRESSED IN BRAIN, SIGNAL = 1.7; EXPRESSED IN HELA, SIGNAL =   2; EXPRESSED IN FETAL LIVER, SIGNAL = 1.7; EXPRESSED IN HEART, SIGNAL = 2.1; EXPRESSED IN ADULT LIVER, SIGNAL = 3.2; EST_HUMAN HIT: BF115674.1, EVALUE 8.00e-37; NT HIT: gi14724243, EVALUE 1.00e-34; SWISSPROT HIT: P17317, EVALUE 3.00e-10
ttacatagtcttctgttgttctttcttcccaatcagagacttgcgaatgtgtggaatgacaccatcaccagcaattgtagccttgatgagagagtccaattcttcttcttcac

SEQ ID NO: 14186 - DNA, 140 bp, Homo sapiens
  MAP TO AL138893.2; EXPRESSED IN BRAIN, SIGNAL = 6.3; EXPRESSED IN HEART, SIGNAL =   5; EXPRESSED IN PLACENTA, SIGNAL = 7.9; EXPRESSED IN LUNG, SIGNAL = 7.8; EXPRESSED IN ADULT LIVER, SIGNAL = 7.1; EXPRESSED IN FETAL LIVER, SIGNAL =   6; EXPRESSED IN BONE MARROW, SIGNAL = 6.5; EST_HUMAN HIT: AI208733.1, EVALUE 4.00e-27; NT HIT: AF020503.1, EVALUE 7.00e-28; SWISSPROT HIT: P56163, EVALUE 2.30e-01
tcaggatgtgctccagaagaaggcattgttatcacagtagatgacagctccatgcgtgctgttgcccttcaagaccttccggtgggacaagctgtggaggtggaagacagtgatattgattatgttggccccgtgtaggc

SEQ ID NO: 14187 - DNA, 129 bp, Homo sapiens
  MAP TO AL137800.2; EXPRESSED IN FETAL LIVER, SIGNAL =   2; EXPRESSED IN PLACENTA, SIGNAL = 3.1; EXPRESSED IN LUNG, SIGNAL = 2.4; EXPRESSED IN ADULT LIVER, SIGNAL = 2.3; EXPRESSED IN BONE MARROW, SIGNAL = 2.2; EXPRESSED IN BRAIN, SIGNAL =   2; EST_HUMAN HIT: AI695679.1, EVALUE 1.00e-66; NT HIT: U22681.1, EVALUE 4.30e-01
ttgatttcagatgctcctctgatttcaagttttcggtcctcatctgggacttaaatgaaacgttttctcccacaatgactatctgcaagaacatccaatttctcataaggtagaatggtttaagacatt

SEQ ID NO: 14188 - DNA, 138 bp, Homo sapiens
  MAP TO AL138752.2; EXPRESSED IN BONE MARROW, SIGNAL = 2.4; EXPRESSED IN ADULT LIVER, SIGNAL = 3.4; EXPRESSED IN HELA, SIGNAL = 2.4; EXPRESSED IN BRAIN, SIGNAL = 2.3; EXPRESSED IN FETAL LIVER, SIGNAL = 2.7; EXPRESSED IN PLACENTA, SIGNAL = 3.2; EXPRESSED IN LUNG, SIGNAL = 3.7; EST_HUMAN HIT: AA495721.1, EVALUE 7.00e-72; NT HIT: gi4506934, EVALUE 5.00e-72; SWISSPROT HIT: Q05904, EVALUE 7.70e+00
gagcaaccagggttttatgcacatgaaactggccaaaaccaaagagaaatacgttctgggtcagaacagccctccgttcgacagtgtcccggaagtcatccactactacaccaccagaaagctacccatcaaaggggc

SEQ ID NO: 14189 - DNA, 148 bp, Homo sapiens
  MAP TO AC015833.3; EXPRESSED IN HELA, SIGNAL = 1.1; EXPRESSED IN BRAIN, SIGNAL = 1.4; EXPRESSED IN FETAL LIVER, SIGNAL = 1.5; EXPRESSED IN HEART, SIGNAL = 1.2; EXPRESSED IN LUNG, SIGNAL = 1.3; EXPRESSED IN BONE MARROW, SIGNAL = 1.4; EXPRESSED IN PLACENTA, SIGNAL = 1.7; EST_HUMAN HIT: BG828271.1, EVALUE 2.90e+00; NT HIT: AF036170.1, EVALUE 5.00e-04
ggctgactccagagtcaacaatggctatgttctacattcccaaactgaccctgaaacaaacttgggctttgtgttgctgttgttggtaatggtggtggtaatggtggaagttcacatgtgtgtgtattttaaaagagaagagatgacc

SEQ ID NO: 14190 - DNA, 192 bp, Homo sapiens
  MAP TO AL135786.2; EXPRESSED IN BONE MARROW, SIGNAL = 1.3; EXPRESSED IN PLACENTA, SIGNAL = 1.3; EXPRESSED IN LUNG, SIGNAL = 1.3; EXPRESSED IN ADULT LIVER, SIGNAL = 1.9; EXPRESSED IN BRAIN, SIGNAL = 0.99; EXPRESSED IN HELA, SIGNAL = 1.7; EXPRESSED IN FETAL LIVER, SIGNAL = 1.5; EST_HUMAN HIT: AW271805.1, EVALUE 2.00e-57; SWISSPROT HIT: Q13049, EVALUE 7.40e-02
gcacccactgccgggaagtctgatgaagaccggcatgtgctccgaagcgtgtggaatggtgatgacagccaggacctcggggtcgtcgaggagctgcgacacggagaagtcagggggcagcttggtgacaccgctgcaccaggggcatcgcacatccttctggctggtcctcgtctgctggaggcaaactga

SEQ ID NO: 14191 - DNA, 211 bp, Homo sapiens
  MAP TO AL137798.1; EXPRESSED IN BRAIN, SIGNAL = 0.77; EXPRESSED IN PLACENTA, SIGNAL = 0.67; EXPRESSED IN ADULT LIVER, SIGNAL = 1.4; EXPRESSED IN FETAL LIVER, SIGNAL = 0.56; EXPRESSED IN BONE MARROW, SIGNAL = 0.7; NT HIT: gi16161785, EVALUE 6.00e-88; EST_HUMAN HIT: BF156010.1, EVALUE 1.00e-98; SWISSPROT HIT: P80667, EVALUE 2.40e+00
gaatctgcaggagtctgaagaggaggaagtcccccaggagtcctgggatgaaggttattcgactctctcaattcctcctgaaatgttggcctcgtacaagtcttacagcggcacatttcactcattagaggaacagcaagtctgcatggctgttgacataggcggtgagtactccattgtgaaggtgataaagctccagttcatggcccag

SEQ ID NO: 14192 - DNA, 175 bp, Homo sapiens
  MAP TO AC015822.3; EXPRESSED IN FETAL LIVER, SIGNAL = 2.5; EXPRESSED IN LUNG, SIGNAL =   3; EXPRESSED IN BONE MARROW, SIGNAL = 2.6; EXPRESSED IN ADULT LIVER, SIGNAL = 3.9; EXPRESSED IN HELA, SIGNAL = 1.7; EXPRESSED IN BRAIN, SIGNAL = 2.8; SWISSPROT HIT: P08548, EVALUE 4.00e-11; NT HIT: L78810.1, EVALUE 8.00e-25; EST_HUMAN HIT: BE733662.1, EVALUE 8.00e-29
atgagatactgccacaaacctattagaatggccaaaattcagaaaactgacaacaaaaaatgctggcaaggatgtggagcaacaggaactatcattcattgctggtggtactgtgtccggaattggtgggttcttggtctcactgacttcaagaatgaagccgcggaccctcgca

SEQ ID NO: 14193 - DNA, 132 bp, Homo sapiens
  MAP TO AL132765.16; EXPRESSED IN BONE MARROW, SIGNAL = 1.5; EXPRESSED IN LUNG, SIGNAL = 2.3; EXPRESSED IN HELA, SIGNAL = 3.4; EXPRESSED IN PLACENTA, SIGNAL =   2; EXPRESSED IN HEART, SIGNAL = 2.3; EXPRESSED IN ADULT LIVER, SIGNAL = 2.3; EXPRESSED IN BRAIN, SIGNAL = 1.7; EXPRESSED IN FETAL LIVER, SIGNAL = 2.1
gttggaagaaagaagaagaagaagaagaaggagaaggagaaggagaaggggaaggggaaggggaaggggaagaagaagaagacagagaaagagaaggaggagagggggaggtggagggagaggatgatctga

SEQ ID NO: 14194 - DNA, 104 bp, Homo sapiens
  MAP TO AL035464.20; EXPRESSED IN FETAL LIVER, SIGNAL = 0.47; EXPRESSED IN LUNG, SIGNAL = 0.67; EXPRESSED IN BONE MARROW, SIGNAL = 0.46; EXPRESSED IN BRAIN, SIGNAL = 0.41; NT HIT: gi14764116, EVALUE 1.30e+00; EST_HUMAN HIT: BE044185.1, EVALUE 9.00e-52; SWISSPROT HIT: Q08378, EVALUE 3.10e-01
gtgattaaacgcctacaaaaggaaatccaggaactgaaggatgaactggccatggtcactggggagcagaggacagaggcactcacagaagcagagctccttca

SEQ ID NO: 14195 - DNA, 176 bp, Homo sapiens
  MAP TO CHR22_82.0; EXPRESSED IN BONE MARROW, SIGNAL = 2.6; EXPRESSED IN ADULT LIVER, SIGNAL = 2.3; EXPRESSED IN HELA, SIGNAL = 5.5; EXPRESSED IN PLACENTA, SIGNAL = 2.2; EXPRESSED IN LUNG, SIGNAL = 2.3; EXPRESSED IN BRAIN, SIGNAL = 2.2; EXPRESSED IN FETAL LIVER, SIGNAL = 2.4; EXPRESSED IN HEART, SIGNAL = 1.9; NT HIT: AY052041.1, EVALUE 1.60e-01; SWISSPROT HIT: P79005, EVALUE 1.10e+00
gaaccaaaaatgtggatttttatgggaaagttttcaatttgtagaacatttgagggccaagcacaactcgcttgccaatcaccctttgcaactgctagcgtcataaataataaacacaccactggtaatgacagcacccgacatttgtcaagtgctcactgtgtgccggcacctcg

SEQ ID NO: 14196 - DNA, 235 bp, Homo sapiens
  MAP TO AL139177.1; EXPRESSED IN PLACENTA, SIGNAL = 1.9; EXPRESSED IN BONE MARROW, SIGNAL = 1.2; EXPRESSED IN LUNG, SIGNAL = 1.6; EXPRESSED IN BRAIN, SIGNAL = 1.1; EXPRESSED IN HELA, SIGNAL =   1; EXPRESSED IN FETAL LIVER, SIGNAL = 1.3; EST_HUMAN HIT: BF853254.1, EVALUE 3.00e-72; NT HIT: AF216205.1, EVALUE 2.10e-01; SWISSPROT HIT: P46939, EVALUE 1.20e+00
cttcagctcatggatcagacttctggtttggtataggctgaagcgctcctggcccttcactgcagatagcaggtggctggtgtcagtgaggaagcgaaacaagttctccacagaagtagtgaaatcttgccactgcctcaccagcccatcaacgtcacccttcctctgccgaacaccctggacagcattctgccaccgatccgtcagctttgagaattctgtaataaattctggt

SEQ ID NO: 14197 - DNA, 109 bp, Homo sapiens
  MAP TO AC015855.4; EXPRESSED IN FETAL LIVER, SIGNAL = 0.92; EXPRESSED IN ADULT LIVER, SIGNAL = 1.3; EXPRESSED IN BONE MARROW, SIGNAL = 0.89; EXPRESSED IN HELA, SIGNAL = 0.5; EXPRESSED IN BRAIN, SIGNAL = 0.87; EXPRESSED IN PLACENTA, SIGNAL = 1.2; EST_HUMAN HIT: Z45468.1, EVALUE 6.00e-53; NT HIT: gi14774731, EVALUE 2.00e-52; SWISSPROT HIT: O14653, EVALUE 1.00e-12
agtttggcattttgccttttgttagggggctccttgctggacaaaatctccagacgttctagacggctgaatatctggtctatgcttgcttggatttcgttttctacta

SEQ ID NO: 14198 - DNA, 171 bp, Homo sapiens
  MAP TO AC022263.3; EXPRESSED IN HELA, SIGNAL = 0.54; EXPRESSED IN BRAIN, SIGNAL = 1.2; EXPRESSED IN ADULT LIVER, SIGNAL = 5.1; SWISSPROT HIT: P09451, EVALUE 8.00e-06; EST_HUMAN HIT: BG708552.1, EVALUE 1.40e-02; NT HIT: gi14760622, EVALUE 2.30e+00
ggccagggctacccccacggcgtccagggttttatcccattcatctcatctgcaggtcctgcaaaagagcaggctgccacgctggctttgcatcttccagagatgcttggccagttcaccttccagagccatgtcatcgtggccaaagtagaagtccagagagatgccggt

SEQ ID NO: 14199 - DNA, 207 bp, Homo sapiens
  MAP TO CHR22_104.0; EXPRESSED IN BRAIN, SIGNAL = 2.2; EXPRESSED IN PLACENTA, SIGNAL = 3.1; EXPRESSED IN HELA, SIGNAL =   2; EXPRESSED IN ADULT LIVER, SIGNAL = 3.3; EXPRESSED IN LUNG, SIGNAL = 2.9; EXPRESSED IN FETAL LIVER, SIGNAL = 2.4; EXPRESSED IN BONE MARROW, SIGNAL = 2.4; EXPRESSED IN HEART, SIGNAL = 2.4; NT HIT: gi14249157, EVALUE 7.30e-01; EST_HUMAN HIT: AL544189.1, EVALUE 2.70e-01; SWISSPROT HIT: P53320, EVALUE 2.50e+00
aaccacattcacagcagtgtccagcaaccagcacccctgtgcaatcctctccagccatgttgcatcactcaccacaaagggcccactcctcctgtctttgcagaagctgtggcttctccagggaaccgaggccacaggggacacctgctggagcggtcgctccttctcctggggggcatcctccttctccaggtcccgtggcagcac

SEQ ID NO: 14200 - DNA, 107 bp, Homo sapiens
  MAP TO AL034373.13; EXPRESSED IN FETAL LIVER, SIGNAL = 1.5; EXPRESSED IN BONE MARROW, SIGNAL = 1.5; EXPRESSED IN HEART, SIGNAL = 1.6; EXPRESSED IN LUNG, SIGNAL = 1.9; EXPRESSED IN ADULT LIVER, SIGNAL = 1.8; EXPRESSED IN BRAIN, SIGNAL = 1.4; EXPRESSED IN PLACENTA, SIGNAL = 1.7; NT HIT: AF111167.2, EVALUE 9.00e-05; EST_HUMAN HIT: BF247143.1, EVALUE 5.10e-01; SWISSPROT HIT: P18500, EVALUE 6.10e+00
tttccaatatcttgttccttagtaccatctgcgatgtcataagaatggcctttgctttccatacttctatcaacattctgatcactcaagtaatctttaagaagttc

SEQ ID NO: 14201 - DNA, 16 bp, Homo sapiens
  MAP TO CHR22_212.0; EXPRESSED IN BRAIN, SIGNAL = 1.3; EXPRESSED IN HELA, SIGNAL = 3.4; EXPRESSED IN FETAL LIVER, SIGNAL = 1.5; EXPRESSED IN PLACENTA, SIGNAL = 0.95; EXPRESSED IN ADULT LIVER, SIGNAL =   1; EXPRESSED IN BONE MARROW, SIGNAL = 1.6; EXPRESSED IN LUNG, SIGNAL = 0.91; EST_HUMAN HIT: BF433017.1, EVALUE 3.60e-01
gttggcaatggataag

SEQ ID NO: 14202 - DNA, 129 bp, Homo sapiens
  MAP TO AL138781.2; EXPRESSED IN BRAIN, SIGNAL = 0.98; EXPRESSED IN FETAL LIVER, SIGNAL = 0.94; EXPRESSED IN BONE MARROW, SIGNAL = 0.95; EXPRESSED IN HEART, SIGNAL = 1.1; EXPRESSED IN LUNG, SIGNAL = 1.4; EXPRESSED IN ADULT LIVER, SIGNAL = 1.3; EXPRESSED IN PLACENTA, SIGNAL = 1.6; EST_HUMAN HIT: AL572813.1, EVALUE 2.50e+00; NT HIT: M81233.1, EVALUE 1.70e+00; SWISSPROT HIT: Q24957, EVALUE 7.80e+00
ctaaccgttcatttcagtgacaagaaggctccttcctccgtcaaccgtgtcattgccgcacccaagaagtccatgcccgtcgcgctgtccagcgtccagcccaccctcattgccacctgggagctgtag

SEQ ID NO: 14203 - DNA, 335 bp, Homo sapiens
  MAP TO AC011799.5; EXPRESSED IN FETAL LIVER, SIGNAL = 1.5; EXPRESSED IN HEART, SIGNAL = 1.4; EXPRESSED IN PLACENTA, SIGNAL = 1.8; EXPRESSED IN LUNG, SIGNAL = 1.9; EXPRESSED IN BONE MARROW, SIGNAL = 1.8; EXPRESSED IN ADULT LIVER, SIGNAL = 1.5; EXPRESSED IN HELA, SIGNAL = 0.99; EXPRESSED IN BRAIN, SIGNAL = 1.6; EST_HUMAN HIT: AI460041.1, EVALUE 2.00e-09; NT HIT: gi4885602, EVALUE 0.00e+00; SWISSPROT HIT: Q9Y6H5, EVALUE 2.00e-59
caggagagagatctgtccttctttaacaatgttcaagatgcttttcacttttttcagatactcactcctttcttctgggccttgggagctggtccggtttaggccactgacctgctcttctggtttggattctgctgctgaggattgtaggtggaaggccctgagctggcagtctggtgttgtcttctcaacttttcgaccatgaggatcactaaatgtcttgtttaggaagtctttactctggttttcaggctcatatgcagagccacatttaaccagaggaggtgagatctcggtttcttcagtggacagcttgtgctggtcgtggatgacag

SEQ ID NO: 14204 - DNA, 144 bp, Homo sapiens
  MAP TO AL133402.2; EXPRESSED IN BONE MARROW, SIGNAL = 2.4; EXPRESSED IN HEART, SIGNAL = 2.2; EXPRESSED IN ADULT LIVER, SIGNAL =   2; EXPRESSED IN HELA, SIGNAL = 1.6; EXPRESSED IN FETAL LIVER, SIGNAL = 2.4; EXPRESSED IN LUNG, SIGNAL = 2.9; EXPRESSED IN PLACENTA, SIGNAL = 2.8; EXPRESSED IN BRAIN, SIGNAL = 2.6; NT HIT: U88068.1, EVALUE 1.20e-01; SWISSPROT HIT: P94188, EVALUE 7.70e+00
ctttcccctcttcttctggttggatttcatgctgtctgggaggacacaaaacccccttgcacatttgtctttaatgaaggagaagttaaggaagatcattgtgtaagggtagagataaatgacgatggcaaaactcaaaaagaa

SEQ ID NO: 14205 - DNA, 277 bp, Homo sapiens
  MAP TO AL133408.3; EXPRESSED IN BONE MARROW, SIGNAL = 2.4; EXPRESSED IN LUNG, SIGNAL = 0.97; EXPRESSED IN PLACENTA, SIGNAL = 1.3; EXPRESSED IN BRAIN, SIGNAL =   3; EXPRESSED IN HELA, SIGNAL =   2; EXPRESSED IN FETAL LIVER, SIGNAL = 2.5; EXPRESSED IN HEART, SIGNAL = 2.4; EST_HUMAN HIT: AA577904.1, EVALUE 3.00e-20; NT HIT: AF196779.1, EVALUE 2.00e-36; SWISSPROT HIT: P79197, EVALUE 2.60e-01
gtggccttggggtgtgcacaccttgcagaggctcaggggctgtgggcttcgatgtggggagcctctcttcttggtaaggaggggcaccattggtgccatttctgccatgcatcctctgatgtggggtcggacagaaccgtaggagctgacttccctcggcgggtggagcaagacttttccttggctatctgtccctttgctactagtactgctgcagcctgtcctcttagccactgtgaggggtctaaaactagctgcaaccaagtatctatgtatg

SEQ ID NO: 14206 - DNA, 306 bp, Homo sapiens
  MAP TO CHR22_134.0; EXPRESSED IN FETAL LIVER, SIGNAL = 0.92; EXPRESSED IN LUNG, SIGNAL =   1; EXPRESSED IN BONE MARROW, SIGNAL = 0.9; EXPRESSED IN PLACENTA, SIGNAL = 1.1; EXPRESSED IN ADULT LIVER, SIGNAL = 1.1; EXPRESSED IN HELA, SIGNAL = 1.2; EXPRESSED IN BRAIN, SIGNAL = 0.82; SWISSPROT HIT: Q05315, EVALUE 2.00e-16; EST_HUMAN HIT: AI128445.1, EVALUE 5.00e-22; NT HIT: U67985.1, EVALUE 1.00e-15
gctgcaggtgcatttccacagggggacgatgagcactcagacatcgccttccatttctgagtgtactttggccattgggtgatcatgaacagccatgagtgtgggcctggaagtgtgaggagagatccaacaatatgcccgctgaggatggcagagtatttgagctccacatcatcgtgctggacaatgaataccaggcaatggtaaacggccatcactgttacacagctttgcccatcgactgctgccagggtctgtgaagatggtccaagtgtggagagatgtctccctgaactcaaggtgtgt

SEQ ID NO: 14207 - DNA, 314 bp, Homo sapiens
  MAP TO AL160314.1; EXPRESSED IN BRAIN, SIGNAL = 0.89; EXPRESSED IN HELA, SIGNAL = 2.3; EXPRESSED IN FETAL LIVER, SIGNAL = 0.95; EXPRESSED IN HEART, SIGNAL = 1.1; EXPRESSED IN PLACENTA, SIGNAL = 0.96; EXPRESSED IN LUNG, SIGNAL =   1; EXPRESSED IN ADULT LIVER, SIGNAL = 1.1; SWISSPROT HIT: P03344, EVALUE 4.00e-04; EST_HUMAN HIT: BE008018.1, EVALUE 2.00e-30; NT HIT: AJ271736.1, EVALUE 1.00e-62
aatgggggcctgtcatcactgcagaaatccaggatattggcgtagagaacattccaaacctccaggttacaaagctgcccccaggatcctgtcctcattgtaaacaagagggtcattggaacagcgagtgtccttctctccctcatgaggaggggccacctcctccttctgggccgtcgcagccacaacctcaccaacctacccaacaagggggtcctgcagaaagaggacaagggcaagggcaagcacaagcacctctaactctattcctggattatgatcgagcctctgaaagtcatcccctagatgactga

SEQ ID NO: 14208 - DNA, 141 bp, Homo sapiens
  MAP TO AL138788.1; EXPRESSED IN PLACENTA, SIGNAL = 0.97; EXPRESSED IN LUNG, SIGNAL = 0.89; EXPRESSED IN BRAIN, SIGNAL =   1; EXPRESSED IN HELA, SIGNAL = 0.82; EXPRESSED IN FETAL LIVER, SIGNAL = 0.72; SWISSPROT HIT: P23801, EVALUE 4.50e+00; EST_HUMAN HIT: AW896500.1, EVALUE 5.00e-48
ggtactttacatggataaagaaaataagcaattacaggaaaatagtcttcgtctcacacagcagattggcttcttagagcgaattataaggagcatccatattcgcagaggagaggtaagatgtgtgcttcctattgggcc

SEQ ID NO: 14209 - DNA, 82 bp, Homo sapiens
  MAP TO AC018735.5; EXPRESSED IN HEART, SIGNAL = 5.6; EXPRESSED IN ADULT LIVER, SIGNAL = 6.1; EXPRESSED IN BONE MARROW, SIGNAL = 7.3; EXPRESSED IN HELA, SIGNAL = 3.9; EXPRESSED IN LUNG, SIGNAL = 6.8; EXPRESSED IN PLACENTA, SIGNAL = 7.1; EXPRESSED IN FETAL LIVER, SIGNAL = 6.2; EXPRESSED IN BRAIN, SIGNAL = 6.1; SWISSPROT HIT: P49284, EVALUE 2.10e+00; NT HIT: gi14763916, EVALUE 9.90e-01; EST_HUMAN HIT: BG941296.1, EVALUE 1.40e+00
ctgaggatgattccgaaacaaaataatagcaaggaggttgaggagcgacatcaaaactcaaaaaatgaccagtatgccaata

SEQ ID NO: 14210 - DNA, 214 bp, Homo sapiens
  MAP TO CHR22_215.0; EXPRESSED IN HELA, SIGNAL = 3.1; EXPRESSED IN FETAL LIVER, SIGNAL = 1.5; EXPRESSED IN PLACENTA, SIGNAL = 0.97; EXPRESSED IN ADULT LIVER, SIGNAL = 1.1; EXPRESSED IN LUNG, SIGNAL =   1; EXPRESSED IN BONE MARROW, SIGNAL = 1.7; EXPRESSED IN BRAIN, SIGNAL = 1.4; NT HIT: gi14778584, EVALUE 1.00e-117; EST_HUMAN HIT: BF819388.1, EVALUE 1.00e-114; SWISSPROT HIT: P35579, EVALUE 6.00e-32
ctgagctcctgctgggcagctgtggaatccagcgtgtcctccaactctgttttcagagcctctagctcttccccaaggtcccgtttctgcttctcagctttattcctggaagcacgctcagactccaggtcttcctggagttcagagatctgagattccagctcccggatcttcttgagggccatgttcttctgggcagcttcctcttccactc

SEQ ID NO: 14211 - DNA, 106 bp, Homo sapiens
  MAP TO AL137840.3; EXPRESSED IN BRAIN, SIGNAL = 4.9; EXPRESSED IN PLACENTA, SIGNAL =   6; EXPRESSED IN LUNG, SIGNAL = 6.4; EXPRESSED IN HELA, SIGNAL =   3; EXPRESSED IN FETAL LIVER, SIGNAL = 5.2; EXPRESSED IN ADULT LIVER, SIGNAL = 6.2; EXPRESSED IN BONE MARROW, SIGNAL = 6.1; EXPRESSED IN HEART, SIGNAL = 4.6; NT HIT: AP002997.2, EVALUE 8.60e-02; EST_HUMAN HIT: BF949557.1, EVALUE 2.00e-03; SWISSPROT HIT: P23220, EVALUE 2.40e-01
atgttgttggtggagggtgtttgcattggcatagacagccatccagatgcattccctgtcttctggggagagggtggaggagagcatgacatacgtgtcttgccag

SEQ ID NO: 14212 - DNA, 123 bp, Homo sapiens
  MAP TO AL138735.2; EXPRESSED IN HEART, SIGNAL = 2.9; EXPRESSED IN PLACENTA, SIGNAL = 3.8; EXPRESSED IN FETAL LIVER, SIGNAL = 3.7; EXPRESSED IN BONE MARROW, SIGNAL = 3.4; EXPRESSED IN BRAIN, SIGNAL = 3.4; EXPRESSED IN HELA, SIGNAL =   3; EXPRESSED IN ADULT LIVER, SIGNAL =   4; EXPRESSED IN LUNG, SIGNAL = 3.8; EST_HUMAN HIT: BI909969.1, EVALUE 5.00e-63; NT HIT: AF031930.1, EVALUE 1.00e-01
ctggatgtgagtacagcacaaatccatatgcccgtggaggatggagcatctgtatctgctcccgaaggtgcagatgcccagacctcggcacacccagcgccagcattgtctgctttgacccat

SEQ ID NO: 14213 - DNA, 122 bp, Homo sapiens
  MAP TO AL137796.1; EXPRESSED IN HEART, SIGNAL = 2.4; EXPRESSED IN BONE MARROW, SIGNAL = 2.5; EXPRESSED IN PLACENTA, SIGNAL = 2.8; EXPRESSED IN LUNG, SIGNAL =   3; EXPRESSED IN BRAIN, SIGNAL = 2.1; EXPRESSED IN HELA, SIGNAL = 2.1; EXPRESSED IN ADULT LIVER, SIGNAL = 2.5; EXPRESSED IN FETAL LIVER, SIGNAL = 2.1; EST_HUMAN HIT: AW853219.1, EVALUE 2.30e+00; NT HIT: AF149773.1, EVALUE 1.60e+00
ctataagttgtggtcataaaccattttttcaagactcagagagctcttctcacttggaaagccatcacacatattcatcaatttggaatctgcagcaaaactgagccttttcagcctcttac

SEQ ID NO: 14214 - DNA, 174 bp, Homo sapiens
  MAP TO CHR22_96.0; EXPRESSED IN BONE MARROW, SIGNAL = 1.5; EXPRESSED IN BRAIN, SIGNAL = 1.2; EXPRESSED IN HELA, SIGNAL = 1.4; EXPRESSED IN PLACENTA, SIGNAL = 1.2; EXPRESSED IN ADULT LIVER, SIGNAL = 1.6; EXPRESSED IN LUNG, SIGNAL = 1.8; EXPRESSED IN FETAL LIVER, SIGNAL = 1.4; EST_HUMAN HIT: BI826341.1, EVALUE 8.90e-01; NT HIT: L39874.1, EVALUE 9.50e+00; SWISSPROT HIT: P21064, EVALUE 2.50e+00
catgtgctggggaggcagctgctgcataccagagctctgcatttcgcacgtgctgccccggataggcctgtccaaggagctctctatgtacctatccatcctcttgtcctcactcccactctgctcccagctctctgggatgaaggggaccacctccctgttaggaaactgcat

SEQ ID NO: 14215 - DNA, 297 bp, Homo sapiens
  MAP TO AC025758.1; EXPRESSED IN FETAL LIVER, SIGNAL = 0.72; EXPRESSED IN PLACENTA, SIGNAL = 0.83; EXPRESSED IN ADULT LIVER, SIGNAL = 0.8; EXPRESSED IN BONE MARROW, SIGNAL = 0.85; EXPRESSED IN BRAIN, SIGNAL = 0.91; EXPRESSED IN HELA, SIGNAL = 0.7; SWISSPROT HIT: Q9Y2G2, EVALUE 1.40e-01; NT HIT: gi14723321, EVALUE 0.00e+00; EST_HUMAN HIT: BE737100.1, EVALUE 0.00e+00
catgccttaagccgcaaatggcagctgactgtggaaaagtactaaataaacacttgagaaaatgctgacaggtcgcctctccctttttctgtaccaaaattaacagcttccgacttttcttcaggagatctgtaacattctccagagtctcatactcttcctcagaaatcagcctccgagaagttaacgtgtctaagatagaatcaggatcatgttgaaggatttcaagcaacttttttctttctctttctatgatctctgagggagtactctcggtagccattgttcctgtttcct

SEQ ID NO: 14216 - DNA, 80 bp, Homo sapiens
  MAP TO AL133349.2; EXPRESSED IN BONE MARROW, SIGNAL = 0.68; EXPRESSED IN BRAIN, SIGNAL = 0.86; EXPRESSED IN HELA, SIGNAL = 0.56; EXPRESSED IN FETAL LIVER, SIGNAL = 0.7; EXPRESSED IN LUNG, SIGNAL = 0.56; EXPRESSED IN ADULT LIVER, SIGNAL = 0.57; NT HIT: M60610.1, EVALUE 6.10e-02; EST_HUMAN HIT: AL039717.1, EVALUE 5.00e-31
gagtgttccttgaagaacttggagaagtggatgaaaatcagaaggaaaaacaggacaagaatttacgaaaacagcaatga

SEQ ID NO: 14217 - DNA, 107 bp, Homo sapiens
  MAP TO AL137118.3; EXPRESSED IN LUNG, SIGNAL = 0.64; EXPRESSED IN BRAIN, SIGNAL = 0.61; EXPRESSED IN PLACENTA, SIGNAL = 0.73; EXPRESSED IN FETAL LIVER, SIGNAL = 0.61; EXPRESSED IN BONE MARROW, SIGNAL = 0.6; NT HIT: AE007707.1, EVALUE 3.40e-01
aatgacgtaacgccctgaaatggagacagtaaacctggtcagtgtttgcaacgtggcaaatgagaggtcagtcagcatatgtgcagtctgtggaaggtttctcagag

SEQ ID NO: 14218 - DNA, 103 bp, Homo sapiens
  MAP TO AL160237.1; EXPRESSED IN HELA, SIGNAL = 1.1; EXPRESSED IN BRAIN, SIGNAL = 0.65; EXPRESSED IN LUNG, SIGNAL = 0.52; EXPRESSED IN FETAL LIVER, SIGNAL = 0.52; EXPRESSED IN BONE MARROW, SIGNAL = 0.46; SWISSPROT HIT: Q13268, EVALUE 3.00e-06; EST_HUMAN HIT: AU099502.1, EVALUE 6.00e-19; NT HIT: AB045133.1, EVALUE 1.00e-22
gttcggcttcgccattgcccagcgtctggcccacgatagggcccacgtagtcatcagcagcgggaagcagcagaacgtggactgggctgtggccacgctctag

SEQ ID NO: 14219 - DNA, 173 bp, Homo sapiens
  MAP TO CHR22_172.0; EXPRESSED IN HELA, SIGNAL = 0.62; EXPRESSED IN BRAIN, SIGNAL = 0.78; EXPRESSED IN LUNG, SIGNAL = 0.68; SWISSPROT HIT: Q14149, EVALUE 2.00e-02; EST_HUMAN HIT: BI054083.1, EVALUE 1.00e-55; NT HIT: gi14778276, EVALUE 8.00e-56
aaaaccgcctgggcagactcaggaaatgaggactggtgatgcagaccacgatgatgggacctacttcatcaatgccttcttcctcatgaaacgtgcgagacaggaagaggcaggtcatggtgtcttccttcttggtgaacaggataaaatccttcccaatgcgcattgagccc

SEQ ID NO: 14220 - DNA, 241 bp, Homo sapiens
  MAP TO AC025179.2; EXPRESSED IN FETAL LIVER, SIGNAL = 0.54; EXPRESSED IN BONE MARROW, SIGNAL = 0.49; EXPRESSED IN BRAIN, SIGNAL = 0.83; EXPRESSED IN HELA, SIGNAL = 2.7; EXPRESSED IN PLACENTA, SIGNAL = 0.7; EXPRESSED IN ADULT LIVER, SIGNAL = 0.66; SWISSPROT HIT: Q9R012, EVALUE 8.00e-43; EST_HUMAN HIT: BG251446.1, EVALUE 0.00e+00; NT HIT: gi5730054, EVALUE 0.00e+00
tttttgtctggaaggaggctcatgtgagcaccattgttgaaaaggacaccgacggtgtggtctgagagctggtacccaaagccatatttgttagagtaatcaacccatttggtgacccactgaaatgatgtgctcagctgctctttgggaatgcaatcagcttccggcatgttttccagacatccccgaagaacccttgccactgtgtctgcaacacttcccatggtactgtcttcaaggc

SEQ ID NO: 14221 - DNA, 123 bp, Homo sapiens
  MAP TO AC023120.3; EXPRESSED IN FETAL LIVER, SIGNAL = 0.75; EXPRESSED IN PLACENTA, SIGNAL = 0.45; EXPRESSED IN LUNG, SIGNAL = 0.48; EXPRESSED IN ADULT LIVER, SIGNAL = 0.91; EXPRESSED IN BONE MARROW, SIGNAL = 0.5; EXPRESSED IN BRAIN, SIGNAL = 0.88; SWISSPROT HIT: Q9QY06, EVALUE 2.00e-03; EST_HUMAN HIT: AW594598.1, EVALUE 5.00e-63; NT HIT: gi5902011, EVALUE 4.00e-63
gattttgtgagccacttccatgtacttcttccccgaaatattattccatccaaatttaacattcaggatttcttcaggaaaataaatcttaatccagataattatcaagttggaaaaaccatg

SEQ ID NO: 14222 - DNA, 431 bp, Homo sapiens
  MAP TO CHR22_0.0; EXPRESSED IN FETAL LIVER, SIGNAL =  11; EXPRESSED IN HEART, SIGNAL = 9.7; EXPRESSED IN PLACENTA, SIGNAL =  15; EXPRESSED IN ADULT LIVER, SIGNAL =  15; EXPRESSED IN BONE MARROW, SIGNAL =  12; EXPRESSED IN BRAIN, SIGNAL = 9.8; SWISSPROT HIT: Q00587, EVALUE 1.00e-16; EST_HUMAN HIT: BE546872.1, EVALUE 0.00e+00; NT HIT: gi14778715, EVALUE 0.00e+00
gcctggactctgggttctgcaccatctcccgcctgccccgctcggaaaagccgcatgaccgagaccgggatggttccttcccctctgagcccgggcttcgccgctctgactctctcttgtccttccgcctggacctcgaccttgggccctcactcctcagcgagctgctaggggtcatgagcctcccagaagcccctgcagctgagactccagcccccgctgcaaaccccccagcccctactgcaaaccccacgggtcctgctgcaaaccccccagccactactgcaaaccccccagcgcctgctgcaaacccctcagcacctgccgcaacccccacgggtcctgctgcaaatcccccagcccctgccgcaagctccacaccccatggacactgtcccaatggggtaacagctgggttgggcccagtggct

SEQ ID NO: 14223 - DNA, 148 bp, Homo sapiens
  MAP TO AL139135.2; EXPRESSED IN HELA, SIGNAL = 1.3; EXPRESSED IN BRAIN, SIGNAL = 1.3; EXPRESSED IN FETAL LIVER, SIGNAL = 1.9; EXPRESSED IN BONE MARROW, SIGNAL = 2.2; EXPRESSED IN ADULT LIVER, SIGNAL = 2.3; SWISSPROT HIT: P70213, EVALUE 1.00e-07; EST_HUMAN HIT: BG993601.1, EVALUE 7.00e-32; NT HIT: AL163209.2, EVALUE 3.00e-30
aaatctagagaacaagcctgggaatggatattaatggtgtgggaagatggtggaagaaacatagagtcagatcaggctgaattaattgatttggacccactaagtagggattctgcatttaatgttgcagctcagggagttaaaaaag

SEQ ID NO: 14224 - DNA, 78 bp, Homo sapiens
  MAP TO CHR22_28.0; EXPRESSED IN PLACENTA, SIGNAL = 4.4; EXPRESSED IN ADULT LIVER, SIGNAL = 4.4; EXPRESSED IN HEART, SIGNAL = 3.2; EXPRESSED IN BRAIN, SIGNAL = 3.2; EXPRESSED IN HELA, SIGNAL = 2.7; EXPRESSED IN LUNG, SIGNAL = 4.2; EXPRESSED IN FETAL LIVER, SIGNAL = 3.4; EXPRESSED IN BONE MARROW, SIGNAL = 3.8; NT HIT: M55100.1, EVALUE 9.30e-01; EST_HUMAN HIT: H55527.1, EVALUE 2.00e-36
ttatgcctggtgatgggcctgatctgtcgggtcagtgcctttccccagaaggaacgtggtggcatttgttgattcatc

SEQ ID NO: 14225 - DNA, 124 bp, Homo sapiens
  MAP TO AL136361.2; EXPRESSED IN HEART, SIGNAL = 3.6; EXPRESSED IN ADULT LIVER, SIGNAL = 4.5; EXPRESSED IN PLACENTA, SIGNAL = 4.5; EXPRESSED IN BONE MARROW, SIGNAL = 3.3; EXPRESSED IN BRAIN, SIGNAL = 3.2; EXPRESSED IN LUNG, SIGNAL = 4.2; EXPRESSED IN HELA, SIGNAL = 1.8; EXPRESSED IN FETAL LIVER, SIGNAL = 3.8; SWISSPROT HIT: Q9D952, EVALUE 2.70e+00; EST_HUMAN HIT: BI002978.1, EVALUE 3.00e-21; NT HIT: M26434.1, EVALUE 1.00e-04
acttcgagaagacccgctgtcacggactgagttgtgtcctcttaaaattcagatgttggagtccaaacccccagtaactcagagtgtgaacgtatttgaagaggtctttaaagaggtgatgaag

SEQ ID NO: 14226 - DNA, 94 bp, Homo sapiens
  MAP TO AL137071.3; EXPRESSED IN HELA, SIGNAL = 3.9; EXPRESSED IN BRAIN, SIGNAL = 3.6; EXPRESSED IN FETAL LIVER, SIGNAL =   3; EXPRESSED IN HEART, SIGNAL =   3; EXPRESSED IN LUNG, SIGNAL =   1; EXPRESSED IN BONE MARROW, SIGNAL =   4; NT HIT: AF240896.1, EVALUE 7.40e-02
tttggaaacgaaatccaaagctttatggggctgctttatcatcattagcaaaagggaccgtgaactctttaacctgtcatcacagagacactag

SEQ ID NO: 14227 - DNA, 141 bp, Homo sapiens
  MAP TO CHR22_235.0; EXPRESSED IN LUNG, SIGNAL = 0.87; EXPRESSED IN BONE MARROW, SIGNAL = 1.6; EXPRESSED IN PLACENTA, SIGNAL = 0.81; EXPRESSED IN ADULT LIVER, SIGNAL = 0.96; EXPRESSED IN HELA, SIGNAL = 3.5; EXPRESSED IN BRAIN, SIGNAL = 1.6; SWISSPROT HIT: O95613, EVALUE 2.60e+00; EST_HUMAN HIT: AA703767.1, EVALUE 5.00e-42; NT HIT: Z99116.1, EVALUE 1.20e-01
caatcgctgaacttctgctggatgggaggagacgggcaggcatcgctgagctcctgctggatgggagaagacgggcaggcatcgctgagctcctgctggatgggagaagatggagaggcagcctgagattttcggggcatg

SEQ ID NO: 14228 - DNA, 221 bp, Homo sapiens
  MAP TO AL137790.1; EXPRESSED IN FETAL LIVER, SIGNAL = 0.79; EXPRESSED IN PLACENTA, SIGNAL = 1.2; EXPRESSED IN LUNG, SIGNAL = 1.1; EXPRESSED IN ADULT LIVER, SIGNAL = 1.1; EXPRESSED IN BRAIN, SIGNAL = 0.78; SWISSPROT HIT: Q9QZQ3, EVALUE 3.20e+00; EST_HUMAN HIT: AA182705.1, EVALUE 1.90e-02; NT HIT: AF287967.1, EVALUE 2.00e-01
gaatacagagcgcagaggctgggtgggaatggcaggtgactcagaggcagggctgggagtttgagggagagggagagggaagaagaactgtcgcagaagcagaggaagcagcgtggagagcgatgctgcagctcggggcgcagaagggacaccaggtgccgccagtgggagtcaccactgaatctgggcagaggcttcctgagggaagggcctccctcgcc

SEQ ID NO: 14229 - DNA, 115 bp, Homo sapiens
  MAP TO AL160233.1; EXPRESSED IN HELA, SIGNAL = 1.6; EXPRESSED IN BRAIN, SIGNAL = 1.3; EXPRESSED IN PLACENTA, SIGNAL = 1.5; EXPRESSED IN LUNG, SIGNAL = 1.3; EXPRESSED IN ADULT LIVER, SIGNAL = 1.1; EXPRESSED IN FETAL LIVER, SIGNAL =   1; EXPRESSED IN BONE MARROW, SIGNAL = 1.1; EXPRESSED IN HEART, SIGNAL = 1.4; SWISSPROT HIT: P51376, EVALUE 2.10e+00
atttatagtcaataatagagatgtcaaaataaaccagcttccttctgcacttaggcttttgaatctgaagagtcaatttttccacattggtagaagcattcacaaaatcctccat

SEQ ID NO: 14230 - DNA, 171 bp, Homo sapiens
  MAP TO AL139253.1; EXPRESSED IN BRAIN, SIGNAL = 1.5; EXPRESSED IN FETAL LIVER, SIGNAL = 1.8; EXPRESSED IN HEART, SIGNAL = 1.3; EXPRESSED IN LUNG, SIGNAL = 1.9; EXPRESSED IN ADULT LIVER, SIGNAL = 2.8; EXPRESSED IN BONE MARROW, SIGNAL = 1.3; EXPRESSED IN PLACENTA, SIGNAL = 2.3; NT HIT: AF001229.1, EVALUE 1.50e-01
ctggattcaggatgctccggaaaaacaggccagagccctctccgtttgtcacatttttccccaagcttttgggcctggcacaggtgcgtgtgtagtggtggtggaggcgtggggggtggggaagcagctttttctagcattgcccgagaaggggatgacttccgcctggat

SEQ ID NO: 14231 - DNA, 195 bp, Homo sapiens
  MAP TO CHR22_174.0; EXPRESSED IN FETAL LIVER, SIGNAL = 0.62; EXPRESSED IN BONE MARROW, SIGNAL = 0.76; EXPRESSED IN HELA, SIGNAL = 0.69; EXPRESSED IN BRAIN, SIGNAL = 0.76; NT HIT: AL163203.2, EVALUE 5.00e-05; SWISSPROT HIT: O95104, EVALUE 3.00e-03; EST_HUMAN HIT: BE047471.1, EVALUE 4.00e+00
gatactgcagcacccgatggtgcccacaacctgccccctgccattggcagtgcagcccaggttaatgcccccaaactgctccctgatgttggcagtgcagccacggaaagtgcccccaaccagcctcccgccatgggaagtgactcccgggatagcgcccccaagcagaccctagccttgggcagtgacgcccgg

SEQ ID NO: 14232 - DNA, 75 bp, Homo sapiens
  MAP TO AL138889.2; EXPRESSED IN HELA, SIGNAL = 1.3; EXPRESSED IN FETAL LIVER, SIGNAL = 1.9; EXPRESSED IN LUNG, SIGNAL =   2; EXPRESSED IN PLACENTA, SIGNAL = 2.2; EXPRESSED IN HEART, SIGNAL = 1.9; EXPRESSED IN BRAIN, SIGNAL = 2.3; EXPRESSED IN ADULT LIVER, SIGNAL = 1.8; EXPRESSED IN BONE MARROW, SIGNAL = 1.9; NT HIT: AF081283.1, EVALUE 2.20e-01
atggcctccatagaaggtgtgtggacattgtctgcctttttggaacttggatctgagtggacctgggttccactc

SEQ ID NO: 14233 - DNA, 157 bp, Homo sapiens
  MAP TO AL137855.1; EXPRESSED IN FETAL LIVER, SIGNAL = 0.76; EXPRESSED IN BONE MARROW, SIGNAL = 0.93; EXPRESSED IN BRAIN, SIGNAL = 1.1; EXPRESSED IN PLACENTA, SIGNAL = 0.92; NT HIT: AE007811.1, EVALUE 5.40e-01
atggtggagatggtggtagtaatggtggtgggggcggaggtagtggtggagatgggggtggaggtgggggtggtgaaggtggtggaggtggtagggatggtggtgataacagataagactgctcaagtattaaatgcaagaaagatgaatcaagcat

SEQ ID NO: 14234 - DNA, 118 bp, Homo sapiens
  MAP TO AL135783.6; EXPRESSED IN LUNG, SIGNAL = 1.1; EXPRESSED IN ADULT LIVER, SIGNAL = 1.1; EXPRESSED IN FETAL LIVER, SIGNAL = 1.1; EXPRESSED IN BONE MARROW, SIGNAL = 0.94; EXPRESSED IN HELA, SIGNAL = 1.2; EXPRESSED IN BRAIN, SIGNAL = 0.85; NT HIT: gi14765025, EVALUE 3.00e-60; SWISSPROT HIT: P06445, EVALUE 7.90e+00; EST_HUMAN HIT: BE267974.1, EVALUE 5.00e-60
ctctttataacctagtgctgctgatggtctaagtggaggtgcaggtcgtagacaacttaaactccacggttttataatttgaggaggctccaagggtcctcggggctgtccggtagag

SEQ ID NO: 14235 - DNA, 275 bp, Homo sapiens
  MAP TO CHR22_117.0; EXPRESSED IN LUNG, SIGNAL = 1.6; EXPRESSED IN BRAIN, SIGNAL = 1.3; EXPRESSED IN PLACENTA, SIGNAL = 1.4; EXPRESSED IN ADULT LIVER, SIGNAL = 1.7; EXPRESSED IN HELA, SIGNAL = 1.6; EXPRESSED IN FETAL LIVER, SIGNAL = 1.6; SWISSPROT HIT: P80748, EVALUE 1.00e-37; EST_HUMAN HIT: AW404446.1, EVALUE 1.00e-114; NT HIT: Z73658.1, EVALUE 0.00e+00
ctgacagtaatagtcagcctcatccccagcctcgatcctgctgatggttagggtggcggtgttccctgggttggagccagagaatcgctcagggatccctgagggccggttgctatcgctatagatgaccagcacagggtcctggcctggcttttgctggtaccagtgcacagctttacttccaatgttgtttcccccacaggtgatcctggccatctgtgctgtggccactgacactgagtgtggctgagtcagctcataggaggtcgcagagc

SEQ ID NO: 14236 - DNA, 170 bp, Homo sapiens
  MAP TO CHR22_22.0; EXPRESSED IN PLACENTA, SIGNAL = 3.4; EXPRESSED IN ADULT LIVER, SIGNAL = 3.6; EXPRESSED IN BONE MARROW, SIGNAL = 2.7; EXPRESSED IN LUNG, SIGNAL =   3; EXPRESSED IN BRAIN, SIGNAL = 2.8; EXPRESSED IN FETAL LIVER, SIGNAL = 3.5; SWISSPROT HIT: Q12772, EVALUE 2.00e-28; EST_HUMAN HIT: BG746493.1, EVALUE 7.00e-91; NT HIT: gi11418194, EVALUE 5.00e-91
gagccccctggtgaaggccatcttccatgcctgcagagccatgcatgcctcactccctgggaaagcagatgggcagcagagttccttctgccattgcgagagggccagtggccacctatggagcagcctcaacgtcagtggggccacctctgaccctgccctcaaccacg

SEQ ID NO: 14237 - DNA, 93 bp, Homo sapiens
  MAP TO CHR22_222.0; EXPRESSED IN FETAL LIVER, SIGNAL = 1.3; EXPRESSED IN PLACENTA, SIGNAL = 0.94; EXPRESSED IN HELA, SIGNAL = 2.4; EXPRESSED IN LUNG, SIGNAL = 0.95; EXPRESSED IN ADULT LIVER, SIGNAL =   1; EXPRESSED IN BONE MARROW, SIGNAL = 1.5; EXPRESSED IN HEART, SIGNAL = 1.2; EXPRESSED IN BRAIN, SIGNAL = 1.2; SWISSPROT HIT: Q24742, EVALUE 2.00e-04; EST_HUMAN HIT: H55457.1, EVALUE 3.00e-45; NT HIT: gi14779279, EVALUE 2.00e-45
tgcatcaatggcacacgggtaatggtatcggaaggagcagcctttgttgtagcagcccaaggtggcgcctgcctcctggcagtgggaacattt

SEQ ID NO: 14238 - DNA, 266 bp, Homo sapiens
  MAP TO CHR22_93.0; EXPRESSED IN BRAIN, SIGNAL = 0.48; EXPRESSED IN FETAL LIVER, SIGNAL = 0.73; EXPRESSED IN BONE MARROW, SIGNAL = 0.64; EXPRESSED IN PLACENTA, SIGNAL = 0.81; EXPRESSED IN ADULT LIVER, SIGNAL = 0.92; EXPRESSED IN LUNG, SIGNAL = 0.81; NT HIT: gi14778442, EVALUE 1.00e-74; SWISSPROT HIT: P90838, EVALUE 4.00e-03; EST_HUMAN HIT: BG716771.1, EVALUE 0.00e+00
tgagggaaactctgcaaggggccggggcggacccagtggtcaggggaggtccagagggcgcagtggacgccggccgggccggggacggagcacggaaggccccgccatttgctctcctgccttacctgcatgttgggcacgaagcccttcttgatcctccagcagtttttattgatcttctccaagaactgcagctcatcattatagctgcgactcatggtggcgaaaactgtagcaaaaactcccggctccgctttgaagagccg

SEQ ID NO: 14239 - DNA, 346 bp, Homo sapiens
  MAP TO CHR22_174.0; EXPRESSED IN LUNG, SIGNAL = 0.46; EXPRESSED IN FETAL LIVER, SIGNAL = 0.79; EXPRESSED IN PLACENTA, SIGNAL = 0.58; EXPRESSED IN BRAIN, SIGNAL = 0.74; EXPRESSED IN HELA, SIGNAL = 1.4; NT HIT: gi9558724, EVALUE 1.00e-120; SWISSPROT HIT: Q10570, EVALUE 2.00e-49; EST_HUMAN HIT: AI014316.1, EVALUE 0.00e+00
tggccagctggtcagccagggacaaatccgtgtcacaggacgacatggacgagattgaagtgtacggcagcgacgcccagtcgggcacacagctggccacctacctttgaggtgtgtgacagcatccttaacattggaccctgcaccaatgctgccatgggtgagcctgccttcctgtctgaagagtttcagaacaaccctgagccggacctggagattgtggtttgctccagccacaggaagaatggggctctgtcggtgctgcagaagagcatccagccccaggtggtgacaacctttgagcttcccggctgctacgacatgtggacagtcatcgccctggtgc

SEQ ID NO: 14240 - DNA, 146 bp, Homo sapiens
  MAP TO AL133402.2; EXPRESSED IN FETAL LIVER, SIGNAL = 5.6; EXPRESSED IN BONE MARROW, SIGNAL = 5.8; EXPRESSED IN HEART, SIGNAL = 4.9; EXPRESSED IN HELA, SIGNAL = 5.8; EXPRESSED IN BRAIN, SIGNAL = 6.1; EXPRESSED IN LUNG, SIGNAL = 5.8; EXPRESSED IN ADULT LIVER, SIGNAL = 5.7; EXPRESSED IN PLACENTA, SIGNAL = 5.5; NT HIT: AL163278.2, EVALUE 2.00e-19; SWISSPROT HIT: Q9Y493, EVALUE 5.90e+00; EST_HUMAN HIT: BE071702.1, EVALUE 3.00e-25
aagaggagatgaggacacagacacgcacagagggaagaccgggcaaggacacagggagaagatgctgtccacaagccaaggagagaggcctcaggagaaaccaaccctgcccacacctgggtctcagatatctatcttccagaatg

SEQ ID NO: 14241 - DNA, 126 bp, Homo sapiens
  MAP TO AL137017.4; EXPRESSED IN PLACENTA, SIGNAL = 0.62; EXPRESSED IN FETAL LIVER, SIGNAL = 0.45; EXPRESSED IN LUNG, SIGNAL = 0.7; EXPRESSED IN ADULT LIVER, SIGNAL = 0.72; EXPRESSED IN BONE MARROW, SIGNAL = 0.42; EXPRESSED IN BRAIN, SIGNAL = 0.51; EXPRESSED IN HELA, SIGNAL = 0.52; NT HIT: L44140.1, EVALUE 6.50e+00; EST_HUMAN HIT: AA937813.1, EVALUE 6.20e-01
atgtggctgatgctggtgggctttgggaagctggagctgaatatgctacccagaatggtcagcaaggccctgaggggcagtgcagccccgtgtaaaaacagcaccgagacagagcaagaaacaaca

SEQ ID NO: 14242 - DNA, 100 bp, Homo sapiens
  MAP TO AL135783.6; EXPRESSED IN HELA, SIGNAL = 0.51; EXPRESSED IN FETAL LIVER, SIGNAL = 0.62; EXPRESSED IN LUNG, SIGNAL = 0.68; EXPRESSED IN PLACENTA, SIGNAL = 0.91; EXPRESSED IN ADULT LIVER, SIGNAL = 0.81; EXPRESSED IN BRAIN, SIGNAL = 0.75; SWISSPROT HIT: P41902, EVALUE 8.00e+00
cctggagaaccactgctaccacaaaccgggcacaaacttgtcccagatgggaatgggtaacatttgctccctcaaacacaaaaacagctcctctaggttt

SEQ ID NO: 14243 - DNA, 28 bp, Homo sapiens
  MAP TO CHR21_19.0; EXPRESSED IN BONE MARROW, SIGNAL = 1.7; EXPRESSED IN BRAIN, SIGNAL = 1.3; EXPRESSED IN HELA, SIGNAL = 3.7; EXPRESSED IN FETAL LIVER, SIGNAL = 1.4; EXPRESSED IN LUNG, SIGNAL = 1.1; EXPRESSED IN ADULT LIVER, SIGNAL = 0.79; EST_HUMAN HIT: BG535947.1, EVALUE 9.90e-01; NT HIT: U91522.1, EVALUE 6.70e-01
gcattgggcaacactgttggaccctgaa

SEQ ID NO: 14244 - DNA, 189 bp, Homo sapiens
  MAP TO AL137145.3; EXPRESSED IN FETAL LIVER, SIGNAL = 9.1; EXPRESSED IN BONE MARROW, SIGNAL = 9.7; EXPRESSED IN HEART, SIGNAL = 7.2; EXPRESSED IN HELA, SIGNAL = 8.1; EXPRESSED IN ADULT LIVER, SIGNAL = 9.7; EXPRESSED IN LUNG, SIGNAL =  10; EXPRESSED IN PLACENTA, SIGNAL =  11; EXPRESSED IN BRAIN, SIGNAL = 9.3; SWISSPROT HIT: Q04759, EVALUE 6.00e-34; EST_HUMAN HIT: AA301014.1, EVALUE 1.00e-100; NT HIT: gi16156411, EVALUE 1.00e-102
cttcaccagaaggtcctttgcttccttctccagccaccgtgggtaaaagggattgtccatgcggatggagtggaagagctcctcctcatcctgcccgtggaaaggcgactgaccaatcagcatttcataaaggagaaccccgaaggaccaccagtccacagagtggttgtatttctgacccagcaagat

SEQ ID NO: 14245 - DNA, 154 bp, Homo sapiens
  MAP TO AL137846.1; EXPRESSED IN BONE MARROW, SIGNAL = 2.9; EXPRESSED IN HEART, SIGNAL = 2.8; EXPRESSED IN PLACENTA, SIGNAL = 3.5; EXPRESSED IN BRAIN, SIGNAL = 2.7; EXPRESSED IN ADULT LIVER, SIGNAL = 1.9; EXPRESSED IN HELA, SIGNAL =   3; EXPRESSED IN FETAL LIVER, SIGNAL = 2.4; SWISSPROT HIT: Q16983, EVALUE 3.00e-04; EST_HUMAN HIT: BE778512.1, EVALUE 3.10e+00; NT HIT: D26597.1, EVALUE 5.30e-01
gtggcatgtgtggctgtcacagtcgcaatgcacttcctctttctggtggcattctcctggatgctggtggaggggctgctgctgtggaggaaggtggtagctgtgagcatgcacccgggcccaggcatgcggctctaccacgccacaggctggg

SEQ ID NO: 14246 - DNA, 199 bp, Homo sapiens
  MAP TO CHR21_61.0; EXPRESSED IN HELA, SIGNAL = 2.6; EXPRESSED IN HEART, SIGNAL = 1.2; EXPRESSED IN LUNG, SIGNAL =   1; EXPRESSED IN BRAIN, SIGNAL = 1.6; EXPRESSED IN PLACENTA, SIGNAL = 0.81; EXPRESSED IN ADULT LIVER, SIGNAL = 0.95; EXPRESSED IN FETAL LIVER, SIGNAL = 1.7; EXPRESSED IN BONE MARROW, SIGNAL = 1.8; NT HIT: M30817.1, EVALUE 1.00e-108; SWISSPROT HIT: P20591, EVALUE 1.00e-32; EST_HUMAN HIT: AW384094.1, EVALUE 1.00e-108
gaatcttgacgaagcctgatctggtggacaaaggaactgaagacaaggttgtggacgtggtgcggaacctcgtgttccacctgaagaagggttacatgattgtcaagtgccggggccagcaggagatccaggaccagctgagcctgtccgaagccctgcagagagagaagatcttctttgagaaccacccatatttcag

SEQ ID NO: 14247 - DNA, 145 bp, Homo sapiens
  MAP TO AC011585.3; EXPRESSED IN FETAL LIVER, SIGNAL = 0.55; EXPRESSED IN BONE MARROW, SIGNAL = 0.55; EXPRESSED IN PLACENTA, SIGNAL = 0.58; EXPRESSED IN LUNG, SIGNAL = 0.54; EXPRESSED IN BRAIN, SIGNAL = 0.57; NT HIT: AL163252.2, EVALUE 6.00e-16; SWISSPROT HIT: P15101, EVALUE 3.90e-01; EST_HUMAN HIT: BG436265.1, EVALUE 4.00e-18
cccagatcacagtaacagatatgacgataatgaaaaagtctgaaatagtgtgagaatgatcaaaacgtgacacagagacacaaagtgagcacatgctgttgggaaaaatggacttgcttgacacagcattgccacagaacttcat

SEQ ID NO: 14248 - DNA, 296 bp, Homo sapiens
  MAP TO CHR22_176.0; EXPRESSED IN BONE MARROW, SIGNAL = 0.68; EXPRESSED IN BRAIN, SIGNAL = 0.71; EXPRESSED IN HELA, SIGNAL = 0.64; EXPRESSED IN PLACENTA, SIGNAL = 0.89; EXPRESSED IN LUNG, SIGNAL = 0.95; NT HIT: gi4507666, EVALUE 9.00e-97; SWISSPROT HIT: O60704, EVALUE 5.00e-35; EST_HUMAN HIT: AI083688.1, EVALUE 0.00e+00
gagactgaacatttcctcaggtggctggagtttccacatctgcagaagccccatatccccaagagtacacttccacaagtacaggtgcacactcacccgctgtgtgttgttgatgacgaaggggtcagggttgccatagttgggggggtttgcataagggtcatagccgagctgagccagcatgggggcgatctgggccatgtcccgcaccacatccccagggatgtggccagtccacttggagagcgcttccaggttaacaggcttgatgacctggtccgtggaccgctcgatcc

SEQ ID NO: 14249 - DNA, 203 bp, Homo sapiens
  MAP TO AC016683.4; EXPRESSED IN BRAIN, SIGNAL = 0.53; EXPRESSED IN FETAL LIVER, SIGNAL = 0.51; EXPRESSED IN BONE MARROW, SIGNAL = 0.55; EXPRESSED IN PLACENTA, SIGNAL = 0.52; EXPRESSED IN LUNG, SIGNAL = 0.51; EXPRESSED IN ADULT LIVER, SIGNAL = 0.61; EST_HUMAN HIT: R38164.1, EVALUE 4.20e+00; NT HIT: U48860.1, EVALUE 7.20e-01; SWISSPROT HIT: P79295, EVALUE 2.80e-01
atgatacctccccagtccccccaaaattcctcccttgactatgagactttttcttcccctcactttcaaccagattccaaacagcagttatatttgatgctacctttctatgacagccattcaagaaaggtaaagcatgttattagaacacccaaacagaagcctgaacctactctgcaggataaagcaaagccaccgaggaa

SEQ ID NO: 14250 - DNA, 78 bp, Homo sapiens
  MAP TO CHR22_229.0; EXPRESSED IN BONE MARROW, SIGNAL = 1.8; EXPRESSED IN ADULT LIVER, SIGNAL =   1; EXPRESSED IN LUNG, SIGNAL = 1.1; EXPRESSED IN BRAIN, SIGNAL = 1.6; EXPRESSED IN HELA, SIGNAL = 3.6; EXPRESSED IN FETAL LIVER, SIGNAL = 1.6; EXPRESSED IN HEART, SIGNAL = 1.2
tgcggtccagcagaccttggtgaggttggtgcttgggactcctcagctgcagagctgagtcccagttcagccgcttcc

SEQ ID NO: 14251 - DNA, 281 bp, Homo sapiens
  MAP TO CHR22_190.0; EXPRESSED IN BONE MARROW, SIGNAL = 0.69; EXPRESSED IN BRAIN, SIGNAL = 0.58; EXPRESSED IN LUNG, SIGNAL = 0.61; EXPRESSED IN PLACENTA, SIGNAL = 0.66; EXPRESSED IN FETAL LIVER, SIGNAL = 0.63; EST_HUMAN HIT: BF930319.1, EVALUE 0.00e+00; NT HIT: gi14776890, EVALUE 0.00e+00; SWISSPROT HIT: O68937, EVALUE 1.40e+00
cttccaggtttggcttctgggcctcctcagagcctgagtgttcctgtttctgctgctgcctcgctgtgtgaatggcctgaagtacatccagtcgccgctcctcaccaaaggctgcagagcccaccactagctcctcagcctccgataagcagcccagaggcagcagcacccgctgcacgtgaaattctgccaaggctccatattctggaaggttttgattggctgggtcttggagccaggcacccaccacatccagcacagctccaggctcttgcattttg

SEQ ID NO: 14252 - DNA, 164 bp, Homo sapiens
  MAP TO AC020582.3; EXPRESSED IN BRAIN, SIGNAL = 1.1; EXPRESSED IN PLACENTA, SIGNAL = 1.1; EXPRESSED IN LUNG, SIGNAL = 1.2; EXPRESSED IN FETAL LIVER, SIGNAL = 1.3; EXPRESSED IN BONE MARROW, SIGNAL = 1.4; SWISSPROT HIT: Q13428, EVALUE 3.90e-01; NT HIT: AB033036.1, EVALUE 2.00e-87
gaaagcctgctggtcaacagtcagattatgctgtctcagagccggtttggataactatggcaaagcagaagcagaagagtttcaaggcccacatttctgtgaaagagctgaaaactaagagcaatgctggagccgatgctgagactaaggagcctaaatatgag

SEQ ID NO: 14253 - DNA, 93 bp, Homo sapiens
  MAP TO CHR21_22.0; EXPRESSED IN BRAIN, SIGNAL = 1.1; EXPRESSED IN LUNG, SIGNAL = 0.63; EXPRESSED IN PLACENTA, SIGNAL = 0.73; EXPRESSED IN ADULT LIVER, SIGNAL = 0.75; EXPRESSED IN HELA, SIGNAL = 2.9; EXPRESSED IN FETAL LIVER, SIGNAL = 1.2; EXPRESSED IN BONE MARROW, SIGNAL = 1.3; SWISSPROT HIT: Q09161, EVALUE 7.10e-01; EST_HUMAN HIT: BG436371.1, EVALUE 1.70e+00; NT HIT: D50453.1, EVALUE 1.10e+00
tggtgaagaggggtctaatggcaagcagtctaggaaaccttgccaactccattcatgtgaaggaactgccaggttgtaaagggcttattccag

SEQ ID NO: 14254 - DNA, 175 bp, Homo sapiens
  MAP TO CHR21_74.0; EXPRESSED IN PLACENTA, SIGNAL = 0.75; EXPRESSED IN BRAIN, SIGNAL = 1.2; EXPRESSED IN LUNG, SIGNAL = 0.76; EXPRESSED IN HELA, SIGNAL = 2.8; EXPRESSED IN FETAL LIVER, SIGNAL = 1.1; EXPRESSED IN BONE MARROW, SIGNAL = 1.1; SWISSPROT HIT: O43918, EVALUE 7.00e-30; EST_HUMAN HIT: BI040873.1, EVALUE 1.50e-02; NT HIT: Z97990.1, EVALUE 5.00e-94
gagacgcttcatctgaaggaaaaggagggctgcccccaggccttccacgccctcctgtcctggctgctgacccaggactccacagccatcctggacttctggagggtgctgttcaaggactacaacctggagcgctatggccggctgcagcccatcctggacagcttccccaaag

SEQ ID NO: 14255 - DNA, 270 bp, Homo sapiens
  MAP TO AC017050.4; EXPRESSED IN PLACENTA, SIGNAL = 1.4; EXPRESSED IN BRAIN, SIGNAL = 1.1; EXPRESSED IN ADULT LIVER, SIGNAL = 1.2; EXPRESSED IN FETAL LIVER, SIGNAL = 0.84; EST_HUMAN HIT: BI871011.1, EVALUE 3.00e-88; NT HIT: gi14723944, EVALUE 2.00e-88
aggttcggtagcctcaactagtgtaatgtcttccctgtccaaatccagaatgattatactgataacctccatgctggaaatgctgttcaaattgacccccttggtgataattctggctccctcttcctccccagcctcctccctggcctgcacgaccacctcggcctccacgaccacctcgcccaccacgaccaccaccacgatcaccatggtgcccgccatcttggtatctattgtcctgctggtagccaccaccctggtatccacttc

SEQ ID NO: 14256 - DNA, 275 bp, Homo sapiens
  MAP TO CHR22_13.0; EXPRESSED IN HELA, SIGNAL = 0.83; EXPRESSED IN BRAIN, SIGNAL = 0.9; EXPRESSED IN FETAL LIVER, SIGNAL = 1.1; EXPRESSED IN PLACENTA, SIGNAL = 0.81; EXPRESSED IN ADULT LIVER, SIGNAL = 1.5; NT HIT: gi16167673, EVALUE 1.00e-115; SWISSPROT HIT: P19440, EVALUE 1.00e-29; EST_HUMAN HIT: AA632626.1, EVALUE 1.00e-108
gtgggcagtccctgggccacccgcccctggccctttcccacccaggcggcccagcagcccctactagaggttgatggtgctggtggcggacacagcactgccgtcctctgcgacgacagacaggtgagcagtgcccccgtcatccggcgtgtagaactcgggcttgtagtaggagatcgggtgagtggtgtcgtcagagatctgggcccggagctgggcagcgaagaactcggaggtcatgttgcggaccacctgccgagaccccagagctggcc

SEQ ID NO: 14257 - DNA, 172 bp, Homo sapiens
  MAP TO AL137800.2; EXPRESSED IN BONE MARROW, SIGNAL = 2.4; EXPRESSED IN PLACENTA, SIGNAL = 2.1; EXPRESSED IN HELA, SIGNAL = 1.6; EXPRESSED IN BRAIN, SIGNAL = 2.1; EXPRESSED IN FETAL LIVER, SIGNAL = 1.7; EXPRESSED IN HEART, SIGNAL = 1.6; NT HIT: U00787.1, EVALUE 3.00e-92; SWISSPROT HIT: P19878, EVALUE 2.00e-27; EST_HUMAN HIT: BI004008.1, EVALUE 1.00e-89
ataacaccaggattatatccccttcctgaaactccaggtcctctggttgggtagcctcataactgaagagtgcctccacttggctgcctttcttaagctgaggttctgttgtctggttattagcatcagctttttcactttccttgggttcatctggaaagccttggtcacc

SEQ ID NO: 14258 - DNA, 201 bp, Homo sapiens
  MAP TO AL139100.1; EXPRESSED IN FETAL LIVER, SIGNAL = 0.72; EXPRESSED IN BONE MARROW, SIGNAL = 0.77; EXPRESSED IN BRAIN, SIGNAL = 0.73; EXPRESSED IN PLACENTA, SIGNAL = 0.86; EXPRESSED IN LUNG, SIGNAL =   1; EXPRESSED IN ADULT LIVER, SIGNAL = 0.83; EST_HUMAN HIT: BF841652.1, EVALUE 3.00e-10; NT HIT: AY035083.1, EVALUE 1.00e-05; SWISSPROT HIT: P23779, EVALUE 4.20e+00
atcactccaccagcccccagtgcccagcagtcctgggcccaggcatttggtggcagccagggcaacagcaacagcagcagcagccgcctcagccagtactttgagaaatttgatgtgaaagagtcctcctaccatctgctcatctcccgcctggacctgcacatttgtgatgatagccagtcccgagagccaggtacccca

SEQ ID NO: 14259 - DNA, 218 bp, Homo sapiens
  MAP TO CHR22_123.0; EXPRESSED IN HELA, SIGNAL = 1.2; EXPRESSED IN BRAIN, SIGNAL = 0.66; EXPRESSED IN ADULT LIVER, SIGNAL = 0.51; EXPRESSED IN FETAL LIVER, SIGNAL = 0.61; EXPRESSED IN BONE MARROW, SIGNAL = 0.63; EXPRESSED IN LUNG, SIGNAL = 0.59; EST_HUMAN HIT: AI334918.1, EVALUE 4.00e-31; SWISSPROT HIT: Q9UMQ3, EVALUE 4.40e-02
cccatccgcccaagaatgcgccttcccgtcttcggtggccctacccagaatcccaaaatgtggattccaacccaggccctgaacgtcttctcaaatccccgggacttacgttgcggcgcgcgccccgctgtcgggtcttgcccctcgggcggtaccgcccaggcagccctaaatccagcctcccaggcccccagcagcgccctccgcccctccaccat

SEQ ID NO: 14260 - DNA, 111 bp, Homo sapiens
  MAP TO AC011636.3; EXPRESSED IN BONE MARROW, SIGNAL = 0.41; EXPRESSED IN PLACENTA, SIGNAL = 0.46; EXPRESSED IN ADULT LIVER, SIGNAL = 0.43; EXPRESSED IN BRAIN, SIGNAL = 0.4; NT HIT: AB055857.1, EVALUE 9.10e-02
ggttctacgtgaacaagagcatggtgggttcagaaagaagcatcctggagacagtgtgtgagtgggaggcaggctcacacctgcaccatctgcccttcaccctgctgcagg

SEQ ID NO: 14261 - DNA, 375 bp, Homo sapiens
  MAP TO AL138726.2; EXPRESSED IN ADULT LIVER, SIGNAL = 1.3; EXPRESSED IN BRAIN, SIGNAL = 0.46; SWISSPROT HIT: O00624, EVALUE 7.00e-46; NT HIT: U91328.1, EVALUE 0.00e+00
gcctctgtgtatcaatggagcccagaaactcagggtatcatctttagctccatcaactatgggataatactgactctgatcccaagtggatatttagcagggatatttggagcaaaaaaaatgcttggtgctggtttgctgatctcttcccttctcaccctctttacaccactggctgctgacttcggagtgattttggtcatcatggttcggacagtccagggcatggcccaggtatccagatactttctcattcttggtgggatccagatttctgaattctacaaaatatcaaaggtcttaatgattttcatttcagggaatggcatggacaggtcagtttactatttgggcaaagtgggctcctccacttga

SEQ ID NO: 14262 - DNA, 212 bp, Homo sapiens
  MAP TO AC024066.3; EXPRESSED IN HEART, SIGNAL = 1.3; EXPRESSED IN HELA, SIGNAL = 0.92; EXPRESSED IN BRAIN, SIGNAL = 1.6; EXPRESSED IN FETAL LIVER, SIGNAL = 1.2; EXPRESSED IN LUNG, SIGNAL = 1.3; EXPRESSED IN BONE MARROW, SIGNAL = 1.5; SWISSPROT HIT: P47538, EVALUE 6.30e+00; NT HIT: L23201.1, EVALUE 1.90e-01
tcagctgggtttggtactgacaaagattacatggatcctcagcatgcaacagtggggatgtttgttgcagtagtgtgagttgttggggtttatggtggtagtagctgctaaggtcttcttgatcctgatgttgtagtgatggaagttctcttgacactggatcctacttgcaagcccaaatggcattggcactgatgtctgctgagtggtac

SEQ ID NO: 14263 - DNA, 223 bp, Homo sapiens
  MAP TO CHR22_177.0; EXPRESSED IN HEART, SIGNAL = 2.1; EXPRESSED IN LUNG, SIGNAL = 1.6; EXPRESSED IN BRAIN, SIGNAL = 1.7; EXPRESSED IN ADULT LIVER, SIGNAL =   1; EXPRESSED IN HELA, SIGNAL =   4; SWISSPROT HIT: P43082, EVALUE 4.10e+00; EST_HUMAN HIT: AV759369.1, EVALUE 8.00e-85; NT HIT: gi14737999, EVALUE 2.00e-84
ttatttcccaatggatgagagagcctccttcaccttctcggtcatagttgggagcaggtgcatgtggtcatccacacacttggtcacaccaccttccagcttctgcttcaactgaagctccttactcccagcatctattgaatctttggctttgtcgttgcaatgcgtggtgcaccggaccaggtggtcctggaacttctccagctcactggtgatcaaagcc

SEQ ID NO: 14264 - DNA, 111 bp, Homo sapiens
  MAP TO CHR22_232.0; EXPRESSED IN BONE MARROW, SIGNAL = 2.4; EXPRESSED IN LUNG, SIGNAL = 1.2; EXPRESSED IN BRAIN, SIGNAL = 2.1; EXPRESSED IN HELA, SIGNAL = 4.5; EXPRESSED IN HEART, SIGNAL = 1.6; EXPRESSED IN PLACENTA, SIGNAL = 1.2; EXPRESSED IN FETAL LIVER, SIGNAL = 1.9; EXPRESSED IN ADULT LIVER, SIGNAL = 1.4; NT HIT: gi8924035, EVALUE 2.00e-05; EST_HUMAN HIT: AW935076.1, EVALUE 6.00e-04
tgatagtcaaatctctgaaacacaaagtgaggagaggagaaattcttgaaagcagcaagagaaaaatggtccatttcatagagaggaacaatgacatgattaatggctgac

SEQ ID NO: 14265 - DNA, 117 bp, Homo sapiens
  MAP TO CHR22_118.0; EXPRESSED IN BONE MARROW, SIGNAL = 0.53; EXPRESSED IN BRAIN, SIGNAL = 0.55; NT HIT: gi16168476, EVALUE 1.00e-59; SWISSPROT HIT: O43808, EVALUE 5.00e-16; EST_HUMAN HIT: AU123445.1, EVALUE 2.00e-59
caatgatacctttgtagtttgttggtacaatgtcttcattcctaaattttgctccttgaagcttcagtctggtgtttaccacccagagtggagttgttagcaacacattaaccactc

SEQ ID NO: 14266 - DNA, 84 bp, Homo sapiens
  MAP TO AC023123.3; EXPRESSED IN PLACENTA, SIGNAL = 0.53; EXPRESSED IN BONE MARROW, SIGNAL = 0.6; EXPRESSED IN BRAIN, SIGNAL = 0.53; EXPRESSED IN FETAL LIVER, SIGNAL = 0.48; EST_HUMAN HIT: AW891974.1, EVALUE 7.00e-15; NT HIT: AJ305025.1, EVALUE 2.60e-01
ttatcagcacctcaagaggttaaacatgagaattaaacaaaatgagagccaaaagggttatgaaaaagttgggcaatatgattt

SEQ ID NO: 14267 - DNA, 169 bp, Homo sapiens
  MAP TO CHR21_65.0; EXPRESSED IN FETAL LIVER, SIGNAL = 1.7; EXPRESSED IN LUNG, SIGNAL = 0.9; EXPRESSED IN ADULT LIVER, SIGNAL = 0.96; EXPRESSED IN BONE MARROW, SIGNAL = 1.8; EXPRESSED IN PLACENTA, SIGNAL = 0.91; EXPRESSED IN HELA, SIGNAL = 3.9; EXPRESSED IN BRAIN, SIGNAL = 1.9; EST_HUMAN HIT: BF747805.1, EVALUE 5.50e-02; NT HIT: AB038162.1, EVALUE 2.00e-90; SWISSPROT HIT: Q28793, EVALUE 2.90e-01
aacagaggatggcatgggagagcccaacctgccttccagagcctgcattcccacagccttccccagccaccctattcccctgggggagttccagttccagagaaaaagcagagctgttgtcagagctgtaggccgtgcggtagtgggcatcgggcccaacccagacagg

SEQ ID NO: 14268 - DNA, 266 bp, Homo sapiens
  MAP TO AL137799.2; EXPRESSED IN BONE MARROW, SIGNAL = 1.6; EXPRESSED IN BRAIN, SIGNAL = 1.4; EXPRESSED IN FETAL LIVER, SIGNAL = 1.1; EXPRESSED IN ADULT LIVER, SIGNAL = 0.32; EST_HUMAN HIT: AU121943.1, EVALUE 5.00e-93; SWISSPROT HIT: P03355, EVALUE 6.00e-19; NT HIT: AB026898.1, EVALUE 5.00e-95
ctgttgtgagcagagctgagccttttgtttggaaaccttgtagccacaggtggcgaggaaattcaagagcgcttgggtagcttgatggcacaaggtttctgaatgggtggctaaaagcaaatcatccacatactgaaggacaagagtgtcaaggtatgagaactggctcaagtcttgggttaacgcctggccaaatagatgggagctatcccggaacccttggggtaaaacagtccaggtgagttgagacgttgggttcgaaggat

SEQ ID NO: 14269 - DNA, 149 bp, Homo sapiens
  MAP TO AC013613.3; EXPRESSED IN HELA, SIGNAL = 1.5; EXPRESSED IN HEART, SIGNAL = 1.7; EXPRESSED IN PLACENTA, SIGNAL = 2.4; EXPRESSED IN ADULT LIVER, SIGNAL = 2.3; EXPRESSED IN BONE MARROW, SIGNAL = 2.4; EXPRESSED IN BRAIN, SIGNAL =   2; EXPRESSED IN FETAL LIVER, SIGNAL = 2.5; EXPRESSED IN LUNG, SIGNAL = 2.4; EST_HUMAN HIT: BG403053.1, EVALUE 2.00e-78; SWISSPROT HIT: P42685, EVALUE 2.00e-22; NT HIT: gi16162726, EVALUE 1.00e-78
tttgtagatattatgttcaccaacgaggacatttctggcagccagatctctgtgaatgtagttccgagactccagataggccattccagaggcaacctgtgccgccatgtctacctgttgagtcagatggatttttgatccagtgtcat

SEQ ID NO: 14270 - DNA, 83 bp, Homo sapiens
  MAP TO AL139022.1; EXPRESSED IN FETAL LIVER, SIGNAL = 6.2; EXPRESSED IN PLACENTA, SIGNAL = 8.1; EXPRESSED IN LUNG, SIGNAL = 7.2; EXPRESSED IN ADULT LIVER, SIGNAL = 6.8; EXPRESSED IN BONE MARROW, SIGNAL =   7; EXPRESSED IN BRAIN, SIGNAL = 6.5; EXPRESSED IN HEART, SIGNAL =   5; SWISSPROT HIT: P49356, EVALUE 4.00e-09; NT HIT: gi10835058, EVALUE 2.00e-39; EST_HUMAN HIT: BI755078.1, EVALUE 2.00e-39
ctgttctatggacgtgactgtttccaccgagtcgtcctgcaaccgctctcgcgcgtgctcgggcctcagactgtacagcggct

SEQ ID NO: 14271 - DNA, 145 bp, Homo sapiens
  MAP TO AC018715.3; EXPRESSED IN PLACENTA, SIGNAL = 8.9; EXPRESSED IN HELA, SIGNAL = 6.6; EXPRESSED IN BRAIN, SIGNAL = 8.2; EXPRESSED IN LUNG, SIGNAL = 7.9; EXPRESSED IN ADULT LIVER, SIGNAL = 6.8; EXPRESSED IN FETAL LIVER, SIGNAL = 7.1; EXPRESSED IN BONE MARROW, SIGNAL =   8; EXPRESSED IN HEART, SIGNAL = 7.2; SWISSPROT HIT: P21414, EVALUE 5.00e-03; NT HIT: gi14780192, EVALUE 3.20e-02; EST_HUMAN HIT: T59593.1, EVALUE 3.00e-03
ttcgaagcctaaatactggactcttttggaacagatttgagcttctttctgaacaccttatatctggctttccacaggaggtggaggaggtcttggattccttggaggcagtcctcttgggttgggtctgctggaagcaggtcat

SEQ ID NO: 14272 - DNA, 125 bp, Homo sapiens
  MAP TO AL138837.1; EXPRESSED IN LUNG, SIGNAL = 3.4; EXPRESSED IN FETAL LIVER, SIGNAL = 0.98; EXPRESSED IN PLACENTA, SIGNAL = 1.7; EXPRESSED IN ADULT LIVER, SIGNAL = 1.1; EXPRESSED IN BONE MARROW, SIGNAL = 1.7; EXPRESSED IN BRAIN, SIGNAL = 1.1; SWISSPROT HIT: Q60563, EVALUE 2.00e+00; NT HIT: AB069605.1, EVALUE 2.70e-02; EST_HUMAN HIT: BE063601.1, EVALUE 1.50e-01
gaattcataatctgttggaggagagagacgaggatatggataatggtaagcctgagatacatatcttaattacaaaacagagtgatcagaactataaagaagatgtagaagatgctgtatcagac

SEQ ID NO: 14273 - DNA, 133 bp, Homo sapiens
  MAP TO CHR21_67.0; EXPRESSED IN HEART, SIGNAL = 1.7; EXPRESSED IN PLACENTA, SIGNAL = 1.4; EXPRESSED IN LUNG, SIGNAL = 1.5; EXPRESSED IN ADULT LIVER, SIGNAL = 1.4; EXPRESSED IN FETAL LIVER, SIGNAL = 2.3; EXPRESSED IN BONE MARROW, SIGNAL = 2.6; EXPRESSED IN HELA, SIGNAL = 4.1; EXPRESSED IN BRAIN, SIGNAL = 2.2; EST_HUMAN HIT: AL531458.1, EVALUE 6.00e-69
tgaggctgtgttgatccaccttgaccgagatcccgcgcctggcagggcagctgccgctgtggattctccttggtgcagcttgctgaagtccactgtcttcctccaggagtctcctatttctgcagaggccagc

SEQ ID NO: 14274 - DNA, 474 bp, Homo sapiens
  MAP TO AC004846.2; EXPRESSED IN FETAL LIVER, SIGNAL = 2.4; EXPRESSED IN PLACENTA, SIGNAL = 2.4; EXPRESSED IN LUNG, SIGNAL = 2.7; EXPRESSED IN BONE MARROW, SIGNAL = 2.8; EXPRESSED IN HELA, SIGNAL = 2.6; EXPRESSED IN HEART, SIGNAL = 2.6; EXPRESSED IN ADULT LIVER, SIGNAL = 2.3; EXPRESSED IN BRAIN, SIGNAL = 2.6; EST_HUMAN HIT: BI192904.1, EVALUE 2.60e+00; SWISSPROT HIT: P12111, EVALUE 3.00e-11; NT HIT: gi14749657, EVALUE 0.00e+00
aggaggagctgtggaagggtggcgctggtgatccggcatctccacccagtccaggggccctggacccaagctcctgcccccatggccattctccaaaggcctgggtgtggggggcctcccctggcccaggctgttggtcttgccgccagagaccaccagaaggccagggctttctctgcaccgcggcccctgtcctgtgctggctgggttcctgctcgcctgcaggactgctgccgccaccatccgtgtgggtgctccttccagaagccccaggctggggacgacggggcccatggagagatccctggcagctgctcatgcactcttgctccgaggcaaagttattggcattgccatggcagccgccataccagaagcggttacattggcccacagaggcaacgaagtaccagcgggcagcccagtctgcgcaagagccatgggcactgggcagcaggcaccgcacggggtagg

SEQ ID NO: 14275 - DNA, 179 bp, Homo sapiens
  MAP TO CHR22_145.0; EXPRESSED IN BRAIN, SIGNAL = 0.63; EXPRESSED IN PLACENTA, SIGNAL = 1.1; EXPRESSED IN ADULT LIVER, SIGNAL = 1.1; EXPRESSED IN LUNG, SIGNAL = 0.85; EXPRESSED IN FETAL LIVER, SIGNAL = 0.75; EXPRESSED IN BONE MARROW, SIGNAL = 0.59; EST_HUMAN HIT: BE720080.1, EVALUE 2.00e-91; NT HIT: gi14778388, EVALUE 2.00e-96; SWISSPROT HIT: P38692, EVALUE 1.30e-01
gccatccttcacgcagagcgacagcttctgtataggtcttggttcatgtggcaccagcaggcagcagcacgtcaccaggagcaggagtggcaaacagtggcctgtgcccaccaccgccacgggcggctcaagaaagctttctgcctctggagggaaagtgcccaagggctcagaacaga

SEQ ID NO: 14276 - DNA, 111 bp, Homo sapiens
  MAP TO CHR22_83.0; EXPRESSED IN FETAL LIVER, SIGNAL = 0.46; EXPRESSED IN BONE MARROW, SIGNAL = 0.45; EXPRESSED IN BRAIN, SIGNAL = 0.44; EXPRESSED IN ADULT LIVER, SIGNAL = 0.75; EST_HUMAN HIT: BI117364.1, EVALUE 7.00e-56; NT HIT: gi14778734, EVALUE 5.00e-56; SWISSPROT HIT: Q9UJY5, EVALUE 3.00e-15
gttatgaaggtgaagctgcagccaccctcgggcacggagctgccagcttttaaccccatcgtccacccctcagcaatcacccaggtcctgctgcttgccaacccccagaag

SEQ ID NO: 14277 - DNA, 188 bp, Homo sapiens
  MAP TO CHR22_147.0; EXPRESSED IN BRAIN, SIGNAL = 0.28; EXPRESSED IN HELA, SIGNAL = 1.1; EXPRESSED IN ADULT LIVER, SIGNAL = 0.56; EXPRESSED IN BONE MARROW, SIGNAL = 0.43; SWISSPROT HIT: O93429, EVALUE 2.50e+00; NT HIT: AF331659.1, EVALUE 4.20e-02
atggcgcctgcgctcagtcataagctcttccctgcctgggtgccagcaagaagggcagggctgaggggagtcacctcgatggtgcagcccagtgatggacagctggagaggacgagcacaaaatgcagtcgcctccccaggcctctgcgcacgagaatcaagagtgcccttcccattctcaagacaag

SEQ ID NO: 14278 - DNA, 95 bp, Homo sapiens
  MAP TO AL137799.2; EXPRESSED IN PLACENTA, SIGNAL =   2; EXPRESSED IN LUNG, SIGNAL =   2; EXPRESSED IN FETAL LIVER, SIGNAL = 1.6; EXPRESSED IN BONE MARROW, SIGNAL = 1.8; EXPRESSED IN BRAIN, SIGNAL = 1.5; EXPRESSED IN HELA, SIGNAL = 1.2; SWISSPROT HIT: P48420, EVALUE 6.20e+00; NT HIT: gi16159294, EVALUE 1.00e-46; EST_HUMAN HIT: BE296045.1, EVALUE 2.00e-46
ccggtcataggtgtccccctccagttctccccatttcctgccatcccatgaggtaactcgaacttgatttccatccctgatctcttcaggcacat

SEQ ID NO: 14279 - DNA, 133 bp, Homo sapiens
  MAP TO AL138839.1; EXPRESSED IN BRAIN, SIGNAL = 0.63; EXPRESSED IN FETAL LIVER, SIGNAL = 0.77; EXPRESSED IN PLACENTA, SIGNAL = 0.83; EXPRESSED IN LUNG, SIGNAL = 0.78; EXPRESSED IN BONE MARROW, SIGNAL = 0.7; SWISSPROT HIT: O13880, EVALUE 2.60e+00; NT HIT: M94081.1, EVALUE 2.90e-02; EST_HUMAN HIT: BF897654.1, EVALUE 1.10e-02
attaaggaattgaggttcaaagacatcagtaacttgttcaaggtcacagagccaaaatgtgcatccaaccctaaaacccaagctctttcctctaaaccagggtgcctcatagtactaataatgacagtaatag

SEQ ID NO: 14280 - DNA, 543 bp, Homo sapiens
  MAP TO AL138722.2; EXPRESSED IN BONE MARROW, SIGNAL = 0.6; EXPRESSED IN ADULT LIVER, SIGNAL = 0.71; EXPRESSED IN BRAIN, SIGNAL = 1.5; EXPRESSED IN FETAL LIVER, SIGNAL = 0.58; EXPRESSED IN PLACENTA, SIGNAL = 0.75; EXPRESSED IN LUNG, SIGNAL = 0.72; SWISSPROT HIT: Q09749, EVALUE 4.00e-06; NT HIT: D49835.1, EVALUE 8.00e-03; EST_HUMAN HIT: BI546339.1, EVALUE 0.00e+00
cctgtcctgagggcgcggcacggagtgcatgcgggccgcggccatgacgaccgccatcttggagcgcctgagcaccctgtcggtcagcgggcagcagctgcgccgcctgcccaagatcctggaggatgggcttcccaagatgccttgcactgtcccagaaacggatgtgccccagctcttccgggagccttacatccgcaccggctaccgccccacggggcacgagtggcgctactacttcttcagcctctttcagaaacacaacgaggtggtcaacgtctggacccatttactggcagccctggccgtcctcttgcgattctgggcctttgccgaggctgaggccttgccatgggcgtctacccactccctgcctctgctcctcttcatcctgtcgtcaatcacttacctcacctgcagccttctggcccacctgctgcagtccaagtcagagctctcccactacaccttctactttgtggactatgttggcgtgagcgtttaccaatatggcagtgctttggctcatttcttctacagctc

SEQ ID NO: 14281 - DNA, 89 bp, Homo sapiens
  MAP TO AC021009.3; EXPRESSED IN FETAL LIVER, SIGNAL = 6.1; EXPRESSED IN BONE MARROW, SIGNAL =   7; EXPRESSED IN BRAIN, SIGNAL = 5.4; EXPRESSED IN HEART, SIGNAL = 4.8; EXPRESSED IN PLACENTA, SIGNAL = 6.7; EXPRESSED IN HELA, SIGNAL = 3.7; EXPRESSED IN LUNG, SIGNAL = 6.1; EXPRESSED IN ADULT LIVER, SIGNAL = 6.1; SWISSPROT HIT: P08548, EVALUE 8.20e-02; NT HIT: AL163210.2, EVALUE 2.80e-01; EST_HUMAN HIT: T95406.1, EVALUE 2.60e-02
atatactgatttcctttctttgggatatactgatttccttccactggggtgtatacccaggactggaattgctggatcatgtggtagct

SEQ ID NO: 14282 - DNA, 269 bp, Homo sapiens
  MAP TO AL138801.1; EXPRESSED IN FETAL LIVER, SIGNAL = 0.64; EXPRESSED IN BONE MARROW, SIGNAL = 0.7; EXPRESSED IN LUNG, SIGNAL = 0.89; EXPRESSED IN HELA, SIGNAL = 0.56; EXPRESSED IN BRAIN, SIGNAL = 0.83; EXPRESSED IN PLACENTA, SIGNAL = 0.97; EXPRESSED IN ADULT LIVER, SIGNAL = 0.64; EST_HUMAN HIT: AA083687.1, EVALUE 2.00e-09; SWISSPROT HIT: P08548, EVALUE 2.00e-18; NT HIT: AF111167.2, EVALUE 5.00e-18
cattaactagcattgctattttcatttctagtttaattccattgtggtctgagaaagtaagttgtatgatttcaattcttttaaatttgggaaagtgtgttttaggatacagaatgttgtctatcttagtgaatgtttcatatgagcttgagaaaaatgtataatctattgttgttggaaagagttgtctataaataccaatcagatcaaattgatcaatagtactcttcaggtcaaagccacccttactgattttctgcatgcttgac

SEQ ID NO: 14283 - DNA, 483 bp, Homo sapiens
  MAP TO CHR21_63.0; EXPRESSED IN BRAIN, SIGNAL = 1.5; EXPRESSED IN FETAL LIVER, SIGNAL = 1.5; EXPRESSED IN BONE MARROW, SIGNAL = 1.5; EXPRESSED IN LUNG, SIGNAL = 0.82; EXPRESSED IN HELA, SIGNAL = 3.3; EXPRESSED IN PLACENTA, SIGNAL = 0.69; EST_HUMAN HIT: AW978385.1, EVALUE 0.00e+00; SWISSPROT HIT: Q09602, EVALUE 3.30e+00; NT HIT: gi14780528, EVALUE 0.00e+00
tcagtagctgtacatctgctgctgctgctgctccgcctgcacctggggctgggccgcctgctgtgggggtgcctgcggctgcgagggtggcaagacgtcagtctggggcactgcccgccacgtgagcgggtgctggtcactaagctggctccccaggggcgtgatggagttgaccagggtcgtcaggttgatgaaatgggccacagactgtgggttcgaggcttccggctgggggtggatctggacgtcattttggcggttgtgcaacatggcagagccgctgacggtatcaaaggtcacggtcaggattgagttgtccagctgtaactggcgttcaggggtggtaaggtgccccacggccaccggctggagattggtaaactgagtcgcggccgcagtggtgatgggggtcacggtgatgttggttaagccgactgagctcgatggtgtggtcacatttgggtcacccagggtcaccactac

SEQ ID NO: 14284 - DNA, 292 bp, Homo sapiens
  MAP TO AC012482.3; EXPRESSED IN PLACENTA, SIGNAL = 1.9; EXPRESSED IN FETAL LIVER, SIGNAL = 1.8; EXPRESSED IN LUNG, SIGNAL = 2.7; EXPRESSED IN ADULT LIVER, SIGNAL = 2.6; EXPRESSED IN BONE MARROW, SIGNAL = 2.3; EXPRESSED IN BRAIN, SIGNAL = 2.5; EST_HUMAN HIT: BF352136.1, EVALUE 0.00e+00; SWISSPROT HIT: O43525, EVALUE 8.00e-55; NT HIT: gi4758629, EVALUE 0.00e+00
tgggtccccctcggggcaggttcacagggtcatgtgcaaaaaacccataggggctgactttgtcaatggtcacctggtggaagctgtagggtggttccggggggcctgtctcagaatagttgcagatgatggttttcaaatcggaatacctgttgtcctccttcttctctgcttcagctggcgaggaggtgcccttggttgggtaatactccgtgacctgcacctgcaaccgttccatgtgttgcatgtgcatatccacgaggaagtccagcttcttccccatgtcctgaac

SEQ ID NO: 14285 - DNA, 99 bp, Homo sapiens
  MAP TO AL137795.2; EXPRESSED IN BRAIN, SIGNAL = 0.86; EXPRESSED IN PLACENTA, SIGNAL = 0.59; EXPRESSED IN FETAL LIVER, SIGNAL = 0.46; EXPRESSED IN BONE MARROW, SIGNAL = 0.48; NT HIT: X75494.1, EVALUE 1.20e+00; EST_HUMAN HIT: BE159177.1, EVALUE 1.80e+00
atgtcagcaatcatgaagtcgagagagagctgcagtcgtccgctagtgtctgccatgctgcaattgtctgttaatgtctgccagaggtgcacctggaag

SEQ ID NO: 14286 - DNA, 130 bp, Homo sapiens
  MAP TO AL137017.4; EXPRESSED IN BONE MARROW, SIGNAL = 0.53; EXPRESSED IN PLACENTA, SIGNAL = 0.56; EXPRESSED IN LUNG, SIGNAL = 0.52; EXPRESSED IN BRAIN, SIGNAL = 0.56; EXPRESSED IN ADULT LIVER, SIGNAL = 0.55
caggaagctcatcacactccctgtgatttggaacttccagacacccaaatttcctctgaagtttatgccgcggctcctctgtacaccaatgatctgcatcctgagctggtccaagctgtttctcctcatg

SEQ ID NO: 14287 - DNA, 162 bp, Homo sapiens
  MAP TO AL137013.2; EXPRESSED IN PLACENTA, SIGNAL = 7.2; EXPRESSED IN FETAL LIVER, SIGNAL = 7.4; EXPRESSED IN LUNG, SIGNAL = 8.7; EXPRESSED IN ADULT LIVER, SIGNAL = 6.9; EXPRESSED IN BONE MARROW, SIGNAL =   8; EXPRESSED IN BRAIN, SIGNAL = 7.1; EXPRESSED IN HELA, SIGNAL = 5.9; EXPRESSED IN HEART, SIGNAL = 6.3; SWISSPROT HIT: P18562, EVALUE 2.00e-14; NT HIT: M19703.1, EVALUE 5.60e-01; EST_HUMAN HIT: AW956034.1, EVALUE 4.00e-86
gtgaggcaatggaacaaggtttacgagactgctgtcgatccatacgaattggaaagatcctgattcagagtgatgaggagacacaaagagccaaagtatattatgccaaattccccccagacatttaccggagaaaagtccttctgatgtatccaattctca

SEQ ID NO: 14288 - DNA, 101 bp, Homo sapiens
  MAP TO AL139112.1; EXPRESSED IN BONE MARROW, SIGNAL = 0.62; EXPRESSED IN PLACENTA, SIGNAL = 0.58; EXPRESSED IN LUNG, SIGNAL = 0.61; EXPRESSED IN BRAIN, SIGNAL = 0.51; EXPRESSED IN ADULT LIVER, SIGNAL = 0.63; NT HIT: D63861.1, EVALUE 1.00e-06; EST_HUMAN HIT: BE670182.1, EVALUE 5.00e-07
tcaatatgtcaaagaggtatctgctctcccatgctcgttccagcagtattcacaaatggccaagttgtggaagcaacgtaagtacccatcgatggatgaac

SEQ ID NO: 14289 - DNA, 98 bp, Homo sapiens
  MAP TO AC011676.4; EXPRESSED IN PLACENTA, SIGNAL = 1.4; EXPRESSED IN LUNG, SIGNAL = 1.3; EXPRESSED IN HELA, SIGNAL = 1.1; EXPRESSED IN BRAIN, SIGNAL = 1.3; EXPRESSED IN ADULT LIVER, SIGNAL = 1.3; EXPRESSED IN FETAL LIVER, SIGNAL = 1.3; EXPRESSED IN BONE MARROW, SIGNAL = 1.4; SWISSPROT HIT: O70165, EVALUE 4.70e+00
atgcccagaggagtcaaaaaggcacaaggggagacaggcctggctccagcccttggggtgcccaaggcactgggtgcccacagcccctcctcgggaag

SEQ ID NO: 14290 - DNA, 159 bp, Homo sapiens
  MAP TO AC021607.4; EXPRESSED IN BONE MARROW, SIGNAL = 1.3; EXPRESSED IN PLACENTA, SIGNAL = 1.2; EXPRESSED IN LUNG, SIGNAL = 1.1; EXPRESSED IN BRAIN, SIGNAL = 1.3; EXPRESSED IN ADULT LIVER, SIGNAL = 1.1; EXPRESSED IN HELA, SIGNAL = 0.82; EXPRESSED IN FETAL LIVER, SIGNAL =   1; SWISSPROT HIT: P34619, EVALUE 7.60e+00; NT HIT: X81841.1, EVALUE 1.40e-01; EST_HUMAN HIT: BG771578.1, EVALUE 2.00e-84
ctttattcttcattgagagcatgtagaatctcactctaaccactgtcttctgacgctttgcacatttgacctttgtaagtgtggctgataaaccagaaggctgctgaccagtttccatctcctgctttcccttttcatctttgcaggtcgcagagatgg

SEQ ID NO: 14291 - DNA, 203 bp, Homo sapiens
  MAP TO AL137005.2; EXPRESSED IN BONE MARROW, SIGNAL = 0.73; EXPRESSED IN BRAIN, SIGNAL = 0.72; EXPRESSED IN FETAL LIVER, SIGNAL = 0.6; EXPRESSED IN PLACENTA, SIGNAL = 0.81; EXPRESSED IN LUNG, SIGNAL = 0.68; EXPRESSED IN ADULT LIVER, SIGNAL = 0.74; SWISSPROT HIT: P50617, EVALUE 1.10e+00; NT HIT: Z92772.1, EVALUE 1.80e-01
atgctgcgaagaggccgtgggtagtttcctctggaagcaattcattctcattgctgtctggggtttcctccctctgaatgttctgctgatttttcgccgcaccacaagcctcaacgcggcatgcgccaggtgccccaggcttcccccggctgcgccttccttgctgtgagtgccacagcagccggtgctcctccaggccatgg

SEQ ID NO: 14292 - DNA, 160 bp, Homo sapiens
  MAP TO AC020759.3; EXPRESSED IN FETAL LIVER, SIGNAL = 0.88; EXPRESSED IN ADULT LIVER, SIGNAL = 0.87; EXPRESSED IN BONE MARROW, SIGNAL = 1.6; EXPRESSED IN PLACENTA, SIGNAL = 0.98; EXPRESSED IN HELA, SIGNAL = 1.3; EXPRESSED IN BRAIN, SIGNAL = 1.3; EST_HUMAN HIT: BE379967.1, EVALUE 6.00e-85; SWISSPROT HIT: P27680, EVALUE 3.40e-02; NT HIT: gi16164644, EVALUE 4.00e-85
cgttttccacatagggatgaaaggggaggacaagggcaaggatgaccctgcctctagttggctccaagacacttctgatatcttttaacaaagtcaggggctgatcacagcggtccagcaagttcaggcagctgatgacatcatactggaaccccgtatt

SEQ ID NO: 14293 - DNA, 231 bp, Homo sapiens
  MAP TO AL137070.3; EXPRESSED IN HELA, SIGNAL = 1.5; EXPRESSED IN BRAIN, SIGNAL = 1.6; EXPRESSED IN HEART, SIGNAL = 1.6; EXPRESSED IN PLACENTA, SIGNAL = 1.6; EXPRESSED IN LUNG, SIGNAL = 1.6; EXPRESSED IN FETAL LIVER, SIGNAL = 1.6; EXPRESSED IN ADULT LIVER, SIGNAL = 1.5; EXPRESSED IN BONE MARROW, SIGNAL = 1.7; EST_HUMAN HIT: BF931516.1, EVALUE 1.20e+00
ttgagatgatcgacaacaagaggattttcatttgctttgtcagtgtaagctggctgctgtgcatctgcagtgaaggcagcacaggtctctgtttgcattctgcggtttgttagcatcaatgacctgtcacagaaaggctctgcagcacaatatttacacagatcattagcagagcagaccctgcttgccagatcgctaatcagttttgtgactgccccagtttcatcaaga

SEQ ID NO: 14294 - DNA, 195 bp, Homo sapiens
  MAP TO AL137793.1; EXPRESSED IN BRAIN, SIGNAL = 2.7; EXPRESSED IN HELA, SIGNAL = 1.4; EXPRESSED IN FETAL LIVER, SIGNAL = 2.1; EXPRESSED IN HEART, SIGNAL = 2.4; EXPRESSED IN BONE MARROW, SIGNAL = 2.4; EST_HUMAN HIT: AL120612.1, EVALUE 1.00e-89; SWISSPROT HIT: P13002, EVALUE 2.50e+00
ggaatttgaagaatctccaggagggccagagagtagacttggatgccacccagccagcaatagagaagttgggaccacccagccagggacaaggccacacctcagccatcaccacccacaagcaacgcagcatgtatgagctgggacaggacaccagaaactacctcatgattgctccggaagaagcagctgcag

SEQ ID NO: 14295 - DNA, 124 bp, Homo sapiens
  MAP TO AL136099.2; EXPRESSED IN BRAIN, SIGNAL = 0.58; EXPRESSED IN PLACENTA, SIGNAL = 0.5; EXPRESSED IN LUNG, SIGNAL = 0.5; EXPRESSED IN ADULT LIVER, SIGNAL = 0.55; EXPRESSED IN FETAL LIVER, SIGNAL = 0.49; EXPRESSED IN BONE MARROW, SIGNAL = 0.51; EST_HUMAN HIT: AI678313.1, EVALUE 6.10e-01; SWISSPROT HIT: O28426, EVALUE 3.50e+00; NT HIT: Z99768.1, EVALUE 1.00e-01
ctgcagggatattgcccggcgagggttcagaggctgcagctttaggtactgatctcagtatcacctgacgagacctgtgaattctctcaccatacctccaccattcattatcatcatcaatcat

SEQ ID NO: 14296 - DNA, 237 bp, Homo sapiens
  MAP TO CHR22_181.0; EXPRESSED IN BRAIN, SIGNAL = 0.57; EXPRESSED IN PLACENTA, SIGNAL = 0.62; EXPRESSED IN ADULT LIVER, SIGNAL = 0.6; SWISSPROT HIT: P11542, EVALUE 4.90e+00; NT HIT: AF209773.1, EVALUE 2.20e-01; EST_HUMAN HIT: BE410433.1, EVALUE 1.20e+00
ctcctggttctaaggattctgccaggttgaacaatgctcagaagcaggtggcagtttagcaattcattcagagggacctggggctgtgcccgtccccggtggcaaggagagactgcagtaagagactgcagtgtggaactttgaaatctcttctctaaagaatcctcctcctcctcctcttctttctcctcctcctcctccttctcctcctccgtagtactacggacacatgtgctc

SEQ ID NO: 14297 - DNA, 369 bp, Homo sapiens
  MAP TO AC012580.3; EXPRESSED IN BRAIN, SIGNAL = 5.9; EXPRESSED IN HELA, SIGNAL = 5.6; EXPRESSED IN PLACENTA, SIGNAL = 5.1; EXPRESSED IN ADULT LIVER, SIGNAL = 8.6; EXPRESSED IN FETAL LIVER, SIGNAL = 5.4; EXPRESSED IN LUNG, SIGNAL =   7; SWISSPROT HIT: P05092, EVALUE 8.00e-15; NT HIT: gi13646800, EVALUE 6.00e-49; EST_HUMAN HIT: BG331064.1, EVALUE 4.00e-54
ctagacttagagaataaggaaaatatggaacccaaagaattgcaacaagagcacaaagataatggacattgcaagcagatgggatggagggatactctcttgagctacagaaagaacagtgtggtggctaagataaaacacaagccaaatttattagagttgtccacagttagcaatggcgatcttcttgttggtcttgccatttctggacccaaagcactctgtgccttccaagatattccttctgtctttaccttgccaaaaaaccacatgcttgccatccaaccactcaggcccagctgtgcagatgatagactggaactgttgatgttgggttcagaatttgccatggacaagatgccaggacct

SEQ ID NO: 14298 - DNA, 164 bp, Homo sapiens
  MAP TO CHR22_153.0; EXPRESSED IN ADULT LIVER, SIGNAL = 0.66; EXPRESSED IN FETAL LIVER, SIGNAL = 0.39; EXPRESSED IN LUNG, SIGNAL = 0.46; EXPRESSED IN BONE MARROW, SIGNAL = 0.53; EXPRESSED IN BRAIN, SIGNAL = 0.49; SWISSPROT HIT: Q61670, EVALUE 3.40e-02; NT HIT: gi14776874, EVALUE 6.00e-75; EST_HUMAN HIT: BF957743.1, EVALUE 8.00e-75
atcagcactggtctgacagcccgtcggatgctgacagagagctgcgtttgccgtgcccagctgagggggaagcagagctggagctgagggtgtcggaagatgaggagaagctgcccgcctcaccgaagcaccaagagagaggtgagcctgtctttgatgggaga

SEQ ID NO: 14299 - DNA, 187 bp, Homo sapiens
  MAP TO AC015833.3; EXPRESSED IN BONE MARROW, SIGNAL = 0.59; EXPRESSED IN PLACENTA, SIGNAL = 0.89; EXPRESSED IN BRAIN, SIGNAL = 0.71; EXPRESSED IN LUNG, SIGNAL = 0.67; EXPRESSED IN ADULT LIVER, SIGNAL = 0.64; EST_HUMAN HIT: BG999158.1, EVALUE 9.70e-01; SWISSPROT HIT: P13267, EVALUE 8.50e-01
ttaaatgttcaacattgcctttaaaaagataactgttatctttttaaagttagttataacaatgtctgaattgttctttacttgctcttcagatgacatgacaaaagctatccctttctcaataaggttcagagtcttaaaattggtgatggcattaataataacagagccttttaaatcaccattg

SEQ ID NO: 14300 - DNA, 173 bp, Homo sapiens
  MAP TO CHR21_73.0; EXPRESSED IN BONE MARROW, SIGNAL = 1.3; EXPRESSED IN HELA, SIGNAL =   2; EXPRESSED IN BRAIN, SIGNAL = 1.2; EXPRESSED IN LUNG, SIGNAL = 0.68; EXPRESSED IN FETAL LIVER, SIGNAL = 1.2; EXPRESSED IN ADULT LIVER, SIGNAL = 0.6; EXPRESSED IN PLACENTA, SIGNAL = 0.65; EST_HUMAN HIT: BE902138.1, EVALUE 1.00e-92; SWISSPROT HIT: O00555, EVALUE 3.30e+00; NT HIT: gi14780689, EVALUE 8.00e-93
cgactctcggtcgtagaaggccttgagctggctgcgccacttcctccgacgctgcagcagcccgcttcgggaggacggcaggcacaggtagcacacccagttgctcatggcgtgcaccttccccgaggtcccggggccgaccaggctatccacacactcgaagcagtagcatc

SEQ ID NO: 14301 - DNA, 97 bp, Homo sapiens
  MAP TO AC018681.5; EXPRESSED IN BRAIN, SIGNAL = 0.52; EXPRESSED IN FETAL LIVER, SIGNAL = 0.42; EXPRESSED IN BONE MARROW, SIGNAL = 0.5; EXPRESSED IN PLACENTA, SIGNAL = 0.46; EXPRESSED IN LUNG, SIGNAL = 0.54; NT HIT: AJ271735.1, EVALUE 6.00e-18; EST_HUMAN HIT: AA555098.1, EVALUE 2.00e-21
atccataagcataaagactatccagaaaaacatgacctcaccaaacaaattaaataaggcagcagtgaccaatcccagagtgacagagatatgtgac

SEQ ID NO: 14302 - DNA, 237 bp, Homo sapiens
  MAP TO CHR22_164.0; EXPRESSED IN LUNG, SIGNAL = 1.2; EXPRESSED IN PLACENTA, SIGNAL = 1.1; EXPRESSED IN ADULT LIVER, SIGNAL = 1.6; EXPRESSED IN FETAL LIVER, SIGNAL = 1.1; EXPRESSED IN BONE MARROW, SIGNAL = 0.82; EXPRESSED IN BRAIN, SIGNAL = 0.95; SWISSPROT HIT: P75559, EVALUE 9.70e-01; NT HIT: AF139494.1, EVALUE 2.00e-91; EST_HUMAN HIT: BI092387.1, EVALUE 1.00e-130
ctctttcagcttcttggcccagggcttctgtgccttccgaaagccgtcctcagcttccttggtctccttgaagccgcccatcatctgcttgtgaaaggcttccttctgccagttcttgatcttctcgaagtcatcgttcatcagtgaggccttcacctcgaggtgcagctcgctcaccctctctgcctcggacatgaaggccatccaggccttctccacggtcccgtactggggccc

SEQ ID NO: 14303 - DNA, 129 bp, Homo sapiens
  MAP TO AL137157.2; EXPRESSED IN BRAIN, SIGNAL = 0.85; EXPRESSED IN FETAL LIVER, SIGNAL = 0.59; EXPRESSED IN BONE MARROW, SIGNAL = 0.82; EXPRESSED IN PLACENTA, SIGNAL = 0.78; EXPRESSED IN ADULT LIVER, SIGNAL = 0.77; SWISSPROT HIT: Q12284, EVALUE 7.80e+00; NT HIT: gi14727739, EVALUE 1.10e-01; EST_HUMAN HIT: BF811472.1, EVALUE 1.60e-01
atctgcacactccctgtggtggaaaaggtcagcgtcgaccctgtgaacactgttcacactccttcgttaagttatttagttagccaaaacttagatattttcacaaaagtcccagtaaatattgaactc

SEQ ID NO: 14304 - DNA, 231 bp, Homo sapiens
  MAP TO CHR22_179.0; EXPRESSED IN BONE MARROW, SIGNAL = 0.74; EXPRESSED IN BRAIN, SIGNAL = 0.71; EXPRESSED IN FETAL LIVER, SIGNAL = 0.73; EXPRESSED IN PLACENTA, SIGNAL = 0.6; SWISSPROT HIT: P46109, EVALUE 2.00e-41; NT HIT: gi11417808, EVALUE 1.00e-127; EST_HUMAN HIT: AA452941.1, EVALUE 1.00e-127
agcttttcgacataagggacaggaatcatcccaacccggccatccttgttccgggcactccaccactgttcttcaggcttctctattatcactaggatctcaccctttttaaagggcaggtcttcggcatcattcccaggaaaatcatacagagtccgtacatattccaggttatcttctgctgtaggcaggttgggtgctgagacagatcccattggtgggcttggatac

SEQ ID NO: 14305 - DNA, 94 bp, Homo sapiens
  MAP TO AL137071.3; EXPRESSED IN BRAIN, SIGNAL = 0.65; EXPRESSED IN FETAL LIVER, SIGNAL = 0.57; EXPRESSED IN PLACENTA, SIGNAL = 0.61; EXPRESSED IN LUNG, SIGNAL = 0.58; EXPRESSED IN ADULT LIVER, SIGNAL = 0.69; EXPRESSED IN BONE MARROW, SIGNAL = 0.62; SWISSPROT HIT: P08548, EVALUE 6.00e-05; NT HIT: AJ243213.1, EVALUE 5.00e-03; EST_HUMAN HIT: BI018307.1, EVALUE 7.00e-03
atcctgagaatgcctttgacaaaattcattacccattcataataaaaaccctcaaggaaataggaattgagggctacttccttaacattataaa

SEQ ID NO: 14306 - DNA, 246 bp, Homo sapiens
  MAP TO AC013648.3; EXPRESSED IN ADULT LIVER, SIGNAL = 0.41; EXPRESSED IN BRAIN, SIGNAL = 0.46; SWISSPROT HIT: P34545, EVALUE 1.40e+00; EST_HUMAN HIT: BI063109.1, EVALUE 2.00e-73
ttccatcatcccggcttgatctcactggtcctcactttgaatcttctattctctctccctgtgaggatgttacacttacaaaataccaggtgactgttcccagagctgccttggcccctgagcttgctctggaaattccttctgggtctcaggctgatattcctcttcccaagacagagtgctccactgacctgcagcctccagagggagttccaacatctcaagctgagagtcactctggcccac

SEQ ID NO: 14307 - DNA, 190 bp, Homo sapiens
  MAP TO CHR22_166.0; EXPRESSED IN FETAL LIVER, SIGNAL = 0.85; EXPRESSED IN BONE MARROW, SIGNAL = 0.63; EXPRESSED IN LUNG, SIGNAL = 0.79; EXPRESSED IN BRAIN, SIGNAL = 0.69; EXPRESSED IN PLACENTA, SIGNAL =   1; EXPRESSED IN ADULT LIVER, SIGNAL = 0.73; EST_HUMAN HIT: BE900707.1, EVALUE 3.90e+00; SWISSPROT HIT: P32927, EVALUE 6.00e-35; NT HIT: gi11418060, EVALUE 1.00e-103
gacctcctggagccagtgtcctgtgacctcagtgatgacatgccctggtcagcctgcccccatccccgctgcgtgcccaggagatgtgtcattccctgccagagttttgtcgtcactgacgttgactacttctcattccaaccagacaggcctctgggcacccggctcaccgtcactctgacccagcatg

SEQ ID NO: 14308 - DNA, 125 bp, Homo sapiens
  MAP TO CHR22_108.0; EXPRESSED IN PLACENTA, SIGNAL = 0.75; EXPRESSED IN HELA, SIGNAL = 1.6; EXPRESSED IN BRAIN, SIGNAL = 1.3; EXPRESSED IN FETAL LIVER, SIGNAL = 1.1; EXPRESSED IN HEART, SIGNAL = 1.1; SWISSPROT HIT: P10496, EVALUE 2.00e+00; NT HIT: AE004443.1, EVALUE 1.00e-01; EST_HUMAN HIT: BE394633.1, EVALUE 3.90e-02
gatttagtgggcaggtccctccgtgctccccctggctgcctgttcttcctccatcttgcccttctcacactgctgagcctccatcaccatagcaactccaaaactggcccaaggcctggctcaag

SEQ ID NO: 14309 - DNA, 154 bp, Homo sapiens
  MAP TO AL096764.11; EXPRESSED IN FETAL LIVER, SIGNAL = 7.9; EXPRESSED IN BRAIN, SIGNAL = 4.2; EXPRESSED IN PLACENTA, SIGNAL = 3.4; SWISSPROT HIT: P11249, EVALUE 9.00e-20; NT HIT: U52111.2, EVALUE 4.00e-48; EST_HUMAN HIT: AW050981.1, EVALUE 6.00e-48
acggcgcaggacctggtggggcagcgggaacttgaccttagagtcgtggaactgcttgacggacggccggcggcacttgccggctgcgatctcctccaccttcatgatctggatggagtgggcctgggcgcagtgccgagagtccatgactcgg

SEQ ID NO: 14310 - DNA, 117 bp, Homo sapiens
  MAP TO CHR22_7.0; EXPRESSED IN BRAIN, SIGNAL = 5.1; EXPRESSED IN HELA, SIGNAL =  11; EXPRESSED IN FETAL LIVER, SIGNAL = 4.3; EXPRESSED IN BONE MARROW, SIGNAL = 4.4; EXPRESSED IN HEART, SIGNAL = 3.2; EST_HUMAN HIT: AI424331.1, EVALUE 5.70e-01; NT HIT: X53749.1, EVALUE 2.00e-03
ctgggttcaaaatctgatgcttactggctgtgtgatctgggtgaagccccttgttgtctctgagccttgatttcttcatctgaaaagcaaggatcataatgctgattgtgtttgtgt

SEQ ID NO: 14311 - DNA, 85 bp, Homo sapiens
  MAP TO AC016729.5; EXPRESSED IN FETAL LIVER, SIGNAL = 0.56; EXPRESSED IN PLACENTA, SIGNAL = 0.75; EXPRESSED IN ADULT LIVER, SIGNAL = 0.66; EXPRESSED IN LUNG, SIGNAL = 0.62; EXPRESSED IN BONE MARROW, SIGNAL = 0.58; EXPRESSED IN BRAIN, SIGNAL = 0.69; EST_HUMAN HIT: R26536.1, EVALUE 2.00e-03; NT HIT: AF101099.1, EVALUE 1.00e+00
atggactggggtgatgagatcatgtctctgattacgaatacttacggtatttccctttgtaaaggcaatgagagtaatgaaagaa

SEQ ID NO: 14312 - DNA, 153 bp, Homo sapiens
  MAP TO AL133261.4; EXPRESSED IN BRAIN, SIGNAL = 0.99; EXPRESSED IN PLACENTA, SIGNAL = 1.2; EXPRESSED IN HELA, SIGNAL = 0.67; EXPRESSED IN LUNG, SIGNAL = 1.5; EXPRESSED IN ADULT LIVER, SIGNAL = 1.2; EXPRESSED IN FETAL LIVER, SIGNAL = 1.1; EXPRESSED IN BONE MARROW, SIGNAL = 0.96; NT HIT: gi13937343, EVALUE 3.40e-02; SWISSPROT HIT: P11638, EVALUE 5.10e-01; EST_HUMAN HIT: BG219567.1, EVALUE 8.00e-04
aaatttcacactccatctttttcattttaaatcctttgacattaatcacagttattttaaaatctctgatactgccaacattttgatcatctctgagtctggttctgttgactggtttgtctgtcgacaagtgattgttctctgccttggctt

SEQ ID NO: 14313 - DNA, 152 bp, Homo sapiens
  MAP TO AC017112.5; EXPRESSED IN PLACENTA, SIGNAL = 0.55; EXPRESSED IN BRAIN, SIGNAL = 0.57; EXPRESSED IN LUNG, SIGNAL = 0.6; EXPRESSED IN FETAL LIVER, SIGNAL = 0.49; EXPRESSED IN BONE MARROW, SIGNAL = 0.48; NT HIT: AF111167.2, EVALUE 8.00e-03; SWISSPROT HIT: P19096, EVALUE 3.40e+00; EST_HUMAN HIT: AA300312.1, EVALUE 3.00e+00
caaagaacaggagaaaaaaaaggcatagatgtacaactcagaattattctgtgtttcaccgccataagaatgtcaaccccacaactccacaacagactctgtctgttgttcatggttgtatccctgatgcccagaacacagcctggaacaca

SEQ ID NO: 14314 - DNA, 134 bp, Homo sapiens
  MAP TO CHR22_164.0; EXPRESSED IN LUNG, SIGNAL = 0.73; EXPRESSED IN BONE MARROW, SIGNAL = 0.69; EXPRESSED IN ADULT LIVER, SIGNAL = 0.76; EXPRESSED IN BRAIN, SIGNAL = 0.64; EXPRESSED IN FETAL LIVER, SIGNAL = 0.53; EST_HUMAN HIT: AL603420.1, EVALUE 2.00e-69; SWISSPROT HIT: P13186, EVALUE 4.50e+00
tatcgttccaactcctccacttcaggcaggcccccgacacacacgatcattccaccttcttcattctctgaaactcttccttctccctctccaagatccaggctcagaacctctggagacacgaccagagccat

SEQ ID NO: 14315 - DNA, 196 bp, Homo sapiens
  MAP TO CHR22_167.0; EXPRESSED IN BONE MARROW, SIGNAL = 0.61; EXPRESSED IN LUNG, SIGNAL = 0.62; EXPRESSED IN PLACENTA, SIGNAL = 0.57; EXPRESSED IN ADULT LIVER, SIGNAL = 0.65; EXPRESSED IN BRAIN, SIGNAL = 0.64; NT HIT: D63487.1, EVALUE 1.00e-106; EST_HUMAN HIT: BG768679.1, EVALUE 1.00e-106; SWISSPROT HIT: Q14166, EVALUE 2.00e-33
cacctttcccgctgctggaagtagctgacaaactggggcagctcagtgcgcaggttgaaggttcggggcagccagggtgggccctcggggccacctgcccggcgcgcgatggaggccaggcagtccttgacagtcagcaggttctcgcaggggaactggttcagcagcacgcctggcctctcctggctgagtttcc

SEQ ID NO: 14316 - DNA, 59 bp, Homo sapiens
  MAP TO CHR21_70.0; EXPRESSED IN FETAL LIVER, SIGNAL = 1.8; EXPRESSED IN BONE MARROW, SIGNAL = 2.1; EXPRESSED IN LUNG, SIGNAL = 0.98; EXPRESSED IN HEART, SIGNAL = 1.5; EXPRESSED IN HELA, SIGNAL = 4.1; EXPRESSED IN PLACENTA, SIGNAL = 0.99; EXPRESSED IN BRAIN, SIGNAL = 1.8; NT HIT: AE007144.1, EVALUE 4.10e-02; EST_HUMAN HIT: BI027914.1, EVALUE 9.40e-01
tggggaaagaggacgttcttgcggaccttgacctccatgccggcagccggaccccggag

SEQ ID NO: 14317 - DNA, 168 bp, Homo sapiens
  MAP TO AL136457.1; EXPRESSED IN HELA, SIGNAL = 0.77; EXPRESSED IN FETAL LIVER, SIGNAL = 1.3; EXPRESSED IN ADULT LIVER, SIGNAL = 1.4; EXPRESSED IN BONE MARROW, SIGNAL = 1.3; EXPRESSED IN LUNG, SIGNAL = 1.3; EXPRESSED IN BRAIN, SIGNAL = 1.2; NT HIT: AF338230.1, EVALUE 2.00e-06; SWISSPROT HIT: P08547, EVALUE 2.00e-04; EST_HUMAN HIT: AA700562.1, EVALUE 4.00e-03
tacatgatctgaataaacacttcatcaaagatgtacagataaaaaatgagcaaatggagaaatgttcaaggtcatatgtcattagagaaatgcagattgaaacaacgagatacctctacacacaggttagaatgatcaaattcataacattaacaacaccaaatgctg

SEQ ID NO: 14318 - DNA, 130 bp, Homo sapiens
  MAP TO CHR22_168.0; EXPRESSED IN PLACENTA, SIGNAL = 1.3; EXPRESSED IN BRAIN, SIGNAL = 1.5; EXPRESSED IN LUNG, SIGNAL = 1.4; EXPRESSED IN HELA, SIGNAL =   1; EXPRESSED IN ADULT LIVER, SIGNAL = 1.1; EXPRESSED IN FETAL LIVER, SIGNAL =   1; EXPRESSED IN BONE MARROW, SIGNAL = 1.3; EXPRESSED IN HEART, SIGNAL = 2.1; SWISSPROT HIT: O04887, EVALUE 4.60e+00; EST_HUMAN HIT: AW961935.1, EVALUE 2.00e-59; NT HIT: gi14777617, EVALUE 3.00e-67
tatgttccccagatgtcttccagatttgctctgcatgtggtaacttgtgttagggctgtgagctgttcctcgagttgaatggggatgtcagtgctcctagggttctccaggtggttcttcagaccttcac

SEQ ID NO: 14319 - DNA, 459 bp, Homo sapiens
  MAP TO AC018432.4; EXPRESSED IN HELA, SIGNAL = 1.9; EXPRESSED IN FETAL LIVER, SIGNAL = 3.2; EXPRESSED IN PLACENTA, SIGNAL = 3.8; EXPRESSED IN LUNG, SIGNAL = 3.5; EXPRESSED IN ADULT LIVER, SIGNAL = 3.5; EXPRESSED IN BONE MARROW, SIGNAL = 3.2; EXPRESSED IN BRAIN, SIGNAL = 3.2; SWISSPROT HIT: P12839, EVALUE 2.40e+00; EST_HUMAN HIT: BG979467.1, EVALUE 4.10e-02; NT HIT: AL161534.2, EVALUE 6.80e+00
agtgtatgtggaagtgataattgctctgcctcaaaaattgtgccttcaggttgcattatataatccacacttactgtttttcctctatctacttctttctgtggcttgtattcttgtactgtttttacatcatttgagctatccaccccaaaagactttgtatgtgctattttccctgcatcaaatgatttctgctgccttagttgcaaagtagcagattttattattccttgtaagtcttcctctccttcttttcttgtgttcaattcataacaagttagagaagactcacaacgcaaatgtaggaagagaactgtttcctgtttactcttgtgtccatcccttttctcttgctctgtgcctactccatctgcttgctgttgctcttcagtttctccatccctgttcccttgctcctcaccttctccgtcctctttcccttgctcctggccttctcca

SEQ ID NO: 14320 - DNA, 480 bp, Homo sapiens
  MAP TO CHR22_203.0; EXPRESSED IN HELA, SIGNAL = 2.3; EXPRESSED IN FETAL LIVER, SIGNAL = 2.1; EXPRESSED IN HEART, SIGNAL = 2.1; EXPRESSED IN PLACENTA, SIGNAL = 1.1; EXPRESSED IN LUNG, SIGNAL = 0.84; EXPRESSED IN ADULT LIVER, SIGNAL = 0.72; EXPRESSED IN BRAIN, SIGNAL = 1.8; SWISSPROT HIT: O95985, EVALUE 3.00e-74; EST_HUMAN HIT: BG180123.1, EVALUE 0.00e+00; NT HIT: gi4507634, EVALUE 0.00e+00
gcatgggctgcaacgagtgtacgcacccctcctgccagcactcgctgagcatgctgggcatcggccagtgcgtggaatgtgagagcggggtgctggtgctggaccccacctcgggccccaagtggaaggtggcctgcaacaagtgcaacgtggtagcgcactgcttcgagaacgcccaccgcgtgcgggtgtccgccgacacctgcagtgtctgtgaggccgccttgcttgatgtggacttcaacaaggccaagtccccactcccgggcgatgaggcgcagcacatgggctgcgtcttttgtgaccccgtcttccaggagctggtggagctgaagcatgcggcctcctgccaccccatgcaccgcggtggaccagggagaaggcagggtcgagggcggggccgggccaggaggccccctgggaagcccaaccccagacggcccaaggacaagatgtcagccctggccgcctactttgtat

SEQ ID NO: 14321 - DNA, 171 bp, Homo sapiens
  MAP TO CHR22_116.0; EXPRESSED IN HELA, SIGNAL = 3.9; EXPRESSED IN BRAIN, SIGNAL = 7.6; EXPRESSED IN FETAL LIVER, SIGNAL = 7.8; EXPRESSED IN HEART, SIGNAL = 6.3; EXPRESSED IN ADULT LIVER, SIGNAL = 7.4; EXPRESSED IN BONE MARROW, SIGNAL = 8.7; EXPRESSED IN PLACENTA, SIGNAL = 7.7; EXPRESSED IN LUNG, SIGNAL = 7.3; SWISSPROT HIT: P27284, EVALUE 1.50e+00; EST_HUMAN HIT: BF314689.1, EVALUE 8.80e-01
atggttatgatgaaaaccctgaccagctactcagagaagaacctactgatgtctcagctgaagtgccaggttggccacgtttttacagctggggagatcctttcctagtttggagtctgagaagggccttaattttcccattaggagaagcttggtgtcaatgtagctttg

SEQ ID NO: 14322 - DNA, 140 bp, Homo sapiens
  MAP TO AC018704.5; EXPRESSED IN BRAIN, SIGNAL = 0.46; EXPRESSED IN PLACENTA, SIGNAL = 0.45; EXPRESSED IN ADULT LIVER, SIGNAL = 0.41; SWISSPROT HIT: Q9WZH9, EVALUE 7.70e+00; EST_HUMAN HIT: BE789673.1, EVALUE 3.00e-03
gagttttagataagaagatctttcttggtgtcagcccacaagcagccatggcagaactggggtctagggaacaggttctgaaagcagctgtggagccaagttcctgggctctggattatacaactactgtagtacctaag

SEQ ID NO: 14323 - DNA, 231 bp, Homo sapiens
  MAP TO CHR22_174.0; EXPRESSED IN BONE MARROW, SIGNAL =  28; EXPRESSED IN BRAIN, SIGNAL = 1.2; EXPRESSED IN HEART, SIGNAL = 1.2; EXPRESSED IN FETAL LIVER, SIGNAL = 1.5; EXPRESSED IN LUNG, SIGNAL =  20; EXPRESSED IN HELA, SIGNAL = 0.99; EXPRESSED IN ADULT LIVER, SIGNAL = 7.7; EXPRESSED IN PLACENTA, SIGNAL = 1.4; SWISSPROT HIT: P15814, EVALUE 4.00e-25; EST_HUMAN HIT: AA541663.1, EVALUE 4.00e-28; NT HIT: X51755.1, EVALUE 7.00e-26
atgagtggcttctacccgggagctgtgacggtggcctggaaggcaaacagcacccctgtcacccagggtatggaagtcaccaaggcctccaaacagagcaacaagtacacagccagaagcgacctgagcctgacaccccatcaatggaggtcccgcagcagctacagctgccgggtcacacacaaagagagcgctgtggagaagacagtggcccctgaagaatgttcttag

SEQ ID NO: 14324 - DNA, 162 bp, Homo sapiens
  MAP TO AL136317.2; EXPRESSED IN BONE MARROW, SIGNAL = 1.6; EXPRESSED IN PLACENTA, SIGNAL = 1.9; EXPRESSED IN LUNG, SIGNAL = 1.7; EXPRESSED IN ADULT LIVER, SIGNAL =   2; EXPRESSED IN BRAIN, SIGNAL = 1.5; EXPRESSED IN HELA, SIGNAL = 0.82; EXPRESSED IN FETAL LIVER, SIGNAL = 1.6; NT HIT: AL163204.2, EVALUE 2.00e-62; SWISSPROT HIT: P15146, EVALUE 3.40e+00; EST_HUMAN HIT: BG478950.1, EVALUE 2.00e-26
aaagcctttttgtctttccgtgtcaatggaagtgtcgtccagatcactgtctatatggaagcagttgccaagaagcagaagaaggaatctttatttttcacgggaacagaggtgtttaccatgatgataagcaaccagcatttagagctgtttatgaagcac

SEQ ID NO: 14325 - DNA, 117 bp, Homo sapiens
  MAP TO AL133492.1; EXPRESSED IN HELA, SIGNAL = 2.7; EXPRESSED IN BRAIN, SIGNAL = 3.3; EXPRESSED IN FETAL LIVER, SIGNAL = 3.6; EXPRESSED IN HEART, SIGNAL = 3.3; EXPRESSED IN BONE MARROW, SIGNAL = 3.5; EXPRESSED IN PLACENTA, SIGNAL = 4.7; EXPRESSED IN LUNG, SIGNAL = 4.1; EXPRESSED IN ADULT LIVER, SIGNAL = 4.4; NT HIT: AL163303.2, EVALUE 1.00e-59; EST_HUMAN HIT: BE149693.1, EVALUE 2.00e-03
tcacattctctcttgggtaatgtattcagaaagtgaccgtacattcttttggttcttcaaagtggaggaggtgggcataaattgcatctcgtcatccatcttgaagctcctctccat

SEQ ID NO: 14326 - DNA, 183 bp, Homo sapiens
  MAP TO AC021009.3; EXPRESSED IN PLACENTA, SIGNAL = 1.7; EXPRESSED IN BONE MARROW, SIGNAL = 1.5; EXPRESSED IN ADULT LIVER, SIGNAL = 1.4; EXPRESSED IN LUNG, SIGNAL = 1.6; EXPRESSED IN BRAIN, SIGNAL =   2; EXPRESSED IN FETAL LIVER, SIGNAL = 1.5; EXPRESSED IN HEART, SIGNAL = 1.7; EST_HUMAN HIT: AW057550.1, EVALUE 9.50e-01; SWISSPROT HIT: O00744, EVALUE 1.70e-01
gtggagccgatgccctgggcagacgccttcgccggctccgaggacgacctggacctggggtccttctcactgccggagcttcccttgcagactaaagatgtcccagatgttgaaacagaacccacagaagaaagtcttgctccttcagaaaagatccctccaggggcccctgtggtcgtaagg

SEQ ID NO: 14327 - DNA, 60 bp, Homo sapiens
  MAP TO CHR22_231.0; EXPRESSED IN HELA, SIGNAL = 3.1; EXPRESSED IN BRAIN, SIGNAL = 1.5; EXPRESSED IN FETAL LIVER, SIGNAL = 1.6; EXPRESSED IN HEART, SIGNAL = 1.3; EXPRESSED IN LUNG, SIGNAL =   1; EXPRESSED IN BONE MARROW, SIGNAL = 1.8; EXPRESSED IN ADULT LIVER, SIGNAL = 0.93; EXPRESSED IN PLACENTA, SIGNAL = 1.1; NT HIT: AF096247.1, EVALUE 6.50e-01
gagcaggtgtttcctccagatgtccaatatgtacctcccattacagcggtgttaggaagg

SEQ ID NO: 14328 - DNA, 214 bp, Homo sapiens
  MAP TO CHR21_72.0; EXPRESSED IN BONE MARROW, SIGNAL = 1.6; EXPRESSED IN LUNG, SIGNAL = 0.83; EXPRESSED IN PLACENTA, SIGNAL = 0.77; EXPRESSED IN HELA, SIGNAL =   3; EXPRESSED IN BRAIN, SIGNAL = 1.6; EXPRESSED IN FETAL LIVER, SIGNAL = 1.4; SWISSPROT HIT: O15296, EVALUE 7.30e-01; NT HIT: gi14720599, EVALUE 7.60e-01; EST_HUMAN HIT: BF815786.1, EVALUE 1.80e-02
ggagaacgctgggaccccctggagcacctttcaagaacgactccaaagccggatatttgcagtgggaggagaggaagggagtgcccggctgtgtcttcttcatccccctgaacacaggagggggcagcctggctgaaggcctgacccctggggggaaagcgcacctggtgaaaaactgttctctgactgatgtgatgatgaaaacgaatggcag

SEQ ID NO: 14329 - DNA, 178 bp, Homo sapiens
  MAP TO AL136444.1; EXPRESSED IN ADULT LIVER, SIGNAL =  11; EXPRESSED IN FETAL LIVER, SIGNAL =  11; EXPRESSED IN PLACENTA, SIGNAL =  11; EXPRESSED IN LUNG, SIGNAL =  11; EXPRESSED IN BONE MARROW, SIGNAL =  11; EXPRESSED IN HELA, SIGNAL = 8.1; EXPRESSED IN BRAIN, SIGNAL = 9.7; EXPRESSED IN HEART, SIGNAL = 8.3; SWISSPROT HIT: P35372, EVALUE 4.00e-29; NT HIT: gi14753887, EVALUE 8.00e-96
ctgacaatcacatacatgaccaggaagtttccgaagagccccaccacgcacacgatggagtagagggccatgatcgtgatggccgtgatcatggagggactgccggtcggagggcacaggctgtctctcccgcccaggtcggtgcggttcggaccgcatgggtcggacaggttgccat

SEQ ID NO: 14330 - DNA, 174 bp, Homo sapiens
  MAP TO CHR22_170.0; EXPRESSED IN BRAIN, SIGNAL = 2.1; EXPRESSED IN FETAL LIVER, SIGNAL = 1.8; EXPRESSED IN BONE MARROW, SIGNAL =   2; EXPRESSED IN ADULT LIVER, SIGNAL = 1.4; EXPRESSED IN HELA, SIGNAL = 1.1; EXPRESSED IN HEART, SIGNAL = 1.9; EXPRESSED IN LUNG, SIGNAL = 1.6; EXPRESSED IN PLACENTA, SIGNAL =   2; NT HIT: AF386077.2, EVALUE 6.10e-01
cagagtgagaccctgtctcgaagaagaagagaaaaagaagaagaagaagaagaagaagaagaagaagaagaagaagaagaagaagaagaagaagaagaagaagaagaagaggaagaagaagaagaagaaggaggaggaggaggaggaggaggaggaggaggaggagaagggaat

SEQ ID NO: 14331 - DNA, 174 bp, Homo sapiens
  MAP TO AL136312.1; EXPRESSED IN BRAIN, SIGNAL = 0.65; EXPRESSED IN HELA, SIGNAL = 0.61; EXPRESSED IN PLACENTA, SIGNAL = 0.65; EXPRESSED IN ADULT LIVER, SIGNAL = 0.65; EXPRESSED IN FETAL LIVER, SIGNAL = 0.62; EXPRESSED IN BONE MARROW, SIGNAL = 0.57; SWISSPROT HIT: Q46815, EVALUE 1.90e+00; EST_HUMAN HIT: BG330889.1, EVALUE 2.30e-01
ttaatcgtcttttgtcgaagaaaaaggagagacagaatggatacttgaaggggtggggaatgacctgaaagtcgctgttgcgtttcctccaggcagcttgctgaagagcccggcggctgtgctgtccgtgcttccgcctggtggacagagttggtaattctgactgcttgggga

SEQ ID NO: 14332 - DNA, 135 bp, Homo sapiens
  MAP TO AC011981.3; EXPRESSED IN FETAL LIVER, SIGNAL = 0.51; EXPRESSED IN BONE MARROW, SIGNAL = 0.61; EXPRESSED IN PLACENTA, SIGNAL = 0.59; EXPRESSED IN BRAIN, SIGNAL = 0.53; SWISSPROT HIT: Q27675, EVALUE 5.90e+00; EST_HUMAN HIT: BF747321.1, EVALUE 1.00e-05; NT HIT: Z93039.1, EVALUE 8.00e-06
ctaatatttaatgatatattggaatatgtaggctttgatggttttgtagaagccgaatccttcccatatctgccacttaacagccattgtggccctgagcaagtatttgacctctttgagcctcagttttcccat

SEQ ID NO: 14333 - DNA, 150 bp, Homo sapiens
  MAP TO CHR22_121.0; EXPRESSED IN FETAL LIVER, SIGNAL = 1.7; EXPRESSED IN BONE MARROW, SIGNAL = 1.5; EXPRESSED IN HEART, SIGNAL = 1.6; EXPRESSED IN LUNG, SIGNAL = 1.5; EXPRESSED IN BRAIN, SIGNAL = 1.6; EXPRESSED IN ADULT LIVER, SIGNAL = 1.5; EXPRESSED IN HELA, SIGNAL = 0.97; EXPRESSED IN PLACENTA, SIGNAL = 1.8; NT HIT: gi13655188, EVALUE 3.00e-79; SWISSPROT HIT: P07383, EVALUE 2.00e-02; EST_HUMAN HIT: BI599353.1, EVALUE 5.00e-79
gtctgatctcagagctgaagctggctgtgccctggggccacatcgcagccaaagcctggggctccctgcagggccctccagttctctgcctgcacggctggctggacaatgccagctccttcgacagactcatccctcttctcccgcaag

SEQ ID NO: 14334 - DNA, 147 bp, Homo sapiens
  MAP TO AC016672.4; EXPRESSED IN BONE MARROW, SIGNAL = 5.5; EXPRESSED IN PLACENTA, SIGNAL = 5.5; EXPRESSED IN LUNG, SIGNAL =   5; EXPRESSED IN BRAIN, SIGNAL = 5.2; EXPRESSED IN HELA, SIGNAL = 2.4; EXPRESSED IN FETAL LIVER, SIGNAL = 5.2; EST_HUMAN HIT: BF569424.1, EVALUE 7.40e-01; NT HIT: AB058775.1, EVALUE 2.00e+00; SWISSPROT HIT: Q9S9P1, EVALUE 2.00e+00
gaccatcaccaccgcgggcaaaaggagtgctgcttttgcgagaggattgtcttaaacctgactacgtcttatgccaagcaacatgcctggcacacacagtctcagaaaccccggcttcctcactgtctcacacaaaaggtgcatcag

SEQ ID NO: 14335 - DNA, 145 bp, Homo sapiens
  MAP TO AC011676.4; EXPRESSED IN HEART, SIGNAL = 2.9; EXPRESSED IN LUNG, SIGNAL = 3.1; EXPRESSED IN ADULT LIVER, SIGNAL = 2.7; EXPRESSED IN HELA, SIGNAL = 2.9; EXPRESSED IN FETAL LIVER, SIGNAL = 1.9; EXPRESSED IN PLACENTA, SIGNAL = 3.1; EXPRESSED IN BONE MARROW, SIGNAL = 2.9; EXPRESSED IN BRAIN, SIGNAL = 2.9; EST_HUMAN HIT: BI907301.1, EVALUE 1.00e-73; NT HIT: D00362.1, EVALUE 3.20e-02; SWISSPROT HIT: P32017, EVALUE 1.80e-01
ctgggaagcacagctgcggcagggtgaggaggtccacgccgcccgggacggcgacatcctcaggctctggcgctctggggggccccgggaggccctcccactgctctggtctgggcttctctctcttctttctcaaggagcgcat

SEQ ID NO: 14336 - DNA, 431 bp, Homo sapiens
  MAP TO CHR22_183_1.0; EXPRESSED IN LUNG, SIGNAL = 0.83; EXPRESSED IN ADULT LIVER, SIGNAL = 0.83; EXPRESSED IN BRAIN, SIGNAL = 0.82; SWISSPROT HIT: Q47146, EVALUE 9.60e-01; EST_HUMAN HIT: BI769448.1, EVALUE 1.00e-126; NT HIT: gi14777692, EVALUE 1.00e-129
ctgacattaaggagcgcacgggcggccttgctgcggatgttctggttggcgctgaggagcttctgcttcaggacaagcaccacattgctgcccagggcctcggtggcatcctcctgcaggcagaggaccagtgtgtccaggatgaactcctggaactcctcctcctccacctccacctgcagcttccataccagtgaggaaatcagacctttgctgatgatctcttgggcccctacaaggcaggaaagggcactgagggcgggctggccacacacccacccacccatgccagttggcctgcagggctcaaggagggtcttgcagaaccagtgggtgggtttgacaaaaggacttgcaagtgccacccccacacacacgtcccgcctggccaggggcctgagcgaccagcaggcagctgcagtgacagccat

SEQ ID NO: 14337 - DNA, 159 bp, Homo sapiens
  MAP TO AC018691.5; EXPRESSED IN FETAL LIVER, SIGNAL = 2.8; EXPRESSED IN HEART, SIGNAL = 2.9; EXPRESSED IN PLACENTA, SIGNAL = 4.1; EXPRESSED IN ADULT LIVER, SIGNAL = 3.2; EXPRESSED IN BONE MARROW, SIGNAL =   3; EXPRESSED IN LUNG, SIGNAL =   4; EXPRESSED IN BRAIN, SIGNAL = 3.2; SWISSPROT HIT: P47976, EVALUE 1.10e+00; EST_HUMAN HIT: AA580723.1, EVALUE 3.00e-03; NT HIT: AJ243213.1, EVALUE 3.50e-02
gccactggcacatggaatatatcaactgtgggccaggcacagttgaaaaacaagaagagaagtttagagacaagattcaacatcagtctccactccacccccagcaaccccaccaaaaccagcattaccatatactccacctccatcacgtttgtgtag

SEQ ID NO: 14338 - DNA, 175 bp, Homo sapiens
  MAP TO AC021609.3; EXPRESSED IN BONE MARROW, SIGNAL = 0.48; EXPRESSED IN BRAIN, SIGNAL = 0.58; EXPRESSED IN FETAL LIVER, SIGNAL = 0.52; EXPRESSED IN ADULT LIVER, SIGNAL = 0.57; EXPRESSED IN LUNG, SIGNAL = 0.79; SWISSPROT HIT: O61608, EVALUE 4.00e-04; EST_HUMAN HIT: AA085543.1, EVALUE 7.00e-94; NT HIT: gi13325067, EVALUE 5.00e-94
ataaatatggccgttctcctggaggaggattctcgccacctgctggccatgaagctggatgttgtcttgtacatactttgctggggcttcctcctccccaacaggagcatctcttgagaaggaaacctttagatgagttaagatcccatgcttaaggaaatgtctgagctctttt

SEQ ID NO: 14339 - DNA, 123 bp, Homo sapiens
  MAP TO AL138895.4; EXPRESSED IN PLACENTA, SIGNAL = 0.64; EXPRESSED IN BRAIN, SIGNAL = 0.62; EXPRESSED IN LUNG, SIGNAL = 1.2; EXPRESSED IN BONE MARROW, SIGNAL = 0.82; SWISSPROT HIT: P36165, EVALUE 1.60e+00; EST_HUMAN HIT: AW879644.1, EVALUE 1.00e-35; NT HIT: gi14735275, EVALUE 1.00e-35
gaagactaccacaggctcctcaccaagtacgctgaggccgagaacaccattgaccagctacgcctcggggccaaggtaccaggccgggatggggtggaggcatgggcccaagtccccgaggag

SEQ ID NO: 14340 - DNA, 144 bp, Homo sapiens
  MAP TO AC010498.4; EXPRESSED IN FETAL LIVER, SIGNAL = 0.52; EXPRESSED IN HEART, SIGNAL = 1.3; EXPRESSED IN PLACENTA, SIGNAL = 0.71; EXPRESSED IN LUNG, SIGNAL = 0.72; EXPRESSED IN ADULT LIVER, SIGNAL = 0.61; EXPRESSED IN BONE MARROW, SIGNAL = 0.57; EXPRESSED IN BRAIN, SIGNAL = 0.71; SWISSPROT HIT: P08548, EVALUE 3.00e-12; EST_HUMAN HIT: BF817785.1, EVALUE 2.00e-22; NT HIT: U66059.1, EVALUE 2.00e-22
ctcgaaataatgaaagtcatatatagaaaacccacaaccaacattatactcaatgaggaaaagttgaaagcattccccctaagacctggtacaagacaaggatgccgattttcaccactcctactcaacatagtactgtatgtc

SEQ ID NO: 14341 - DNA, 99 bp, Homo sapiens
  MAP TO AL137145.3; EXPRESSED IN LUNG, SIGNAL =  12; EXPRESSED IN HEART, SIGNAL = 2.5; EXPRESSED IN ADULT LIVER, SIGNAL = 9.1; EXPRESSED IN BONE MARROW, SIGNAL = 5.1; EXPRESSED IN BRAIN, SIGNAL = 3.7; NT HIT: AL163227.2, EVALUE 3.00e-32; EST_HUMAN HIT: BF959202.1, EVALUE 1.00e-35
atggcttttaccaaaatgctgataatgatatggacagtgaaatccaggctgaggtggtctcagatggagatgaggaacttgttgggaattggaacaaag

SEQ ID NO: 14342 - DNA, 104 bp, Homo sapiens
  MAP TO AC021010.3; EXPRESSED IN BRAIN, SIGNAL = 0.6; EXPRESSED IN FETAL LIVER, SIGNAL = 0.45; EXPRESSED IN PLACENTA, SIGNAL = 0.67; EXPRESSED IN ADULT LIVER, SIGNAL = 0.46; EXPRESSED IN LUNG, SIGNAL = 0.54; NT HIT: gi13899268, EVALUE 1.30e+00; EST_HUMAN HIT: BF734504.1, EVALUE 1.20e-01
ccttgcaagcctttggcattttctgtgatatagtacatatgaccattggacagttctccattacctccaaaccaagggagtttcttgatattctccatgtgtaa

SEQ ID NO: 14343 - DNA, 271 bp, Homo sapiens
  MAP TO AC018586.3; EXPRESSED IN HELA, SIGNAL = 0.77; EXPRESSED IN FETAL LIVER, SIGNAL = 1.3; EXPRESSED IN PLACENTA, SIGNAL = 1.9; EXPRESSED IN ADULT LIVER, SIGNAL = 1.6; EXPRESSED IN LUNG, SIGNAL =   2; EXPRESSED IN BONE MARROW, SIGNAL = 1.8; EXPRESSED IN BRAIN, SIGNAL = 1.7; EXPRESSED IN HEART, SIGNAL = 1.8; EST_HUMAN HIT: AL599607.1, EVALUE 2.00e-21; NT HIT: AJ277546.2, EVALUE 3.00e-19; SWISSPROT HIT: P23071, EVALUE 3.70e+00
gagaggagcgagaatactggggaggactttgtctcgagtcttggataccagctcagctacagctggatagggcaccagttagagttgcgaggcctgtgttccaaggccttgctcttgggtgacatttgtagacacaccctaggccagaagggaacatgctgtcttgaaggaaaggacccagtcatggcaacattcatcacctgcttgctaaagaatccttgtgccctgaataacaagcatcaatacccaggtactacatcaagggccttgg

SEQ ID NO: 14344 - DNA, 75 bp, Homo sapiens
  MAP TO AC022057.2; EXPRESSED IN BRAIN, SIGNAL = 1.8; EXPRESSED IN HEART, SIGNAL = 1.8; EXPRESSED IN ADULT LIVER, SIGNAL =   2; EXPRESSED IN BONE MARROW, SIGNAL = 1.8; EXPRESSED IN HELA, SIGNAL = 1.2; EXPRESSED IN LUNG, SIGNAL = 2.2; EXPRESSED IN PLACENTA, SIGNAL = 1.8; EXPRESSED IN FETAL LIVER, SIGNAL = 1.8; EST_HUMAN HIT: BF835723.1, EVALUE 6.00e-09; NT HIT: AL163213.2, EVALUE 6.00e-11; SWISSPROT HIT: P08548, EVALUE 1.70e-02
aatgataatggacacaaaataccaaaacctgtgagatacagtgaaagcagtactaagaggggaatttataagtga

SEQ ID NO: 14345 - DNA, 369 bp, Homo sapiens
  MAP TO AF235096.1; EXPRESSED IN BONE MARROW, SIGNAL = 0.54; EXPRESSED IN BRAIN, SIGNAL = 0.63; EXPRESSED IN PLACENTA, SIGNAL = 0.63; EXPRESSED IN LUNG, SIGNAL = 0.56; EXPRESSED IN ADULT LIVER, SIGNAL = 0.56; EST_HUMAN HIT: T19839.1, EVALUE 6.00e-47; NT HIT: AL161553.2, EVALUE 3.40e-01; SWISSPROT HIT: O35709, EVALUE 3.00e-08
atgggaagaaccggccatttacctggataaggcgcacagggttctgcatgatgtcctctcctccaaagagatagagtctttggtctttcacagcgactgcggggtggagcacccccacgggcatgctggccatactctcccagacattgcagatgctgtcatacctttccatggagcccatgagctcctgcccttctccaatccccccgatggagaagatgaagttcttatgggcagtgcttctgtgggagtagcgggccaccagcatgggctcccccagcctccactgattgagtttcagggagaagatgtagacattgtgactgaccagactcttccctgagctgacagccatgccccccagcacat

SEQ ID NO: 14346 - DNA, 135 bp, Homo sapiens
  MAP TO AL121993.2; EXPRESSED IN ADULT LIVER, SIGNAL = 1.4; EXPRESSED IN BRAIN, SIGNAL = 1.3; EXPRESSED IN LUNG, SIGNAL = 1.3; EXPRESSED IN HELA, SIGNAL = 1.2; EXPRESSED IN FETAL LIVER, SIGNAL = 1.3; EXPRESSED IN BONE MARROW, SIGNAL = 1.3; EXPRESSED IN HEART, SIGNAL = 1.4; EST_HUMAN HIT: AL528207.1, EVALUE 4.00e-70; NT HIT: gi14748718, EVALUE 3.00e-70; SWISSPROT HIT: Q9UNX4, EVALUE 1.00e-21
ggtcatcaccaggaaatatggtgtttggctgtaagccccagtggagactatgttgtatcatcgtcccatgacaaatctctgagactttgggagagaacaagggagcctcttattcttgaggaagaaagggagatg

SEQ ID NO: 14347 - DNA, 95 bp, Homo sapiens
  MAP TO AC011636.3; EXPRESSED IN BRAIN, SIGNAL =   9; EXPRESSED IN HEART, SIGNAL = 8.8; EXPRESSED IN HELA, SIGNAL = 3.1; EXPRESSED IN PLACENTA, SIGNAL =  11; EXPRESSED IN FETAL LIVER, SIGNAL = 9.8; EXPRESSED IN LUNG, SIGNAL = 8.8; EXPRESSED IN ADULT LIVER, SIGNAL = 9.4; EST_HUMAN HIT: BF365992.1, EVALUE 4.40e-01; NT HIT: AF420214.1, EVALUE 3.00e-01
cttccatccagggtgccttcagggtctccaaagggcatgttgagcagcctccatggctgaaagcccccgattgcccacaatttccagatgatgcc

SEQ ID NO: 14348 - DNA, 103 bp, Homo sapiens
  MAP TO AL136381.1; EXPRESSED IN BONE MARROW, SIGNAL =   8; EXPRESSED IN ADULT LIVER, SIGNAL = 7.1; EXPRESSED IN PLACENTA, SIGNAL = 7.2; EXPRESSED IN LUNG, SIGNAL = 7.3; EXPRESSED IN BRAIN, SIGNAL = 7.2; EXPRESSED IN HELA, SIGNAL = 4.4; EXPRESSED IN FETAL LIVER, SIGNAL = 7.4; SWISSPROT HIT: Q16513, EVALUE 1.00e-12; EST_HUMAN HIT: BE502469.1, EVALUE 2.00e-49; NT HIT: gi5453973, EVALUE 2.00e-51
caacaatagattgaaggccttacaaaaacaattggatatagaacttaaagtaaaacaaggtgcagagaatatgatacagatgtattcaaatggatcttcaaag

SEQ ID NO: 14349 - DNA, 94 bp, Homo sapiens
  MAP TO CHR21_63.0; EXPRESSED IN BONE MARROW, SIGNAL = 1.8; EXPRESSED IN HEART, SIGNAL = 1.3; EXPRESSED IN PLACENTA, SIGNAL = 0.79; EXPRESSED IN BRAIN, SIGNAL = 1.4; EXPRESSED IN HELA, SIGNAL = 4.7; EXPRESSED IN FETAL LIVER, SIGNAL = 1.2; NT HIT: gi14732011, EVALUE 1.20e+00; EST_HUMAN HIT: BE698306.1, EVALUE 4.30e-01
ctgccattttcccctcagatggctgagggaagagtctgggatgatgattggctcctgtgctctgagtgtgcaaatgctccaagggtgcagccat

SEQ ID NO: 14350 - DNA, 154 bp, Homo sapiens
  MAP TO AL035367.1; EXPRESSED IN BRAIN, SIGNAL = 4.5; EXPRESSED IN HELA, SIGNAL = 2.8; EXPRESSED IN LUNG, SIGNAL = 7.5; EXPRESSED IN HEART, SIGNAL = 4.2; EXPRESSED IN ADULT LIVER, SIGNAL = 6.1; EXPRESSED IN FETAL LIVER, SIGNAL = 3.7; EXPRESSED IN PLACENTA, SIGNAL = 5.8; EST_HUMAN HIT: BF685121.1, EVALUE 5.00e-79; SWISSPROT HIT: P08111, EVALUE 9.00e-05
catctcgaaggaatgtgtcggcaaagtataggcaacgcacgacacccgacaaggagtcatcggcagagcggggctcaatgcggcgctgcacgggcgtcatctccacgtcgtgggggcaggcctgctcagccagctgtgcattggcttcctgcaa

SEQ ID NO: 14351 - DNA, 151 bp, Homo sapiens
  MAP TO CHR22_179.0; EXPRESSED IN HELA, SIGNAL = 0.86; EXPRESSED IN FETAL LIVER, SIGNAL = 1.5; EXPRESSED IN LUNG, SIGNAL = 1.4; EXPRESSED IN PLACENTA, SIGNAL = 1.5; EXPRESSED IN BONE MARROW, SIGNAL = 1.7; EXPRESSED IN BRAIN, SIGNAL = 1.6; EXPRESSED IN ADULT LIVER, SIGNAL = 1.3; EXPRESSED IN HEART, SIGNAL = 1.2; EST_HUMAN HIT: BI757011.1, EVALUE 1.00e-79; NT HIT: gi14777539, EVALUE 9.00e-80; SWISSPROT HIT: O15547, EVALUE 9.00e-24
ctgaggtggcttcacgaagtcggccacatcccacagccggtttccaagctccttgatctgagtgacggaaacccctttgagtttggtgatgatggaaaactggggttccaggtcccgctcctggtagccttttttggcgaggagagcccac

SEQ ID NO: 14352 - DNA, 153 bp, Homo sapiens
  MAP TO AL035457.13; EXPRESSED IN FETAL LIVER, SIGNAL = 0.53; EXPRESSED IN BRAIN, SIGNAL = 0.5; EXPRESSED IN PLACENTA, SIGNAL = 0.67; EXPRESSED IN LUNG, SIGNAL = 0.49; EST_HUMAN HIT: BE777872.1, EVALUE 2.00e-01; NT HIT: AB041645.1, EVALUE 8.20e+00; SWISSPROT HIT: P10546, EVALUE 1.00e+01
gcatgtgaccttgaaggtctaatcagggtgcatctagtttgggcccccgtttcccgggatgtagatggggaaaggtgtcgcccctgggatgcagctggccctgctgaggaggctgctggcatggctgtgctgagagatggtcacagttggcgt

SEQ ID NO: 14353 - DNA, 253 bp, Homo sapiens
  MAP TO AJ239319.2; EXPRESSED IN FETAL LIVER, SIGNAL = 0.73; EXPRESSED IN ADULT LIVER, SIGNAL = 0.65; EXPRESSED IN BRAIN, SIGNAL = 1.1; EST_HUMAN HIT: AV707387.1, EVALUE 0.00e+00; NT HIT: gi14759202, EVALUE 0.00e+00; SWISSPROT HIT: O15294, EVALUE 3.00e-46
attctgaagcgtgttcccaatagtgtactctggctgttgcgttttccagcagtaggagaacctaatattcaacagtatgcacaaaacatgggcctgccccagaaccgtatcattttttcacctgttgctcctaaagaggaacacgtcaggagaggccagctggctgatgtctgcttggacactccactctgtaatgggcacaccacagggatggatgtcctctgggcagggacccccatggtgactatgccag

SEQ ID NO: 14354 - DNA, 95 bp, Homo sapiens
  MAP TO AC015845.4; EXPRESSED IN BRAIN, SIGNAL = 1.1; EXPRESSED IN FETAL LIVER, SIGNAL = 3.7; EXPRESSED IN LUNG, SIGNAL =   3; EXPRESSED IN ADULT LIVER, SIGNAL =   3; EXPRESSED IN BONE MARROW, SIGNAL =   2; NT HIT: gi14777577, EVALUE 2.00e-21; EST_HUMAN HIT: H55799.1, EVALUE 4.00e-26; SWISSPROT HIT: P37483, EVALUE 2.10e+00
atggtcatcctcttcagcctccggagggacgcacatggagtgctgagggaggaagtggacacccacctagccagccagatcagccgaatcaaccc

SEQ ID NO: 14355 - DNA, 83 bp, Homo sapiens
  MAP TO AL139149.1; EXPRESSED IN BRAIN, SIGNAL = 0.59; EXPRESSED IN LUNG, SIGNAL = 0.75; EXPRESSED IN FETAL LIVER, SIGNAL = 0.7; EXPRESSED IN BONE MARROW, SIGNAL = 0.62; NT HIT: AF213884.1, EVALUE 3.00e-10; EST_HUMAN HIT: AU138590.1, EVALUE 4.00e-13; SWISSPROT HIT: P08547, EVALUE 7.00e-03
gtatatgatcatatcatcagcaaacagcgagagtttggcttcctctttaccgaggagttccagcactccgttgaatagaagtg

SEQ ID NO: 14356 - DNA, 178 bp, Homo sapiens
  MAP TO AC018876.4; EXPRESSED IN ADULT LIVER, SIGNAL = 0.37; EXPRESSED IN BRAIN, SIGNAL = 0.44; NT HIT: AL161502.2, EVALUE 9.70e+00; EST_HUMAN HIT: AA814015.1, EVALUE 2.30e-01; SWISSPROT HIT: Q84133, EVALUE 7.40e+00
gaagtggaaattgacaaaaaccacttttgaaacatgcttggcaacatctttctcaagaagaatacatgaaaagcttgtagccagtaggtccacttctgggtgtttccctagcagaaacgtatacctatgttcactcaccaaaagacgtagaagagtgatcagtgcagctctacccaaa

SEQ ID NO: 14357 - DNA, 387 bp, Homo sapiens
  MAP TO AL138726.2; EXPRESSED IN BONE MARROW, SIGNAL = 4.1; EXPRESSED IN PLACENTA, SIGNAL = 2.9; EXPRESSED IN LUNG, SIGNAL = 2.7; EXPRESSED IN ADULT LIVER, SIGNAL = 4.1; EXPRESSED IN BRAIN, SIGNAL = 2.7; NT HIT: gi5730046, EVALUE 0.00e+00; EST_HUMAN HIT: BF795913.1, EVALUE 4.00e-82; SWISSPROT HIT: P02261, EVALUE 2.00e-34
ttgcccttggccttgtggtggctcttggtcttctggggcagaagcacgccctgaatgttgggcaggacaccgccctgcgcgatggtgacttcgcccagcagcttgttaagctcctcgccgttgcgaatggccagctacaggtggcgcaggatgatgcgggtcttcttgtcgcgggccgggttgccagccagctccaggatctcggcggtcaggtgctccagcacggccgccaggtacacctgcgctctggccccgacacgctcggcatagatgcctttgcggagcagacggcgctggagcccggccagggaagaccaagtctgggacttcagcgccagcctcgccaccctgcttcccacaaccagatgtctcctgcgaagtagcccc

SEQ ID NO: 14358 - DNA, 158 bp, Homo sapiens
  MAP TO AL137844.2; EXPRESSED IN HELA, SIGNAL = 0.95; EXPRESSED IN BRAIN, SIGNAL = 2.1; EXPRESSED IN FETAL LIVER, SIGNAL = 1.9; EXPRESSED IN BONE MARROW, SIGNAL = 1.7; EXPRESSED IN HEART, SIGNAL = 1.9; EXPRESSED IN LUNG, SIGNAL = 1.7; EXPRESSED IN PLACENTA, SIGNAL = 1.9; EXPRESSED IN ADULT LIVER, SIGNAL = 1.9; NT HIT: X58434.1, EVALUE 5.40e-01; EST_HUMAN HIT: F08745.1, EVALUE 2.00e-01; SWISSPROT HIT: P19704, EVALUE 4.40e+00
ctaaggtccacagtgagcaagtggtaaaactggaatttaaacctacgctggtctggctccaaagcctaaaccctgtggtctcacttcctgcaaacacaatgttgaatttgcgctcacagcaggtggagatgaccctggtcccactgctttgattaaga

SEQ ID NO: 14359 - DNA, 230 bp, Homo sapiens
  MAP TO AL121830.11; EXPRESSED IN BRAIN, SIGNAL =   1; EXPRESSED IN LUNG, SIGNAL =   1; EXPRESSED IN PLACENTA, SIGNAL = 0.99; EXPRESSED IN HEART, SIGNAL = 1.3; EXPRESSED IN BONE MARROW, SIGNAL = 0.93; EXPRESSED IN ADULT LIVER, SIGNAL = 0.88; EXPRESSED IN HELA, SIGNAL = 0.8; EXPRESSED IN FETAL LIVER, SIGNAL = 0.94; EST_HUMAN HIT: BF511467.1, EVALUE 1.00e-03; SWISSPROT HIT: P20629, EVALUE 2.70e+00
aagtggtcattctaatctccctggctgctcagtggtcaaggcagacccttctgcgaccaaagagatgcaaggtggaagtgtgccaaaaagaacaacagtgccccttcttcctccttcctttcttcaatatgaacttggtggctggggctgcagcagccatcttgggaccattaggcaaaggccaggggaaatgcagagccacagcaccacctacatccggggcactgata

SEQ ID NO: 14360 - DNA, 120 bp, Homo sapiens
  MAP TO AC021311.4; EXPRESSED IN BONE MARROW, SIGNAL = 0.56; EXPRESSED IN BRAIN, SIGNAL = 0.6; EXPRESSED IN FETAL LIVER, SIGNAL = 0.56; EXPRESSED IN PLACENTA, SIGNAL = 0.66; EXPRESSED IN LUNG, SIGNAL = 0.56
tcatcctatgttctgttgtagggtatgctttctttcctccttgcctttccccttctcctcgtccccctcttcttcctcttcctcctgcctcttcttcttctcttgtttttcctcatcctc

SEQ ID NO: 14361 - DNA, 161 bp, Homo sapiens
  MAP TO CHR22_181.0; EXPRESSED IN LUNG, SIGNAL =   2; EXPRESSED IN BRAIN, SIGNAL = 1.9; EXPRESSED IN ADULT LIVER, SIGNAL = 1.8; EXPRESSED IN HELA, SIGNAL = 0.73; EXPRESSED IN FETAL LIVER, SIGNAL = 1.4; EXPRESSED IN BONE MARROW, SIGNAL = 1.5; NT HIT: U55030.1, EVALUE 5.50e-01; EST_HUMAN HIT: BE145813.1, EVALUE 1.00e-76; SWISSPROT HIT: P01353, EVALUE 3.90e-01
taggcgccaccttctggctcctggtgggacttgtaagtcccgtggtcagttacctgattgctcttacggacctgacgctggaaatcctctctctccaaggtccctgcaggagatgggacctgccacagagaatgccgcaagggatgtttctgttgggagct

SEQ ID NO: 14362 - DNA, 191 bp, Homo sapiens
  MAP TO CHR22_164.0; EXPRESSED IN FETAL LIVER, SIGNAL = 0.82; EXPRESSED IN LUNG, SIGNAL = 0.72; EXPRESSED IN BRAIN, SIGNAL = 0.78; EXPRESSED IN ADULT LIVER, SIGNAL = 0.71; EXPRESSED IN HELA, SIGNAL = 0.55; SWISSPROT HIT: P57642, EVALUE 1.50e+00; EST_HUMAN HIT: R57311.1, EVALUE 6.40e-02
caacagattctgattttgttcaaggcagcaatgggacctgctgaaaacacaccccgttgccactcccttgcaactaggggggcctgggacgcagttctggctggggagaaaaaggcacaagtccctcgctgggagtcagccctttctcctctccttgttcttgcgcagaggcctggaagggaggatgccat

SEQ ID NO: 14363 - DNA, 157 bp, Homo sapiens
  MAP TO CHR21_68.0; EXPRESSED IN BRAIN, SIGNAL = 1.6; EXPRESSED IN HELA, SIGNAL = 5.5; EXPRESSED IN HEART, SIGNAL = 1.3; EXPRESSED IN PLACENTA, SIGNAL = 0.89; EXPRESSED IN LUNG, SIGNAL = 0.97; EXPRESSED IN ADULT LIVER, SIGNAL = 0.91; SWISSPROT HIT: P57081, EVALUE 4.00e-23; EST_HUMAN HIT: AI631689.1, EVALUE 4.00e-83; NT HIT: gi14780591, EVALUE 2.00e-83
cacatctaacagcatagacaggtgccccagctctagacggccacacccgtgtggctccagcaccgaaaaggagtagacgtctccagacttgtcggccaccaagaccttctcctccgaggctatgaaagtcagggctgtacacctccttgccacggtc

SEQ ID NO: 14364 - DNA, 172 bp, Homo sapiens
  MAP TO AL139141.1; EXPRESSED IN BRAIN, SIGNAL = 0.65; EXPRESSED IN FETAL LIVER, SIGNAL = 0.58; EXPRESSED IN ADULT LIVER, SIGNAL = 0.61; EXPRESSED IN LUNG, SIGNAL = 0.61; NT HIT: AF282899.1, EVALUE 3.00e-92; SWISSPROT HIT: P53776, EVALUE 8.00e-31; EST_HUMAN HIT: BI113679.1, EVALUE 4.00e-92
agattccccagtgcgctggctgcaaccagcacatcctggacaagttcatcctgaaggtcctggacagacactggcacagctcctgcctcaagtgtgcagactgccagatgcagctggcggacaggtgcttctccagggctgggagcgtctactgcaaggaggacttcttcaa

SEQ ID NO: 14365 - DNA, 102 bp, Homo sapiens
  MAP TO AC015930.3; EXPRESSED IN PLACENTA, SIGNAL = 0.75; EXPRESSED IN BRAIN, SIGNAL = 0.69; EXPRESSED IN ADULT LIVER, SIGNAL = 0.81; EXPRESSED IN FETAL LIVER, SIGNAL = 0.54; EXPRESSED IN BONE MARROW, SIGNAL = 0.7; NT HIT: AE006262.1, EVALUE 1.30e+00; EST_HUMAN HIT: R35584.1, EVALUE 4.80e-01
atgggaaggaggcaccggaagagggaggaatgggagaaggacttcacaattaatgaagacgtgaaaagtgatatgatgactgtcataaaaaataaaaagaaa

SEQ ID NO: 14366 - DNA, 201 bp, Homo sapiens
  MAP TO AL137062.3; EXPRESSED IN BONE MARROW, SIGNAL =   1; EXPRESSED IN LUNG, SIGNAL = 1.1; EXPRESSED IN HELA, SIGNAL = 0.54; EXPRESSED IN BRAIN, SIGNAL = 0.99; EXPRESSED IN PLACENTA, SIGNAL = 1.2; EXPRESSED IN FETAL LIVER, SIGNAL = 0.96; NT HIT: AF007805.1, EVALUE 7.10e-01; SWISSPROT HIT: P30189, EVALUE 1.10e+00; EST_HUMAN HIT: BI462217.1, EVALUE 1.00e-107
aatgattagctcttggcacagtttgatggccatttgttcctgcctcttcagtagactggagatctgtgacttgagaaattcctcctccatggacaagttgttggagttgcccagttgctgggataagttatcctgctgctgttggatggttttctgaagttgactcaatttctctgaatctgagttaatgtcattagatat

SEQ ID NO: 14367 - DNA, 162 bp, Homo sapiens
  MAP TO AL118512.8; EXPRESSED IN BONE MARROW, SIGNAL = 1.1; EXPRESSED IN PLACENTA, SIGNAL = 1.1; EXPRESSED IN LUNG, SIGNAL = 1.1; EXPRESSED IN HELA, SIGNAL = 0.59; EXPRESSED IN ADULT LIVER, SIGNAL =   1; EXPRESSED IN BRAIN, SIGNAL = 1.1; EXPRESSED IN FETAL LIVER, SIGNAL = 0.86; NT HIT: AF156100.1, EVALUE 1.00e-32; SWISSPROT HIT: Q15746, EVALUE 4.50e-02
cccaaatgttgacattgtagtttttttcagtttttccagcaacatttgttgcttcacaagtgtaacgaccagtgtcttgaacctgagcatcttcaatctgaaaacaaaatcatcctttgaaatcacactttctatttcacttggggttttttaattaatact

SEQ ID NO: 14368 - DNA, 105 bp, Homo sapiens
  MAP TO CHR22_209.0; EXPRESSED IN HELA, SIGNAL = 2.7; EXPRESSED IN FETAL LIVER, SIGNAL = 1.8; EXPRESSED IN HEART, SIGNAL = 1.3; EXPRESSED IN PLACENTA, SIGNAL = 0.8; EXPRESSED IN ADULT LIVER, SIGNAL = 0.97; EXPRESSED IN BONE MARROW, SIGNAL = 1.8; EXPRESSED IN BRAIN, SIGNAL = 1.8
catcctcctcctccttcctcctcctctcctcctccttcttctccttcttctccttctttcttcctcttcttcctcttcctctttttctccttctccttctccatc

SEQ ID NO: 14369 - DNA, 297 bp, Homo sapiens
  MAP TO AC020698.2; EXPRESSED IN FETAL LIVER, SIGNAL = 0.64; EXPRESSED IN BONE MARROW, SIGNAL = 0.59; EXPRESSED IN BRAIN, SIGNAL = 0.67; EXPRESSED IN PLACENTA, SIGNAL = 0.63; EXPRESSED IN LUNG, SIGNAL = 0.6; EXPRESSED IN ADULT LIVER, SIGNAL = 0.65; NT HIT: gi6679648, EVALUE 2.70e-01; EST_HUMAN HIT: BF858834.1, EVALUE 4.00e-01; SWISSPROT HIT: P55395, EVALUE 4.50e+00
ctaatttttgctcattatcttatgttttatggtcagcaattccgactgggccttgacaaacacttgctcatagccagttggctgtgtcagctgaaggagaggttgcctgagagatttctcatcggttgtgctttgaatcaacgtggccaatgttggaatgccaggagggtgtgcagctgtgagcagggccagcttcacaggtgcatccagaagactccaaagcttgttttcctgacaaggcctgggtataattttcctagtttgacaaaagctgactgtcagagcaatctgttcatt

SEQ ID NO: 14370 - DNA, 121 bp, Homo sapiens
  MAP TO AL136147.2; EXPRESSED IN HELA, SIGNAL = 0.51; EXPRESSED IN FETAL LIVER, SIGNAL = 0.82; EXPRESSED IN BONE MARROW, SIGNAL = 0.94; EXPRESSED IN LUNG, SIGNAL = 0.89; EXPRESSED IN PLACENTA, SIGNAL = 1.2; EXPRESSED IN BRAIN, SIGNAL = 0.92; NT HIT: AJ229043.1, EVALUE 7.00e-06; EST_HUMAN HIT: BF996955.1, EVALUE 9.20e+00; SWISSPROT HIT: P08548, EVALUE 1.00e-03
cataataaaggtcatatatgaaaagtcgacagctaacatcatatttaatggtaaaaaaactgaatacttttcctctaggaccaggaacaaaacaaagatgaccactcttgccacttctatt

SEQ ID NO: 14371 - DNA, 106 bp, Homo sapiens
  MAP TO AL135920.4; EXPRESSED IN HELA, SIGNAL = 0.58; EXPRESSED IN FETAL LIVER, SIGNAL =   1; EXPRESSED IN LUNG, SIGNAL = 1.1; EXPRESSED IN ADULT LIVER, SIGNAL = 0.98; EXPRESSED IN PLACENTA, SIGNAL = 1.1; EXPRESSED IN BONE MARROW, SIGNAL = 1.1; EXPRESSED IN BRAIN, SIGNAL = 0.98; NT HIT: U62556.1, EVALUE 6.00e-12; EST_HUMAN HIT: AI733823.1, EVALUE 4.00e-11; SWISSPROT HIT: Q07011, EVALUE 2.10e+00
ttccttgtttaccatcatcactgaaaacagttgcaggccagaggctgtgccaggtatgcacaactgtatctttagtcactgtgttccaagtgttagcaaaaacata

SEQ ID NO: 14372 - DNA, 225 bp, Homo sapiens
  MAP TO AL139141.1; EXPRESSED IN FETAL LIVER, SIGNAL = 1.9; EXPRESSED IN BONE MARROW, SIGNAL = 2.5; EXPRESSED IN HEART, SIGNAL = 2.1; EXPRESSED IN BRAIN, SIGNAL = 2.5; EXPRESSED IN PLACENTA, SIGNAL = 2.6; EXPRESSED IN HELA, SIGNAL = 1.3; EXPRESSED IN ADULT LIVER, SIGNAL = 1.5; SWISSPROT HIT: P53776, EVALUE 9.00e-37; NT HIT: AB055703.1, EVALUE 1.00e-110; EST_HUMAN HIT: BI113679.1, EVALUE 1.00e-96
catgcggggccatgctgcttaccgttctgcttggctgtctcgtagtcttccttgcacaccagccgcccgtcctccatgaggtagaattcgtcccccgtggccagctgccggttgcagatgatgcaagcaaagcagtgcaggtggtagacaaagtcctgggccttgcggaccacctgggttggggggataccctgctggcaggccgtgcattttgtgccgaagcgc

SEQ ID NO: 14373 - DNA, 367 bp, Homo sapiens
  MAP TO AL133553.2; EXPRESSED IN BONE MARROW, SIGNAL = 1.5; EXPRESSED IN BRAIN, SIGNAL = 1.5; EXPRESSED IN ADULT LIVER, SIGNAL = 2.1; EXPRESSED IN LUNG, SIGNAL = 2.1; EXPRESSED IN PLACENTA, SIGNAL = 1.7; EXPRESSED IN HELA, SIGNAL = 1.4; EXPRESSED IN FETAL LIVER, SIGNAL = 1.7; EXPRESSED IN HEART, SIGNAL = 1.6; SWISSPROT HIT: P23142, EVALUE 2.50e-01; NT HIT: gi14730477, EVALUE 0.00e+00; EST_HUMAN HIT: BF694934.1, EVALUE 0.00e+00
ttagtatggataggcggacacagctatataaactatgaatgtggtctgatattcaatggtcccattggcactgtaggatgaggctcggaccctcatgcggtaggtctctgcttctcgtagtggtcgtgttgtatacaccactcctttcaggttttcatccctcaaggcaaaaggaacagtctgttcctcatctaccatgaggaaagttgtcctgggatgcatcactccatcctgtgtgtatgcaaccagccggattaaatcttgattggtggctattccaaatgggagggagacgagtttgtattccaaggcatatgggctcaaggcacattccaaatcattgggtggacagttcttgaggcagaac

SEQ ID NO: 14374 - DNA, 142 bp, Homo sapiens
  MAP TO CHR21_69.0; EXPRESSED IN HEART, SIGNAL = 1.5; EXPRESSED IN PLACENTA, SIGNAL = 1.1; EXPRESSED IN BRAIN, SIGNAL = 1.8; EXPRESSED IN LUNG, SIGNAL = 0.94; EXPRESSED IN HELA, SIGNAL = 5.3; EXPRESSED IN ADULT LIVER, SIGNAL = 0.69; EXPRESSED IN BONE MARROW, SIGNAL = 1.8; SWISSPROT HIT: P37304, EVALUE 4.50e+00; NT HIT: AL161579.2, EVALUE 4.80e-01; EST_HUMAN HIT: AI972492.1, EVALUE 7.10e-01
tcctccacaagatgagccccagactgtggggcaggaccatgggatcctcttagctcggctagagctgaatgctgagctctagtgtttgggcggatttgcgtgttagaattgcatttctcttggcaacagagcatcttcctac

SEQ ID NO: 14375 - DNA, 125 bp, Homo sapiens
  MAP TO AL137855.1; EXPRESSED IN BONE MARROW, SIGNAL =   3; EXPRESSED IN PLACENTA, SIGNAL = 2.9; EXPRESSED IN LUNG, SIGNAL = 2.6; EXPRESSED IN ADULT LIVER, SIGNAL =   4; EXPRESSED IN BRAIN, SIGNAL = 2.6; EXPRESSED IN FETAL LIVER, SIGNAL = 2.6; SWISSPROT HIT: P41993, EVALUE 6.00e+00; EST_HUMAN HIT: BF094018.1, EVALUE 1.50e-01
ttgggttaaacaagcccaagagtaaaggctattctagacctgtcatagcaaacttcaaaaacaagcctttaaatgttcaaggtgatctgaaagaaactgccaaaatgaacttcaacactgtataa

SEQ ID NO: 14376 - DNA, 272 bp, Homo sapiens
  MAP TO CHR22_183_1.0; EXPRESSED IN FETAL LIVER, SIGNAL = 0.43; EXPRESSED IN LUNG, SIGNAL = 0.53; EXPRESSED IN ADULT LIVER, SIGNAL = 0.48; EXPRESSED IN BONE MARROW, SIGNAL = 0.53; EXPRESSED IN PLACENTA, SIGNAL = 0.51; EXPRESSED IN BRAIN, SIGNAL = 0.44; EST_HUMAN HIT: AA723702.1, EVALUE 1.00e-07
ctaatggaataggtttctttttctgttctgacacacaagttctcttctgattgtcaaattattggctaaagggagcccctgctggtccccaacattataaagcccgacaccagtttttagttttctgctttctgcatttgctccagattggagaaatttaagaaaaatcaaaagacacggagttaaaatgagagagctgacattgcctggggcaatgttgaggcaaattacgataatgattgacaaaagggcctgaggcccttcacccagcc

SEQ ID NO: 14377 - DNA, 249 bp, Homo sapiens
  MAP TO CHR22_152.0; EXPRESSED IN PLACENTA, SIGNAL = 0.41; EXPRESSED IN BRAIN, SIGNAL = 0.44; EXPRESSED IN LUNG, SIGNAL = 0.5; EXPRESSED IN HELA, SIGNAL = 1.2; EXPRESSED IN FETAL LIVER, SIGNAL = 0.4; EXPRESSED IN BONE MARROW, SIGNAL = 0.4; SWISSPROT HIT: P11369, EVALUE 1.40e+00; NT HIT: AF253417.1, EVALUE 2.00e-07; EST_HUMAN HIT: BE549846.1, EVALUE 4.00e-07
ctcccagatattggacatttccagcatccaaaagagtctcccatgcctttccctgccagtgcacagccctctagaggcatcctgactcctgtcacccttttgcttcctcttgaacttcccataaatggaattatgtagtgtgtgttcttcagtatctggcttcttttgttcaatattatgtgtgtgagattcctccatggtattgggtataggaggagtccattgatttttattgtggtgtagtattcc

SEQ ID NO: 14378 - DNA, 135 bp, Homo sapiens
  MAP TO AC015896.4; EXPRESSED IN HELA, SIGNAL = 0.56; EXPRESSED IN BRAIN, SIGNAL = 0.76; EXPRESSED IN FETAL LIVER, SIGNAL = 0.74; EXPRESSED IN BONE MARROW, SIGNAL = 0.74; EXPRESSED IN PLACENTA, SIGNAL = 0.88; EXPRESSED IN LUNG, SIGNAL = 0.87; EXPRESSED IN ADULT LIVER, SIGNAL = 0.77; SWISSPROT HIT: P40085, EVALUE 9.00e-03; NT HIT: AF189251.1, EVALUE 3.00e-70; EST_HUMAN HIT: W79932.1, EVALUE 4.00e-70
gtgtgtgacattttgaagggtgtcattttggtaatctgctattttatgatgcactatgttgactactccatgatgtaccacctgataagggggcagtccgtcatcaagctctacatcatctacaacatgctggag

SEQ ID NO: 14379 - DNA, 201 bp, Homo sapiens
  MAP TO CHR22_110.0; EXPRESSED IN BRAIN, SIGNAL = 0.72; EXPRESSED IN PLACENTA, SIGNAL = 0.74; EXPRESSED IN LUNG, SIGNAL = 0.74; EXPRESSED IN ADULT LIVER, SIGNAL = 0.68; SWISSPROT HIT: Q9L0Q8, EVALUE 1.30e-01; NT HIT: U78031.1, EVALUE 1.80e-01; EST_HUMAN HIT: W80620.1, EVALUE 2.60e-01
tgctgccaaaaggtggcataaccagttaccctcagaagccagaaccccaagttccacgctgcaatccccatcccaagctggcggcaggagcatgccctctgccacttccctggggcctggcaaagccctgcgaactgcagggacaacccccctggagagtcacagcaggagaagtcctccacttcttccattacctccatg

SEQ ID NO: 14380 - DNA, 193 bp, Homo sapiens
  MAP TO AL137851.1; EXPRESSED IN LUNG, SIGNAL = 0.71; EXPRESSED IN ADULT LIVER, SIGNAL = 0.82; EXPRESSED IN FETAL LIVER, SIGNAL = 0.73; EXPRESSED IN PLACENTA, SIGNAL = 0.72; EXPRESSED IN BONE MARROW, SIGNAL = 0.63; EXPRESSED IN BRAIN, SIGNAL = 0.67
ctgtctgtttctgtctgtctttctctctgtctctcggtctctttctttctctctttctctttgtttcttcctcctttctccctttttctttctctctctgtctctctctctctgtctctctgtgtcactctctgtgtctctttgtctctttctttgtctctttctctctctctttctttctctttcttcctac

SEQ ID NO: 14381 - DNA, 137 bp, Homo sapiens
  MAP TO AL136987.1; EXPRESSED IN BRAIN, SIGNAL = 0.89; EXPRESSED IN HELA, SIGNAL = 0.64; EXPRESSED IN LUNG, SIGNAL =   1; EXPRESSED IN ADULT LIVER, SIGNAL = 1.3; EXPRESSED IN FETAL LIVER, SIGNAL = 0.89; EXPRESSED IN PLACENTA, SIGNAL = 1.1; EXPRESSED IN BONE MARROW, SIGNAL = 0.82; NT HIT: AJ249504.1, EVALUE 1.20e-01
atgaagttttatcgtcttcctagtcagactgctcaatatgatccattttctctggatctggtaggggtgtataagaaaaaagtgaattgtaatagccagacacatgtgacttgggtccttagcatgtggatggaaag

SEQ ID NO: 14382 - DNA, 157 bp, Homo sapiens
  MAP TO AL121836.9; EXPRESSED IN FETAL LIVER, SIGNAL =   1; EXPRESSED IN BONE MARROW, SIGNAL = 0.93; EXPRESSED IN BRAIN, SIGNAL =   1; EXPRESSED IN PLACENTA, SIGNAL = 0.97; EXPRESSED IN LUNG, SIGNAL =   1; EXPRESSED IN HELA, SIGNAL = 1.3; SWISSPROT HIT: P22711, EVALUE 2.60e+00; NT HIT: M57889.1, EVALUE 5.40e-01
gcttgtaattatcaatacactggaacagggtcaaaacagaaattatccttaccgtgatcatgaccctactaaaatcctcatttttaccttaatcacttgctgcatcaaccattacaatttccttattttgtatgattttcctgagtccttttacatc

SEQ ID NO: 14383 - DNA, 86 bp, Homo sapiens
  MAP TO AL133543.2; EXPRESSED IN BRAIN, SIGNAL = 1.8; EXPRESSED IN HELA, SIGNAL = 2.7; EXPRESSED IN FETAL LIVER, SIGNAL = 1.9; EXPRESSED IN PLACENTA, SIGNAL = 2.2; EXPRESSED IN LUNG, SIGNAL = 2.4; EXPRESSED IN BONE MARROW, SIGNAL =   2; EXPRESSED IN ADULT LIVER, SIGNAL =   2; SWISSPROT HIT: P32244, EVALUE 8.10e+00; NT HIT: Z28283.1, EVALUE 2.70e-01
acggaagggtggtaactgtagttttgcagtgtggagtcagaagtatgtggacagcactaggagaagctgtgctattttacgcatag

SEQ ID NO: 14384 - DNA, 102 bp, Homo sapiens
  MAP TO CHR22_167.0; EXPRESSED IN BONE MARROW, SIGNAL = 0.55; EXPRESSED IN BRAIN, SIGNAL = 0.62; EXPRESSED IN LUNG, SIGNAL = 0.63; EXPRESSED IN FETAL LIVER, SIGNAL = 0.59; EXPRESSED IN PLACENTA, SIGNAL = 0.67; EXPRESSED IN ADULT LIVER, SIGNAL = 0.69; SWISSPROT HIT: Q08624, EVALUE 3.60e+00
tcagccccactcacactgccaccaggaggccagctcgccgctgtcacagtgccagccaatagcacacacaagtacttcaccttcgctccagtctgatgctcc

SEQ ID NO: 14385 - DNA, 129 bp, Homo sapiens
  MAP TO CHR21_71.0; EXPRESSED IN BRAIN, SIGNAL = 1.6; EXPRESSED IN HELA, SIGNAL = 6.1; EXPRESSED IN FETAL LIVER, SIGNAL = 2.1; EXPRESSED IN HEART, SIGNAL = 2.1; EXPRESSED IN BONE MARROW, SIGNAL = 1.6; EXPRESSED IN PLACENTA, SIGNAL = 1.2; EXPRESSED IN ADULT LIVER, SIGNAL = 1.6; EST_HUMAN HIT: AA729321.1, EVALUE 1.00e-66; NT HIT: gi11423626, EVALUE 1.00e-66; SWISSPROT HIT: P04080, EVALUE 7.00e-20
tcagaaataggtcagctcatcatgcttggctttgttggtctggtagttagataaggtcaagggcttgttttcatgagggagagattggaacactcgcaggtgtacgaagtcctcgtcgccgacgtgcac

SEQ ID NO: 14386 - DNA, 77 bp, Homo sapiens
  MAP TO CHR21_26.0; EXPRESSED IN PLACENTA, SIGNAL = 0.84; EXPRESSED IN BONE MARROW, SIGNAL = 0.9; EXPRESSED IN LUNG, SIGNAL = 0.67; EXPRESSED IN BRAIN, SIGNAL = 0.99; EXPRESSED IN HELA, SIGNAL = 2.7; EXPRESSED IN FETAL LIVER, SIGNAL = 0.87; EST_HUMAN HIT: AJ271379.1, EVALUE 3.30e-01
tattcaataatttcttcagttccagatctttgattcttttttacagtatctatctgtgtttgtccattctcatgatg

SEQ ID NO: 14387 - DNA, 292 bp, Homo sapiens
  MAP TO AL137846.1; EXPRESSED IN PLACENTA, SIGNAL = 6.7; EXPRESSED IN LUNG, SIGNAL = 6.5; EXPRESSED IN BONE MARROW, SIGNAL = 5.8; EXPRESSED IN ADULT LIVER, SIGNAL = 5.9; EXPRESSED IN HELA, SIGNAL =   3; EXPRESSED IN BRAIN, SIGNAL = 5.6; EXPRESSED IN FETAL LIVER, SIGNAL = 4.6; EXPRESSED IN HEART, SIGNAL = 4.7; EST_HUMAN HIT: AA219159.1, EVALUE 1.00e-01; NT HIT: U49447.1, EVALUE 6.80e-02
ttgaaaatgaatatagacgaaacatttgccatcttaaagtgcactaatttgatcctgtgcaggacaactttcaaaatcaagtcatgtggaggtatcaaaatatctatacaaaggttgtacttgagtataaaaatacagaaaaggttgtactttagcataaaaatacagaaaaggttgtactttagtgtaaaaatacagaaaaggctgtactttagcgtaacgatggcaaatctgaactccctatccatgttcctaagttctcacttaattgtaagattcttctgcccacaag

SEQ ID NO: 14388 - DNA, 78 bp, Homo sapiens
  MAP TO AC016687.2; EXPRESSED IN PLACENTA, SIGNAL = 0.36; EXPRESSED IN BONE MARROW, SIGNAL = 0.42; EXPRESSED IN BRAIN, SIGNAL = 0.47; EST_HUMAN HIT: BI830850.1, EVALUE 4.00e-10; NT HIT: AY037272.1, EVALUE 9.30e-01
ctttgactctttcaataataaaactgttggttatacaattccaggtcctgtttctgctgggaggacaatttgagctaa

SEQ ID NO: 14389 - DNA, 134 bp, Homo sapiens
  MAP TO AC013341.3; EXPRESSED IN FETAL LIVER, SIGNAL = 0.54; EXPRESSED IN PLACENTA, SIGNAL = 0.57; EXPRESSED IN BONE MARROW, SIGNAL = 0.46; EXPRESSED IN BRAIN, SIGNAL = 0.56; EST_HUMAN HIT: AI337284.1, EVALUE 6.60e-01
ccacccccaaactgccagattctcacaggagtggattgtcacctgtcatagaattggtggcaagaactggaatttccctcttcatatcttccttctccttctttgtgaaaattatagttaggcatttctatgtc

SEQ ID NO: 14390 - DNA, 128 bp, Homo sapiens
  MAP TO AL137843.1; EXPRESSED IN BONE MARROW, SIGNAL = 0.88; EXPRESSED IN BRAIN, SIGNAL = 1.2; EXPRESSED IN HELA, SIGNAL = 0.93; EXPRESSED IN HEART, SIGNAL = 1.3; EXPRESSED IN FETAL LIVER, SIGNAL = 0.83; EXPRESSED IN PLACENTA, SIGNAL = 1.2; EXPRESSED IN LUNG, SIGNAL = 0.83; SWISSPROT HIT: P13026, EVALUE 2.70e+00; NT HIT: gi14724378, EVALUE 1.70e+00; EST_HUMAN HIT: AW842430.1, EVALUE 4.00e-02
atgaatctggaagcagatgttggcaagatggccaaaaaggacattcgatctcttgtctccccacaaaaccatcagtgtaaacaaccacacatatgcaaaaataacttccgaagagctaaggaaaccag

SEQ ID NO: 14391 - DNA, 172 bp, Homo sapiens
  MAP TO AL137178.3; EXPRESSED IN BONE MARROW, SIGNAL = 0.43; EXPRESSED IN BRAIN, SIGNAL = 0.44; EXPRESSED IN FETAL LIVER, SIGNAL = 0.42; EXPRESSED IN PLACENTA, SIGNAL = 0.47; SWISSPROT HIT: Q11067, EVALUE 4.40e+00; NT HIT: AL163285.2, EVALUE 3.80e-02; EST_HUMAN HIT: BE064410.1, EVALUE 6.00e-05
atggtctggaaatcaaggggtggaaatggaagtggttcctctcaactcactatctatgattcaactagcaaaatctgtgcttctgactcccaagacattgggctatgttggtccagagctcttagttcccaatggtacaatgctaactctagtgtccatggcaatagttcta

SEQ ID NO: 14392 - DNA, 229 bp, Homo sapiens
  MAP TO CHR22_113.0; EXPRESSED IN BRAIN, SIGNAL = 0.36; EXPRESSED IN LUNG, SIGNAL = 0.49; SWISSPROT HIT: P55647, EVALUE 2.60e+00; NT HIT: AE000022.2, EVALUE 2.10e-01; EST_HUMAN HIT: BI018703.1, EVALUE 3.00e-01
aaagtgtggcattcccaagatccatacttgatccctccagaggacttgtgttattaaaccagagagcagagcaggttctggctggcaaggacccagggattaacgtccagggcgttaacatcataattgggccagccttgaaggcagcaacatctgctgtgtgaggctctggtgccagagcccatgttgcacctcctggctggctagggcctttgtcttgggaagtggc

SEQ ID NO: 14393 - DNA, 183 bp, Homo sapiens
  MAP TO AL138842.2; EXPRESSED IN BONE MARROW, SIGNAL =  18; EXPRESSED IN HELA, SIGNAL =  11; EXPRESSED IN BRAIN, SIGNAL =  13; EXPRESSED IN PLACENTA, SIGNAL =  15; EXPRESSED IN ADULT LIVER, SIGNAL =  20; EXPRESSED IN FETAL LIVER, SIGNAL =  15; SWISSPROT HIT: P01026, EVALUE 5.60e+00; NT HIT: AB051901.1, EVALUE 9.00e-99; EST_HUMAN HIT: AV705760.1, EVALUE 3.00e-81
gattcttatgtggccatattttcttttctagctcctccctgctatatggatgtcattcctgaagatcaccgattggagagcccaaccactcctctgctagatgacatggatggctctcaagacagccctatctttatgtatgcccctgagttcaagttcatgccaccaccgacttatactgag

SEQ ID NO: 14394 - DNA, 346 bp, Homo sapiens
  MAP TO AC024195.2; EXPRESSED IN BONE MARROW, SIGNAL = 0.48; EXPRESSED IN BRAIN, SIGNAL = 0.42; EXPRESSED IN PLACENTA, SIGNAL = 0.87; EXPRESSED IN LUNG, SIGNAL = 0.89; EXPRESSED IN ADULT LIVER, SIGNAL = 0.8; SWISSPROT HIT: Q03167, EVALUE 7.00e-56; NT HIT: gi16161131, EVALUE 0.00e+00; EST_HUMAN HIT: AU139970.1, EVALUE 0.00e+00
ctaaaaatgccaaaataaccatccgaatggatgaaggcccacaaaccttaggcaacttctgggggtgcttctccatcttcgtacacagcgtcagctcacactgtagaaagagcagtgaggtgttgaagacaggcttgaagacaaagctgaatcgcttcttatccatgtcagcttgcgggataggaaagtgcactctcttgggactgtagaatttcacagattcatctttaggacaaatattctcaataatggtgtaatgagacatcctatcagggttcgaatatggagagataaagcacgtttggatggcaaatcccagttcttgttcagccttagtaacagatac

SEQ ID NO: 14395 - DNA, 247 bp, Homo sapiens
  MAP TO AL137846.1; EXPRESSED IN FETAL LIVER, SIGNAL = 5.7; EXPRESSED IN BONE MARROW, SIGNAL = 6.4; EXPRESSED IN HELA, SIGNAL = 3.1; EXPRESSED IN LUNG, SIGNAL =   7; EXPRESSED IN BRAIN, SIGNAL = 5.4; EXPRESSED IN PLACENTA, SIGNAL = 6.2; EXPRESSED IN ADULT LIVER, SIGNAL = 6.5; SWISSPROT HIT: P16554, EVALUE 9.40e-02; EST_HUMAN HIT: BE745492.1, EVALUE 8.40e-02
ctcactctttcagacgctcggtgagcatctgtgcaacggaaaggtaaagaaagtgaaggaactagtgaagccttaactgagagaggcttggcccatcctgagcctggcagcacagggtcctcaggtccctgcctcccggcaggttccccaaccccctgacccaggggaggggctgctcccccttctatcttaaagtcagggtgctgtgtctcactggggggcagggtgtcctggactgcagctaggg

SEQ ID NO: 14396 - DNA, 157 bp, Homo sapiens
  MAP TO AL139100.1; EXPRESSED IN BONE MARROW, SIGNAL =  32; EXPRESSED IN BRAIN, SIGNAL =  26; EXPRESSED IN HEART, SIGNAL =  21; EXPRESSED IN HELA, SIGNAL =  16; EXPRESSED IN FETAL LIVER, SIGNAL =  24; EXPRESSED IN LUNG, SIGNAL =  17; SWISSPROT HIT: P15866, EVALUE 2.00e+00; NT HIT: L10391.1, EVALUE 1.40e-01; EST_HUMAN HIT: BG621217.1, EVALUE 5.00e-39
tgaacctcgtagcggcccgtagtactcctccttcccgccatcctatagatgaaaggaagaaaaggaaaagccccgcccctcgctcggctgctggaggcgagggcttcggaagtcttcatgctagtctcgtggggttccgcggtgtcgtcgctggctg

SEQ ID NO: 14397 - DNA, 382 bp, Homo sapiens
  MAP TO CHR21_67.0; EXPRESSED IN FETAL LIVER, SIGNAL = 1.1; EXPRESSED IN LUNG, SIGNAL = 0.66; EXPRESSED IN HELA, SIGNAL = 3.8; EXPRESSED IN BRAIN, SIGNAL = 1.2; EXPRESSED IN PLACENTA, SIGNAL = 0.62; EXPRESSED IN ADULT LIVER, SIGNAL = 0.69; SWISSPROT HIT: P49753, EVALUE 1.10e+00; NT HIT: AL163282.2, EVALUE 6.00e-03; EST_HUMAN HIT: AA300086.1, EVALUE 5.30e-01
tcacagggccacaggatccaaccgaaggagctcccaatggccaatgctggaacactgggagcaacatttagtaaagttgtatggaattgtagcccacagtatgagtccatacagaataaacaaaaatggtggaagagacaaatacgtgggggagaagaaacaaatgtcccatgccagattccaaatgacgtgggcagacgccccctcgaggaggtgctgtggaccccccaccctaagcgtgggctgtgcacagtgactcccttccagagcacacggcctggagatagggagagagagggtgaccttacagtggggaagcctgactcacagcacctcagccaggtggccaaggtcaacgtcaacaggaaggactcctttggaa

SEQ ID NO: 14398 - DNA, 208 bp, Homo sapiens
  MAP TO CHR22_215.0; EXPRESSED IN FETAL LIVER, SIGNAL =   2; EXPRESSED IN PLACENTA, SIGNAL = 1.4; EXPRESSED IN ADULT LIVER, SIGNAL = 1.4; EXPRESSED IN BONE MARROW, SIGNAL = 2.3; EXPRESSED IN BRAIN, SIGNAL = 1.8; EXPRESSED IN HELA, SIGNAL =   3; EXPRESSED IN HEART, SIGNAL = 1.5; EXPRESSED IN LUNG, SIGNAL = 1.3; SWISSPROT HIT: Q62812, EVALUE 3.00e-23; NT HIT: gi12667787, EVALUE 2.00e-81; EST_HUMAN HIT: BF742921.1, EVALUE 3.00e-81
ggcaaccaacaggccaaggaggcagcagggtgggtaatgaagggcaaggctcacatcaaagatctcgaagccggcaatgtccaggatcccgatgaaggaggcgccctgcctcttggtcttgtccagagccttgttgatgcgcagcaccagccagcggaacatccgctcataggtcgccttggccaaggcctcgatggcaaagtcagcc

SEQ ID NO: 14399 - DNA, 1 bp, Homo sapiens
  MAP TO CHR21_42.0; EXPRESSED IN BRAIN, SIGNAL = 1.9; EXPRESSED IN LUNG, SIGNAL = 1.5; EXPRESSED IN HEART, SIGNAL = 1.4; EXPRESSED IN ADULT LIVER, SIGNAL = 1.3; EXPRESSED IN HELA, SIGNAL = 3.4; EXPRESSED IN FETAL LIVER, SIGNAL = 1.9; EXPRESSED IN BONE MARROW, SIGNAL = 2.2
g

SEQ ID NO: 14400 - DNA, 148 bp, Homo sapiens
  MAP TO CHR21_5.0; EXPRESSED IN BRAIN, SIGNAL = 1.1; EXPRESSED IN PLACENTA, SIGNAL = 0.77; EXPRESSED IN HELA, SIGNAL = 2.8; EXPRESSED IN ADULT LIVER, SIGNAL = 0.75; EXPRESSED IN FETAL LIVER, SIGNAL =   1; EXPRESSED IN BONE MARROW, SIGNAL = 1.1; SWISSPROT HIT: P98205, EVALUE 5.90e+00; EST_HUMAN HIT: BF884860.1, EVALUE 6.00e-23; NT HIT: Z11905.1, EVALUE 1.30e-01
ctttatgactgactgaggaagtcctgaagttgcagctgctccacttctgagtgatcctggtttttttatttcttgttgtcccacagcagacagttattaaaatattgaaataatgagaatcctcaacaactctagtcacctttggcac

SEQ ID NO: 14401 - DNA, 476 bp, Homo sapiens
  MAP TO AL138752.2; EXPRESSED IN LUNG, SIGNAL = 8.1; EXPRESSED IN ADULT LIVER, SIGNAL = 8.2; EXPRESSED IN HELA, SIGNAL = 4.5; EXPRESSED IN BRAIN, SIGNAL = 7.6; EXPRESSED IN PLACENTA, SIGNAL = 8.2; EXPRESSED IN FETAL LIVER, SIGNAL = 7.5; EXPRESSED IN BONE MARROW, SIGNAL = 8.2; SWISSPROT HIT: Q9NQT5, EVALUE 1.00e-45; EST_HUMAN HIT: BI227382.1, EVALUE 0.00e+00; NT HIT: gi14736849, EVALUE 0.00e+00
ggacccgtgagctgacggccatcaagcttcataaactggtccgaatccaacggaccgctactgccggaaacggaaagtcctcaagggcgggtgttggaagcggagcggaagcggaaggcgggtaccggaaacggtgtttggtggagcccgcgatggccgaacctgcgtctgtcgcggctgaatctctcgcgggcagcagggcgcgcgctgcacgcacagtactaggtcaggtggtgctcccgggtgaggagctgctcctgccggaacaggaggacgcggaaggccctgggggtgcagtggagcgaccgttgagcctgaatgctagagcgtgctcgcgggtgcgcgttgtatgcggtccgggccttcggcgctgtggggaccgcctgctggtcaccaagtgcggccgcctccgtcacaaggagcccggcagtggcagcggcggcggtgtttactgggtggactctcagcagaagcgg

SEQ ID NO: 14402 - DNA, 237 bp, Homo sapiens
  MAP TO AL135932.1; EXPRESSED IN HEART, SIGNAL = 2.8; EXPRESSED IN FETAL LIVER, SIGNAL = 3.1; EXPRESSED IN LUNG, SIGNAL = 3.9; EXPRESSED IN ADULT LIVER, SIGNAL = 3.8; EXPRESSED IN BONE MARROW, SIGNAL = 3.1; EXPRESSED IN BRAIN, SIGNAL =   3; EXPRESSED IN HELA, SIGNAL = 2.5; EXPRESSED IN PLACENTA, SIGNAL = 3.7; SWISSPROT HIT: P32870, EVALUE 2.90e+00; EST_HUMAN HIT: BE019674.1, EVALUE 1.20e+00; NT HIT: AL161500.2, EVALUE 1.40e-02
ctcccacatctggaatcaatcctgaccagcagcaaaatgctgaacagccgggctcctcccagggcagactttctttctcccaaggagagacaagaatacatcgcatatgaattagccattctcttctagggaaaactggcagcagaggcagcttctgcattctaatttgctcatctaaccccttcatctttacttgtttaagcaaaatatttagtttaacattttcagtcattagag

SEQ ID NO: 14403 - DNA, 197 bp, Homo sapiens
  MAP TO AL137800.2; EXPRESSED IN HEART, SIGNAL =  11; EXPRESSED IN BONE MARROW, SIGNAL =  15; EXPRESSED IN LUNG, SIGNAL =  16; EXPRESSED IN ADULT LIVER, SIGNAL =  15; EXPRESSED IN PLACENTA, SIGNAL =  15; EXPRESSED IN HELA, SIGNAL = 7.3; EXPRESSED IN BRAIN, SIGNAL =  13; EXPRESSED IN FETAL LIVER, SIGNAL =  13; EST_HUMAN HIT: BE269352.1, EVALUE 1.00e-101; SWISSPROT HIT: P19878, EVALUE 5.00e-29; NT HIT: U00776.1, EVALUE 1.00e-107
ctccactcaccttctctgcttcagtcatgttcttcaggatagtgtacatgcagccaatgttgaagcaaatccgggagtgggggtcctggacggcactgaaggcatccagggctcccttccagtccttcttgtccgctgccagcaccccttcattccagaggctgatggcctccaccagggacatgattaggtagaaa

SEQ ID NO: 14404 - DNA, 135 bp, Homo sapiens
  MAP TO AL135786.2; EXPRESSED IN HEART, SIGNAL = 1.7; EXPRESSED IN BRAIN, SIGNAL = 1.8; EXPRESSED IN LUNG, SIGNAL = 0.86; EXPRESSED IN HELA, SIGNAL = 1.8; EXPRESSED IN FETAL LIVER, SIGNAL = 1.4; EXPRESSED IN BONE MARROW, SIGNAL = 1.5; NT HIT: AL163267.2, EVALUE 3.00e-11; EST_HUMAN HIT: BG198449.1, EVALUE 1.00e-26; SWISSPROT HIT: P11369, EVALUE 4.00e-08
atgcccatcagtcaacaagtggataaagaaaatgtgatatatatataccatggaataaaacgcagccataaaaatgaacaaaataatggtattcacagcaacctggtgggaattggagacaattatctaagtaaa

SEQ ID NO: 14405 - DNA, 298 bp, Homo sapiens
  MAP TO AL136163.3; EXPRESSED IN FETAL LIVER, SIGNAL = 0.69; EXPRESSED IN BONE MARROW, SIGNAL = 0.66; EXPRESSED IN LUNG, SIGNAL = 0.71; EXPRESSED IN ADULT LIVER, SIGNAL = 0.6; EXPRESSED IN BRAIN, SIGNAL = 0.76; NT HIT: AF023853.1, EVALUE 1.80e-02
ctatagatatttagagcagtgagactggataaaatcaagggagcaattgtagatagagaagaagaccaagaactgagccttggaccattccaacactaagagtttagaggggagatacaaagggaagggaaagaacttaagaggaaaaaaggaaaacaagagaatgcagtgacctggaaacatatgaagaaggtgtattaaggagacagggattattaaaatgtgccaaatgctgctaatcagataagaaaaggactgagaattgccattgaatttggcaatgtggaggtcacccaag

SEQ ID NO: 14406 - DNA, 223 bp, Homo sapiens
  MAP TO CHR21_70.0; EXPRESSED IN LUNG, SIGNAL = 0.68; EXPRESSED IN PLACENTA, SIGNAL = 0.61; EXPRESSED IN BONE MARROW, SIGNAL = 1.3; EXPRESSED IN BRAIN, SIGNAL = 1.3; EXPRESSED IN HELA, SIGNAL = 3.4; EXPRESSED IN FETAL LIVER, SIGNAL = 1.2; SWISSPROT HIT: P30349, EVALUE 4.80e-01; EST_HUMAN HIT: AI089508.1, EVALUE 7.50e-02
ccctgtggacatctcttgcccacccagccatggcaaaaatgaggagcccccgaccatggtgaccctgtctgccagccccaaatttgggactcagagttggacaggccagagtgcggaggaacaccagccccctggaagccccctggaatacgaagccgtcaccgctgagatcatccctaagtgcctgctgatcacccctccctcctccagacggaaggaaatc

SEQ ID NO: 14407 - DNA, 120 bp, Homo sapiens
  MAP TO AL133338.2; EXPRESSED IN PLACENTA, SIGNAL = 1.1; EXPRESSED IN LUNG, SIGNAL = 1.1; EXPRESSED IN ADULT LIVER, SIGNAL = 1.1; EXPRESSED IN BONE MARROW, SIGNAL = 1.1; EXPRESSED IN BRAIN, SIGNAL =   1; EXPRESSED IN HELA, SIGNAL = 0.77; EXPRESSED IN FETAL LIVER, SIGNAL = 0.91; EST_HUMAN HIT: AA381249.1, EVALUE 9.10e+00; NT HIT: AL163302.2, EVALUE 1.60e+00
gtttcccattcaaaggtgggggaaaaaaatcctggacaggctcataactataaagcagattagtctttatattcagaatattcccccccaaagttgtgttaattttacttttagcacagg

SEQ ID NO: 14408 - DNA, 43 bp, Homo sapiens
  MAP TO CHR22_222.0; EXPRESSED IN HEART, SIGNAL = 1.3; EXPRESSED IN LUNG, SIGNAL = 1.6; EXPRESSED IN BONE MARROW, SIGNAL = 1.7; EXPRESSED IN PLACENTA, SIGNAL = 2.5; EXPRESSED IN BRAIN, SIGNAL = 1.3; EXPRESSED IN HELA, SIGNAL = 2.4; EST_HUMAN HIT: BG028427.1, EVALUE 1.00e-08; NT HIT: D87675.1, EVALUE 1.00e-04
tctccaggctccacttttaattcgagttctcttgctatttcta

SEQ ID NO: 14409 - DNA, 157 bp, Homo sapiens
  MAP TO CHR22_113.0; EXPRESSED IN BONE MARROW, SIGNAL = 0.43; EXPRESSED IN BRAIN, SIGNAL = 0.51; EXPRESSED IN LUNG, SIGNAL = 0.5; SWISSPROT HIT: P47607, EVALUE 1.50e+00; NT HIT: AE004638.1, EVALUE 1.40e-01; EST_HUMAN HIT: AA934505.1, EVALUE 2.00e-01
tgcaggatgcagcaactcggtacacgtgtgagatgagagaggcgaggacaagggagctcctgttccctgggttctggaagttcacagatggtgttttcatccactgcaatgcagtggaggaaggtgaagaaggcgagttcagttatggactcagatg

SEQ ID NO: 14410 - DNA, 156 bp, Homo sapiens
  MAP TO CHR21_72.0; EXPRESSED IN BRAIN, SIGNAL = 1.3; EXPRESSED IN HELA, SIGNAL = 2.7; EXPRESSED IN LUNG, SIGNAL = 0.77; EXPRESSED IN FETAL LIVER, SIGNAL = 1.2; EXPRESSED IN BONE MARROW, SIGNAL = 1.3; EXPRESSED IN ADULT LIVER, SIGNAL = 0.66; NT HIT: AF111167.2, EVALUE 8.40e+00; SWISSPROT HIT: Q28441, EVALUE 5.80e+00; EST_HUMAN HIT: AA025350.1, EVALUE 2.00e-01
ttgcagaccccacggcagagcccctagtgcttggcactgaagagccagtgcaggcccgttgtcaccatcaaaacccacctctggtaaattcaatggcttctgcttccacgctttgccccccctctctggccttgtcaaaaactcttgtgatgtccc

SEQ ID NO: 14411 - DNA, 58 bp, Homo sapiens
  MAP TO CHR21_48.0; EXPRESSED IN HELA, SIGNAL = 0.85; EXPRESSED IN FETAL LIVER, SIGNAL = 0.46; EXPRESSED IN ADULT LIVER, SIGNAL = 0.29; EXPRESSED IN BRAIN, SIGNAL = 0.39; NT HIT: AL163252.2, EVALUE 8.00e-25
tttctagtgtacctaagcctgaaacaagaagaataacaatgtcatcatcaacaaacac

SEQ ID NO: 14412 - DNA, 84 bp, Homo sapiens
  MAP TO AL138886.1; EXPRESSED IN BONE MARROW, SIGNAL = 1.6; EXPRESSED IN HELA, SIGNAL = 0.96; EXPRESSED IN BRAIN, SIGNAL = 1.7; EXPRESSED IN PLACENTA, SIGNAL =   2; EXPRESSED IN FETAL LIVER, SIGNAL = 1.8; EXPRESSED IN HEART, SIGNAL = 1.6; EXPRESSED IN LUNG, SIGNAL =   3; EXPRESSED IN ADULT LIVER, SIGNAL = 2.4; EST_HUMAN HIT: AA634550.1, EVALUE 9.50e-02; NT HIT: gi9634679, EVALUE 4.00e+00
ctgcctttttcctactgccttatattcatcttggactgcatggtctatacattcaataaattctgccaatactttaaaatccat

SEQ ID NO: 14413 - DNA, 385 bp, Homo sapiens
  MAP TO AL138837.1; EXPRESSED IN BRAIN, SIGNAL = 1.8; EXPRESSED IN FETAL LIVER, SIGNAL = 1.9; EXPRESSED IN LUNG, SIGNAL = 1.8; EXPRESSED IN PLACENTA, SIGNAL = 1.9; EXPRESSED IN BONE MARROW, SIGNAL = 1.9; EXPRESSED IN HELA, SIGNAL = 1.1; EST_HUMAN HIT: AI815668.1, EVALUE 5.30e-01; NT HIT: M25804.1, EVALUE 9.10e-02; SWISSPROT HIT: O02833, EVALUE 1.00e-06
caggttttgggtggtcagtgtaggcagaggagccagccagccctcacccagggttaccagtggattattgcccaagttcaaggtctgtagcctctgtaggccctggaatacctggtctttcaagcaaaccagttggttcccttgaagtagcagctcccgcaggtggggcaaacaggagaagatgactggggacagggtacacagcctattcttggacagatccagggcccacaatcctgacacaaaccctgtctcattcatacacaacatggcgctcctcagttggttgttggccaggttcagtctctgaagcctgggcatggcagccaggaaacctcgtggtaactcaatcaggccattgctccgaagacccgagctcttcagg

SEQ ID NO: 14414 - DNA, 158 bp, Homo sapiens
  MAP TO AF239614.1; EXPRESSED IN LUNG, SIGNAL = 2.4; EXPRESSED IN FETAL LIVER, SIGNAL = 2.3; EXPRESSED IN PLACENTA, SIGNAL = 2.4; EXPRESSED IN ADULT LIVER, SIGNAL = 2.7; EXPRESSED IN BONE MARROW, SIGNAL = 2.4; EXPRESSED IN BRAIN, SIGNAL = 2.4; SWISSPROT HIT: P54296, EVALUE 2.00e-25; NT HIT: gi4505314, EVALUE 6.00e-84; EST_HUMAN HIT: AL596786.1, EVALUE 3.00e-06
atggaggacaagctggcctgggagagacacacatttgaagagcggataagcagggctcctgagatcctggtgcggctgcgatcccacaccgtctgggagaggatgtctgtgaaactctgcttcaccgtgcaaggatttcccacgcccgtggtgcagtg

SEQ ID NO: 14415 - DNA, 141 bp, Homo sapiens
  MAP TO CHR22_226.0; EXPRESSED IN LUNG, SIGNAL = 0.92; EXPRESSED IN PLACENTA, SIGNAL = 0.84; EXPRESSED IN ADULT LIVER, SIGNAL = 1.2; EXPRESSED IN BONE MARROW, SIGNAL = 1.9; EXPRESSED IN BRAIN, SIGNAL = 1.7; EXPRESSED IN HELA, SIGNAL = 3.3; EXPRESSED IN FETAL LIVER, SIGNAL = 1.5; EXPRESSED IN HEART, SIGNAL = 1.2; SWISSPROT HIT: Q00587, EVALUE 8.90e-01; NT HIT: AF060568.1, EVALUE 7.40e+00; EST_HUMAN HIT: AL038936.1, EVALUE 7.00e-01
tggaaaatgaggggaagcagctcatccaaggggcacatccatggcagagctgggaccaggatcaggaccttggtgtccagcctctcttcctggccctgaccacatcccaactgctacttccagtgaatgtcatggccatag

SEQ ID NO: 14416 - DNA, 131 bp, Homo sapiens
  MAP TO AL133285.3; EXPRESSED IN PLACENTA, SIGNAL = 3.8; EXPRESSED IN LUNG, SIGNAL = 3.4; EXPRESSED IN ADULT LIVER, SIGNAL = 3.6; EXPRESSED IN BONE MARROW, SIGNAL = 3.5; EXPRESSED IN BRAIN, SIGNAL = 3.1; EXPRESSED IN HELA, SIGNAL = 1.5; EXPRESSED IN HEART, SIGNAL = 2.7; SWISSPROT HIT: P08547, EVALUE 5.70e-02; NT HIT: L78810.1, EVALUE 5.00e-04; EST_HUMAN HIT: BF839372.1, EVALUE 1.60e-01
ttttttgacgagtcttcataccattttccataatgactgtatccacgtatattctgaccaacaatatataagagttttcctcatatcctctccaatatgtgttatctttcatctttttgatgacagccatt

SEQ ID NO: 14417 - DNA, 122 bp, Homo sapiens
  MAP TO AC018608.4; EXPRESSED IN BRAIN, SIGNAL = 0.8; EXPRESSED IN LUNG, SIGNAL = 0.66; EXPRESSED IN FETAL LIVER, SIGNAL = 0.79; EXPRESSED IN BONE MARROW, SIGNAL = 0.71; NT HIT: AF135799.1, EVALUE 1.60e+00
atggcattggtgatggcagtagaagtagtgggtacatcttgggaccttcctgtggcatacatgggcacagtagtggcagcagtggacttggaaggccagttcccaggcctccaggtggcaca

SEQ ID NO: 14418 - DNA, 150 bp, Homo sapiens
  MAP TO CHR21_73.0; EXPRESSED IN BRAIN, SIGNAL = 1.3; EXPRESSED IN HEART, SIGNAL = 1.2; EXPRESSED IN HELA, SIGNAL = 2.6; EXPRESSED IN LUNG, SIGNAL = 0.77; EXPRESSED IN ADULT LIVER, SIGNAL = 0.76; EXPRESSED IN FETAL LIVER, SIGNAL = 1.4; EXPRESSED IN BONE MARROW, SIGNAL = 1.2; SWISSPROT HIT: Q06455, EVALUE 1.20e+00; EST_HUMAN HIT: BE280360.1, EVALUE 1.00e-58; NT HIT: gi14780689, EVALUE 7.00e-59
cgggtgcaatcagggtttccgcagatgagcagcgtctctccggagcagcagatggagcagtaggattggtacccgtcatcgtcgtacaggaagagggcatccaggaacttgtccttggaaggagcaaagcaaggctggcttgtgtcatcc

SEQ ID NO: 14419 - DNA, 139 bp, Homo sapiens
  MAP TO AL121876.23; EXPRESSED IN BONE MARROW, SIGNAL =   2; EXPRESSED IN HEART, SIGNAL = 1.9; EXPRESSED IN PLACENTA, SIGNAL = 2.1; EXPRESSED IN LUNG, SIGNAL =   2; EXPRESSED IN ADULT LIVER, SIGNAL = 1.7; EXPRESSED IN HELA, SIGNAL = 0.9; EXPRESSED IN BRAIN, SIGNAL = 2.1; EXPRESSED IN FETAL LIVER, SIGNAL = 1.9; NT HIT: AJ290436.1, EVALUE 1.00e-72; SWISSPROT HIT: Q90610, EVALUE 3.50e-02; EST_HUMAN HIT: AV705355.1, EVALUE 4.40e-02
atgtggagaagcataataatacagaaaggaaatgctcttctgatccaagaagttcaagaagaagatggaggaaattacacatgtgaacttaaatatgaaggaaaacttgtaagacgaacaactgaattgaaagttacag

SEQ ID NO: 14420 - DNA, 120 bp, Homo sapiens
  MAP TO AC011585.3; EXPRESSED IN BRAIN, SIGNAL = 0.35; EXPRESSED IN PLACENTA, SIGNAL = 0.43; EST_HUMAN HIT: BF680078.1, EVALUE 6.00e-07; NT HIT: X87344.1, EVALUE 3.90e-01
atggcccttcaacatgtctgtgaatatgttgccttatacagcaaaagggactttgccaatgtgattgttacatatgttgacatctggatgttattctggattatcaagatgggcccataa

SEQ ID NO: 14421 - DNA, 206 bp, Homo sapiens
  MAP TO AL135909.3; EXPRESSED IN BONE MARROW, SIGNAL =   1; EXPRESSED IN BRAIN, SIGNAL = 0.98; EXPRESSED IN HELA, SIGNAL = 0.69; EXPRESSED IN PLACENTA, SIGNAL =   1; EXPRESSED IN LUNG, SIGNAL = 0.95; EXPRESSED IN ADULT LIVER, SIGNAL =   1; NT HIT: AJ251216.1, EVALUE 4.70e-02; SWISSPROT HIT: Q9UKJ3, EVALUE 3.70e-01
tcaacagatgattaatactttgcttttcctttcagagatgtggtactggatcttcctctgggctctcttctcttctctgtttgtccatggtgctgcaggagtgttgatgtttgtgatgctgcagaggcataggcagggaagagtcatctctgtcattgcagtcagcattggatttctggcttctgtaactggagcgatgattacca

SEQ ID NO: 14422 - DNA, 235 bp, Homo sapiens
  MAP TO AL136304.2; EXPRESSED IN BONE MARROW, SIGNAL = 1.3; EXPRESSED IN HEART, SIGNAL = 1.5; EXPRESSED IN PLACENTA, SIGNAL = 1.7; EXPRESSED IN LUNG, SIGNAL = 1.6; EXPRESSED IN ADULT LIVER, SIGNAL = 2.1; EXPRESSED IN BRAIN, SIGNAL = 1.5; EXPRESSED IN FETAL LIVER, SIGNAL = 1.4; EST_HUMAN HIT: BE795313.1, EVALUE 3.00e-60; NT HIT: gi15300082, EVALUE 2.00e-60; SWISSPROT HIT: Q45718, EVALUE 3.60e+00
gagcagcaagaaatggcacagcaggaacgaaagcaacagcaggagctgcacctggccctgaagcaagaacgtcgggctcaggcccagcagggccatcggccatacttcctgaaaaaatgtgagttgggcacaactgttgctaacagggacaggggtgcaggggccatggtggtagagtcttgtgttggggtgtccctgatcccctttaaggaaggcatgaaggctggatcccatg

SEQ ID NO: 14423 - DNA, 191 bp, Homo sapiens
  MAP TO CHR22_182.0; EXPRESSED IN BRAIN, SIGNAL = 0.8; EXPRESSED IN LUNG, SIGNAL = 0.66; EXPRESSED IN ADULT LIVER, SIGNAL = 0.79; EXPRESSED IN FETAL LIVER, SIGNAL = 0.73; EXPRESSED IN BONE MARROW, SIGNAL = 0.73; EST_HUMAN HIT: BI084138.1, EVALUE 1.00e-103; NT HIT: Y17124.1, EVALUE 1.00e-103; SWISSPROT HIT: Q9Z0H3, EVALUE 7.00e-32
tgaacatccatgtgggaaacatttccctggtggaccagtttgagtgggacatgtcagagaaggagaactcaccagagaagtttgccctgaagctgtgctcggagctggggttgggcggggagtttgtcaccaccatcgcatacagcatccggggacagctgagctggcatcagaagacctacgccttcagg

SEQ ID NO: 14424 - DNA, 174 bp, Homo sapiens
  MAP TO U82695.2; EXPRESSED IN FETAL LIVER, SIGNAL = 0.44; EXPRESSED IN ADULT LIVER, SIGNAL = 0.63; EXPRESSED IN PLACENTA, SIGNAL = 0.6; EXPRESSED IN LUNG, SIGNAL = 0.45; EXPRESSED IN BRAIN, SIGNAL = 0.42; EST_HUMAN HIT: BF036577.1, EVALUE 4.00e-03; NT HIT: U82695.2, EVALUE 2.00e-93; SWISSPROT HIT: Q62396, EVALUE 1.10e-02
aaggtcctctacaagcgggtgatgctggagaactatagccatttggtgtcactgggtaagtgatccctccacgacatacacacacccagtcccacctactctgtctctgggctcagtttatttccgagattcctgtttgtcggttgctatgagcccaagaataaatgcatttct

SEQ ID NO: 14425 - DNA, 156 bp, Homo sapiens
  MAP TO CHR22_146.0; EXPRESSED IN BONE MARROW, SIGNAL = 0.45; EXPRESSED IN LUNG, SIGNAL = 0.52; EXPRESSED IN BRAIN, SIGNAL = 0.52; EXPRESSED IN FETAL LIVER, SIGNAL = 0.49; SWISSPROT HIT: Q9UIA0, EVALUE 5.00e-26; EST_HUMAN HIT: BI051783.1, EVALUE 1.00e-82; NT HIT: gi14778686, EVALUE 4.00e-82
ttctgcctggagctctacaaccctagctgccgaggccagaaaatcaaggcctgcaagaccgatggcgacggcagggtggtggagggcaagcacgaatcgtaccgcatctcagccaccagtgccgaggaacgtgaccagtggatcgagtccatccgg

SEQ ID NO: 14426 - DNA, 186 bp, Homo sapiens
  MAP TO AJ239319.2; EXPRESSED IN BONE MARROW, SIGNAL = 2.2; EXPRESSED IN BRAIN, SIGNAL = 2.1; EXPRESSED IN PLACENTA, SIGNAL = 2.9; EXPRESSED IN HEART, SIGNAL =   2; EXPRESSED IN LUNG, SIGNAL = 2.8; EXPRESSED IN ADULT LIVER, SIGNAL =   3; EXPRESSED IN FETAL LIVER, SIGNAL = 2.2; SWISSPROT HIT: Q14202, EVALUE 2.00e-15; EST_HUMAN HIT: AU131773.1, EVALUE 8.00e-94; NT HIT: gi14759120, EVALUE 5.00e-94
ctatggcataccacaaaggtcagatgaggccttgtctaactcctcagcctctgcaatcatttctgccatagccaggatgtcggcctccaaggggttggaagggatcttcaccttcagctcctcaatggtctctacaatcttgtctgtgctctccaaggtagtgggcaagaacatgggcacaggcac

SEQ ID NO: 14427 - DNA, 217 bp, Homo sapiens
  MAP TO AL138801.1; EXPRESSED IN PLACENTA, SIGNAL = 0.52; EXPRESSED IN LUNG, SIGNAL = 0.57; EXPRESSED IN FETAL LIVER, SIGNAL = 0.45; EXPRESSED IN BONE MARROW, SIGNAL = 0.47; EXPRESSED IN HELA, SIGNAL = 0.93; EXPRESSED IN BRAIN, SIGNAL = 0.55; SWISSPROT HIT: P37714, EVALUE 4.40e-01; EST_HUMAN HIT: AI554844.1, EVALUE 7.30e-02; NT HIT: AJ251973.1, EVALUE 2.00e-01
aaggccactagggatgtgctggtgatgatgatgatgatgatgaagatgatgatgatttttagagggttcatcttctttgtgccaggcattattttaagtactttacatgcagaccctggacatacgattgcacagagtgatccctgcaacaggatggccaggaaagggtcacgtgagctgagatctagcggaagctttgcttgccatgttctgtctc

SEQ ID NO: 14428 - DNA, 221 bp, Homo sapiens
  MAP TO AC015523.3; EXPRESSED IN BRAIN, SIGNAL = 0.59; EXPRESSED IN PLACENTA, SIGNAL = 0.61; EXPRESSED IN LUNG, SIGNAL = 0.54; NT HIT: gi4557600, EVALUE 1.00e-121; SWISSPROT HIT: P47869, EVALUE 3.00e-39; EST_HUMAN HIT: BG699503.1, EVALUE 1.00e-112
ctcatggtatacagcagagtcccatcatcctgaattcgaagcaacttatttggcattgtcatattatgagctactgatttcttcccattgtgaaaaaaggtatctggagtccagattttgctagccattaaattgtttagtcgaaggatattcataggacctttaaattttaaacgttcatctttccatttttgtcgaaagaaaacatcaattgtatattc

SEQ ID NO: 14429 - DNA, 92 bp, Homo sapiens
  MAP TO AL137795.2; EXPRESSED IN BONE MARROW, SIGNAL = 2.5; EXPRESSED IN HELA, SIGNAL = 0.61; EXPRESSED IN BRAIN, SIGNAL =   1; EXPRESSED IN PLACENTA, SIGNAL = 1.1; EXPRESSED IN LUNG, SIGNAL = 1.8; EXPRESSED IN ADULT LIVER, SIGNAL = 1.4; EXPRESSED IN FETAL LIVER, SIGNAL = 1.1; EST_HUMAN HIT: AA578184.1, EVALUE 4.20e-01; SWISSPROT HIT: Q05859, EVALUE 8.10e+00
atgaacacacacaaggtggactggatcccagtacagctaagagtcaaggccaaggaaatgaccccagagctcagcctagctgacttagaaat

SEQ ID NO: 14430 - DNA, 111 bp, Homo sapiens
  MAP TO AC018709.5; EXPRESSED IN HELA, SIGNAL = 0.54; EXPRESSED IN BRAIN, SIGNAL = 0.69; EXPRESSED IN PLACENTA, SIGNAL = 0.83; EXPRESSED IN LUNG, SIGNAL = 0.73; EXPRESSED IN ADULT LIVER, SIGNAL = 0.67; EST_HUMAN HIT: BE729183.1, EVALUE 2.10e+00; NT HIT: AF143862.1, EVALUE 3.60e-01; SWISSPROT HIT: P38167, EVALUE 7.90e+00
ctaattgttatcatcataaggagagtctttggaatgatgattaaggcaggatccagcacttctggaactagtggttccttcatgaaccctctcatctgctggttcctcagc

SEQ ID NO: 14431 - DNA, 125 bp, Homo sapiens
  MAP TO AL136231.3; EXPRESSED IN FETAL LIVER, SIGNAL = 0.52; EXPRESSED IN BONE MARROW, SIGNAL = 0.52; EXPRESSED IN LUNG, SIGNAL = 0.59; EXPRESSED IN BRAIN, SIGNAL = 0.57; EXPRESSED IN PLACENTA, SIGNAL = 0.62; EXPRESSED IN ADULT LIVER, SIGNAL = 0.75; EST_HUMAN HIT: BE972255.1, EVALUE 3.00e-64; NT HIT: gi11429150, EVALUE 2.00e-64
tggaaaacccagagccgtcttcatgagcacctccctacacctcctagggtgcgaaggtgtcagcttgggctctgggaaaagaaaatctcgtgtgttttcttcgtagtaggccaactcatcccaca

SEQ ID NO: 14432 - DNA, 508 bp, Homo sapiens
  MAP TO AF235095.1; EXPRESSED IN FETAL LIVER, SIGNAL = 1.7; EXPRESSED IN BONE MARROW, SIGNAL = 1.4; EXPRESSED IN BRAIN, SIGNAL = 1.5; EXPRESSED IN HEART, SIGNAL =   3; EXPRESSED IN PLACENTA, SIGNAL = 1.2; EXPRESSED IN ADULT LIVER, SIGNAL = 1.6; NT HIT: gi14743602, EVALUE 0.00e+00; EST_HUMAN HIT: BG197149.1, EVALUE 0.00e+00; SWISSPROT HIT: Q9NV58, EVALUE 3.00e-98
ccacagtctggagctggacaccacctacaatcaggatctgcaacaagccaccgtctaagcataaattcttcgtatgtttccatcaagacatcatcacttaatatcaagcgaatatcatggggattaaaccgttcagtacattctgggcaactaatattaactctgctttcagagatttctatccttaaatattgtcgtaagcaatccacacaagatctgtgatgacaagtcattatatcaggaaatctgtctttagaatgccgcaaaaggcacaaagggcactctatgaagtctccaatttgtttgctgatggaagttaatccattgtcagaagaggtatttgtagagaaaatggagttcttatcagtacacatttcagaatgtatactttcaatacttgcaattccatccaccccgccatttagctcccttgatttacgtttgttatcttttttcctccgaaacagggagcctattgaaattcttctttttttgggtgcctttttga

SEQ ID NO: 14433 - DNA, 78 bp, Homo sapiens
  MAP TO AL137251.2; EXPRESSED IN HELA, SIGNAL = 0.54; EXPRESSED IN LUNG, SIGNAL = 0.59; EXPRESSED IN PLACENTA, SIGNAL = 0.66; EXPRESSED IN BRAIN, SIGNAL = 0.59; EXPRESSED IN FETAL LIVER, SIGNAL = 0.58; EXPRESSED IN BONE MARROW, SIGNAL = 0.55; NT HIT: AF029308.1, EVALUE 4.00e-03; EST_HUMAN HIT: AV730172.1, EVALUE 6.00e-06
ctcattaagtaacagccccatttcctcttgataatcaggatcgatcttcccagccaccactgtagctcccttctttgc

SEQ ID NO: 14434 - DNA, 150 bp, Homo sapiens
  MAP TO AL133553.2; EXPRESSED IN BONE MARROW, SIGNAL = 1.5; EXPRESSED IN BRAIN, SIGNAL = 1.5; EXPRESSED IN HEART, SIGNAL = 1.6; EXPRESSED IN HELA, SIGNAL = 1.4; EXPRESSED IN PLACENTA, SIGNAL = 1.8; EXPRESSED IN LUNG, SIGNAL = 1.8; EXPRESSED IN FETAL LIVER, SIGNAL = 1.5; EXPRESSED IN ADULT LIVER, SIGNAL = 1.8; SWISSPROT HIT: O42370, EVALUE 1.50e+00; NT HIT: gi14730477, EVALUE 3.00e-79; EST_HUMAN HIT: AV647669.1, EVALUE 2.00e-22
caagactacgaggtacattggtaattttggcacgtattattctagtatcagagttagggctatcagttattgtggcattaaggaaagcaattccaaattcaacatcattaatatttccaataacacttcctctggctcgctggggcccac

SEQ ID NO: 14435 - DNA, 133 bp, Homo sapiens
  MAP TO AL133543.2; EXPRESSED IN BRAIN, SIGNAL =   4; EXPRESSED IN PLACENTA, SIGNAL = 7.4; EXPRESSED IN LUNG, SIGNAL = 6.1; EXPRESSED IN FETAL LIVER, SIGNAL = 5.1; EXPRESSED IN BONE MARROW, SIGNAL = 5.1; EXPRESSED IN HEART, SIGNAL = 4.2; EST_HUMAN HIT: BI603573.1, EVALUE 1.00e-45; SWISSPROT HIT: P14866, EVALUE 3.00e-15; NT HIT: AB044547.1, EVALUE 8.00e-46
actgttcacgctccggatcatccgagttcccggggcgggagatcttctggctggtagagtagttgacaaaagctgggtgaccggcaatatgtatttggttgtcggctgtgtagttcactgcgttgcaagcctc

SEQ ID NO: 14436 - DNA, 119 bp, Homo sapiens
  MAP TO CHR22_86.0; EXPRESSED IN HELA, SIGNAL = 2.7; EXPRESSED IN BRAIN, SIGNAL = 0.61; EXPRESSED IN PLACENTA, SIGNAL = 0.53; EXPRESSED IN LUNG, SIGNAL = 0.56; EXPRESSED IN BONE MARROW, SIGNAL = 0.63; NT HIT: AF220365.2, EVALUE 3.90e-01; EST_HUMAN HIT: BE696981.1, EVALUE 5.80e-01
ccgggcaggaaggtactttgccctcaggagggcaccttcgacccaaagcaccctgaccaagaggctgtgcaccgtggcaaccctaagactgaggcccaggtcctggagttccaccaagg

SEQ ID NO: 14437 - DNA, 152 bp, Homo sapiens
  MAP TO AL133406.3; EXPRESSED IN HEART, SIGNAL = 2.5; EXPRESSED IN HELA, SIGNAL = 3.6; EXPRESSED IN PLACENTA, SIGNAL = 3.3; EXPRESSED IN ADULT LIVER, SIGNAL = 4.1; EXPRESSED IN LUNG, SIGNAL = 3.3; EXPRESSED IN FETAL LIVER, SIGNAL = 2.8; EXPRESSED IN BONE MARROW, SIGNAL = 2.4; EXPRESSED IN BRAIN, SIGNAL = 2.5; NT HIT: U29397.1, EVALUE 1.30e-01; EST_HUMAN HIT: AA053497.1, EVALUE 8.00e-41; SWISSPROT HIT: Q10109, EVALUE 4.40e+00
aaactcttctcctctggcttctgtgatgccagcttttgtggctcctcctcctcctgtgtccctaaaatgtgagactgtggtcctcttctcccaccatacacactgttggagttttcggctgtgcccatgggctcctccaccaccaccaccat

SEQ ID NO: 14438 - DNA, 153 bp, Homo sapiens
  MAP TO AL138784.1; EXPRESSED IN FETAL LIVER, SIGNAL =   4; EXPRESSED IN BONE MARROW, SIGNAL = 4.5; EXPRESSED IN PLACENTA, SIGNAL = 4.9; EXPRESSED IN HELA, SIGNAL = 3.4; EXPRESSED IN BRAIN, SIGNAL = 4.5; EXPRESSED IN LUNG, SIGNAL = 4.7; NT HIT: U13673.1, EVALUE 2.10e+00; SWISSPROT HIT: P37998, EVALUE 4.40e+00
atgcagaagaaccaggagagaaaaataaagccacccttaaccagcctacagcatgacctgaagacagagaacgctggaacctttgaattacatggaagtacagagataaacccccaagtgcagcagacagccccggagccaccccatggggag

SEQ ID NO: 14439 - DNA, 341 bp, Homo sapiens
  MAP TO Z98044.13; EXPRESSED IN BRAIN, SIGNAL = 0.5; EXPRESSED IN FETAL LIVER, SIGNAL = 0.74; EXPRESSED IN PLACENTA, SIGNAL = 0.89; EXPRESSED IN BONE MARROW, SIGNAL = 0.62; EXPRESSED IN LUNG, SIGNAL = 0.76; NT HIT: gi4758497, EVALUE 0.00e+00; EST_HUMAN HIT: AW503925.1, EVALUE 0.00e+00; SWISSPROT HIT: O95479, EVALUE 8.00e-46
ctgcgaaggtcggcgtcaggctgtggaagctgtctggcttctgcagctctctgcgcacctgctcactgtaagactggtactggcccacgacggcactgcccctctgcaggccccgcagcgcctggaagacctgaagcttgtgccgcagcacagcctccgcactgctgacattgtggggcagctccatggccacgagggtgaggacctccgtcagatggttctggaggacgtcgcgaatgacaccgtactcctcatagaagctggtgcggcctggtggagggaggtggagaagtggggaggatctaaagagaggccagaacatcagatctccccgaggtgca

SEQ ID NO: 14440 - DNA, 36 bp, Homo sapiens
  MAP TO CHR21_14.0; EXPRESSED IN BONE MARROW, SIGNAL = 1.5; EXPRESSED IN BRAIN, SIGNAL = 1.4; EXPRESSED IN HELA, SIGNAL = 3.1; EXPRESSED IN FETAL LIVER, SIGNAL = 1.4; EXPRESSED IN PLACENTA, SIGNAL = 0.77; EXPRESSED IN ADULT LIVER, SIGNAL = 0.8; NT HIT: AL163218.2, EVALUE 5.00e-12; EST_HUMAN HIT: BI197582.1, EVALUE 7.00e-03
acgttcatcgaaatcaaacataacaacaaatgggag

SEQ ID NO: 14441 - DNA, 398 bp, Homo sapiens
  MAP TO CHR22_151.0; EXPRESSED IN BONE MARROW, SIGNAL = 0.46; EXPRESSED IN BRAIN, SIGNAL = 0.37; EXPRESSED IN PLACENTA, SIGNAL = 0.68; EXPRESSED IN FETAL LIVER, SIGNAL = 0.44; EXPRESSED IN LUNG, SIGNAL = 0.64; EXPRESSED IN ADULT LIVER, SIGNAL = 0.8; NT HIT: gi15318146, EVALUE 0.00e+00; EST_HUMAN HIT: BG107572.1, EVALUE 0.00e+00; SWISSPROT HIT: P07522, EVALUE 1.00e-16
cccatctcgggatgcagtgcaatggcacggggctcgtccatgtcctctgacaccaggatcttgtgggaggtgctgttgaggcacgtcacctcgatgtgttcagtgcctgtgtgggtccaatagaggcttcgggccacccagttgactgcgatgtcatcggggtcgttgatcttggtgttgatcagcgtctgcgccccagacccatccaggtatgccctgcggatggcccacacctcgtcatccgtccagtagacgtggccctccattgggtcatagttgatggcgatggcatgctggatgtcgtccagctgcagcacgatgtcggtgaagtccggtgtgtccagcgagaccctccattggtccgtctaccgggccagcagcaggacctccttggctcc

SEQ ID NO: 14442 - DNA, 159 bp, Homo sapiens
  MAP TO AL137790.1; EXPRESSED IN LUNG, SIGNAL = 0.54; EXPRESSED IN ADULT LIVER, SIGNAL = 0.62; EXPRESSED IN BRAIN, SIGNAL = 0.61; EXPRESSED IN FETAL LIVER, SIGNAL = 0.7; EXPRESSED IN BONE MARROW, SIGNAL = 0.63; NT HIT: D90910.1, EVALUE 5.50e-01; SWISSPROT HIT: P40568, EVALUE 7.60e+00; EST_HUMAN HIT: BF576731.1, EVALUE 2.00e-01
atgggcacacaatgtgccaggcatagagttggccctcaaaagtttgttgttattgatcattactattataagtcttatgatgtttcttgtgtatctttccccaatcaagcatccaacccttctactcagacccccagagtctttgctggagaaaagcaa

SEQ ID NO: 14443 - DNA, 163 bp, Homo sapiens
  MAP TO AL133349.2; EXPRESSED IN ADULT LIVER, SIGNAL = 1.4; EXPRESSED IN FETAL LIVER, SIGNAL = 1.1; EXPRESSED IN HEART, SIGNAL = 1.3; EXPRESSED IN PLACENTA, SIGNAL = 1.4; EXPRESSED IN HELA, SIGNAL = 0.64; EXPRESSED IN BRAIN, SIGNAL = 0.98; EXPRESSED IN LUNG, SIGNAL = 1.2; NT HIT: X56334.1, EVALUE 2.20e+00; SWISSPROT HIT: Q54468, EVALUE 1.50e+00
aaaaacattttcttcacctccatatatttctagcttctcatagtctttaacttttccctccattctttttaaatttttgactttgacccatggaagcttcctccttgaccaatatctccgaccctttcctctttgccttccaacaggcatatagctcttattc

SEQ ID NO: 14444 - DNA, 250 bp, Homo sapiens
  MAP TO AL139135.2; EXPRESSED IN FETAL LIVER, SIGNAL = 0.67; EXPRESSED IN BONE MARROW, SIGNAL = 0.52; EXPRESSED IN BRAIN, SIGNAL = 0.63; SWISSPROT HIT: P70213, EVALUE 9.00e-05; NT HIT: AL163209.2, EVALUE 4.00e-18; EST_HUMAN HIT: BE163587.1, EVALUE 1.00e-19
caggtgtctactgttaaagtgagggcactgattggaaaaggatggaaccccgaaacttagaatggggacatttgggaggaacctgatgaagctggacttgtaaactctgatgaacattttgccagaaaaaatagctttcccatctccaatagtggcaacattccctccttgacccatgctgctgtccccctttccacatttgtctgagaagataaaccctacgctgcctgaggcaacagtgatggcctcc

SEQ ID NO: 14445 - DNA, 142 bp, Homo sapiens
  MAP TO AC015478.3; EXPRESSED IN BONE MARROW, SIGNAL = 0.42; EXPRESSED IN LUNG, SIGNAL = 0.5; EXPRESSED IN BRAIN, SIGNAL = 0.49; EXPRESSED IN ADULT LIVER, SIGNAL = 0.29; NT HIT: AJ277662.1, EVALUE 1.90e+00; EST_HUMAN HIT: BG193017.1, EVALUE 4.50e-02; SWISSPROT HIT: Q28172, EVALUE 2.60e+00
ctgcactcatcttcctgcttctgtcccaactgtccacccaacagagtggcctttcctttcttgtccccacaggccagctctttacggttctccaggaaccagctcagagagcccctcctgcccaggtccaccacctcagtcc

SEQ ID NO: 14446 - DNA, 100 bp, Homo sapiens
  MAP TO AC012482.3; EXPRESSED IN HELA, SIGNAL = 5.3; EXPRESSED IN PLACENTA, SIGNAL = 3.4; EXPRESSED IN LUNG, SIGNAL = 4.5; EXPRESSED IN ADULT LIVER, SIGNAL =   4; EXPRESSED IN BRAIN, SIGNAL = 4.6; EST_HUMAN HIT: BE812168.1, EVALUE 3.00e-02
ctgtgttccaaagggacaagacacatgccaggcccatgcacagcttcattgaaggaccacgtgacaggaagcccagcatgcttgtgatactctggcccac

SEQ ID NO: 14447 - DNA, 167 bp, Homo sapiens
  MAP TO AL078585.18; EXPRESSED IN FETAL LIVER, SIGNAL = 1.7; EXPRESSED IN BONE MARROW, SIGNAL = 1.7; EXPRESSED IN HEART, SIGNAL = 1.3; EXPRESSED IN PLACENTA, SIGNAL = 2.2; EXPRESSED IN LUNG, SIGNAL = 1.8; EXPRESSED IN HELA, SIGNAL =   1; EXPRESSED IN BRAIN, SIGNAL = 1.5; EXPRESSED IN ADULT LIVER, SIGNAL = 2.1; NT HIT: M25704.1, EVALUE 5.80e-01; SWISSPROT HIT: P16791, EVALUE 4.40e+00; EST_HUMAN HIT: BI334759.1, EVALUE 3.40e+00
tgcagcctcctctgcggagctggacgtgcccccagggttgctcagccaaacagaaggatcgagaggcaacatgataggtgcctaggatgtggctataaaaggttcttgtgggcactgtgtgatccttcattggccagtgccactgcaggaatgatgaggaaaatggc

SEQ ID NO: 14448 - DNA, 375 bp, Homo sapiens
  MAP TO AL133520.2; EXPRESSED IN BRAIN, SIGNAL = 0.91; EXPRESSED IN FETAL LIVER, SIGNAL = 1.1; EXPRESSED IN LUNG, SIGNAL = 1.4; EXPRESSED IN PLACENTA, SIGNAL = 1.4; EXPRESSED IN BONE MARROW, SIGNAL = 1.1; NT HIT: gi15303869, EVALUE 0.00e+00; EST_HUMAN HIT: AV757661.1, EVALUE 0.00e+00; SWISSPROT HIT: P53323, EVALUE 1.00e-19
ctacccaaccatggacctctttcttcctctcaggcgcacttcatctaatttttttagcactggcctggcctttttggaggaggtggagtagctcttcagaaaggcttcaaacacagtttcagtgttgggatgggtactgaggaaggccttctccaggacatagaggtctactcccttatcctctggaagtgctgaaatgaaactcagcccaaagtctatgagcacaatgttcagctgttccagggggggtttcaggagcatgttggaggtggtgagatcaccatgaatgaggtcttcatcgtgcattcgagccaaaacctgcccaattgtcttggctaagttggagagaccctggggagttttttcagtctccat

SEQ ID NO: 14449 - DNA, 219 bp, Homo sapiens
  MAP TO AL136443.5; EXPRESSED IN BRAIN, SIGNAL = 0.67; EXPRESSED IN FETAL LIVER, SIGNAL = 0.66; EXPRESSED IN PLACENTA, SIGNAL = 0.51; EXPRESSED IN LUNG, SIGNAL = 0.63; EXPRESSED IN BONE MARROW, SIGNAL = 0.5; SWISSPROT HIT: O13688, EVALUE 1.60e-01
ggtactggtacaccttgggcttcacagagaacacacacagtgccaaccctctgctccgctgctttacctcagacttggacatcaacaacaggaaggtgaaactgcattttgaggacaagttcacattcacagcccacctggcactgaaggaagatggaattactatcctctgctcagataacaaccgaggaaagaggccctacccaccctatcccataa

SEQ ID NO: 14450 - DNA, 103 bp, Homo sapiens
  MAP TO AL139144.1; EXPRESSED IN HELA, SIGNAL = 4.7; EXPRESSED IN HEART, SIGNAL =   7; EXPRESSED IN PLACENTA, SIGNAL = 9.9; EXPRESSED IN LUNG, SIGNAL = 9.4; EXPRESSED IN BONE MARROW, SIGNAL = 8.5; EXPRESSED IN BRAIN, SIGNAL = 7.3; EXPRESSED IN ADULT LIVER, SIGNAL =  11; EXPRESSED IN FETAL LIVER, SIGNAL = 8.7
atgccttggaagctgcctgggcaggctgggcccaacaggaaggacttggagagctgcagaggctgggatcatgtggcagatttggccccagtggaatggctca

SEQ ID NO: 14451 - DNA, 102 bp, Homo sapiens
  MAP TO AJ132411.1; EXPRESSED IN FETAL LIVER, SIGNAL = 0.96; EXPRESSED IN BONE MARROW, SIGNAL = 0.92; EXPRESSED IN BRAIN, SIGNAL = 0.92; EXPRESSED IN ADULT LIVER, SIGNAL =   1; EXPRESSED IN PLACENTA, SIGNAL = 1.1; EXPRESSED IN LUNG, SIGNAL = 0.95; NT HIT: AJ312685.1, EVALUE 1.00e-40; EST_HUMAN HIT: AL602425.1, EVALUE 8.00e-03
ctagttgtagtttttttctttgtatttatccctcttggggtttttaagattaggaatctgtgggttgatatctttcatcaattttggaaaattgtcagccat

SEQ ID NO: 14452 - DNA, 300 bp, Homo sapiens
  MAP TO AC012661.4; EXPRESSED IN LUNG, SIGNAL = 2.2; EXPRESSED IN BONE MARROW, SIGNAL = 1.1; EXPRESSED IN ADULT LIVER, SIGNAL = 5.2; EXPRESSED IN BRAIN, SIGNAL = 1.1; EXPRESSED IN FETAL LIVER, SIGNAL = 1.7; NT HIT: AY028079.1, EVALUE 1.00e-126; EST_HUMAN HIT: BG699765.1, EVALUE 9.00e-24; SWISSPROT HIT: Q99969, EVALUE 5.00e-15
atgcgattcagtgctgggctccgctgggggccgggccttggagaaggcgaactgtgcagggaagcagcagctgtggggtcctcaccgcccgccccgcccggctgcacccggcctcctggtgctcctcaggctcccgccgagtctgcgcctctggagggcagcgaccatcctgcccagaaccttatcctcacattccagtttgacgcaggtcaggcatttctgcttcctcctctcgggctggactttgcacttgggtttcttccagtctttcctccggccgcttctctgtctgccggagct

SEQ ID NO: 14453 - DNA, 32 bp, Homo sapiens
  MAP TO CHR22_79.0; EXPRESSED IN BRAIN, SIGNAL = 0.43; EXPRESSED IN PLACENTA, SIGNAL = 0.57; EXPRESSED IN FETAL LIVER, SIGNAL = 0.4; EXPRESSED IN LUNG, SIGNAL = 0.56; EXPRESSED IN ADULT LIVER, SIGNAL = 0.55
tcttgtccccctcctcctccttctcctcctcc

SEQ ID NO: 14454 - DNA, 258 bp, Homo sapiens
  MAP TO AL133418.2; EXPRESSED IN FETAL LIVER, SIGNAL = 0.67; EXPRESSED IN BONE MARROW, SIGNAL = 0.74; EXPRESSED IN PLACENTA, SIGNAL = 0.59; EXPRESSED IN LUNG, SIGNAL = 0.82; EXPRESSED IN BRAIN, SIGNAL = 0.63; NT HIT: gi14043027, EVALUE 2.00e-38; SWISSPROT HIT: P29374, EVALUE 6.00e-13; EST_HUMAN HIT: AW242991.1, EVALUE 3.00e-38
ctcacattccatccgcagtaatgcaccaagtaaaggacctctccaccttcgacatcagaatctttaatactagcttcatacattttttgatttttccctcgtccataccgcacttggactttcatgcctggtggatagcactcaaactcctcttcctcattgttgtcatcatcatcttcatcctcttcttcttcttcctcctcctcctcctcttctgcttcttcatcatcttcatcttcttctttattcgtttcatct

SEQ ID NO: 14455 - DNA, 207 bp, Homo sapiens
  MAP TO CHR22_144.0; EXPRESSED IN FETAL LIVER, SIGNAL = 0.6; EXPRESSED IN PLACENTA, SIGNAL = 0.75; EXPRESSED IN HELA, SIGNAL = 1.5; EXPRESSED IN BRAIN, SIGNAL = 0.55; EXPRESSED IN LUNG, SIGNAL = 0.59; EXPRESSED IN ADULT LIVER, SIGNAL = 0.77; SWISSPROT HIT: P05143, EVALUE 1.90e+00; EST_HUMAN HIT: AA609066.1, EVALUE 1.00e-95
gtttccactcgcagtactgacccaggatcactaggccctcggggtccacttcgtactcggccctgtaggggacggcagccgagctgttgactgtggacagcagctcctccaccagcagtgcctgcaccacctcggggctcagcatcagccggcggtgctcggggatttggagaatgaaccagaagaagcaggtgaggggtccctccc

SEQ ID NO: 14456 - DNA, 116 bp, Homo sapiens
  MAP TO AL138843.2; EXPRESSED IN PLACENTA, SIGNAL = 2.9; EXPRESSED IN LUNG, SIGNAL = 2.6; EXPRESSED IN BONE MARROW, SIGNAL = 2.6; EXPRESSED IN HELA, SIGNAL = 1.4; EXPRESSED IN BRAIN, SIGNAL = 2.6; EXPRESSED IN FETAL LIVER, SIGNAL = 2.7; EXPRESSED IN HEART, SIGNAL = 1.9; SWISSPROT HIT: Q9UL18, EVALUE 7.00e-14; EST_HUMAN HIT: AA251782.1, EVALUE 7.00e-59; NT HIT: gi14733042, EVALUE 5.00e-59
atgggcaaacccattaaactgctggctaactgttttcaagttgaaatcccaaagattgatgtctacctctatgaggtagatattaaaccagacaagtgtcctaggagagtgaacag

SEQ ID NO: 14457 - DNA, 128 bp, Homo sapiens
  MAP TO AL133472.2; EXPRESSED IN BRAIN, SIGNAL = 0.67; EXPRESSED IN ADULT LIVER, SIGNAL = 0.7; EXPRESSED IN PLACENTA, SIGNAL = 0.69; EXPRESSED IN LUNG, SIGNAL = 0.64; EXPRESSED IN FETAL LIVER, SIGNAL = 0.6; NT HIT: AJ277662.1, EVALUE 2.70e-02; SWISSPROT HIT: P42672, EVALUE 6.90e-01; EST_HUMAN HIT: BG719542.1, EVALUE 6.00e-66
tggtttcccaaatacaacaaagcaaacaggtttggacaacaaaaaattcctttcagtttcatcttcatcaaatatatctgcaaaaggatactcttctgtcttctcttgagaagtcatgacacaaaata

SEQ ID NO: 14458 - DNA, 183 bp, Homo sapiens
  MAP TO AC015956.3; EXPRESSED IN BRAIN, SIGNAL = 0.8; EXPRESSED IN FETAL LIVER, SIGNAL = 0.83; EXPRESSED IN LUNG, SIGNAL = 0.75; EXPRESSED IN BONE MARROW, SIGNAL = 0.72; EXPRESSED IN ADULT LIVER, SIGNAL = 0.64; NT HIT: AF179688.1, EVALUE 7.00e-10; SWISSPROT HIT: P90978, EVALUE 1.50e+00; EST_HUMAN HIT: BE502168.1, EVALUE 7.00e-08
ttattgcttttcattgcagactggaatgtccaagatcaagatgctgacagatttagtgtctgctgagggcccactttctggttcatagacctggccttcttgctgtgttctcatgtggtgggtggaggtggtgaattcataagaggaggagggagtgtcctcataagaggacactaatcccat

SEQ ID NO: 14459 - DNA, 112 bp, Homo sapiens
  MAP TO AL133408.3; EXPRESSED IN FETAL LIVER, SIGNAL = 2.2; EXPRESSED IN HEART, SIGNAL = 1.9; EXPRESSED IN ADULT LIVER, SIGNAL = 2.2; EXPRESSED IN HELA, SIGNAL = 1.4; EXPRESSED IN LUNG, SIGNAL = 2.3; EXPRESSED IN PLACENTA, SIGNAL = 2.5; EXPRESSED IN BONE MARROW, SIGNAL = 2.5; EXPRESSED IN BRAIN, SIGNAL = 2.2; NT HIT: AF303737.1, EVALUE 1.40e+00; EST_HUMAN HIT: BF871412.1, EVALUE 5.40e-01
ttgcaatcacaaatgtatgttcaattgaagtgcttttgaagctcaatttaacaaagcaaacaaatttcctggcattattaacataattgttctcattgttgggttttgattt

SEQ ID NO: 14460 - DNA, 311 bp, Homo sapiens
  MAP TO AL136379.2; EXPRESSED IN PLACENTA, SIGNAL = 1.9; EXPRESSED IN FETAL LIVER, SIGNAL = 1.4; EXPRESSED IN BONE MARROW, SIGNAL = 1.3; EXPRESSED IN ADULT LIVER, SIGNAL = 1.7; EXPRESSED IN BRAIN, SIGNAL = 1.2; EXPRESSED IN HELA, SIGNAL = 0.81; NT HIT: gi14916474, EVALUE 0.00e+00; SWISSPROT HIT: P27467, EVALUE 5.00e-46; EST_HUMAN HIT: AI472003.1, EVALUE 6.00e-31
aggaggctcctttttcccaagcacccttgcgggcggcgaacctacctggcgcccagcctcgttgttgtggcggttcatggctgagcgggcatctggccggttctcccgggcgtcggcgaactcccgagacaccatcccaccaaactcgatgtcctcgctacagccaccccacttccagcccttgcctggtgagccctggtggcggctgctgcagccacagatggcggccgtgccttctgcacatgagcgtgtcactgcaaaggccacaccggctgaggcaatggcgtggacaaaggccgactccctggtag

SEQ ID NO: 14461 - DNA, 79 bp, Homo sapiens
  MAP TO AL133402.2; EXPRESSED IN LUNG, SIGNAL = 3.7; EXPRESSED IN FETAL LIVER, SIGNAL =   3; EXPRESSED IN PLACENTA, SIGNAL = 3.6; EXPRESSED IN ADULT LIVER, SIGNAL = 4.5; EXPRESSED IN BONE MARROW, SIGNAL = 3.3; EXPRESSED IN BRAIN, SIGNAL = 2.9; EXPRESSED IN HELA, SIGNAL = 2.2; EXPRESSED IN HEART, SIGNAL = 2.9; NT HIT: gi6755864, EVALUE 4.00e-03; EST_HUMAN HIT: BI596372.1, EVALUE 2.20e-02
ctgtgcaaagcacagcacagccatgagctgaggacacacggctgaagtccgcagaccccggggccctcccgttcctcat

SEQ ID NO: 14462 - DNA, 236 bp, Homo sapiens
  MAP TO AC018608.4; EXPRESSED IN BRAIN, SIGNAL = 0.75; EXPRESSED IN LUNG, SIGNAL = 0.65; EXPRESSED IN ADULT LIVER, SIGNAL = 0.61; EXPRESSED IN FETAL LIVER, SIGNAL = 0.66; EXPRESSED IN BONE MARROW, SIGNAL = 0.67; SWISSPROT HIT: Q9H161, EVALUE 2.20e-02; NT HIT: gi11426388, EVALUE 8.50e-01; EST_HUMAN HIT: BF754079.1, EVALUE 8.00e-02
ctaatccttatatctttcctctggttcagaaattccttgaccaggggagaaacattccattggcaaggcaggcgagaagcgcccatccattggcctgtggggccgcagctgtggcggggttttctcccgccccctcgtcctaggcagcacaggcggctgcagctgcggcattgctctccccgcggcctcgtggctgttgggttgggcctttgcctgctgcgggcacacccaggcac

SEQ ID NO: 14463 - DNA, 209 bp, Homo sapiens
  MAP TO AL008639.15; EXPRESSED IN BONE MARROW, SIGNAL = 4.9; EXPRESSED IN PLACENTA, SIGNAL = 3.8; EXPRESSED IN LUNG, SIGNAL = 4.7; EXPRESSED IN HELA, SIGNAL = 4.4; EXPRESSED IN FETAL LIVER, SIGNAL = 3.7; EXPRESSED IN HEART, SIGNAL = 3.9; EXPRESSED IN ADULT LIVER, SIGNAL = 4.2; EXPRESSED IN BRAIN, SIGNAL = 4.1; EST_HUMAN HIT: AW838277.1, EVALUE 2.00e-27; SWISSPROT HIT: Q99439, EVALUE 2.00e-17; NT HIT: gi14765608, EVALUE 4.00e-30
ccgcagcacatctacaacaccaaactgggagcccacaagtgtgacaactcctccatgtccctgcatatgggtgacacgcagagtgccaaccacagcgtccagggctttggcctgggccagcagatatactatcccaagtactgccctcaaggcctgcagccagtggggctcccttggatgccggcaactgcccaggaccaggggaggcc

SEQ ID NO: 14464 - DNA, 334 bp, Homo sapiens
  MAP TO AC016763.5; EXPRESSED IN BONE MARROW, SIGNAL = 1.1; EXPRESSED IN PLACENTA, SIGNAL = 1.3; EXPRESSED IN BRAIN, SIGNAL =   1; EXPRESSED IN HEART, SIGNAL = 1.3; EXPRESSED IN LUNG, SIGNAL = 1.2; SWISSPROT HIT: P38739, EVALUE 1.60e-01; EST_HUMAN HIT: BE958538.1, EVALUE 0.00e+00; NT HIT: gi15295397, EVALUE 0.00e+00
gaacctctaaaacattatactccaccaatatggctttatcatccagcccagggatttcagctgtacagcttgtaaggacagttggccacaccactacaaaccacttaatcccagcattgtgcacaagcagtcctcagacacttcccatgaacaattcctgcctgacaaatgcagtgcacctcaataatgtcagtgttgtttctccagtcaatgtgcatatcaatacacggacttcagcaccatcgccaacagccttaaaacttgccacagttgctgccagtatggacagagtgccaaaggttactcccagcagtgccatcagcagcatagcaag

SEQ ID NO: 14465 - DNA, 135 bp, Homo sapiens
  MAP TO AL138809.6; EXPRESSED IN BRAIN, SIGNAL = 0.47; EXPRESSED IN LUNG, SIGNAL = 0.48; EXPRESSED IN FETAL LIVER, SIGNAL = 0.49; EXPRESSED IN BONE MARROW, SIGNAL = 0.49; SWISSPROT HIT: Q03570, EVALUE 4.50e+00; NT HIT: U00147.1, EVALUE 4.50e-01; EST_HUMAN HIT: BG507092.1, EVALUE 2.60e+00
aatgtgcagttttctaagatgaagcatgatgaatgtggtcataagtatggaccaggcctggagggtgaaaggaagggtaccctatggctacctgtgcacatctggcagcaagatgtgaaagtaaagaagccagaa

SEQ ID NO: 14466 - DNA, 112 bp, Homo sapiens
  MAP TO AL133553.2; EXPRESSED IN BONE MARROW, SIGNAL = 1.4; EXPRESSED IN LUNG, SIGNAL = 1.9; EXPRESSED IN BRAIN, SIGNAL = 1.4; EXPRESSED IN HEART, SIGNAL = 1.3; EXPRESSED IN PLACENTA, SIGNAL = 2.3; EXPRESSED IN ADULT LIVER, SIGNAL = 2.4; EXPRESSED IN FETAL LIVER, SIGNAL = 1.6; NT HIT: U03455.1, EVALUE 3.60e-01; EST_HUMAN HIT: BI767808.1, EVALUE 5.40e-01
ggccttttagtcccggagtagtgcccctgaacatgccctacttgctggttcttttccgtattatattacttatcacacagtatcgtagtgtgggaaagaaggctatgctgag

SEQ ID NO: 14467 - DNA, 192 bp, Homo sapiens
  MAP TO AL138886.1; EXPRESSED IN PLACENTA, SIGNAL = 0.91; EXPRESSED IN LUNG, SIGNAL = 0.98; EXPRESSED IN ADULT LIVER, SIGNAL = 0.84; EXPRESSED IN BONE MARROW, SIGNAL = 1.1; EXPRESSED IN BRAIN, SIGNAL = 1.1; SWISSPROT HIT: Q06180, EVALUE 1.10e+00; NT HIT: AL161581.2, EVALUE 2.70e+00; EST_HUMAN HIT: BG827724.1, EVALUE 1.60e-02
gagtccacgttcattgagccggcttgccagatccatctcccctggtggatttcactccttaggcctccaagctctgccatcttctctatcttcctcctttcaaaatttccttgttctatctatacaactcacaaggaagaaatgcaaatgatcaacacaggagaaagtgttgatcaaagaaaagcaaactga

SEQ ID NO: 14468 - DNA, 399 bp, Homo sapiens
  MAP TO AL139152.1; EXPRESSED IN BRAIN, SIGNAL = 0.43; EXPRESSED IN LUNG, SIGNAL = 0.98; EXPRESSED IN ADULT LIVER, SIGNAL = 0.76; EXPRESSED IN FETAL LIVER, SIGNAL = 1.1; EXPRESSED IN BONE MARROW, SIGNAL = 0.89; SWISSPROT HIT: P57722, EVALUE 1.00e-08; NT HIT: gi14723712, EVALUE 0.00e+00; EST_HUMAN HIT: AA159913.1, EVALUE 1.00e-101
ctatgcagttggggtagcaaagaagtgtccaataattctgacgatcacttcctcattttcatctggcctttggtcacgaggcacgatgacttctgcactggttaagttctgcagttcattcaaggtattgacacctttgccaatcacccggccagctgtggaagagggcactctgatacgggcttccagcttcacttcttctttggggttaaagaagttttcttctttcagtttcccaaagatccgtccctgggccttgaactgggcttccggtggccgggtgatgatggccatcctttcgttgacgtctgggccttccgcaagggcgatcttgatggaggctgtggcgaatctcgccagctgtttgatgtgtgctcccctcttcctgataatggcgcc

SEQ ID NO: 14469 - DNA, 83 bp, Homo sapiens
  MAP TO AL133338.2; EXPRESSED IN BRAIN, SIGNAL = 0.47; EXPRESSED IN FETAL LIVER, SIGNAL = 0.51; EXPRESSED IN PLACENTA, SIGNAL = 0.46; EXPRESSED IN LUNG, SIGNAL = 0.48; NT HIT: gi14747359, EVALUE 1.00e-30; EST_HUMAN HIT: AI540859.1, EVALUE 2.00e-30
gagccttgcgttccttttcaaatgtcaccaagcaagataattataatgaagaagtggctgacttaaaggtagatttgttaaag

SEQ ID NO: 14470 - DNA, 152 bp, Homo sapiens
  MAP TO AF235096.1; EXPRESSED IN FETAL LIVER, SIGNAL = 0.59; EXPRESSED IN BONE MARROW, SIGNAL = 0.61; EXPRESSED IN PLACENTA, SIGNAL = 0.75; EXPRESSED IN LUNG, SIGNAL = 0.82; EXPRESSED IN BRAIN, SIGNAL = 0.68; SWISSPROT HIT: Q9UN79, EVALUE 3.40e+00; NT HIT: AB007962.1, EVALUE 4.00e-54; EST_HUMAN HIT: BI823043.1, EVALUE 8.00e-41
ttaaacacgtcaagaaagatgaacgcagatactatgaggaactgctaaagtacagccgagatcatctcatgctgtaccctaaccatcaatcggatattatggtgaaaggcttgaggataacaccattttcatattatactgggattatggag

SEQ ID NO: 14471 - DNA, 271 bp, Homo sapiens
  MAP TO AL136304.2; EXPRESSED IN PLACENTA, SIGNAL = 4.4; EXPRESSED IN LUNG, SIGNAL = 3.8; EXPRESSED IN FETAL LIVER, SIGNAL = 3.4; EXPRESSED IN ADULT LIVER, SIGNAL = 4.4; EXPRESSED IN BONE MARROW, SIGNAL = 3.5; EXPRESSED IN HELA, SIGNAL = 3.6; EXPRESSED IN BRAIN, SIGNAL = 3.1; EXPRESSED IN HEART, SIGNAL =   3; NT HIT: gi14781548, EVALUE 1.00e-83; EST_HUMAN HIT: BG032837.1, EVALUE 1.00e-62; SWISSPROT HIT: Q14999, EVALUE 5.00e-27
tcttgttgtagaagttggagtatctgttcaaagtgcccctcaggtaggagggcaggcaggttctggggttcagtgtgtggcagattgaggcaacaggccaggagtgtcgggacaggacaagcacagacacttctggcattgccccttcatagtagaggtcctcattctcctcctcttcctcctctccctccgccacatccaccactgctgctgccccagcttcctcttccttctcgctcttgtgctccttgccactggccccaaggcccac

SEQ ID NO: 14472 - DNA, 114 bp, Homo sapiens
  MAP TO AL133552.2; EXPRESSED IN HELA, SIGNAL = 1.8; EXPRESSED IN FETAL LIVER, SIGNAL = 2.4; EXPRESSED IN HEART, SIGNAL = 1.7; EXPRESSED IN LUNG, SIGNAL = 2.2; EXPRESSED IN BRAIN, SIGNAL = 2.1; EXPRESSED IN PLACENTA, SIGNAL = 2.5; EXPRESSED IN BONE MARROW, SIGNAL = 2.2; EXPRESSED IN ADULT LIVER, SIGNAL = 2.5; NT HIT: AB032159.1, EVALUE 2.00e-09; EST_HUMAN HIT: AA779269.1, EVALUE 1.00e-08; SWISSPROT HIT: P15989, EVALUE 6.00e+00
cttgcgtgtgtgtctacgtagtgagagtgaaacgagaaaggttcccttgtgccctttgcagggcgtgtgcccggaggtgtgactcgcttcttcaggcccccgctgctcagactt

SEQ ID NO: 14473 - DNA, 132 bp, Homo sapiens
  MAP TO AC022528.3; EXPRESSED IN BONE MARROW, SIGNAL = 0.67; EXPRESSED IN PLACENTA, SIGNAL = 0.72; EXPRESSED IN LUNG, SIGNAL = 0.83; EXPRESSED IN BRAIN, SIGNAL = 0.53; SWISSPROT HIT: P39770, EVALUE 3.50e+00; NT HIT: gi11034822, EVALUE 4.40e-01; EST_HUMAN HIT: BE704035.1, EVALUE 6.50e-01
atgggcaatgctgttataaaactggcctttctgccagcaatgtgggtgatgatggtccagagtggcagaagccaggtggcatcactcaatcaccaggaagaagatgggcacaactaccttactggcatccag

SEQ ID NO: 14474 - DNA, 203 bp, Homo sapiens
  MAP TO CHR21_30.0; EXPRESSED IN FETAL LIVER, SIGNAL = 1.6; EXPRESSED IN HEART, SIGNAL = 1.2; EXPRESSED IN LUNG, SIGNAL = 0.9; EXPRESSED IN PLACENTA, SIGNAL = 0.84; EXPRESSED IN ADULT LIVER, SIGNAL = 0.91; EXPRESSED IN BONE MARROW, SIGNAL = 1.8; EXPRESSED IN HELA, SIGNAL = 3.7; EXPRESSED IN BRAIN, SIGNAL = 1.6; SWISSPROT HIT: P40959, EVALUE 1.40e+00; NT HIT: gi14861872, EVALUE 2.80e+00; EST_HUMAN HIT: BF753800.1, EVALUE 2.00e-05
ctttcttctaattgtggaactctcattatgtaagttatccttttcctttttaaaatttttttttgctcatctgaatggataatttcaaacattttgtcttctggcccactcattctttcttctacttgaccaagtctgctgctgaaggtttctgttggcttttttagttcagtcattgtatcatttatctctagaatttctat

SEQ ID NO: 14475 - DNA, 167 bp, Homo sapiens
  MAP TO AL049860.8; EXPRESSED IN BONE MARROW, SIGNAL = 1.6; EXPRESSED IN BRAIN, SIGNAL = 1.9; EXPRESSED IN HELA, SIGNAL = 0.74; EXPRESSED IN HEART, SIGNAL = 2.1; EXPRESSED IN FETAL LIVER, SIGNAL = 1.4; EXPRESSED IN LUNG, SIGNAL = 2.2; EXPRESSED IN ADULT LIVER, SIGNAL = 2.1; SWISSPROT HIT: Q9UPE1, EVALUE 2.90e-01; NT HIT: AL163210.2, EVALUE 4.00e-14; EST_HUMAN HIT: AV727859.1, EVALUE 4.00e-21
cttttagaagaggacgaccatcctccagaccccagaatggtagatctactgacaacttgcactgtgcacctggaaaagccagtcactcagtgccagcctgtactggagggtggctgtactccaaaaagccacaggtgtctataggttttgaaacatgcactatggtt

SEQ ID NO: 14476 - DNA, 389 bp, Homo sapiens
  MAP TO CHR22_202.0; EXPRESSED IN BONE MARROW, SIGNAL = 1.8; EXPRESSED IN BRAIN, SIGNAL = 1.7; EXPRESSED IN HELA, SIGNAL =   2; EXPRESSED IN FETAL LIVER, SIGNAL = 1.8; EXPRESSED IN HEART, SIGNAL = 1.9; EXPRESSED IN LUNG, SIGNAL = 2.2; EXPRESSED IN ADULT LIVER, SIGNAL = 1.9; SWISSPROT HIT: P08563, EVALUE 5.60e-02; NT HIT: AL163246.2, EVALUE 1.00e-118; EST_HUMAN HIT: AL079752.1, EVALUE 1.00e-75
aactgtcacagggactaggaagaagtatgattggaaaattgatgacaaagaaatttggggaaaagatatgtggatggacctctctgagtggtcaaaaactgtgaaagtatttgtatcccatgtgagcgctcaccaacgggtgacctcagcagaggaggattttaataatcaagaggagagtatgaccagttctgtgaacaccacgcatcctctttccccagacacccctgtcatcgcccaatgggcccatgagggaagtggccatgctggcaggaatggaggttacacacgggctcatcaacatggacttccactcaccaaggctgacctagctacagccactgctgagtgcccaatttgccagcagcagagaccaacactgagccctt

SEQ ID NO: 14477 - DNA, 120 bp, Homo sapiens
  MAP TO CHR21_1.0; EXPRESSED IN FETAL LIVER, SIGNAL = 1.3; EXPRESSED IN PLACENTA, SIGNAL = 0.77; EXPRESSED IN ADULT LIVER, SIGNAL = 0.88; EXPRESSED IN BONE MARROW, SIGNAL = 1.5; EXPRESSED IN HELA, SIGNAL = 2.6; EXPRESSED IN BRAIN, SIGNAL = 1.3; EXPRESSED IN LUNG, SIGNAL = 0.77; EST_HUMAN HIT: BF971139.1, EVALUE 4.00e-39; SWISSPROT HIT: P56180, EVALUE 8.00e-06; NT HIT: AL163201.2, EVALUE 4.00e-47
ctgggaatattcctaagcaacttaatgtcaaaaaaaatgtaaacgacatcaaccagcagaagaatcacaataatggcagtatctaaaatgttaaataagtcagaaaaatactgctgtctc

SEQ ID NO: 14478 - DNA, 539 bp, Homo sapiens
  MAP TO AL133520.2; EXPRESSED IN PLACENTA, SIGNAL = 2.7; EXPRESSED IN BRAIN, SIGNAL = 1.5; EXPRESSED IN ADULT LIVER, SIGNAL = 3.1; EXPRESSED IN LUNG, SIGNAL = 2.5; EXPRESSED IN FETAL LIVER, SIGNAL = 1.9; EXPRESSED IN BONE MARROW, SIGNAL = 1.7; EXPRESSED IN HEART, SIGNAL = 1.7; NT HIT: gi14786187, EVALUE 0.00e+00; EST_HUMAN HIT: BI824797.1, EVALUE 0.00e+00; SWISSPROT HIT: Q9R1D7, EVALUE 4.50e-01
gaagtctccagagtcacctgcaagaaaactccacttacctggcccaaacccaaaggagaaggcactgacaaagaccatcaggcacagcagtgcggtccagcgcagcagtgcatgcccccgagcgggcagagggggcccagggagggcagagctcagggccagccgaggaggggctgaggggtctccagatctgggatggggcttggttttcttagcagtggacaagattggctccctttggtcctcattggtccttggaatgggaggtagagaggagtcctgcagcaggccagagtctccagggaggcctgtctgcccggtggcattgggcacagccagacagcttgggcctgagtccatgggcacggcaaagctgacgaggcctatgccactgacggacagggccatgagggcacagccagctagcaacagagccctgcggcctgcacggtccaccagccccatggcggtcagggtagctgccaccttcactgcgccaagccccacagaggccagcacggctgaggatcccccatgga

SEQ ID NO: 14479 - DNA, 237 bp, Homo sapiens
  MAP TO CHR22_170.0; EXPRESSED IN BRAIN, SIGNAL = 0.65; EXPRESSED IN PLACENTA, SIGNAL = 0.79; EXPRESSED IN ADULT LIVER, SIGNAL = 0.74; EXPRESSED IN FETAL LIVER, SIGNAL = 0.57; EXPRESSED IN BONE MARROW, SIGNAL = 0.74; SWISSPROT HIT: P27743, EVALUE 2.20e+00; NT HIT: AL163278.2, EVALUE 1.40e-02; EST_HUMAN HIT: AL582830.1, EVALUE 3.20e-01
tggggaccctctgttcatatttgttaaccctgatgaccgtagcccaggaggcaaaggcagtggctgcctgagtgcagcaggtcccagggcccccatgcctaatgctggccgccacctcgtggggcgtggcctgagcacctggcgtgtcatgctgggccccaaaagcgacgccaggggcgtgtttctggtgtttccgaactgggggctttattgaggtaactgcagattcacacgcac

SEQ ID NO: 14480 - DNA, 113 bp, Homo sapiens
  MAP TO AL133285.3; EXPRESSED IN BRAIN, SIGNAL = 1.2; EXPRESSED IN LUNG, SIGNAL = 1.4; EXPRESSED IN ADULT LIVER, SIGNAL = 1.5; EXPRESSED IN FETAL LIVER, SIGNAL = 1.2; EXPRESSED IN PLACENTA, SIGNAL = 1.6; EXPRESSED IN BONE MARROW, SIGNAL = 1.1; SWISSPROT HIT: P45972, EVALUE 2.70e+00; EST_HUMAN HIT: AA724789.1, EVALUE 1.40e-01
tagttaagaagtggatttccaagccacgctcccacttctccatcccctgctcatggaacaaaacttgctctgcttgatgctcactttcagtttcatgtattggctctgcagca

SEQ ID NO: 14481 - DNA, 121 bp, Homo sapiens
  MAP TO AL137062.3; EXPRESSED IN PLACENTA, SIGNAL = 0.59; EXPRESSED IN LUNG, SIGNAL = 0.7; EXPRESSED IN BONE MARROW, SIGNAL = 0.61; EXPRESSED IN ADULT LIVER, SIGNAL = 0.62; EXPRESSED IN BRAIN, SIGNAL = 0.64; EXPRESSED IN FETAL LIVER, SIGNAL = 0.63; SWISSPROT HIT: Q01055, EVALUE 1.20e+00; NT HIT: gi16120353, EVALUE 1.00e-01; EST_HUMAN HIT: BF843644.1, EVALUE 5.00e-57
ttaagtggatttgttgttgctgtcgttgctgaaactagtgaaaggatcgagttttgtgctatgagtcatgggagcaaaacgtgagtatttagaagtggagaggaccacgaagaaggaagcc

SEQ ID NO: 14482 - DNA, 166 bp, Homo sapiens
  MAP TO AJ239319.2; EXPRESSED IN FETAL LIVER, SIGNAL = 0.42; EXPRESSED IN BONE MARROW, SIGNAL = 0.42; EXPRESSED IN LUNG, SIGNAL = 0.45; EXPRESSED IN BRAIN, SIGNAL = 0.52; SWISSPROT HIT: P21675, EVALUE 7.70e-02; NT HIT: X07024.1, EVALUE 1.00e-88; EST_HUMAN HIT: BE162649.1, EVALUE 2.00e-88
tcgaaaatttgccctttttgatgaacaacatcgggaagagatgcgaaaagaacggcggaggattcaagagcaactgaggcggcttaagaggaaccaggaaaaggagaagcttaagggtcctcctgagaagaagcccaagaaaatgaaggagcgtcctgacctaaaa

SEQ ID NO: 14483 - DNA, 192 bp, Homo sapiens
  MAP TO CHR21_6.0; EXPRESSED IN FETAL LIVER, SIGNAL = 1.3; EXPRESSED IN PLACENTA, SIGNAL = 0.84; EXPRESSED IN ADULT LIVER, SIGNAL = 1.1; EXPRESSED IN BONE MARROW, SIGNAL = 1.3; EXPRESSED IN HELA, SIGNAL = 2.9; EXPRESSED IN BRAIN, SIGNAL = 1.3; EXPRESSED IN HEART, SIGNAL = 1.1; EXPRESSED IN LUNG, SIGNAL = 0.93; SWISSPROT HIT: O05156, EVALUE 4.30e+00; NT HIT: AJ400879.1, EVALUE 3.00e-03; EST_HUMAN HIT: AA209247.1, EVALUE 1.00e-104
atggcaaaatcagacagacttcttttcaaatacagatctccaatgtccccctccagtctgcagatgcacggctggtggtgtggctcagacggagcaagggttacatcaaggctattctctggaccgtgcaaacagtctagaccaatgacctgcagcatcatgtcctttgaagaagaggcaagttcggtcatg

SEQ ID NO: 14484 - DNA, 189 bp, Homo sapiens
  MAP TO AL133543.2; EXPRESSED IN FETAL LIVER, SIGNAL =   8; EXPRESSED IN LUNG, SIGNAL =  10; EXPRESSED IN HEART, SIGNAL = 7.5; EXPRESSED IN BONE MARROW, SIGNAL = 9.1; EXPRESSED IN PLACENTA, SIGNAL =  10; EXPRESSED IN ADULT LIVER, SIGNAL = 9.1; EXPRESSED IN HELA, SIGNAL = 6.6; EXPRESSED IN BRAIN, SIGNAL = 8.5; SWISSPROT HIT: Q06343, EVALUE 1.90e-02; NT HIT: gi13385873, EVALUE 5.00e-45; EST_HUMAN HIT: AW504398.1, EVALUE 1.00e-61
cttgattgattttggcagccaagtctacaaagagatcgctgtcattttcaataatttgagaatcagagcgctttttctttgtctcctcaactacgaaatcatagagggcaagacgatcagcttgagttagatcacaaacaaaccgtttgtgattcaaaggaacttcaacaggcaatgaagaataaattc

SEQ ID NO: 14485 - DNA, 95 bp, Homo sapiens
  MAP TO AL139141.1; EXPRESSED IN HEART, SIGNAL =   6; EXPRESSED IN FETAL LIVER, SIGNAL = 5.3; EXPRESSED IN LUNG, SIGNAL = 6.2; EXPRESSED IN ADULT LIVER, SIGNAL = 5.6; EXPRESSED IN BONE MARROW, SIGNAL = 5.6; EXPRESSED IN BRAIN, SIGNAL = 5.6; EXPRESSED IN HELA, SIGNAL = 3.3; EST_HUMAN HIT: AA085012.1, EVALUE 2.00e-46; SWISSPROT HIT: Q05823, EVALUE 4.80e-02; NT HIT: gi14733502, EVALUE 1.00e-46
cctctgcctgtgagtttctggatattgtagagctgctgctccagtctggtgctgaccccactctccgagaccaggatggctgcctgccagaggag

SEQ ID NO: 14486 - DNA, 414 bp, Homo sapiens
  MAP TO AC021635.3; EXPRESSED IN FETAL LIVER, SIGNAL = 0.71; EXPRESSED IN PLACENTA, SIGNAL = 0.63; EXPRESSED IN ADULT LIVER, SIGNAL = 0.63; EXPRESSED IN BRAIN, SIGNAL = 0.58; NT HIT: AL163213.2, EVALUE 3.00e-20; EST_HUMAN HIT: BF670627.1, EVALUE 2.00e-50; SWISSPROT HIT: P08547, EVALUE 4.00e-29
atgattgataccacagaaattcaaaggatcattactggttaccataagcaactatatgccaataaattggaaaacctagaagaaatggacaaattcctagacacataccacctaccctacctaaatcatgaagagatccaaaacctgaacagaccaataacaagtaatgagatcaaaactgtaataaaaagtcccccagcaaagataagccctgacctgatggcttctaccatgctgaattctaccaaacatttaaagaagaataatacccattatactcaaattattctgaaaaatagaggaggaggaaatacttccaaacttgttctaagaagtcagtattaccctgataccaacaccagacaaagacacatcaaaaaaagaaaacttcaggtcaatatctctcatgaatat

SEQ ID NO: 14487 - DNA, 250 bp, Homo sapiens
  MAP TO CHR21_59.0; EXPRESSED IN BONE MARROW, SIGNAL = 1.9; EXPRESSED IN BRAIN, SIGNAL = 1.7; EXPRESSED IN HELA, SIGNAL = 3.2; EXPRESSED IN HEART, SIGNAL = 1.5; EXPRESSED IN ADULT LIVER, SIGNAL = 1.4; EXPRESSED IN FETAL LIVER, SIGNAL = 1.8; NT HIT: AJ133804.1, EVALUE 2.30e-01; EST_HUMAN HIT: BE973840.1, EVALUE 1.00e-19; SWISSPROT HIT: Q92538, EVALUE 1.30e-01
ctggacatgagcactttgaagggcagcttccctcccggggtctggctgagctcagggtaggcgtcagtctgcatggattggatggaggaaggctgtgcgtggcaggagatgacactgcccttgggctgtgtggtttctctctgttccgagccctgttcctccaccttagcggaatagcgcctctccatccagttctcatctttgagaacgattcttgggatgaaagccacgacgttggatatgaacaacc

SEQ ID NO: 14488 - DNA, 186 bp, Homo sapiens
  MAP TO CHR22_206.0; EXPRESSED IN BONE MARROW, SIGNAL = 1.6; EXPRESSED IN BRAIN, SIGNAL = 1.6; EXPRESSED IN HELA, SIGNAL = 2.2; EXPRESSED IN HEART, SIGNAL = 1.6; EXPRESSED IN LUNG, SIGNAL = 1.8; EXPRESSED IN FETAL LIVER, SIGNAL = 1.8; EXPRESSED IN ADULT LIVER, SIGNAL = 1.6; SWISSPROT HIT: P53814, EVALUE 2.50e+00; NT HIT: gi13648116, EVALUE 1.00e-100; EST_HUMAN HIT: AW500592.1, EVALUE 1.00e-100
tggagccaccacagcgagactccagtgcaccagggaggtttcacgttggcagtgcagaatccatgctgcatgttcgacctggtggatacacgccccagagagcactgattaaccccttcgctccctctcggatgcccatgaagcttacgtccaacagaaggcgctggatgcacacttttcctgtgg

SEQ ID NO: 14489 - DNA, 109 bp, Homo sapiens
  MAP TO CHR22_154.0; EXPRESSED IN BRAIN, SIGNAL = 0.31; EXPRESSED IN HELA, SIGNAL = 0.83; EXPRESSED IN ADULT LIVER, SIGNAL = 0.38; SWISSPROT HIT: P08121, EVALUE 2.70e+00; NT HIT: AE004595.1, EVALUE 1.40e+00; EST_HUMAN HIT: BF218830.1, EVALUE 5.20e-01
gcccgtgtttgttggattctgattccgggctctggagggcctcagtgtcctgctggtctttgcccaggtggtaggtgtagggagggtatttcaggcagtgggcacagcc

SEQ ID NO: 14490 - DNA, 158 bp, Homo sapiens
  MAP TO AL138995.1; EXPRESSED IN HELA, SIGNAL = 4.5; EXPRESSED IN BRAIN, SIGNAL = 1.9; EXPRESSED IN HEART, SIGNAL = 1.9; EXPRESSED IN PLACENTA, SIGNAL = 1.3; EXPRESSED IN FETAL LIVER, SIGNAL = 1.8; EXPRESSED IN BONE MARROW, SIGNAL = 1.4; SWISSPROT HIT: P28275, EVALUE 3.90e-01; NT HIT: AF234171.2, EVALUE 5.40e-01; EST_HUMAN HIT: BG571356.1, EVALUE 8.00e-01
gcaactccaattcaaacaagtggaatgggctcatcatctcatctactcctccactcccaatctccgtggctgctccacccaagcccgtagcctgggctggctacgaggctgcattctccctcactcccacagccactcccctccttggcttccctcct

SEQ ID NO: 14491 - DNA, 176 bp, Homo sapiens
  MAP TO CHR21_60.0; EXPRESSED IN HELA, SIGNAL = 7.9; EXPRESSED IN BRAIN, SIGNAL =   2; EXPRESSED IN PLACENTA, SIGNAL = 1.2; EXPRESSED IN ADULT LIVER, SIGNAL = 5.9; EXPRESSED IN FETAL LIVER, SIGNAL = 2.7; EXPRESSED IN BONE MARROW, SIGNAL = 2.3; EST_HUMAN HIT: BI757548.1, EVALUE 2.00e-94; SWISSPROT HIT: P15036, EVALUE 3.00e-29; NT HIT: gi14780454, EVALUE 1.00e-94
tgaactacgagaagctgagccggggcttacgctactattacgacaagaacatcatccacaagacgtcggggaagcgctacgtgtaccgcttcgtgtgcgacctccagaacttgctggggttcacgcccgaggaactgcacgccatcctgggcgtccagcccgacacggaggactga

SEQ ID NO: 14492 - DNA, 154 bp, Homo sapiens
  MAP TO AL133406.3; EXPRESSED IN FETAL LIVER, SIGNAL = 2.6; EXPRESSED IN HEART, SIGNAL = 2.3; EXPRESSED IN ADULT LIVER, SIGNAL = 4.6; EXPRESSED IN LUNG, SIGNAL = 2.9; EXPRESSED IN BONE MARROW, SIGNAL = 2.1; EXPRESSED IN BRAIN, SIGNAL = 1.3; NT HIT: AF055066.1, EVALUE 5.00e-04; EST_HUMAN HIT: BF676573.1, EVALUE 3.00e-03; SWISSPROT HIT: P12970, EVALUE 1.00e-08
tgttgctaccttgtgggagaacaaggtggctcaactggtggtgactgcgcacgacatggatcctttccagcaggctgtcttcccatctgccctgtatcatgaaagggggttccctactacatcatcaaaggaacggccagactgggacatctag

SEQ ID NO: 14493 - DNA, 110 bp, Homo sapiens
  MAP TO AC015930.3; EXPRESSED IN BONE MARROW, SIGNAL = 0.53; EXPRESSED IN LUNG, SIGNAL = 0.5; EXPRESSED IN BRAIN, SIGNAL = 0.53; NT HIT: U66059.1, EVALUE 9.00e-02
acaacaacaagaacaacaagaacaacaacaacaacaacaaaaatgcacaaaactccaaagatggcccattgggttggcagaaaaccaaagctgcccctccccccttcttt

SEQ ID NO: 14494 - DNA, 178 bp, Homo sapiens
  MAP TO AB017653.1; EXPRESSED IN BONE MARROW, SIGNAL = 0.67; EXPRESSED IN BRAIN, SIGNAL = 0.67; EXPRESSED IN PLACENTA, SIGNAL = 0.7; EXPRESSED IN LUNG, SIGNAL = 0.54; EXPRESSED IN FETAL LIVER, SIGNAL = 0.71; EXPRESSED IN ADULT LIVER, SIGNAL = 0.73; SWISSPROT HIT: P23653, EVALUE 7.40e+00; NT HIT: AJ229041.1, EVALUE 3.00e-06; EST_HUMAN HIT: BG619122.1, EVALUE 6.00e-05
ctacctacctccctatctatgaggagaattattacgggaatcacaattatgaaggccgagaagtaccacaatctgctgtctgtgagctggagagccaggaaagtcagaggtataattccctctgtgtccaaaggctcaagaagcaggagcattgttgttcaagggcaggagagggtgg

SEQ ID NO: 14495 - DNA, 142 bp, Homo sapiens
  MAP TO AL133515.2; EXPRESSED IN LUNG, SIGNAL = 1.2; EXPRESSED IN FETAL LIVER, SIGNAL = 1.5; EXPRESSED IN ADULT LIVER, SIGNAL = 1.5; EXPRESSED IN PLACENTA, SIGNAL = 1.8; EXPRESSED IN BONE MARROW, SIGNAL = 1.1; EXPRESSED IN HELA, SIGNAL = 0.96; EXPRESSED IN BRAIN, SIGNAL = 1.2; SWISSPROT HIT: O60469, EVALUE 6.00e-04; NT HIT: gi15296873, EVALUE 2.00e-74; EST_HUMAN HIT: AW175947.1, EVALUE 7.10e-01
ctgtgtgaacccacgataaacatatcgttaacggtccaggcaatctttggtttgggataacctgttgcagaacacatgatggagacctcagaccctcctgtgaaagactgattcttgggcatcacagtgactttgggtggtt

SEQ ID NO: 14496 - DNA, 186 bp, Homo sapiens
  MAP TO CHR21_61.0; EXPRESSED IN BRAIN, SIGNAL = 1.5; EXPRESSED IN HELA, SIGNAL = 3.2; EXPRESSED IN PLACENTA, SIGNAL = 0.9; EXPRESSED IN ADULT LIVER, SIGNAL = 1.1; EXPRESSED IN FETAL LIVER, SIGNAL = 1.7; EXPRESSED IN BONE MARROW, SIGNAL = 1.6; EXPRESSED IN LUNG, SIGNAL = 1.1; SWISSPROT HIT: P27401, EVALUE 6.00e-06; NT HIT: AL163285.2, EVALUE 1.00e-100; EST_HUMAN HIT: AA403053.1, EVALUE 7.00e-45
tcaaactgatacagcagctgccattggagtcaccagctggttaagcctacaataatccactgtcattttccaagatccatctgtcttctgcacaggccaaacaggagggttgaatggggatgtggtgggaatcaccacacttgtgtctttcaggttcttgatggtggcactaatctctgcaatccc

SEQ ID NO: 14497 - DNA, 81 bp, Homo sapiens
  MAP TO AL133408.3; EXPRESSED IN FETAL LIVER, SIGNAL = 7.9; EXPRESSED IN BRAIN, SIGNAL = 8.7; EXPRESSED IN HEART, SIGNAL = 7.2; EXPRESSED IN LUNG, SIGNAL =  11; EXPRESSED IN HELA, SIGNAL = 4.1; EXPRESSED IN ADULT LIVER, SIGNAL = 9.4; EST_HUMAN HIT: BF027736.1, EVALUE 2.00e-06; NT HIT: AL163278.2, EVALUE 1.00e-06
ttatattatctcctgtacagtgcatagtggtggtgcatcatcatacaggtcttcatccttgttatcttcacgttgactagg

SEQ ID NO: 14498 - DNA, 74 bp, Homo sapiens
  MAP TO CHR21_62.0; EXPRESSED IN HELA, SIGNAL =   5; EXPRESSED IN BRAIN, SIGNAL = 1.9; EXPRESSED IN FETAL LIVER, SIGNAL = 1.8; EXPRESSED IN HEART, SIGNAL = 1.2; EXPRESSED IN LUNG, SIGNAL = 1.2; EXPRESSED IN BONE MARROW, SIGNAL = 2.2; EXPRESSED IN PLACENTA, SIGNAL =   1; EXPRESSED IN ADULT LIVER, SIGNAL = 1.2; NT HIT: M96150.1, EVALUE 3.40e+00
ttgctttctactgtgatcacctgctgatgctccccatttgctgaattcaaatggaagtctgtaaggtcagcttg

SEQ ID NO: 14499 - DNA, 147 bp, Homo sapiens
  MAP TO CHR22_208.0; EXPRESSED IN PLACENTA, SIGNAL = 0.74; EXPRESSED IN LUNG, SIGNAL = 0.84; EXPRESSED IN ADULT LIVER, SIGNAL = 0.7; EXPRESSED IN BRAIN, SIGNAL = 0.96; EXPRESSED IN HELA, SIGNAL = 3.1; EXPRESSED IN FETAL LIVER, SIGNAL = 0.84; NT HIT: gi15318458, EVALUE 1.00e-75; EST_HUMAN HIT: AI792940.1, EVALUE 2.00e-10; SWISSPROT HIT: O14994, EVALUE 3.00e-21
tcacatgtaagccttgtagttggatccaattttctggatgcggatgtcgtacttggagtcgatgaaggcctcggtggtggcgtaggttttggccatggcgaccacgctggtgatgtcctggaagtcaagctggttttccactttgat

SEQ ID NO: 14500 - DNA, 132 bp, Homo sapiens
  MAP TO AC009472.2; EXPRESSED IN HEART, SIGNAL = 1.3; EXPRESSED IN PLACENTA, SIGNAL = 1.6; EXPRESSED IN BONE MARROW, SIGNAL = 1.6; EXPRESSED IN ADULT LIVER, SIGNAL = 1.4; EXPRESSED IN HELA, SIGNAL =   1; EXPRESSED IN BRAIN, SIGNAL = 1.4; EXPRESSED IN FETAL LIVER, SIGNAL = 1.5; EXPRESSED IN LUNG, SIGNAL = 1.5; NT HIT: gi4505726, EVALUE 2.00e-68; EST_HUMAN HIT: BI826271.1, EVALUE 2.00e-68; SWISSPROT HIT: Q9JJK3, EVALUE 2.00e-19
ctgtcatattgcaagtcctctggttactttcaaaatgatattgtcgtcgtgcttgggcaatgtattctgcagcctccctttcctgtatttctctgattttcttctgtccatatttccccagaatatatactc

SEQ ID NO: 14501 - DNA, 174 bp, Homo sapiens
  MAP TO CHR22_4.0; EXPRESSED IN BONE MARROW, SIGNAL = 1.5; EXPRESSED IN HELA, SIGNAL =   1; EXPRESSED IN BRAIN, SIGNAL = 1.5; EXPRESSED IN HEART, SIGNAL = 1.5; EXPRESSED IN PLACENTA, SIGNAL = 1.6; EXPRESSED IN LUNG, SIGNAL = 1.8; EXPRESSED IN ADULT LIVER, SIGNAL = 1.7; EST_HUMAN HIT: BI754772.1, EVALUE 1.00e-58; SWISSPROT HIT: Q9H479, EVALUE 2.00e-18; NT HIT: gi11545905, EVALUE 8.00e-59
ctgctcaagctcctcatcttcaaatgctccatcacaaaggcggccacacctctcggcaaatcgatgaccttcatgggcctcggcgcctgcaccaggcccgtgctctggagggcctccaggctcgccacctccccctcaaacatctgctgggcctgcatccagaacacagccatg

SEQ ID NO: 14502 - DNA, 184 bp, Homo sapiens
  MAP TO CHR22_114.0; EXPRESSED IN BONE MARROW, SIGNAL = 0.97; EXPRESSED IN LUNG, SIGNAL = 1.2; EXPRESSED IN ADULT LIVER, SIGNAL = 1.1; EXPRESSED IN PLACENTA, SIGNAL = 0.9; EXPRESSED IN HELA, SIGNAL = 0.78; EXPRESSED IN BRAIN, SIGNAL = 1.1; EXPRESSED IN FETAL LIVER, SIGNAL = 0.78; EST_HUMAN HIT: BI254887.1, EVALUE 3.00e-99; SWISSPROT HIT: P32019, EVALUE 2.00e-06; NT HIT: U45975.1, EVALUE 2.00e-99
tgccaagaaacggaagccagcttggacagaccgtatcctatggaaggtcaaggctccaggtgggggtcccagcccctcaggacggaagagccaccgactccaggtgacgcagcacagctaccgcagccacatggaatacacagtcagcgaccacaagcctgtggctgcccagttcctcctgcag

SEQ ID NO: 14503 - DNA, 304 bp, Homo sapiens
  MAP TO U82695.2; EXPRESSED IN BONE MARROW, SIGNAL =   2; EXPRESSED IN BRAIN, SIGNAL = 1.7; EXPRESSED IN PLACENTA, SIGNAL = 6.6; EXPRESSED IN LUNG, SIGNAL = 4.4; EXPRESSED IN ADULT LIVER, SIGNAL = 4.9; EXPRESSED IN FETAL LIVER, SIGNAL = 2.4; EST_HUMAN HIT: AW068206.1, EVALUE 1.00e-101; SWISSPROT HIT: P21810, EVALUE 2.00e-34; NT HIT: U82695.2, EVALUE 0.00e+00
ctttgagcagagaggcttctgggacttcaccctggacgatgggccattcatgatgaacgatgaggaagcttcgggcgctgacacctcgggcgtcctggacccggactctgtcacacccacctacagcgccatgtgtcctttcggctgccactgccacctgcgggtggttcagtgctccgacctgggtttgtccctgagtgatggggagcggggcatgcagggaggctcaggtgcagcctgagagccccttctgaagggggcacatgctggtcctgtgggacggtggcgagcatgatgtaagtgt

SEQ ID NO: 14504 - DNA, 154 bp, Homo sapiens
  MAP TO AL031283.26; EXPRESSED IN BONE MARROW, SIGNAL = 0.54; EXPRESSED IN BRAIN, SIGNAL = 0.59; EXPRESSED IN LUNG, SIGNAL = 0.57; EXPRESSED IN ADULT LIVER, SIGNAL = 0.52; EST_HUMAN HIT: BE175185.1, EVALUE 5.00e-02; SWISSPROT HIT: O68940, EVALUE 8.80e-01; NT HIT: gi7706215, EVALUE 8.20e+00
ctggtaaagttctgaggattaggtataaaaacaccctgagtctttgtgacgagcccatcatggtgtctgggctgtttgcatgatagatgatgtttttgaaaaatacaaggttctcgtatgtgatcattcttccaacagatattaagtttttgcg

SEQ ID NO: 14505 - DNA, 85 bp, Homo sapiens
  MAP TO CHR22_9.0; EXPRESSED IN HELA, SIGNAL = 1.2; EXPRESSED IN BRAIN, SIGNAL = 2.1; EXPRESSED IN HEART, SIGNAL = 2.4; EXPRESSED IN FETAL LIVER, SIGNAL = 1.9; EXPRESSED IN ADULT LIVER, SIGNAL =   2; EXPRESSED IN BONE MARROW, SIGNAL = 1.9; EST_HUMAN HIT: BF935596.1, EVALUE 9.60e-02; NT HIT: gi6755501, EVALUE 6.60e-02
cctcctggaaatcataaacagcatagagccagctcagaaaacacaagaagaaaagcccaaccatgttccccagctacacagggtt

SEQ ID NO: 14506 - DNA, 115 bp, Homo sapiens
  MAP TO AL136231.3; EXPRESSED IN ADULT LIVER, SIGNAL = 1.2; EXPRESSED IN FETAL LIVER, SIGNAL = 0.61; EXPRESSED IN BONE MARROW, SIGNAL = 0.57; EXPRESSED IN BRAIN, SIGNAL = 0.59; EXPRESSED IN PLACENTA, SIGNAL = 0.81; EXPRESSED IN LUNG, SIGNAL = 0.84; NT HIT: AF074905.1, EVALUE 2.00e-58; SWISSPROT HIT: P43005, EVALUE 1.00e-13; EST_HUMAN HIT: AA278256.1, EVALUE 2.00e-53
ctgatgagatctaacatggcatccaccgtactgacttcaggggtgctgcctgtcctcgcaatttcacccactttctgggtgacaccaggcttgatgctcaccaccagcacaatac

SEQ ID NO: 14507 - DNA, 123 bp, Homo sapiens
  MAP TO CHR21_64.0; EXPRESSED IN HELA, SIGNAL = 3.4; EXPRESSED IN BRAIN, SIGNAL = 1.4; EXPRESSED IN FETAL LIVER, SIGNAL = 1.8; EXPRESSED IN LUNG, SIGNAL = 0.97; EXPRESSED IN HEART, SIGNAL = 1.1; EXPRESSED IN BONE MARROW, SIGNAL = 1.8; EXPRESSED IN ADULT LIVER, SIGNAL = 1.2; NT HIT: AF319782.1, EVALUE 4.10e-01; EST_HUMAN HIT: BE268685.1, EVALUE 5.00e-63; SWISSPROT HIT: P46675, EVALUE 6.00e+00
ctgagcttcctttacagtcgtgggcttggtaatcagaaccactgatggagaggcagaaccagccaaatgcttcaagatgtccttgagaacgtcagacatcgcacttgtctcagccacctggtc

SEQ ID NO: 14508 - DNA, 85 bp, Homo sapiens
  MAP TO AL137843.1; EXPRESSED IN BONE MARROW, SIGNAL =   3; EXPRESSED IN PLACENTA, SIGNAL = 3.8; EXPRESSED IN LUNG, SIGNAL = 3.7; EXPRESSED IN ADULT LIVER, SIGNAL = 5.9; EXPRESSED IN HELA, SIGNAL = 1.4; EXPRESSED IN BRAIN, SIGNAL = 3.5; EXPRESSED IN FETAL LIVER, SIGNAL = 3.3; EXPRESSED IN HEART, SIGNAL = 3.2; EST_HUMAN HIT: BG996755.1, EVALUE 3.80e-01; NT HIT: gi8394508, EVALUE 1.00e+00
gaagactccgacttcatagatcagacccaattcttcagcttttctcatccacactgtgttggaatctgtattgtatcttatccag

SEQ ID NO: 14509 - DNA, 168 bp, Homo sapiens
  MAP TO CHR21_66.0; EXPRESSED IN LUNG, SIGNAL = 0.92; EXPRESSED IN FETAL LIVER, SIGNAL = 1.5; EXPRESSED IN ADULT LIVER, SIGNAL = 0.89; EXPRESSED IN BONE MARROW, SIGNAL = 1.9; EXPRESSED IN BRAIN, SIGNAL = 1.5; EXPRESSED IN HELA, SIGNAL = 3.8; EXPRESSED IN HEART, SIGNAL = 1.2; SWISSPROT HIT: P23469, EVALUE 7.50e+00; EST_HUMAN HIT: AW163715.1, EVALUE 8.60e-01; NT HIT: S37730.1, EVALUE 5.80e-01
ttatgcacctaccaaatgtagccagggccaccgagaactgtctggtcctgataaatttcagcagctggaaattctgcatcgtccgggccagcgtggacttcacaagggatccacaggatctggcaggagctgcccgtggtgctgaccccgagaatgctttcaaggcag

SEQ ID NO: 14510 - DNA, 215 bp, Homo sapiens
  MAP TO AL138752.2; EXPRESSED IN HEART, SIGNAL = 2.1; EXPRESSED IN LUNG, SIGNAL = 2.5; EXPRESSED IN ADULT LIVER, SIGNAL =   2; EXPRESSED IN BONE MARROW, SIGNAL = 2.4; EXPRESSED IN HELA, SIGNAL = 1.5; EXPRESSED IN PLACENTA, SIGNAL = 2.3; EXPRESSED IN FETAL LIVER, SIGNAL = 2.3; EXPRESSED IN BRAIN, SIGNAL = 2.3; SWISSPROT HIT: Q02645, EVALUE 2.90e+00; EST_HUMAN HIT: AW899432.1, EVALUE 1.00e-117
cgagcaccatgccgtactgcctgtggccaggatctctccctcctggcactcgccttccgcatcgatctgcagaagctggaagccttcaggaagtccatcttcacctgtctcctctaggatgccttcttgcccctgcagcacaggtgactctactttctgagtactcccttccaatttccagtccatggacttagtcctctgtcctttccaccaga

SEQ ID NO: 14511 - DNA, 276 bp, Homo sapiens
  MAP TO CHR22_215.0; EXPRESSED IN BRAIN, SIGNAL = 1.5; EXPRESSED IN HEART, SIGNAL = 1.2; EXPRESSED IN HELA, SIGNAL =   3; EXPRESSED IN LUNG, SIGNAL = 1.2; EXPRESSED IN FETAL LIVER, SIGNAL = 1.1; EXPRESSED IN ADULT LIVER, SIGNAL = 1.2; EXPRESSED IN BONE MARROW, SIGNAL = 1.3; SWISSPROT HIT: P35579, EVALUE 1.00e-33; EST_HUMAN HIT: BG250553.1, EVALUE 1.00e-118; NT HIT: M31013.1, EVALUE 1.00e-118
gaagcctgcgtgaagccaaggcagccttgggcacccatggggtagcaggaggccatgcacacctgtctgaccagctgcttcttcttctcctcgctctgctcgtcccggccctgcaggtcccgctcgaactgggccttcatggcctgcaggttgacctccaaccgcagcttggcatcttcggtggcctgcagctcgtcctccagctcttccagctgcgtcttcatctcctccacctgctgctctagggcccgcttggacttctccagctcgtggacc

SEQ ID NO: 14512 - DNA, 128 bp, Homo sapiens
  MAP TO AL135926.3; EXPRESSED IN FETAL LIVER, SIGNAL = 0.69; EXPRESSED IN PLACENTA, SIGNAL = 0.66; EXPRESSED IN BONE MARROW, SIGNAL = 0.53; EXPRESSED IN LUNG, SIGNAL = 0.6; EXPRESSED IN ADULT LIVER, SIGNAL = 0.73; EXPRESSED IN BRAIN, SIGNAL = 0.54; EST_HUMAN HIT: AI318220.1, EVALUE 7.00e-04; NT HIT: AF214656.1, EVALUE 7.00e-03
ctgcttctttagccatgtgatggggcaggggcttgggttcatggaggagaagcaagggcaggaagaggtggaggaggaagaagaaaagcaggagctgagaaatccagtggcttcagagctgcaaaccg

SEQ ID NO: 14513 - DNA, 232 bp, Homo sapiens
  MAP TO CHR22_73.0; EXPRESSED IN HELA, SIGNAL = 3.2; EXPRESSED IN BRAIN, SIGNAL =   1; EXPRESSED IN LUNG, SIGNAL = 0.81; EXPRESSED IN FETAL LIVER, SIGNAL = 0.77; EXPRESSED IN BONE MARROW, SIGNAL = 0.78; EXPRESSED IN ADULT LIVER, SIGNAL = 0.8; SWISSPROT HIT: O75791, EVALUE 1.00e-14; EST_HUMAN HIT: BI518664.1, EVALUE 4.00e-53; NT HIT: gi14779046, EVALUE 7.00e-66
ggtcaccggggcaacagcctggaccggaggtcccagggaggcccacacctcagtggggctgtgggagaagaaatccgaccttcgatgaaccggaagctgtcggatcaccccccgacccttcccctgcagcagcaccagcaccagccacagcctccgcaatatgccccagcgccccagcagctgcagcagcccccacagcagcgatatctgcagcaccaccatttccaccagg

SEQ ID NO: 14514 - DNA, 448 bp, Homo sapiens
  MAP TO AL137067.3; EXPRESSED IN BRAIN, SIGNAL = 1.3; EXPRESSED IN PLACENTA, SIGNAL =  16; EXPRESSED IN LUNG, SIGNAL = 6.9; EXPRESSED IN ADULT LIVER, SIGNAL = 6.8; EXPRESSED IN FETAL LIVER, SIGNAL = 4.1; EXPRESSED IN BONE MARROW, SIGNAL = 1.6; NT HIT: M26324.1, EVALUE 0.00e+00; SWISSPROT HIT: P05787, EVALUE 1.00e-66; EST_HUMAN HIT: BE615913.1, EVALUE 0.00e+00
actgacgagatcaacttcctcaggcagctgtatgaagaggagatccgggagctgcagtcccagatctccgacatgtctatggtgctgtccatggactacagctgctctcgggacatggacagcatcatccctgaggtcaaggtgcagtatgaggagattgccaactgcagccgggctgaggctgagagcatgtaccagatcaagtatgaggagctgcagacgctggctgggaagtacggggatgacctaagccgcacaaagactgagatctccgagatgaaccggaacatcagctggctccaggctgagaccgagggcctcaaaggccagagggcttccctggaggccgccatcacagatgccgagcagcgtggggagctggctgttaaggatgccaacgccaagctgtccgagctggaggccgccctgcagcgggccaagcaggaca

SEQ ID NO: 14515 - DNA, 489 bp, Homo sapiens
  MAP TO CHR22_43.0; EXPRESSED IN BONE MARROW, SIGNAL = 1.2; EXPRESSED IN PLACENTA, SIGNAL = 1.6; EXPRESSED IN HEART, SIGNAL = 1.4; EXPRESSED IN LUNG, SIGNAL = 1.6; EXPRESSED IN HELA, SIGNAL = 1.8; EXPRESSED IN BRAIN, SIGNAL = 1.4; EXPRESSED IN ADULT LIVER, SIGNAL = 1.9; EXPRESSED IN FETAL LIVER, SIGNAL = 1.6; EST_HUMAN HIT: AU133047.1, EVALUE 0.00e+00; NT HIT: gi16163549, EVALUE 0.00e+00; SWISSPROT HIT: O75461, EVALUE 1.00e-85
agaggtcctgacaccttcagaccttttgttactggtctgaccctgctccacttctcacaaatagacatcgataggtccgttggtgctccttatgtgcactgtgatagagtcttctctgggagctggaacatccaatctggtttctgctggagctttaactgcaatgacgatctgttcatggaaggcctgaatgctatgaatgtcttgataggtcacatatgctagtctttcattttctttgtcatctgttaactcaaacagctgctgagcacaatccttaattaactcatccaaagcatcttccattgctggtaagtcagcaagttcctcctgtagcttcttttgttggggaactgctccaaaattgctaagatcagatcctatccatctaatatggttcttggatttcttttcaacgaggtcgattccatctaagacatcggtgatgtcatacactctccgctttcggactcccagtttcgttgcaac

SEQ ID NO: 14516 - DNA, 116 bp, Homo sapiens
  MAP TO CHR22_140.0; EXPRESSED IN LUNG, SIGNAL = 0.61; EXPRESSED IN ADULT LIVER, SIGNAL = 0.6; EXPRESSED IN FETAL LIVER, SIGNAL = 0.61; EXPRESSED IN PLACENTA, SIGNAL = 0.54; EXPRESSED IN BONE MARROW, SIGNAL = 0.62; EXPRESSED IN HELA, SIGNAL = 1.9; EXPRESSED IN BRAIN, SIGNAL = 0.66; EST_HUMAN HIT: BE410354.1, EVALUE 2.00e-56; NT HIT: L12104.1, EVALUE 5.90e+00; SWISSPROT HIT: P75488, EVALUE 7.90e+00
ggtttcctgggaggctgtgagttgtctggggacctcatcaacatttgcacaaatgccccagactctgctcacctctttcaaaggggctcctccctctgagcctgcaatgtctgtgt

SEQ ID NO: 14517 - DNA, 436 bp, Homo sapiens
  MAP TO AL133476.4; EXPRESSED IN FETAL LIVER, SIGNAL = 3.2; EXPRESSED IN BONE MARROW, SIGNAL = 3.9; EXPRESSED IN PLACENTA, SIGNAL = 5.1; EXPRESSED IN LUNG, SIGNAL = 4.7; EXPRESSED IN BRAIN, SIGNAL = 3.4; EST_HUMAN HIT: AL549534.1, EVALUE 0.00e+00; NT HIT: AB002373.2, EVALUE 0.00e+00; SWISSPROT HIT: P03975, EVALUE 5.50e-01
cagcctgccccactggctgcccctgctgctcaagtctcagtcccagctccctcaggggaaccgcaggcatccactccccgagccactggcagaggtgccaggaaagctgggtctgagccagagacctctcggccatcgcccctgggcagctactcccccatccggagtgttggcccctttgggcccagcactgactcttctgcctccacttcgtgctcccctcccccagagcagcccacagccacagaaagcctgcccccatggagccactcctgtccttctgctgtccggcctgccacctcccagcagccgcagaaggaggatcagaagatactgaccttgactgagtaccggctccatggaacaggaagcttgccgcctctgggctcctggcgatctggcctcagccgagcagagagcctggcccggggaggtg

SEQ ID NO: 14518 - DNA, 209 bp, Homo sapiens
  MAP TO CHR21_66.0; EXPRESSED IN FETAL LIVER, SIGNAL = 1.3; EXPRESSED IN LUNG, SIGNAL = 0.89; EXPRESSED IN PLACENTA, SIGNAL = 0.83; EXPRESSED IN ADULT LIVER, SIGNAL =   1; EXPRESSED IN BONE MARROW, SIGNAL = 1.4; EXPRESSED IN HELA, SIGNAL = 2.9; EXPRESSED IN BRAIN, SIGNAL = 1.3; SWISSPROT HIT: P57075, EVALUE 6.00e-37; EST_HUMAN HIT: AW962803.1, EVALUE 7.00e-79; NT HIT: gi9507220, EVALUE 1.00e-114
accctgagagccctattccagtacaaaccccagaacgtggatgagctgacgctaagtcctggtgactacatctttgtggaccccacgcagcaggacgaagccagcgagggctgggtgattgggatctcacagcggacgggctgccggggcttcctgccggaaaactacacggatcgagccagtgagtctgacacgtgggtgaagcacag

SEQ ID NO: 14519 - DNA, 157 bp, Homo sapiens
  MAP TO AC009802.13; EXPRESSED IN BRAIN, SIGNAL = 0.52; EXPRESSED IN FETAL LIVER, SIGNAL = 0.7; EXPRESSED IN PLACENTA, SIGNAL = 0.85; EXPRESSED IN BONE MARROW, SIGNAL = 0.61; SWISSPROT HIT: P50452, EVALUE 3.00e-23; EST_HUMAN HIT: BG227962.1, EVALUE 5.00e-76; NT HIT: gi11425220, EVALUE 3.00e-76
cacggcgaggtccgtgttgtcatcgggaagcagaatgaccatgctcagctcctcttccacatagggcagctccaggacctgggtgtgtacctcatccgcataccccattttaaacttagcttccttaaacatcatctgcactgtctttttttcctaa

SEQ ID NO: 14520 - DNA, 93 bp, Homo sapiens
  MAP TO AL138967.2; EXPRESSED IN PLACENTA, SIGNAL = 1.4; EXPRESSED IN ADULT LIVER, SIGNAL = 1.1; EXPRESSED IN BONE MARROW, SIGNAL = 0.9; EXPRESSED IN LUNG, SIGNAL = 0.99; EXPRESSED IN BRAIN, SIGNAL = 0.79; EXPRESSED IN HELA, SIGNAL = 0.62; EXPRESSED IN FETAL LIVER, SIGNAL = 0.98; EST_HUMAN HIT: BG005909.1, EVALUE 1.00e-04; NT HIT: M31951.1, EVALUE 1.10e+00
gcaccctatgagatagatgccattatcagcggcattttatacatgaagaaactgaggcaagaaagacttggggtctggcccaagatcccagag

SEQ ID NO: 14521 - DNA, 125 bp, Homo sapiens
  MAP TO AC020582.3; EXPRESSED IN BONE MARROW, SIGNAL = 7.2; EXPRESSED IN BRAIN, SIGNAL = 5.7; EXPRESSED IN LUNG, SIGNAL = 8.3; EXPRESSED IN HELA, SIGNAL = 4.7; EXPRESSED IN FETAL LIVER, SIGNAL = 6.7; EXPRESSED IN HEART, SIGNAL =   6; EXPRESSED IN PLACENTA, SIGNAL = 8.9; EXPRESSED IN ADULT LIVER, SIGNAL =   9; EST_HUMAN HIT: BI550392.1, EVALUE 2.00e-53; NT HIT: AL163249.2, EVALUE 7.00e-43
cacgaagatctgcagcttcactcctgagcccagcgagaccatgagcccaccgggaggaacgaacaactccagacgctctgccttaagagctgtaacactcactgcgaaggtctgcagcttcactc

SEQ ID NO: 14522 - DNA, 157 bp, Homo sapiens
  MAP TO CHR21_67.0; EXPRESSED IN PLACENTA, SIGNAL = 0.9; EXPRESSED IN FETAL LIVER, SIGNAL = 1.7; EXPRESSED IN ADULT LIVER, SIGNAL = 1.1; EXPRESSED IN BONE MARROW, SIGNAL = 1.7; EXPRESSED IN BRAIN, SIGNAL = 1.5; EXPRESSED IN HELA, SIGNAL = 3.1; EXPRESSED IN LUNG, SIGNAL =   1; NT HIT: gi14780574, EVALUE 2.00e-83; SWISSPROT HIT: O76083, EVALUE 7.00e-26; EST_HUMAN HIT: BF858512.1, EVALUE 4.00e-83
gtaccagatcaatgcccgcacagagctggcggtccgctacaatgacatctcaccgctggagaaccaccactgcgccgtggccttccagatcctcgccgagcctgagtgcaacatcttctccaacatcccacctgatgggttcaagcagatccgacag

SEQ ID NO: 14523 - DNA, 189 bp, Homo sapiens
  MAP TO AC013371.4; EXPRESSED IN BONE MARROW, SIGNAL =   6; EXPRESSED IN BRAIN, SIGNAL = 2.5; EXPRESSED IN LUNG, SIGNAL = 7.6; EXPRESSED IN HELA, SIGNAL = 1.6; EXPRESSED IN PLACENTA, SIGNAL = 4.1; EXPRESSED IN ADULT LIVER, SIGNAL = 8.3; EST_HUMAN HIT: BE255829.1, EVALUE 4.00e-31; NT HIT: Z23090.1, EVALUE 2.00e-31; SWISSPROT HIT: P52859, EVALUE 4.00e-22
atgacaccaggaagttgacagtcaggtgaatgttatacacaagtttattgtctgtaacatttacatggccaacagtcacagccagacacagcaccttcgtcatctggaacttgattgtggacttcacctcatccacttcattttcattgtgtatcagcagggaagggaacgtgccagccttatgtaggc

SEQ ID NO: 14524 - DNA, 79 bp, Homo sapiens
  MAP TO CHR21_67.0; EXPRESSED IN FETAL LIVER, SIGNAL = 1.8; EXPRESSED IN BONE MARROW, SIGNAL = 2.2; EXPRESSED IN HEART, SIGNAL = 1.5; EXPRESSED IN BRAIN, SIGNAL = 1.8; EXPRESSED IN LUNG, SIGNAL =   1; EXPRESSED IN HELA, SIGNAL = 4.7; EXPRESSED IN PLACENTA, SIGNAL =   1; EXPRESSED IN ADULT LIVER, SIGNAL = 1.1; NT HIT: gi13928769, EVALUE 9.40e-01; SWISSPROT HIT: O46432, EVALUE 6.30e+00
tgcaccatagggcctggaggaagcggctgtagcaggactcgcagagttccccgtgcgtggccaccggccctgcctccat

SEQ ID NO: 14525 - DNA, 157 bp, Homo sapiens
  MAP TO AL138839.1; EXPRESSED IN PLACENTA, SIGNAL = 1.1; EXPRESSED IN ADULT LIVER, SIGNAL =   1; EXPRESSED IN FETAL LIVER, SIGNAL = 0.92; EXPRESSED IN BONE MARROW, SIGNAL = 0.87; EXPRESSED IN BRAIN, SIGNAL = 1.1; EXPRESSED IN HELA, SIGNAL = 0.96; EST_HUMAN HIT: BE567741.1, EVALUE 5.10e-02; NT HIT: gi8393607, EVALUE 3.50e-02; SWISSPROT HIT: P01029, EVALUE 2.00e+00
atggagctggctctaaaccccacccaacagggagctaagcaagctccttgtgctgaaaagttctccagttgctcaaaatttatagaaacccttggtcacaaccagttgaatggtcagctctgcacagggaagatgaaacctgtggagtatcccacaa

SEQ ID NO: 14526 - DNA, 105 bp, Homo sapiens
  MAP TO AL136105.2; EXPRESSED IN BONE MARROW, SIGNAL = 1.5; EXPRESSED IN HELA, SIGNAL = 3.8; EXPRESSED IN BRAIN, SIGNAL = 1.7; EXPRESSED IN LUNG, SIGNAL = 0.49; EXPRESSED IN HEART, SIGNAL = 1.8; EXPRESSED IN FETAL LIVER, SIGNAL = 1.5; EST_HUMAN HIT: BG682198.1, EVALUE 2.00e-52; NT HIT: gi14739670, EVALUE 5.20e+00
cttggttcttctggtctaggtggtgagcaccctgaggggcagcagccaccggcccaggggtgccagcaggcccagagtgtggcccagcatctcagccacgatcct

SEQ ID NO: 14527 - DNA, 148 bp, Homo sapiens
  MAP TO CHR21_56.0; EXPRESSED IN HELA, SIGNAL = 3.8; EXPRESSED IN BRAIN, SIGNAL = 1.7; EXPRESSED IN LUNG, SIGNAL = 1.5; EXPRESSED IN FETAL LIVER, SIGNAL = 1.8; EXPRESSED IN HEART, SIGNAL = 1.7; EXPRESSED IN BONE MARROW, SIGNAL = 1.6; EXPRESSED IN PLACENTA, SIGNAL = 1.8; EXPRESSED IN ADULT LIVER, SIGNAL = 1.8; EST_HUMAN HIT: BG752885.1, EVALUE 1.20e-02; NT HIT: D85922.1, EVALUE 5.00e-78; SWISSPROT HIT: P98194, EVALUE 4.50e+00
taatctggaactgcaactcccagaacttctccattaagcagctggctgggttgtcctgttgcgtgaggtggcaccgtcaggatggccactttgcagataatcatgttgtctctcctctgatggagagccacaggctcccagcgacacc

SEQ ID NO: 14528 - DNA, 201 bp, Homo sapiens
  MAP TO CHR21_69.0; EXPRESSED IN BONE MARROW, SIGNAL =   2; EXPRESSED IN HEART, SIGNAL = 1.2; EXPRESSED IN LUNG, SIGNAL = 0.89; EXPRESSED IN PLACENTA, SIGNAL = 0.91; EXPRESSED IN HELA, SIGNAL =   5; EXPRESSED IN BRAIN, SIGNAL = 1.7; EXPRESSED IN ADULT LIVER, SIGNAL = 2.3; EXPRESSED IN FETAL LIVER, SIGNAL =   2; SWISSPROT HIT: P35520, EVALUE 5.00e-14; EST_HUMAN HIT: N29067.1, EVALUE 2.00e-54; NT HIT: AF042836.1, EVALUE 1.00e-109
tgtttgagctgcgtgtaggtgaccgggcacctgtttgagctgcctgtaggtgactgcgcatctgtttgagctgcctgtaggtgactgggtacctgtttgaactgcttgtagatgactttgccaacttggtctgacggctgcaccttcccggcaagcagggacgagagcatgttcccaagcgtcaccattcccaggattacc

SEQ ID NO: 14529 - DNA, 132 bp, Homo sapiens
  MAP TO AL050339.4; EXPRESSED IN FETAL LIVER, SIGNAL = 4.4; EXPRESSED IN HEART, SIGNAL = 3.7; EXPRESSED IN PLACENTA, SIGNAL = 5.5; EXPRESSED IN ADULT LIVER, SIGNAL = 5.5; EXPRESSED IN BONE MARROW, SIGNAL = 4.3; EXPRESSED IN LUNG, SIGNAL = 4.6; EXPRESSED IN HELA, SIGNAL = 3.3; EXPRESSED IN BRAIN, SIGNAL = 3.6; EST_HUMAN HIT: BG329709.1, EVALUE 1.60e-01; SWISSPROT HIT: Q9Y3N9, EVALUE 5.00e-05
ctagaccacttttttgtgtgtgtgaaatgtctgcaatgatcaagattcaagattgcatgtgtggacaccacagccatggaggtaaccacatttgccatgtgcctgattatagttcttgttcctcttcttctt

SEQ ID NO: 14530 - DNA, 336 bp, Homo sapiens
  MAP TO AC015930.3; EXPRESSED IN BRAIN, SIGNAL = 1.3; EXPRESSED IN HELA, SIGNAL = 0.55; EXPRESSED IN PLACENTA, SIGNAL = 0.94; EXPRESSED IN LUNG, SIGNAL = 0.85; EXPRESSED IN ADULT LIVER, SIGNAL = 0.79; EST_HUMAN HIT: AA417144.1, EVALUE 5.00e-04; NT HIT: AF400441.1, EVALUE 4.00e-93; SWISSPROT HIT: Q63604, EVALUE 5.00e-29
cttcttttttctctcctcctttctctggcatatgctggtgtcattatcaaataagatgcttcgagaaaggtccaggggtcccttgttccctcccatgaaccctccactcctgaaccctgaaggcctgctccctcctggagcccacctccccgcctcactgtacctgaggaacttgttgaggtccccatgcttcatgtactcaaagaccatgatgagggggtcgccctccacgcagacgccatagaacttgacgatgtgctcatgctggaggttggtcaggagctcggcctcacggtggaagtccttgcgtgcattgtcactggcatccttcagggt

SEQ ID NO: 14531 - DNA, 254 bp, Homo sapiens
  MAP TO CHR22_32.0; EXPRESSED IN LUNG, SIGNAL = 1.6; EXPRESSED IN BRAIN, SIGNAL = 2.2; EXPRESSED IN PLACENTA, SIGNAL = 2.3; EXPRESSED IN BONE MARROW, SIGNAL = 2.3; EXPRESSED IN ADULT LIVER, SIGNAL =   1; EXPRESSED IN HELA, SIGNAL = 2.7; EXPRESSED IN FETAL LIVER, SIGNAL = 1.9; EXPRESSED IN HEART, SIGNAL = 2.4; EST_HUMAN HIT: BE182713.1, EVALUE 5.30e+00
tccccgttccaggctgccttgcagaacccgctgcagcagcttctccaccacccacagcagcttctccaccacccacagcagcttctccaccgcccgcagcagcttctccacccgcagcagcttctccaccgcccgcagcagcttctccacccgcagcagcttatccaccgcccgcagcagcttctccaccacccgcagcagcttctccaccgcccgcagctcctcacgcaggcctccagggcattccgaggcct

SEQ ID NO: 14532 - DNA, 65 bp, Homo sapiens
  MAP TO CHR22_226.0; EXPRESSED IN HELA, SIGNAL =   3; EXPRESSED IN FETAL LIVER, SIGNAL = 1.2; EXPRESSED IN HEART, SIGNAL = 1.4; EXPRESSED IN PLACENTA, SIGNAL = 1.1; EXPRESSED IN LUNG, SIGNAL = 1.1; EXPRESSED IN BONE MARROW, SIGNAL = 1.6; EXPRESSED IN ADULT LIVER, SIGNAL = 1.1; EXPRESSED IN BRAIN, SIGNAL = 1.5; EST_HUMAN HIT: BG420025.1, EVALUE 1.10e+00; NT HIT: Y17967.1, EVALUE 2.90e+00
tgcctgctgtcatctccctggacttcacgatgtacagggtcttggtgaaccctccctgcagccag

SEQ ID NO: 14533 - DNA, 123 bp, Homo sapiens
  MAP TO AC016709.4; EXPRESSED IN FETAL LIVER, SIGNAL = 0.96; EXPRESSED IN BONE MARROW, SIGNAL = 1.1; EXPRESSED IN HELA, SIGNAL = 0.61; EXPRESSED IN BRAIN, SIGNAL = 1.2; EXPRESSED IN HEART, SIGNAL = 1.2; EXPRESSED IN PLACENTA, SIGNAL = 1.2; EXPRESSED IN LUNG, SIGNAL = 1.1; EXPRESSED IN ADULT LIVER, SIGNAL = 1.2; SWISSPROT HIT: O41033, EVALUE 9.10e-01; EST_HUMAN HIT: BI089681.1, EVALUE 2.00e-04
atgcctctgagtcagcaggataagggggaagtaatggtgtttgctggagtgattgatctagaatatcaagtgaatcttggattgctacttcataatgaaggcaagaaagattatatctttctt

SEQ ID NO: 14534 - DNA, 155 bp, Homo sapiens
  MAP TO CHR22_83.0; EXPRESSED IN HELA, SIGNAL = 2.9; EXPRESSED IN BRAIN, SIGNAL = 1.3; EXPRESSED IN FETAL LIVER, SIGNAL = 2.5; EXPRESSED IN BONE MARROW, SIGNAL = 0.98; EXPRESSED IN PLACENTA, SIGNAL = 2.2; EXPRESSED IN LUNG, SIGNAL = 1.3; EXPRESSED IN ADULT LIVER, SIGNAL = 2.7; NT HIT: gi14778734, EVALUE 5.00e-66; EST_HUMAN HIT: BG029591.1, EVALUE 7.00e-66; SWISSPROT HIT: Q9UJY5, EVALUE 1.00e-18
atcaaaggcctccccactgtgtccctgaagtatctgggctctcggacatcggagaaggtgaagaacaagatcttggagctcctctacagctggacagtgggcctgcccgaggaggtgaaaatcgcagaggcctaccagatgctaaagaagcaggg

SEQ ID NO: 14535 - DNA, 84 bp, Homo sapiens
  MAP TO AC021311.4; EXPRESSED IN BRAIN, SIGNAL = 0.38; EXPRESSED IN PLACENTA, SIGNAL = 0.42; EXPRESSED IN BONE MARROW, SIGNAL = 0.48; NT HIT: S75433.1, EVALUE 1.70e-02; EST_HUMAN HIT: BF110649.1, EVALUE 3.70e-01
gttgctttcaatcacactgtatctattaccatatcaatcatcactctaaatgaatacagtgttatcattgacaaagacatcatt

SEQ ID NO: 14536 - DNA, 185 bp, Homo sapiens
  MAP TO CHR22_129.0; EXPRESSED IN BRAIN, SIGNAL = 0.64; EXPRESSED IN LUNG, SIGNAL = 0.84; EXPRESSED IN FETAL LIVER, SIGNAL = 0.59; EXPRESSED IN BONE MARROW, SIGNAL = 0.59; SWISSPROT HIT: P33416, EVALUE 1.90e+00; NT HIT: AJ297257.1, EVALUE 3.00e-86; EST_HUMAN HIT: BF508896.1, EVALUE 1.00e-100
cagggtggctgggtcctcctcaccaatgatggcttccttcaggctggactcaacaggaaggatgttcttctccaccagctccatggggccaggcctctgtgcaatcttctcattgaggtcatcggctagtctggctctcttcagcttcagctgcttggcctggagggatggctcagccgaggtct

SEQ ID NO: 14537 - DNA, 96 bp, Homo sapiens
  MAP TO CHR22_147.0; EXPRESSED IN BONE MARROW, SIGNAL = 0.45; EXPRESSED IN PLACENTA, SIGNAL = 0.46; EXPRESSED IN ADULT LIVER, SIGNAL = 0.58; EXPRESSED IN HELA, SIGNAL = 1.6; EXPRESSED IN BRAIN, SIGNAL = 0.52; NT HIT: AP000061.1, EVALUE 3.00e-01
gttcacgcagcagcagcctcgactccagcctggacccactgcctctgaatgcccccctccctgcagccaatggctgcctttcctacctgatgcaag

SEQ ID NO: 14538 - DNA, 383 bp, Homo sapiens
  MAP TO CHR22_36.0; EXPRESSED IN BONE MARROW, SIGNAL = 3.8; EXPRESSED IN BRAIN, SIGNAL = 2.6; EXPRESSED IN FETAL LIVER, SIGNAL = 3.2; EXPRESSED IN PLACENTA, SIGNAL = 1.8; EXPRESSED IN LUNG, SIGNAL = 2.7; EXPRESSED IN ADULT LIVER, SIGNAL = 1.9; SWISSPROT HIT: Q9Y3U8, EVALUE 2.00e-29; EST_HUMAN HIT: BF213628.1, EVALUE 1.00e-63; NT HIT: gi16117795, EVALUE 2.00e-61
ttttattatgaacagagggcagggcaaggcagggggctcagtccttggcagcggctttcctcatggtggccaggacattgcgcagctcctcctacttcctcttggtgcggatgtgtgttcccacctttttcttgatgaacttgaaggcccttttgtccttggagaccttgagctactccatgggatgctgcccatacagggtgaagccacacacctctcagatcatatcccgcatgaacttggtgtgtttggtcaggcacctgcgatggcagctgggcctgggcttgctcacattcttggtcaccttgtggcccttgttgaggcccatggctgtaggataaagcagaaccatggctgctgctctccagtgacagccaaggcct

SEQ ID NO: 14539 - DNA, 312 bp, Homo sapiens
  MAP TO CHR21_72.0; EXPRESSED IN BONE MARROW, SIGNAL = 1.5; EXPRESSED IN BRAIN, SIGNAL = 1.4; EXPRESSED IN HELA, SIGNAL = 3.6; EXPRESSED IN FETAL LIVER, SIGNAL = 1.3; EXPRESSED IN LUNG, SIGNAL = 0.76; EXPRESSED IN PLACENTA, SIGNAL = 0.71; EXPRESSED IN ADULT LIVER, SIGNAL = 0.86; SWISSPROT HIT: P19661, EVALUE 1.00e-04; EST_HUMAN HIT: BF797491.1, EVALUE 2.70e-02; NT HIT: AB001523.1, EVALUE 0.00e+00
cagcccacatgctacccgatgaggaagccggggaccagaccaaggacactgaccatgcccaagccggggaccagaccaaggacactgaccatgcccaagccagggaccagaccaaggacactgaccatgcccaagccgtccagctagttcagagtcaagtggaaataaccagggcgggagcacagagagccacatcccagtggctccagatcctggtgtcggacagctgggtgcttggggaactgccgttcattcacagggctttgcggctgagctcagaacttgatcttgactttgatgggtggaaggaat

SEQ ID NO: 14540 - DNA, 155 bp, Homo sapiens
  MAP TO AC021609.3; EXPRESSED IN FETAL LIVER, SIGNAL = 2.9; EXPRESSED IN PLACENTA, SIGNAL = 2.8; EXPRESSED IN LUNG, SIGNAL = 2.6; EXPRESSED IN ADULT LIVER, SIGNAL = 2.4; EXPRESSED IN BONE MARROW, SIGNAL = 3.3; EXPRESSED IN HELA, SIGNAL = 1.8; EXPRESSED IN BRAIN, SIGNAL = 2.8; EXPRESSED IN HEART, SIGNAL = 2.1; SWISSPROT HIT: P31276, EVALUE 1.50e+00; EST_HUMAN HIT: BG705051.1, EVALUE 7.00e-69; NT HIT: gi6755936, EVALUE 2.10e+00
tcgttcttcctgtagaagtcagcctgcacatggttggcacggccaaagtcccggtttaggggctcaatgggctgattgatgcgcttcccatagacagaagacgtcagcactccaaccggcctctcctgttcctggtgaaagttatcaaagcacat

SEQ ID NO: 14541 - DNA, 193 bp, Homo sapiens
  MAP TO CHR21_61.0; EXPRESSED IN BONE MARROW, SIGNAL = 2.1; EXPRESSED IN BRAIN, SIGNAL = 1.6; EXPRESSED IN HEART, SIGNAL = 1.2; EXPRESSED IN PLACENTA, SIGNAL = 1.2; EXPRESSED IN LUNG, SIGNAL = 1.6; EXPRESSED IN ADULT LIVER, SIGNAL = 1.1; EST_HUMAN HIT: AL553896.1, EVALUE 1.00e-104; SWISSPROT HIT: P20591, EVALUE 7.00e-30; NT HIT: gi14780510, EVALUE 1.00e-104
gtggctgagaacaacctgtgcagccagtatgaggagaaggtgcgcccctgcatcgacctcattgactccctgcgggctctaggtgtggagcaggacctggccctgccagccatcgccgtcatcggggaccagagctcgggcaagagctccgtgttggaggcactgtcaggagttgcccttcccagaggcagcg

SEQ ID NO: 14542 - DNA, 280 bp, Homo sapiens
  MAP TO AC017013.4; EXPRESSED IN BONE MARROW, SIGNAL = 2.7; EXPRESSED IN HEART, SIGNAL = 2.5; EXPRESSED IN ADULT LIVER, SIGNAL = 2.4; EXPRESSED IN HELA, SIGNAL = 2.2; EXPRESSED IN BRAIN, SIGNAL = 2.3; EXPRESSED IN PLACENTA, SIGNAL = 2.8; EXPRESSED IN LUNG, SIGNAL = 2.6; EXPRESSED IN FETAL LIVER, SIGNAL = 2.2
aagaagaaaaagaaggagaaggagaaggagaaagagagcaagagaagaagaagaaggagaaggaggagaaggaggagaaggaggagaagcaggagaaggaggagaaggaggagaagaaaaagaagaagaagaaaagaagaagaagaagaagagaagaagaagaagaaaagaagaagaagaaaagaagaagaagaagaagaaaagaagaagaaaaaaagaagaagaagaagaagaggaagaagaagaagaagaagaagaagaagaaaagagcttggagaga

SEQ ID NO: 14543 - DNA, 160 bp, Homo sapiens
  MAP TO AL133330.5; EXPRESSED IN LUNG, SIGNAL = 1.1; EXPRESSED IN BONE MARROW, SIGNAL = 0.82; EXPRESSED IN BRAIN, SIGNAL = 1.1; EXPRESSED IN FETAL LIVER, SIGNAL = 0.93; SWISSPROT HIT: O02491, EVALUE 5.80e+00; NT HIT: AF023249.1, EVALUE 1.40e-01; EST_HUMAN HIT: BF700788.1, EVALUE 3.00e-03
atgctggtgtccatgtgatatggttggggtaaaggccaaactgggagagaggaggcatgacttcttccagcttggtcacaaagaagtggtgattggtaacgctaaggatgaaaatagtgataatgaggatgatgatgaggatgatggtggtaactatcac

SEQ ID NO: 14544 - DNA, 139 bp, Homo sapiens
  MAP TO CHR22_226.0; EXPRESSED IN BONE MARROW, SIGNAL = 3.8; EXPRESSED IN PLACENTA, SIGNAL = 4.2; EXPRESSED IN BRAIN, SIGNAL = 2.9; EXPRESSED IN ADULT LIVER, SIGNAL = 4.8; EXPRESSED IN LUNG, SIGNAL = 3.8; EXPRESSED IN FETAL LIVER, SIGNAL = 3.2; EST_HUMAN HIT: BI915267.1, EVALUE 4.00e-27; SWISSPROT HIT: O15442, EVALUE 2.00e-07; NT HIT: gi4502496, EVALUE 3.00e-27
agcacacagccgtcagcttgtccagaagccacagcacggctgagagaggggcgggcaggaggaagctgcatgaactcctggtcaaaggtcagctcgtggttgcccgcgatcacgatcttgtactcatagggcaggctgc

SEQ ID NO: 14545 - DNA, 93 bp, Homo sapiens
  MAP TO AL135926.3; EXPRESSED IN HEART, SIGNAL = 2.7; EXPRESSED IN PLACENTA, SIGNAL = 3.5; EXPRESSED IN HELA, SIGNAL = 1.5; EXPRESSED IN BRAIN, SIGNAL = 2.5; EXPRESSED IN LUNG, SIGNAL = 3.3; EXPRESSED IN ADULT LIVER, SIGNAL = 3.9; EXPRESSED IN FETAL LIVER, SIGNAL = 3.2; EXPRESSED IN BONE MARROW, SIGNAL = 2.8; EST_HUMAN HIT: BI006050.1, EVALUE 1.10e-01; SWISSPROT HIT: Q23670, EVALUE 6.20e+00; NT HIT: L44140.1, EVALUE 7.30e-02
ccaggtcacagggaaggtaggggacaggtgctcatggggctccctgccctgctttgccagtgccttgggctccttgatctgcttcctcaggga

SEQ ID NO: 14546 - DNA, 219 bp, Homo sapiens
  MAP TO CHR21_72.0; EXPRESSED IN PLACENTA, SIGNAL = 0.99; EXPRESSED IN BONE MARROW, SIGNAL = 1.9; EXPRESSED IN ADULT LIVER, SIGNAL = 1.4; EXPRESSED IN HELA, SIGNAL = 4.1; EXPRESSED IN BRAIN, SIGNAL = 1.5; EXPRESSED IN FETAL LIVER, SIGNAL = 1.7; EXPRESSED IN LUNG, SIGNAL = 1.1; SWISSPROT HIT: Q9NRZ7, EVALUE 2.00e-33; EST_HUMAN HIT: AI366140.1, EVALUE 1.00e-120; NT HIT: gi14780654, EVALUE 1.00e-108
gacgcgctccaggagatatataatcagaagggcatgtttccaggggagcagtttaagcctgcccggaggccgtggaccctcctgaacttcctgtcctgggccaccattctcctgtctcccctcttcagttttgtcttgggcgtctttgccagcggatcacctctcctgatcctgactttcttggggtttgtgggagcaggtaatggacactgtcgctaa

SEQ ID NO: 14547 - DNA, 113 bp, Homo sapiens
  MAP TO AC015855.4; EXPRESSED IN HEART, SIGNAL = 3.4; EXPRESSED IN PLACENTA, SIGNAL = 4.1; EXPRESSED IN LUNG, SIGNAL = 3.6; EXPRESSED IN HELA, SIGNAL = 2.4; EXPRESSED IN FETAL LIVER, SIGNAL = 3.8; EXPRESSED IN ADULT LIVER, SIGNAL = 4.1; EXPRESSED IN BONE MARROW, SIGNAL = 3.9; EXPRESSED IN BRAIN, SIGNAL = 3.4; SWISSPROT HIT: P35519, EVALUE 2.10e+00; EST_HUMAN HIT: BE741113.1, EVALUE 5.40e-01; NT HIT: gi12746425, EVALUE 3.70e-01
atggctgctggggacgggagcagctctgttggagagagggtgggtgctacctgggcactccgtcacctgtggaatggtggcaatagcaccgtcggcttccaaggcaagggagg

SEQ ID NO: 14548 - DNA, 130 bp, Homo sapiens
  MAP TO AL139022.1; EXPRESSED IN BRAIN, SIGNAL = 6.7; EXPRESSED IN FETAL LIVER, SIGNAL = 8.6; EXPRESSED IN HEART, SIGNAL = 6.3; EXPRESSED IN LUNG, SIGNAL =   9; EXPRESSED IN ADULT LIVER, SIGNAL =  10; EXPRESSED IN HELA, SIGNAL = 4.4; EXPRESSED IN PLACENTA, SIGNAL = 9.4; EXPRESSED IN BONE MARROW, SIGNAL = 8.5; SWISSPROT HIT: P49356, EVALUE 3.00e-20; EST_HUMAN HIT: BG325222.1, EVALUE 4.00e-67; NT HIT: gi14752277, EVALUE 3.00e-67
taataagctcttcaagttcaaggaacgttccctcttgaggattaccagcgcggccaggccacagaaggtatagccaccatgggcttccatccctggtaccccgccaatgccaccttcccagttctgacac

SEQ ID NO: 14549 - DNA, 77 bp, Homo sapiens
  MAP TO AC011266.3; EXPRESSED IN PLACENTA, SIGNAL = 0.8; EXPRESSED IN LUNG, SIGNAL = 0.67; EXPRESSED IN BRAIN, SIGNAL = 0.74; EXPRESSED IN ADULT LIVER, SIGNAL = 0.78; EXPRESSED IN FETAL LIVER, SIGNAL = 0.79; EXPRESSED IN BONE MARROW, SIGNAL = 0.89; NT HIT: AJ400904.1, EVALUE 2.30e-01
ccatgagtgatgaaagacagataccaacaaatgaaattagactctctctgactatcctcagatcagaaactcttgag

SEQ ID NO: 14550 - DNA, 491 bp, Homo sapiens
  MAP TO CHR22_16.0; EXPRESSED IN PLACENTA, SIGNAL = 0.9; EXPRESSED IN BRAIN, SIGNAL = 0.72; EXPRESSED IN ADULT LIVER, SIGNAL = 0.58; EXPRESSED IN FETAL LIVER, SIGNAL = 0.59; EXPRESSED IN BONE MARROW, SIGNAL = 0.72; NT HIT: Y18890.1, EVALUE 1.00e-50; EST_HUMAN HIT: BG433460.1, EVALUE 0.00e+00; SWISSPROT HIT: P10264, EVALUE 1.00e-62
atcacgtagtggacagggtggtgcactgcatgcagtcattgatgaagccagaaaacagggcgatcttgaggcatggcggttcctggtaattttacaactggtacaggccggggaagagactcaagtaggagcgcctgcccgagctgagactagatgtgaacctttcaccatgaaaatgttaaaagatataaaggaaggagttaaacaatatggatccaactccccttatataagaacattattagattccattgctcatggaaatagacttactccttatgactgggaaattttggccaaatcttccctttcatcctctcagtatctacagtttaaaacctggtggattgatggagtacaagaacaggtacgaaaaaatcaggctactaagcccactgttaatatagacgcagaccaattgttaggaacaggtccaaattggagcaccattaaccaacaatcagtgatgcagaatgaggctattgaacaag

SEQ ID NO: 14551 - DNA, 105 bp, Homo sapiens
  MAP TO CHR22_210.0; EXPRESSED IN HEART, SIGNAL = 3.8; EXPRESSED IN PLACENTA, SIGNAL = 4.5; EXPRESSED IN LUNG, SIGNAL =   5; EXPRESSED IN HELA, SIGNAL = 5.1; EXPRESSED IN BRAIN, SIGNAL = 4.9; EXPRESSED IN ADULT LIVER, SIGNAL = 4.2; EXPRESSED IN FETAL LIVER, SIGNAL = 4.2; NT HIT: AF167342.1, EVALUE 5.20e+00; EST_HUMAN HIT: BI023578.1, EVALUE 1.30e-01
aggatggcagtcaggattgttatgttaactgtcttctgtactctcttgtttatacagaagagaattaacacagcaatcctggctgccatcctgtactctcctccc

SEQ ID NO: 14552 - DNA, 126 bp, Homo sapiens
  MAP TO CHR22_20.0; EXPRESSED IN HELA, SIGNAL = 1.2; EXPRESSED IN ADULT LIVER, SIGNAL = 0.7; EXPRESSED IN BRAIN, SIGNAL = 1.6; EXPRESSED IN FETAL LIVER, SIGNAL = 1.4; EXPRESSED IN BONE MARROW, SIGNAL = 1.6; EXPRESSED IN HEART, SIGNAL = 1.8; EXPRESSED IN PLACENTA, SIGNAL = 1.6; EXPRESSED IN LUNG, SIGNAL = 1.2; NT HIT: gi14778537, EVALUE 6.00e-65; SWISSPROT HIT: O95236, EVALUE 3.00e-12; EST_HUMAN HIT: BE799699.1, EVALUE 9.00e-65
tgggcaattcagccacacgcacaaatctcttccaggcttcatcgctagtcagcaggattttcagatgcactgggctaactttcttctggaagtattcaatgacttcttcagtgaagcgtttctttt

SEQ ID NO: 14553 - DNA, 189 bp, Homo sapiens
  MAP TO CHR21_6.0; EXPRESSED IN BONE MARROW, SIGNAL = 1.7; EXPRESSED IN BRAIN, SIGNAL = 1.7; EXPRESSED IN HEART, SIGNAL = 1.2; EXPRESSED IN LUNG, SIGNAL = 0.88; EXPRESSED IN HELA, SIGNAL = 3.7; EXPRESSED IN FETAL LIVER, SIGNAL = 1.6; EXPRESSED IN PLACENTA, SIGNAL = 0.87; SWISSPROT HIT: Q9ZDC0, EVALUE 3.30e+00; EST_HUMAN HIT: BE062167.1, EVALUE 1.00e-67; NT HIT: AL163227.2, EVALUE 9.00e-62
gctgaagtggtctcagatggagatgaggaatgtgttgggaactggaacaaaggtgacacttgttatgttgtagcgaagagactggcagcattttgcccctgccctagagatttgtggaactttgaacttgagagagatgatttagggtatctggcagaagaaatttctaagcagcaaaggattcaagag

SEQ ID NO: 14554 - DNA, 255 bp, Homo sapiens
  MAP TO CHR21_61.0; EXPRESSED IN BONE MARROW, SIGNAL = 1.7; EXPRESSED IN BRAIN, SIGNAL = 1.5; EXPRESSED IN HELA, SIGNAL = 2.8; EXPRESSED IN FETAL LIVER, SIGNAL = 1.6; EXPRESSED IN LUNG, SIGNAL = 1.1; EXPRESSED IN PLACENTA, SIGNAL = 0.92; EXPRESSED IN ADULT LIVER, SIGNAL = 1.1; SWISSPROT HIT: P20592, EVALUE 1.00e-43; EST_HUMAN HIT: AL551630.1, EVALUE 0.00e+00; NT HIT: gi15320233, EVALUE 0.00e+00
agcacgattgaagacataaaagtgaaacacacagcaaaggcagaaaacatgatccaacttcagttcagaatggagcagatggttttttgtcaagatcagatttacagtgttgttctgaagaaagtccgagaagagatttttaaccctctggggacgccttcacagaatatgaagttgaactctcattttcccagtaatgagtcttcggtttcctcctttactgaaataggcatccacctgaatgcctacttcttg

SEQ ID NO: 14555 - DNA, 138 bp, Homo sapiens
  MAP TO AL138758.3; EXPRESSED IN HEART, SIGNAL = 1.5; EXPRESSED IN PLACENTA, SIGNAL = 1.8; EXPRESSED IN LUNG, SIGNAL = 1.6; EXPRESSED IN BONE MARROW, SIGNAL = 1.5; EXPRESSED IN ADULT LIVER, SIGNAL = 1.8; EXPRESSED IN HELA, SIGNAL = 1.1; EXPRESSED IN BRAIN, SIGNAL = 1.3; EXPRESSED IN FETAL LIVER, SIGNAL = 1.6; NT HIT: AF346902.1, EVALUE 1.20e-01; SWISSPROT HIT: O88410, EVALUE 1.50e+00
cccaattctgtgtctccccattcattggctgtctccccatccaatcattctgacaaacctcattgccaggatgatttttccaaagcaattctgtcatatcatttgcaatcgagaagttccaatgactccctattgctg

SEQ ID NO: 14556 - DNA, 72 bp, Homo sapiens
  MAP TO CHR21_63.0; EXPRESSED IN BONE MARROW, SIGNAL = 2.4; EXPRESSED IN BRAIN, SIGNAL = 1.9; EXPRESSED IN HEART, SIGNAL = 1.9; EXPRESSED IN LUNG, SIGNAL = 1.2; EXPRESSED IN HELA, SIGNAL = 3.9; EXPRESSED IN PLACENTA, SIGNAL = 1.1; EXPRESSED IN FETAL LIVER, SIGNAL = 1.9; EXPRESSED IN ADULT LIVER, SIGNAL = 1.2; NT HIT: AF080592.1, EVALUE 2.10e-01; EST_HUMAN HIT: AW847566.1, EVALUE 4.80e+00
tgaattctaatcctaaatgtaccattgtcctgatcacctccaaaataggaaaaaatgctgccaatgacaatt

SEQ ID NO: 14557 - DNA, 72 bp, Homo sapiens
  MAP TO CHR21_5.0; EXPRESSED IN HELA, SIGNAL = 3.7; EXPRESSED IN BRAIN, SIGNAL = 1.5; EXPRESSED IN HEART, SIGNAL = 1.2; EXPRESSED IN LUNG, SIGNAL =   1; EXPRESSED IN FETAL LIVER, SIGNAL = 1.4; EXPRESSED IN ADULT LIVER, SIGNAL = 0.99; EXPRESSED IN BONE MARROW, SIGNAL = 1.6; EST_HUMAN HIT: T09183.1, EVALUE 1.20e+00
ttgcagacatcactgagttcacatatgaagagaaaaagagccaagtttcggagaccacagcctgtctttaac

SEQ ID NO: 14558 - DNA, 279 bp, Homo sapiens
  MAP TO CHR22_97.0; EXPRESSED IN FETAL LIVER, SIGNAL = 0.4; EXPRESSED IN LUNG, SIGNAL = 0.47; EXPRESSED IN BONE MARROW, SIGNAL = 0.44; EXPRESSED IN PLACENTA, SIGNAL = 0.36; EXPRESSED IN ADULT LIVER, SIGNAL = 0.4; EXPRESSED IN HELA, SIGNAL =   1; EXPRESSED IN BRAIN, SIGNAL = 0.4; NT HIT: AE001325.1, EVALUE 2.60e-01; SWISSPROT HIT: P75157, EVALUE 6.90e+00; EST_HUMAN HIT: BG476842.1, EVALUE 0.00e+00
ctgttgcattttaggccaatgttcattatacgtacttttattatgtaaccttccaaacttaggaagcttatacttcttctctgaagcagaaatatccggtgtgggggcagaagtgcacgctgtcagtgagttacttgaaccaagttgtcttttagaaaacaatatagagtgggaggtacgctgtctagtccgacatgccacttccctctctttacacagcaatggttcatccatcagcaatgtgatgacttgcttagatttttcccggatataataacc

SEQ ID NO: 14559 - DNA, 105 bp, Homo sapiens
  MAP TO AL139227.1; EXPRESSED IN LUNG, SIGNAL = 0.78; EXPRESSED IN FETAL LIVER, SIGNAL = 0.55; EXPRESSED IN BRAIN, SIGNAL = 0.58; EXPRESSED IN ADULT LIVER, SIGNAL = 0.85; NT HIT: gi6756066, EVALUE 2.00e-24; SWISSPROT HIT: Q61967, EVALUE 1.00e-14; EST_HUMAN HIT: BF364179.1, EVALUE 2.00e-52
caagggaggagctgcgctggaaggctttcccacagagactacactgatagggtttctctccggtatgagcattctcatgctgaccaagagatgagctatgcctga

SEQ ID NO: 14560 - DNA, 75 bp, Homo sapiens
  MAP TO AC018671.5; EXPRESSED IN BRAIN, SIGNAL = 1.2; EXPRESSED IN HEART, SIGNAL = 1.2; EXPRESSED IN LUNG, SIGNAL = 1.1; EXPRESSED IN ADULT LIVER, SIGNAL = 1.1; EXPRESSED IN PLACENTA, SIGNAL = 1.5; EXPRESSED IN FETAL LIVER, SIGNAL = 1.2; EXPRESSED IN BONE MARROW, SIGNAL = 1.2; EST_HUMAN HIT: BI832308.1, EVALUE 1.00e-34; NT HIT: AY028460.1, EVALUE 4.00e-15; SWISSPROT HIT: P40358, EVALUE 2.10e+00
atggcggttgagcagatgccaaaaaaggattggtacagcatcctgggagcagacccatctgcaaatatatcagac

SEQ ID NO: 14561 - DNA, 112 bp, Homo sapiens
  MAP TO CHR22_236.0; EXPRESSED IN PLACENTA, SIGNAL = 0.92; EXPRESSED IN LUNG, SIGNAL = 0.99; EXPRESSED IN HELA, SIGNAL = 3.9; EXPRESSED IN BRAIN, SIGNAL = 1.6; EXPRESSED IN HEART, SIGNAL = 1.3; EXPRESSED IN ADULT LIVER, SIGNAL = 0.99; EXPRESSED IN FETAL LIVER, SIGNAL = 1.4; EXPRESSED IN BONE MARROW, SIGNAL = 1.5; EST_HUMAN HIT: BE501066.1, EVALUE 1.00e-20; NT HIT: L44140.1, EVALUE 2.00e-09
agtgcttgcagctgcagcgtttaccccgagataagtttgccatgaaatctctcgttttcatgatgacttctgcattgctcgagtatatcgactttggaaacaaaagacctcg

SEQ ID NO: 14562 - DNA, 79 bp, Homo sapiens
  MAP TO AL138732.2; EXPRESSED IN BONE MARROW, SIGNAL = 0.78; EXPRESSED IN HELA, SIGNAL = 0.6; EXPRESSED IN BRAIN, SIGNAL = 0.84; EXPRESSED IN FETAL LIVER, SIGNAL = 0.89; EXPRESSED IN PLACENTA, SIGNAL =   1; EXPRESSED IN LUNG, SIGNAL = 0.98; EXPRESSED IN ADULT LIVER, SIGNAL = 1.1; EST_HUMAN HIT: BG562415.1, EVALUE 3.50e-01; NT HIT: Z68128.1, EVALUE 2.40e-01
gaaaatttgggaaatgcctggatggaccaagaaggcagtcatgctgttagaaataagcaaactcctttcctcctttcag

SEQ ID NO: 14563 - DNA, 225 bp, Homo sapiens
  MAP TO AC013341.3; EXPRESSED IN FETAL LIVER, SIGNAL = 0.42; EXPRESSED IN BONE MARROW, SIGNAL = 0.46; EXPRESSED IN BRAIN, SIGNAL = 0.47; EXPRESSED IN ADULT LIVER, SIGNAL = 0.48; EST_HUMAN HIT: AI138337.1, EVALUE 1.20e+00
ctagacatctgggtagtgactcaagatataagagtcagcaggtctgatcctcatcaccataaagtcagtcctaacattttcagtgcttccaaaggcacaacctggatgaaaagtcttttctgcttcttgccaccccacagtccatgcagattccacaatgtcaactttaccttgatcatgctcatagaaaatgtcaggtattacaatgctagcggaaaactccat

SEQ ID NO: 14564 - DNA, 225 bp, Homo sapiens
  MAP TO CHR21_65.0; EXPRESSED IN BRAIN, SIGNAL = 1.5; EXPRESSED IN PLACENTA, SIGNAL = 1.1; EXPRESSED IN LUNG, SIGNAL = 2.1; EXPRESSED IN HELA, SIGNAL = 3.8; EXPRESSED IN ADULT LIVER, SIGNAL = 1.3; EXPRESSED IN FETAL LIVER, SIGNAL = 1.6; EXPRESSED IN BONE MARROW, SIGNAL = 1.7; EXPRESSED IN HEART, SIGNAL = 1.5; SWISSPROT HIT: P45844, EVALUE 3.00e-38; EST_HUMAN HIT: BG283492.1, EVALUE 1.00e-109; NT HIT: gi14780535, EVALUE 1.00e-124
tatgggttcgaaggggtcatcctctccatctatggcttagaccgggaagatctgcactgtgacatcgacgagacgtgccacttccagaagtcggaggccatcctgcgggagctggacgtggaaaatgccaagctgtacctggacttcatcgtactcgggattttcttcatctccctccgcctcattgcctattttgtcctcaggtacaaaatccgggcagagagg

SEQ ID NO: 14565 - DNA, 76 bp, Homo sapiens
  MAP TO AL137025.2; EXPRESSED IN BONE MARROW, SIGNAL = 2.8; EXPRESSED IN BRAIN, SIGNAL = 2.2; EXPRESSED IN HELA, SIGNAL = 2.2; EXPRESSED IN HEART, SIGNAL = 2.3; EXPRESSED IN PLACENTA, SIGNAL =   3; EXPRESSED IN LUNG, SIGNAL = 2.9; EXPRESSED IN ADULT LIVER, SIGNAL = 3.2; EXPRESSED IN FETAL LIVER, SIGNAL = 2.9; NT HIT: AL163283.2, EVALUE 2.00e-05; EST_HUMAN HIT: N47320.1, EVALUE 8.30e-02
aatggaagtggatcatcacaaaggtccttgtcatctttacattgagtacgcggaggaagagaaggggttggtcttg

SEQ ID NO: 14566 - DNA, 117 bp, Homo sapiens
  MAP TO AL137017.4; EXPRESSED IN FETAL LIVER, SIGNAL =   1; EXPRESSED IN ADULT LIVER, SIGNAL = 1.1; EXPRESSED IN BRAIN, SIGNAL = 0.93; EXPRESSED IN PLACENTA, SIGNAL = 1.1; EXPRESSED IN HELA, SIGNAL = 0.78; EXPRESSED IN LUNG, SIGNAL =   1; NT HIT: X04500.1, EVALUE 3.80e-01; SWISSPROT HIT: P38502, EVALUE 7.90e+00
gagactccactcaccaccaagtgtggccagaccatggctattctgtctgtgttcctgttgatttgtagaagaaagatggtagtacaaaagttttccctgccctgtgggataagatcc

SEQ ID NO: 14567 - DNA, 247 bp, Homo sapiens
  MAP TO AC011585.3; EXPRESSED IN FETAL LIVER, SIGNAL = 0.89; EXPRESSED IN LUNG, SIGNAL = 0.74; EXPRESSED IN PLACENTA, SIGNAL = 0.78; EXPRESSED IN BONE MARROW, SIGNAL = 0.79; EXPRESSED IN BRAIN, SIGNAL = 0.73; SWISSPROT HIT: P06400, EVALUE 2.40e+00; NT HIT: gi15828471, EVALUE 5.70e-02; EST_HUMAN HIT: BG189619.1, EVALUE 5.20e+00
atgaatcaaaacaagataaatgagcaagaaaatgattctcatcaaattcacaacttcaagaggtcgatgaaatccctggaacttcacattcttcagtacatgaagatttaattagtgctcagagcaatgagaatgaaaaagaggattgttcataaccaattcacaactcaggagtgcaactccggcttgccctttagaaggggaagaaatatccgccttgaaggcagcaacctggatgagaaagagc

SEQ ID NO: 14568 - DNA, 317 bp, Homo sapiens
  MAP TO AC009802.13; EXPRESSED IN BONE MARROW, SIGNAL = 0.84; EXPRESSED IN PLACENTA, SIGNAL = 0.86; EXPRESSED IN BRAIN, SIGNAL = 0.5; EXPRESSED IN ADULT LIVER, SIGNAL = 0.33; EXPRESSED IN HELA, SIGNAL = 1.1; SWISSPROT HIT: P05120, EVALUE 2.00e-42; NT HIT: M24657.1, EVALUE 0.00e+00; EST_HUMAN HIT: BF666685.1, EVALUE 0.00e+00
tgtgggcctccatgtccagttctccctgtcataacacctcctgtgccagcggctgcttcagtgccctcctcattcacatccaccatggcttggtggaacacttcagaaagaaacaggtcattcctctccgacatccctgagaaattggcccgtcccttgttgaaggcgtcctccatgcccatgcttctcagaatggatctgagttcataatgctcttctaatttgaactggggtatgtatacctcaacttcatcttcagccattttgtctttgctggtccacttgttgagtttgtcataggttatttcactttccag

SEQ ID NO: 14569 - DNA, 115 bp, Homo sapiens
  MAP TO AL136537.3; EXPRESSED IN FETAL LIVER, SIGNAL = 0.43; EXPRESSED IN BONE MARROW, SIGNAL = 0.43; EXPRESSED IN BRAIN, SIGNAL = 0.38; EST_HUMAN HIT: AA678832.1, EVALUE 5.50e-01; NT HIT: gi14769955, EVALUE 9.50e-02; SWISSPROT HIT: P33066, EVALUE 7.90e+00
aattgttatgaagattaaaccaattgatacatataaagtgctgatcacagtgagaacctatgacattgatgaagagaggctaagggacctgcccgaaaacccacaatgcctatct

SEQ ID NO: 14570 - DNA, 135 bp, Homo sapiens
  MAP TO AC011980.3; EXPRESSED IN FETAL LIVER, SIGNAL = 2.2; EXPRESSED IN BONE MARROW, SIGNAL = 2.2; EXPRESSED IN LUNG, SIGNAL = 1.8; EXPRESSED IN ADULT LIVER, SIGNAL = 1.8; EXPRESSED IN BRAIN, SIGNAL = 2.5; EXPRESSED IN HELA, SIGNAL = 2.1; EST_HUMAN HIT: AL134018.1, EVALUE 3.00e-03; NT HIT: gi11496970, EVALUE 2.00e-03
aggtcccagagaagctgcttctgcagcagcaccaataaatcactcattaactgtccgtggctgcctgcctccaagccgggctcctctgcagcctgagctccagtagcagccaggccagggccctccactgcagac

SEQ ID NO: 14571 - DNA, 178 bp, Homo sapiens
  MAP TO AL137007.4; EXPRESSED IN PLACENTA, SIGNAL = 0.98; EXPRESSED IN LUNG, SIGNAL = 0.98; EXPRESSED IN FETAL LIVER, SIGNAL = 0.58; EXPRESSED IN ADULT LIVER, SIGNAL = 1.1; EXPRESSED IN BONE MARROW, SIGNAL = 0.62; EXPRESSED IN BRAIN, SIGNAL = 0.58; EST_HUMAN HIT: BI047198.1, EVALUE 5.90e-02; SWISSPROT HIT: Q9NZ52, EVALUE 1.10e+00; NT HIT: AL163252.2, EVALUE 1.60e-01
atgcaggatttttctcagcccgtttggcagactcgtgggagaggtgccccatctacttggtctattatgctcaagcttttgggggagagagcacatatgccagcaagtgcaggacctggctggccactccagatgccgaaacaggagcaagctccacacgggcccccagcctgaccag

SEQ ID NO: 14572 - DNA, 119 bp, Homo sapiens
  MAP TO AL138996.1; EXPRESSED IN FETAL LIVER, SIGNAL = 1.8; EXPRESSED IN BONE MARROW, SIGNAL = 1.6; EXPRESSED IN HEART, SIGNAL = 1.9; EXPRESSED IN HELA, SIGNAL = 2.5; EXPRESSED IN BRAIN, SIGNAL = 1.8; EXPRESSED IN PLACENTA, SIGNAL = 1.7; SWISSPROT HIT: P31350, EVALUE 2.70e+00; NT HIT: U66884.1, EVALUE 1.50e+00; EST_HUMAN HIT: BF893672.1, EVALUE 5.80e-01
atgttgaggctgatgatttctcttatggaactataaaaggactggactctaaggaaatgagggtcttcaacttcattggtgatatttccagttgttctggagctgtgatagaaccagga

SEQ ID NO: 14573 - DNA, 91 bp, Homo sapiens
  MAP TO CHR21_66.0; EXPRESSED IN HELA, SIGNAL =   3; EXPRESSED IN FETAL LIVER, SIGNAL = 1.6; EXPRESSED IN LUNG, SIGNAL = 1.1; EXPRESSED IN BONE MARROW, SIGNAL = 1.6; EXPRESSED IN PLACENTA, SIGNAL = 0.97; EXPRESSED IN ADULT LIVER, SIGNAL = 1.1; EXPRESSED IN BRAIN, SIGNAL = 1.4; SWISSPROT HIT: P57057, EVALUE 2.00e-11; NT HIT: gi14780568, EVALUE 3.00e-44; EST_HUMAN HIT: BI912541.1, EVALUE 4.00e-44
ggcgtgatagagttctcactgtgtctgctgtttgccaagctggtcagctatactttcctcttctggctgcccctgtacatcacgaatgtgg

SEQ ID NO: 14574 - DNA, 159 bp, Homo sapiens
  MAP TO AL138748.1; EXPRESSED IN BRAIN, SIGNAL = 0.77; EXPRESSED IN HELA, SIGNAL = 0.59; EXPRESSED IN LUNG, SIGNAL = 1.2; EXPRESSED IN ADULT LIVER, SIGNAL = 1.4; EXPRESSED IN FETAL LIVER, SIGNAL = 0.93; EXPRESSED IN BONE MARROW, SIGNAL = 0.93; EXPRESSED IN PLACENTA, SIGNAL = 1.2; SWISSPROT HIT: P31316, EVALUE 4.40e+00; NT HIT: X89969.1, EVALUE 1.40e-01; EST_HUMAN HIT: BE173435.1, EVALUE 3.00e-03
attgcttgcagaagtgtgctggctgtgggtacgttcttctgtgttcacattttgcaaggagcggaggatggtgatgatgctgttgataacttactatgtgctaggcattgcttcaaatactttcatttctatgttacaggtaaagaaaatgagttttag

SEQ ID NO: 14575 - DNA, 157 bp, Homo sapiens
  MAP TO AC008432.2; EXPRESSED IN BONE MARROW, SIGNAL = 2.1; EXPRESSED IN BRAIN, SIGNAL = 1.8; EXPRESSED IN ADULT LIVER, SIGNAL = 2.3; EXPRESSED IN FETAL LIVER, SIGNAL = 1.6; EXPRESSED IN LUNG, SIGNAL = 2.7; SWISSPROT HIT: P12790, EVALUE 1.50e+00; NT HIT: AF212137.1, EVALUE 1.40e-01
aatgatacaagagttcttcattctctgcctgtctctgcagctttatctcccaacattcttcttcatattcaaggccagactgaataccaaggtctcccatctctggcctttggcaagctgtcttctcactgcccagaatgaccttaccctcactcat

SEQ ID NO: 14576 - DNA, 176 bp, Homo sapiens
  MAP TO AL137070.3; EXPRESSED IN PLACENTA, SIGNAL = 0.81; EXPRESSED IN LUNG, SIGNAL = 0.94; EXPRESSED IN ADULT LIVER, SIGNAL = 1.2; EXPRESSED IN BRAIN, SIGNAL = 0.55; EXPRESSED IN HELA, SIGNAL = 0.65; EXPRESSED IN FETAL LIVER, SIGNAL = 0.72; EST_HUMAN HIT: AA295848.1, EVALUE 7.00e-85; NT HIT: gi14720872, EVALUE 1.00e-94; SWISSPROT HIT: O14520, EVALUE 1.00e-24
gtggcatcatctacctggtcttcattggctccaccatcccacgggagcccctgaaattggaggactctgtggcgtatgaagaccacgggataaccgtattgcccaagatgggatctcatgaacccatgatctctcccctcaccctcatctccgtgagccttgccaacagatcttca

SEQ ID NO: 14577 - DNA, 112 bp, Homo sapiens
  MAP TO AC021252.3; EXPRESSED IN BONE MARROW, SIGNAL = 1.1; EXPRESSED IN LUNG, SIGNAL = 1.2; EXPRESSED IN PLACENTA, SIGNAL = 0.87; EXPRESSED IN BRAIN, SIGNAL = 0.69; EXPRESSED IN HELA, SIGNAL = 0.61; EST_HUMAN HIT: AV722352.1, EVALUE 2.00e-56; NT HIT: gi16159910, EVALUE 1.00e-56
ttggagcagtcttcacaagcaatattccctgtagtctccttgatggtgcgctcagagacgaatgctggatattcagtatcacaaggctccagggtctgtttcaatttctggg

SEQ ID NO: 14578 - DNA, 180 bp, Homo sapiens
  MAP TO AC021635.3; EXPRESSED IN LUNG, SIGNAL = 0.56; EXPRESSED IN BONE MARROW, SIGNAL = 0.53; EXPRESSED IN PLACENTA, SIGNAL = 0.64; EXPRESSED IN BRAIN, SIGNAL = 0.49; SWISSPROT HIT: O35182, EVALUE 2.20e-01
ctttctccttccgcacagcatctctccaggccccaccacagctcctgccttctccttcagagcctctggtacagccgtagcaaatgctggtggcaggcacacatccctctgtggcccacggtcaccaccgcctgtggttgctgggctttctccccaccctgcaggttccacagccatgcc

SEQ ID NO: 14579 - DNA, 75 bp, Homo sapiens
  MAP TO AC011225.5; EXPRESSED IN LUNG, SIGNAL = 1.4; EXPRESSED IN PLACENTA, SIGNAL = 1.2; EXPRESSED IN BONE MARROW, SIGNAL = 1.2; EXPRESSED IN BRAIN, SIGNAL =   1; EXPRESSED IN HELA, SIGNAL = 0.6; EXPRESSED IN FETAL LIVER, SIGNAL = 1.3; EST_HUMAN HIT: BG821180.1, EVALUE 1.30e+00; NT HIT: AL163213.2, EVALUE 8.80e-01
ctctctcattttcatatccttccgtctctcttcactgattatctcacaggtcccacgcacagcgagtagagcatg

SEQ ID NO: 14580 - DNA, 281 bp, Homo sapiens
  MAP TO CHR22_169.0; EXPRESSED IN LUNG, SIGNAL = 1.9; EXPRESSED IN ADULT LIVER, SIGNAL = 1.9; EXPRESSED IN BONE MARROW, SIGNAL = 1.7; EXPRESSED IN BRAIN, SIGNAL = 2.1; EXPRESSED IN FETAL LIVER, SIGNAL = 1.8; SWISSPROT HIT: P22855, EVALUE 1.40e+00; NT HIT: gi13376440, EVALUE 0.00e+00; EST_HUMAN HIT: BG421975.1, EVALUE 0.00e+00
ggagcccacaggttggggaagggcagagacctgctcaccggtggggaggtatctatagtagtagatgacaggatgaagaaagttagactgccaggcatcttctgtgtgccccacagaccggtcatcaaagaagacgtccttgtcggggccagagaaatttctgccatattccatgttgatgacgaagagcccgtgctttgccttcctccctgtgagtgtctccagctgggccagcatctgtatggggaactcctccaggtactcaaaggccgtggaattcc

SEQ ID NO: 14581 - DNA, 155 bp, Homo sapiens
  MAP TO AL136311.2; EXPRESSED IN PLACENTA, SIGNAL = 0.41; EXPRESSED IN BRAIN, SIGNAL = 0.55; EXPRESSED IN HELA, SIGNAL = 0.67; EXPRESSED IN FETAL LIVER, SIGNAL = 0.41; SWISSPROT HIT: Q9ULC3, EVALUE 3.00e-23; NT HIT: AF161486.1, EVALUE 4.00e-82; EST_HUMAN HIT: AW068195.1, EVALUE 3.00e-80
tgaatttgtcgctccaaaaaatcaactccaatggttttcttgtagtcttttgtaaaaatgcctttgcaatatcgctgaatcatacttgattttccaactgctccattccctacaaccaccatctttatggcgacttccatatcttcctccaacat

SEQ ID NO: 14582 - DNA, 173 bp, Homo sapiens
  MAP TO CHR22_117.0; EXPRESSED IN BONE MARROW, SIGNAL = 0.59; EXPRESSED IN BRAIN, SIGNAL = 0.73; EXPRESSED IN FETAL LIVER, SIGNAL = 0.52; SWISSPROT HIT: O15015, EVALUE 5.70e+00; NT HIT: AE005290.1, EVALUE 1.50e-01
accagaagcaaaccagagcccggccaatgctgccgaagtctcctacctcactgaaactcgcctggatatgtgcgtccacacaggggaacagacacagacatcagaagcacttgctgcatctgtcctcactgcagcccaagcaggaatggaaagtggcaaggttctcttttgaa

SEQ ID NO: 14583 - DNA, 162 bp, Homo sapiens
  MAP TO AC017082.3; EXPRESSED IN BONE MARROW, SIGNAL = 1.4; EXPRESSED IN ADULT LIVER, SIGNAL = 1.1; EXPRESSED IN LUNG, SIGNAL = 1.5; EXPRESSED IN BRAIN, SIGNAL = 1.4; EXPRESSED IN FETAL LIVER, SIGNAL =   1; SWISSPROT HIT: P17139, EVALUE 3.00e-01; NT HIT: gi14861872, EVALUE 2.00e-50; EST_HUMAN HIT: BG007849.1, EVALUE 2.00e-50
tcagtgttggtttatgctgctggcaaattgggcactcaggagtggccgtagccatgtcagttttggtgagtggaagtccacgttgctgagcccatgcgtaacctccatccctgccacaatggccactgtggtcatgggcccattgggcaatgacaggggtgg

SEQ ID NO: 14584 - DNA, 139 bp, Homo sapiens
  MAP TO AL133492.1; EXPRESSED IN BONE MARROW, SIGNAL = 3.4; EXPRESSED IN PLACENTA, SIGNAL =   3; EXPRESSED IN LUNG, SIGNAL = 3.7; EXPRESSED IN BRAIN, SIGNAL = 3.6; EXPRESSED IN ADULT LIVER, SIGNAL = 3.5; EXPRESSED IN FETAL LIVER, SIGNAL = 2.8; SWISSPROT HIT: P27176, EVALUE 4.50e+00; NT HIT: AL163303.2, EVALUE 1.00e-72; EST_HUMAN HIT: BF981537.1, EVALUE 2.00e-32
atcttcaggctccacttctaattctagttctcttgctgttttcaccacatctgcagtgacttccttcaataaaggatggaaccccttaaaggcatccgtgagggttggaatcaacttcttccaaactctgttgatgttg

SEQ ID NO: 14585 - DNA, 155 bp, Homo sapiens
  MAP TO AL137062.3; EXPRESSED IN HEART, SIGNAL = 2.7; EXPRESSED IN ADULT LIVER, SIGNAL = 4.1; EXPRESSED IN BRAIN, SIGNAL =   3; EXPRESSED IN PLACENTA, SIGNAL = 3.4; EXPRESSED IN LUNG, SIGNAL = 3.3; EXPRESSED IN BONE MARROW, SIGNAL = 2.9; EST_HUMAN HIT: R11441.1, EVALUE 5.00e-82; SWISSPROT HIT: P24721, EVALUE 5.00e-07; NT HIT: gi7706060, EVALUE 4.00e-82
aaggtcataaatgcagcccctgtgacacaaactggagatattatggagatagctgctatgggttcttcaggcacaacttaacatgggaagagagtaagcagtactgcactgacatgaatgctactctcctgaagattgacaaccggaacattgtg

SEQ ID NO: 14586 - DNA, 171 bp, Homo sapiens
  MAP TO CHR22_185_2.0; EXPRESSED IN FETAL LIVER, SIGNAL = 0.74; EXPRESSED IN LUNG, SIGNAL = 0.79; EXPRESSED IN PLACENTA, SIGNAL = 0.7; EXPRESSED IN ADULT LIVER, SIGNAL = 0.98; EXPRESSED IN BONE MARROW, SIGNAL = 0.68; EXPRESSED IN BRAIN, SIGNAL =   1; EST_HUMAN HIT: BI551734.1, EVALUE 1.00e-64; NT HIT: gi4501866, EVALUE 2.00e-62; SWISSPROT HIT: Q99798, EVALUE 1.00e-20
catttgcaaacaatgttaatgttcttctctagcaggtcatagtggatgtacttaggctcaaagggtctcatcgccaccttggcccgttggcacaggactgatgccacatggtactgccgcacacccagagctttctgcagccaagtaaccagtaggctgtagggcaccatt

SEQ ID NO: 14587 - DNA, 155 bp, Homo sapiens
  MAP TO CHR21_46.0; EXPRESSED IN HELA, SIGNAL = 0.81; EXPRESSED IN BRAIN, SIGNAL = 0.4; EST_HUMAN HIT: BF944421.1, EVALUE 5.00e-02; NT HIT: AF157066.1, EVALUE 5.30e-01
cagcacaaacattatccaaataatagcagcaacaccaatatcatcgttattgctaccattaccattatcagcactatgaatttcactgccaacaacattggattcatcggcaccactactgacaatgaaaaactcattaccaagagtaacaagta

SEQ ID NO: 14588 - DNA, 169 bp, Homo sapiens
  MAP TO AL136105.2; EXPRESSED IN HELA, SIGNAL = 0.62; EXPRESSED IN FETAL LIVER, SIGNAL = 0.52; EXPRESSED IN PLACENTA, SIGNAL = 0.63; EXPRESSED IN LUNG, SIGNAL = 0.69; EXPRESSED IN BONE MARROW, SIGNAL = 0.54; EXPRESSED IN ADULT LIVER, SIGNAL = 0.59; EXPRESSED IN BRAIN, SIGNAL = 0.35; EST_HUMAN HIT: AU123888.1, EVALUE 3.00e-90; SWISSPROT HIT: Q9H583, EVALUE 1.00e-27; NT HIT: gi11427260, EVALUE 2.00e-90
ctgttttggagatgttcacctggttcaaggtgtcagcaaaaggcttcactaagtggccggcaaacagagtaaaaagccctttcagcttttcagcaatgcaatctgccaagttgtaaaatgtcaacaacctgtcctttggggcatcttctgttttagcccaatcaaacag

SEQ ID NO: 14589 - DNA, 258 bp, Homo sapiens
  MAP TO AL137068.1; EXPRESSED IN HEART, SIGNAL = 1.3; EXPRESSED IN PLACENTA, SIGNAL = 1.5; EXPRESSED IN FETAL LIVER, SIGNAL =   1; EXPRESSED IN LUNG, SIGNAL = 1.6; EXPRESSED IN ADULT LIVER, SIGNAL = 1.9; EXPRESSED IN BONE MARROW, SIGNAL =   1; EXPRESSED IN BRAIN, SIGNAL = 1.3; EXPRESSED IN HELA, SIGNAL = 1.1; EST_HUMAN HIT: BG953973.1, EVALUE 3.50e-01; NT HIT: X75517.1, EVALUE 9.30e-01
atggaagaagaagaaaaggaagaagaggaagaagaagaggaagaggaagaaggaggaggagagaaagagagaaaaagaaggaaagagagagaaggaaggagaaagaaggaagaaagaagaagaggaaggaaggaaggaaggaaggaaagaaaggaggaggagagaagggagaaaaaaagaactagcattttctcaatgccttctaggtgcctgagctggcattttaggcatgcactcgttgaatcttcacgaaaccct

SEQ ID NO: 14590 - DNA, 105 bp, Homo sapiens
  MAP TO AL136140.2; EXPRESSED IN BONE MARROW, SIGNAL =   2; EXPRESSED IN BRAIN, SIGNAL = 2.1; EXPRESSED IN HELA, SIGNAL = 1.2; EXPRESSED IN FETAL LIVER, SIGNAL =   2; EXPRESSED IN LUNG, SIGNAL = 2.5; EXPRESSED IN PLACENTA, SIGNAL = 2.3; EXPRESSED IN ADULT LIVER, SIGNAL = 2.7; NT HIT: U24435.1, EVALUE 1.30e+00; EST_HUMAN HIT: BI544552.1, EVALUE 1.30e-01; SWISSPROT HIT: P36022, EVALUE 2.70e+00
ctgctgtctgcctaagccttccagcctccagagattttctctttgctacattcttcttgctgatacagggatagggactaataagttccatcaggattttcatcc

SEQ ID NO: 14591 - DNA, 188 bp, Homo sapiens
  MAP TO AL137918.1; EXPRESSED IN FETAL LIVER, SIGNAL = 0.93; EXPRESSED IN LUNG, SIGNAL = 1.2; EXPRESSED IN PLACENTA, SIGNAL = 1.3; EXPRESSED IN BONE MARROW, SIGNAL = 0.94; EXPRESSED IN BRAIN, SIGNAL = 0.95; EXPRESSED IN HELA, SIGNAL = 0.62; SWISSPROT HIT: O55029, EVALUE 3.30e+00; NT HIT: D13144.1, EVALUE 1.10e-02; EST_HUMAN HIT: AW090252.1, EVALUE 1.60e-02
tgatccagatgagagccagaaggatggcaatggccaaagggaaggggtggagaaggcagttccaacagatgttaaggttgaaacttctaggatttggtggtggtcagatatggaaagtgacttgcagcctagctgccaggtgacagctgtgacccctcacagagaccggaacacatgcaaaggaccag

SEQ ID NO: 14592 - DNA, 292 bp, Homo sapiens
  MAP TO CHR21_63.0; EXPRESSED IN BRAIN, SIGNAL = 1.8; EXPRESSED IN LUNG, SIGNAL =   1; EXPRESSED IN PLACENTA, SIGNAL = 1.1; EXPRESSED IN ADULT LIVER, SIGNAL = 1.5; EXPRESSED IN HELA, SIGNAL = 4.3; EXPRESSED IN BONE MARROW, SIGNAL =   2; EXPRESSED IN HEART, SIGNAL = 1.4; EST_HUMAN HIT: BG033582.1, EVALUE 0.00e+00; SWISSPROT HIT: P57078, EVALUE 5.00e-44; NT HIT: AB047783.1, EVALUE 0.00e+00
cttgacgtggtagtgggcatccagcaggatgttcgcgggcttgaggtccaggtgcaggagtggcggggccatgcagtgcaggaagttcatgcccaccgccgtctcgtggatgattcggaaccggagatcccatggcaatggctccgaagccagcagcttttccagggagcccgtctccatgtactccatgaccaggccgacaggttcgcggcagatgccatacacaggcaggatgtagcgaaacttggccatctccatcttcttggcttcttccaaaagctccatgcgctcc

SEQ ID NO: 14593 - DNA, 127 bp, Homo sapiens
  MAP TO AL136103.2; EXPRESSED IN LUNG, SIGNAL = 0.83; EXPRESSED IN BRAIN, SIGNAL = 0.64; EXPRESSED IN PLACENTA, SIGNAL = 0.83; EXPRESSED IN ADULT LIVER, SIGNAL = 0.84; EXPRESSED IN FETAL LIVER, SIGNAL = 0.89; EXPRESSED IN BONE MARROW, SIGNAL = 0.84; EST_HUMAN HIT: AW673323.1, EVALUE 6.20e-01; NT HIT: AF286904.1, EVALUE 1.70e+00
gtgcataaagttaaggatattcttgctgagaaaggaagctgcatatggtgacctgtggaaattcatctcaactgtgggaatgccattctttatcatggcatctggtctatcatgccccaaagagtcc

SEQ ID NO: 14594 - DNA, 166 bp, Homo sapiens
  MAP TO CHR22_73.0; EXPRESSED IN BONE MARROW, SIGNAL = 0.72; EXPRESSED IN LUNG, SIGNAL = 0.69; EXPRESSED IN ADULT LIVER, SIGNAL = 0.84; EXPRESSED IN BRAIN, SIGNAL = 0.81; EXPRESSED IN HELA, SIGNAL = 6.2; EXPRESSED IN FETAL LIVER, SIGNAL = 0.88; NT HIT: gi14738362, EVALUE 3.00e-67; SWISSPROT HIT: Q01033, EVALUE 2.30e-01; EST_HUMAN HIT: W00810.1, EVALUE 1.00e-70
atgtccagccacgaaggtggcaagaagaaggcactgaaacagcccaagaagcaggccaaggagatggacgaggaagagaaggctttcaagcagaaacaaaaagaggagcagaagaaactcgaggtgctaaaagcgaaggtcgtggggaaggggcctctggccacag

SEQ ID NO: 14595 - DNA, 27 bp, Homo sapiens
  MAP TO CHR22_180.0; EXPRESSED IN BRAIN, SIGNAL = 0.66; EXPRESSED IN HELA, SIGNAL = 0.81; NT HIT: Z99108.1, EVALUE 6.10e-01; EST_HUMAN HIT: BE730986.1, EVALUE 2.30e-01
tctgcatcatcagcattgctcagcatt

SEQ ID NO: 14596 - DNA, 270 bp, Homo sapiens
  MAP TO AL137062.3; EXPRESSED IN HELA, SIGNAL = 2.9; EXPRESSED IN HEART, SIGNAL = 4.4; EXPRESSED IN BRAIN, SIGNAL = 5.5; EXPRESSED IN PLACENTA, SIGNAL = 6.4; EXPRESSED IN LUNG, SIGNAL = 5.5; EXPRESSED IN ADULT LIVER, SIGNAL = 5.5; EXPRESSED IN FETAL LIVER, SIGNAL = 5.9; EXPRESSED IN BONE MARROW, SIGNAL =   5; NT HIT: gi15922990, EVALUE 1.60e-02; SWISSPROT HIT: Q9UEU0, EVALUE 3.70e+00
aagaataatgaaattttaaatgcggtgatggggagcagtattcctacctttagatttctgcttcgatttacaacgattcttgaaactcagcgtcatatacccatcttcattctccatctcttcaaatgtctaatgtcttattatccagaaaatagtacaaagaaaatggaaactaatctcaaccttggatatgtctctttggcacaaggtactaaaagaaaactaaaaggaaggccaaaaatagtcaaaatttactcagacacagatgtc

SEQ ID NO: 14597 - DNA, 159 bp, Homo sapiens
  MAP TO AL136084.2; EXPRESSED IN BRAIN, SIGNAL =   6; EXPRESSED IN HEART, SIGNAL = 5.2; EXPRESSED IN LUNG, SIGNAL = 7.2; EXPRESSED IN HELA, SIGNAL = 3.5; EXPRESSED IN FETAL LIVER, SIGNAL = 6.3; EXPRESSED IN ADULT LIVER, SIGNAL = 7.2; EXPRESSED IN PLACENTA, SIGNAL = 6.9; EXPRESSED IN BONE MARROW, SIGNAL = 6.6; EST_HUMAN HIT: BF133116.1, EVALUE 8.10e-01; SWISSPROT HIT: P26664, EVALUE 1.50e+00
ttacactgttcccttccatatttctttgaaagtttctgtaagtaaaaggtggttttgtttgcttttcaaagtcctttcaggttgtttaatgaagggacaagccaggcggtgctgtggagcgatgatgccaatggtggcgttgaaggatggataaggagc

SEQ ID NO: 14598 - DNA, 216 bp, Homo sapiens
  MAP TO CHR21_65.0; EXPRESSED IN HELA, SIGNAL = 4.3; EXPRESSED IN BRAIN, SIGNAL = 1.5; EXPRESSED IN HEART, SIGNAL = 1.3; EXPRESSED IN LUNG, SIGNAL = 0.72; EXPRESSED IN BONE MARROW, SIGNAL = 1.7; EXPRESSED IN PLACENTA, SIGNAL = 0.88; EXPRESSED IN ADULT LIVER, SIGNAL = 0.96; SWISSPROT HIT: P28478, EVALUE 2.10e-01; EST_HUMAN HIT: AL526104.1, EVALUE 1.10e+00; NT HIT: gi15316039, EVALUE 7.70e-01
cggagcgctccagaatccatgaagccagcagcaccccacacccggagtgctccagaatccacgcagcacgtggcatctcctcgtcatagcgttctagaatccatgcagcgagcagtaccccacaccgggagcgctccagaatccacgcagcgtctggcacatctttatcagagcgctccagagtccatgcagccacagtcctccaacggaccctga

SEQ ID NO: 14599 - DNA, 119 bp, Homo sapiens
  MAP TO AL035367.1; EXPRESSED IN LUNG, SIGNAL = 0.98; EXPRESSED IN BONE MARROW, SIGNAL = 0.89; EXPRESSED IN PLACENTA, SIGNAL =   1; EXPRESSED IN ADULT LIVER, SIGNAL =  15; EXPRESSED IN HELA, SIGNAL = 1.3; EXPRESSED IN BRAIN, SIGNAL = 0.7; EXPRESSED IN FETAL LIVER, SIGNAL =   2; SWISSPROT HIT: P34896, EVALUE 4.00e-15; EST_HUMAN HIT: BF001838.1, EVALUE 1.00e-60; NT HIT: L23928.1, EVALUE 8.00e-61
ggatagagctgaccctgcagatccagagcgacactggtgtcagagccaccctgaaagagttcaaggagagactggcaggggataagtaccaggcggccgtgcaggctctccgggaggag

SEQ ID NO: 14600 - DNA, 128 bp, Homo sapiens
  MAP TO CHR21_67.0; EXPRESSED IN FETAL LIVER, SIGNAL = 1.7; EXPRESSED IN HEART, SIGNAL = 1.3; EXPRESSED IN LUNG, SIGNAL = 0.82; EXPRESSED IN PLACENTA, SIGNAL = 0.86; EXPRESSED IN BONE MARROW, SIGNAL = 1.9; EXPRESSED IN HELA, SIGNAL = 4.4; EXPRESSED IN BRAIN, SIGNAL = 1.6; SWISSPROT HIT: P26954, EVALUE 2.00e+00; EST_HUMAN HIT: AF037635.1, EVALUE 1.60e-01; NT HIT: AJ133734.1, EVALUE 1.70e+00
ccggccctgcacttcgattgccgggagccctgcacgcggaactgtgtctgcagaagctccttttggcacctgggagggcacctctcatcagtactccaggacctcggccatcgccacggaccgcaggg

SEQ ID NO: 14601 - DNA, 80 bp, Homo sapiens
  MAP TO AL136366.3; EXPRESSED IN FETAL LIVER, SIGNAL = 4.2; EXPRESSED IN PLACENTA, SIGNAL = 4.1; EXPRESSED IN ADULT LIVER, SIGNAL = 4.3; EXPRESSED IN BONE MARROW, SIGNAL = 4.9; EXPRESSED IN BRAIN, SIGNAL = 3.9; EXPRESSED IN HELA, SIGNAL = 2.4; EXPRESSED IN HEART, SIGNAL =   3; EXPRESSED IN LUNG, SIGNAL = 4.4; EST_HUMAN HIT: N83956.1, EVALUE 3.50e-01
atgatatttgcagatggtagtaaatttagaggtgttgctactaccagtgagagcagcaagagccatggggatatcagaga

SEQ ID NO: 14602 - DNA, 160 bp, Homo sapiens
  MAP TO CHR22_139.0; EXPRESSED IN HELA, SIGNAL = 1.2; EXPRESSED IN FETAL LIVER, SIGNAL = 0.66; EXPRESSED IN LUNG, SIGNAL = 0.58; EXPRESSED IN ADULT LIVER, SIGNAL = 0.6; EXPRESSED IN BONE MARROW, SIGNAL = 0.59; EXPRESSED IN BRAIN, SIGNAL = 0.58; NT HIT: gi5835051, EVALUE 5.50e-01; SWISSPROT HIT: Q14833, EVALUE 1.50e+00
caggtgctcccccttcacttcctgtgtgcggagcacgctcgccctgggagtttcactagaaagaaggttgccatgggccagtgggacagcttgtatctcaagtgcacgcggatgccccagaatcccaggatctcagctgagctgtttgtggattattaga

SEQ ID NO: 14603 - DNA, 177 bp, Homo sapiens
  MAP TO AC015478.3; EXPRESSED IN FETAL LIVER, SIGNAL = 0.56; EXPRESSED IN PLACENTA, SIGNAL = 0.55; EXPRESSED IN LUNG, SIGNAL = 0.6; EXPRESSED IN ADULT LIVER, SIGNAL = 0.44; EXPRESSED IN BONE MARROW, SIGNAL = 0.55; EXPRESSED IN BRAIN, SIGNAL = 0.69; SWISSPROT HIT: P11378, EVALUE 2.90e-01
cccagctccacaccacagtctcacacggtgtgcgacaccccaccctgcaagtctacgctctgtccatccctcctcacacacagctgcacgtcgaagtcttcatgtgggcacactggcacagagaagaggccacgtgggtcctggggccggagtatcaggagctggggcaggcccttc

SEQ ID NO: 14604 - DNA, 288 bp, Homo sapiens
  MAP TO AL138722.2; EXPRESSED IN BONE MARROW, SIGNAL = 0.54; EXPRESSED IN LUNG, SIGNAL = 0.66; EXPRESSED IN BRAIN, SIGNAL = 0.44; EXPRESSED IN FETAL LIVER, SIGNAL = 0.48; NT HIT: gi13643675, EVALUE 0.00e+00; SWISSPROT HIT: P08979, EVALUE 1.10e+00; EST_HUMAN HIT: AL526738.1, EVALUE 0.00e+00
gtactgaaatttgatgcctatttccaagaagatgttcctatgtcaactgaggaacagtataggatccgtcaggtgaacatttactattatctagaagatgacagcatgtctgtcatagagcctgttgtagaaaattctggaatccttcaaggcaagttaataaaacgccagcggctagccaagaatgaccggggtgaccattaccattggaaagacctaaatcgaggaataaacatcacaatttatggcaaaactttccgcgttgttgactgtgaccaattcacacag

SEQ ID NO: 14605 - DNA, 148 bp, Homo sapiens
  MAP TO CHR22_178.0; EXPRESSED IN BRAIN, SIGNAL = 0.66; EXPRESSED IN FETAL LIVER, SIGNAL = 0.55; EXPRESSED IN ADULT LIVER, SIGNAL = 0.29; NT HIT: gi14778023, EVALUE 5.00e-78; SWISSPROT HIT: O96017, EVALUE 8.00e-23; EST_HUMAN HIT: BI911591.1, EVALUE 8.00e-78
ctttatttctgcttagtgacagtgcaatttcagaattgttattcaaaggacggcgttttcctttccctacaagctctgtatttacaaaggttccattgccactgtgatcttctatgtatgcaatgtaagagtttttaggacccacttc

SEQ ID NO: 14606 - DNA, 181 bp, Homo sapiens
  MAP TO CHR22_77.0; EXPRESSED IN HELA, SIGNAL = 7.9; EXPRESSED IN BRAIN, SIGNAL = 1.1; EXPRESSED IN FETAL LIVER, SIGNAL = 0.91; EXPRESSED IN LUNG, SIGNAL =   1; EXPRESSED IN ADULT LIVER, SIGNAL = 1.2; EXPRESSED IN BONE MARROW, SIGNAL = 0.9; EXPRESSED IN PLACENTA, SIGNAL = 1.1; EST_HUMAN HIT: BI758462.1, EVALUE 3.00e-93; NT HIT: gi4505222, EVALUE 1.00e-97; SWISSPROT HIT: Q10571, EVALUE 7.00e-30
caagttagggcagccacgaatgtcccaaatctgttggagatgtcagaatgcagggaccgccaggtgggcacggaggctcgagccttggcgtcacccacgtcgtctgtgcagtggacagacaggcactgcaagtggctgccaggctgggatgctgaggccttgtttgcagggaggtcgtggg

SEQ ID NO: 14607 - DNA, 141 bp, Homo sapiens
  MAP TO AL133378.4; EXPRESSED IN BRAIN, SIGNAL = 0.56; EXPRESSED IN PLACENTA, SIGNAL = 0.67; EXPRESSED IN ADULT LIVER, SIGNAL = 0.55; EXPRESSED IN LUNG, SIGNAL = 0.67; EXPRESSED IN BONE MARROW, SIGNAL = 0.57; EST_HUMAN HIT: AW847989.1, EVALUE 4.50e-02; NT HIT: AF391809.2, EVALUE 4.80e-01
ctgctatgacatgctacattgacagcagtgtcatttgtaaacagctgaaaaacctctctcatagacccaagtacttggcccatgctttctttcccttggatgttatggaaaatatcagtagaaaagatatgatggatttta

SEQ ID NO: 14608 - DNA, 117 bp, Homo sapiens
  MAP TO AL158832.2; EXPRESSED IN HEART, SIGNAL = 2.6; EXPRESSED IN PLACENTA, SIGNAL = 3.1; EXPRESSED IN FETAL LIVER, SIGNAL = 2.8; EXPRESSED IN LUNG, SIGNAL = 2.6; EXPRESSED IN ADULT LIVER, SIGNAL = 2.3; EXPRESSED IN BONE MARROW, SIGNAL = 2.8; EXPRESSED IN HELA, SIGNAL = 1.7; EXPRESSED IN BRAIN, SIGNAL = 2.8; SWISSPROT HIT: P07623, EVALUE 3.50e+00; EST_HUMAN HIT: BG323828.1, EVALUE 2.20e+00; NT HIT: U93721.1, EVALUE 3.80e-01
atccctgcaccccaactgtcaactgtcttccatcatcatttactatatccacgtccactcctgacagcatcagtggctcagtcttaccgacctgcatcagggttttgggctctgcct

SEQ ID NO: 14609 - DNA, 492 bp, Homo sapiens
  MAP TO AL135926.3; EXPRESSED IN FETAL LIVER, SIGNAL = 4.6; EXPRESSED IN PLACENTA, SIGNAL = 5.7; EXPRESSED IN LUNG, SIGNAL = 5.5; EXPRESSED IN ADULT LIVER, SIGNAL = 4.9; EXPRESSED IN BONE MARROW, SIGNAL = 4.4; EXPRESSED IN BRAIN, SIGNAL = 5.1; EXPRESSED IN HEART, SIGNAL = 5.5; EST_HUMAN HIT: AA321349.1, EVALUE 1.70e-01; NT HIT: U67081.1, EVALUE 4.70e-01
atgtcgaagttgagtctcagaaaagacaagtgtgagttacccaaaggcacagaggcaaggttattagatatcccaacatccaaacctgatgttctccatgacgccactgctgcaccaggcttgcgtgctgggtgtgctgttggctcagcactcctctttccatgctccctgcttcccaccttatgctgcctctgtgttccagaggctggaagcctgaaatccatatttctcagaatcccagcccgagttatgtttcaacaatgtgaagcaacgcaagaactggagaacagagaaaaaatagaaactattaagttttctgcagcagcaataggcagttgtatgcattgtgtggacttgcataactgtagatgtgacactgtccagaagcttccaggtatccttctgccaccaatcataccccttggtgttgtagcagctaagaaggttagtgaaggcttcctaaagttctttaaactttctgatttccagaat

SEQ ID NO: 14610 - DNA, 218 bp, Homo sapiens
  MAP TO CHR22_106.0; EXPRESSED IN FETAL LIVER, SIGNAL = 1.7; EXPRESSED IN LUNG, SIGNAL = 2.1; EXPRESSED IN ADULT LIVER, SIGNAL = 2.1; EXPRESSED IN BRAIN, SIGNAL = 1.7; EXPRESSED IN PLACENTA, SIGNAL = 1.8; EXPRESSED IN HELA, SIGNAL = 3.1; NT HIT: U63721.1, EVALUE 1.00e-08; SWISSPROT HIT: P39188, EVALUE 1.80e-02; EST_HUMAN HIT: BI032016.1, EVALUE 9.00e-88
tagatctttctacacatataaggaagttcctcatcggctgttcctgagttccttcttaaaataattaagccatgatctatcagggccctgcctggaatgaacagatcatgtttccagttgtgcatgcatacgcacacctctagtccagctactcgagaggctgaggcaggaggatccactgaacccaggagaccagcctgggcaacatagatctcatc

SEQ ID NO: 14611 - DNA, 98 bp, Homo sapiens
  MAP TO CHR21_10.0; EXPRESSED IN BRAIN, SIGNAL = 0.89; EXPRESSED IN FETAL LIVER, SIGNAL = 0.54; EXPRESSED IN HELA, SIGNAL = 0.59; NT HIT: Z78658.1, EVALUE 3.00e-10; EST_HUMAN HIT: BF342452.1, EVALUE 1.00e-16
cgtgaaggtccacggcttcattcttgaagtcagcaagactgtgaacccactggcaggaaccaactctggacacacaaggactgcgagcacagtcagca

SEQ ID NO: 14612 - DNA, 96 bp, Homo sapiens
  MAP TO AB017652.1; EXPRESSED IN HELA, SIGNAL = 2.5; EXPRESSED IN PLACENTA, SIGNAL = 3.3; EXPRESSED IN LUNG, SIGNAL = 2.9; EXPRESSED IN ADULT LIVER, SIGNAL = 2.9; EXPRESSED IN BRAIN, SIGNAL = 2.7; EXPRESSED IN FETAL LIVER, SIGNAL = 2.8; EXPRESSED IN BONE MARROW, SIGNAL = 2.4; EXPRESSED IN HEART, SIGNAL = 2.3; NT HIT: D42021.1, EVALUE 3.00e-04; EST_HUMAN HIT: AW439890.1, EVALUE 2.00e-03
atggcaccatcagaactggaaaaagggcttttggctaggcaggtaatcactttgagcctcagttttcctgtctgtaaaagaagaagaacaacccca

SEQ ID NO: 14613 - DNA, 116 bp, Homo sapiens
  MAP TO AC018715.3; EXPRESSED IN PLACENTA, SIGNAL = 0.48; EXPRESSED IN BRAIN, SIGNAL = 0.4; EXPRESSED IN FETAL LIVER, SIGNAL = 0.52; EXPRESSED IN BONE MARROW, SIGNAL = 0.56; EST_HUMAN HIT: AW152112.1, EVALUE 5.60e-01; NT HIT: X84702.1, EVALUE 2.40e-02
gggccagataatttgcattcccaacaagttcctaggtatgctgatgcagttgatacagctgatgctgctgatctcgagccacattttgagaatcacaagtatagacagaatgacta

SEQ ID NO: 14614 - DNA, 101 bp, Homo sapiens
  MAP TO AL133263.2; EXPRESSED IN BONE MARROW, SIGNAL = 0.92; EXPRESSED IN BRAIN, SIGNAL = 0.97; EXPRESSED IN FETAL LIVER, SIGNAL = 0.87; EXPRESSED IN HEART, SIGNAL = 1.2; EXPRESSED IN PLACENTA, SIGNAL = 1.4; EXPRESSED IN LUNG, SIGNAL = 1.4; EXPRESSED IN ADULT LIVER, SIGNAL = 1.7; EST_HUMAN HIT: AI347001.1, EVALUE 5.00e-41; SWISSPROT HIT: Q9Y603, EVALUE 3.00e-13; NT HIT: AJ276205.1, EVALUE 4.00e-50
aaccgggtgaacatgacctacgagaagatgtctcgtgccctgcgccactattataagcttaatatcattaagaaggaaccggggcagaaactcctgttcag

SEQ ID NO: 14615 - DNA, 363 bp, Homo sapiens
  MAP TO CHR21_68.0; EXPRESSED IN FETAL LIVER, SIGNAL = 1.9; EXPRESSED IN LUNG, SIGNAL = 1.4; EXPRESSED IN BONE MARROW, SIGNAL = 2.3; EXPRESSED IN BRAIN, SIGNAL = 1.8; EXPRESSED IN HELA, SIGNAL = 4.7; EST_HUMAN HIT: BF311986.1, EVALUE 0.00e+00; SWISSPROT HIT: P17535, EVALUE 8.40e+00; NT HIT: AB038163.1, EVALUE 0.00e+00
atgtagtggaaccaaaggagaggggcaagctcctagccacccagacagcagctgaattgtctaaaaacttatcttcacccagttcttacccgccagctgtgaataagggcaggaaggtagctagtcccagtcccagtggcagcgtgctattcacagatgaaggggttccgaaatttttgtcaagaaagactttggtagagtttccacagaaagttctgtctccattcagaaaacagggctctgattcagaagctcgtcaggtgggtcggaaagtgacgtcgccttcgtcttcatcctcttccagctcctctgattctgaatctgatgatgaggctgacgtttcagaggtcactcctcgagtgg

SEQ ID NO: 14616 - DNA, 80 bp, Homo sapiens
  MAP TO CHR21_70.0; EXPRESSED IN FETAL LIVER, SIGNAL =   1; EXPRESSED IN BONE MARROW, SIGNAL =   2; EXPRESSED IN BRAIN, SIGNAL = 1.7; EXPRESSED IN HEART, SIGNAL = 1.2; EXPRESSED IN HELA, SIGNAL = 4.3; EXPRESSED IN PLACENTA, SIGNAL = 0.87; EXPRESSED IN LUNG, SIGNAL = 0.98; EXPRESSED IN ADULT LIVER, SIGNAL =   1; NT HIT: AF283321.1, EVALUE 4.00e-03; EST_HUMAN HIT: AL577804.1, EVALUE 8.90e-02
ggtgtttctgcaatgaaccagctggaatccagcagtgctgtggggaatttcccacggctgctgtgacaaacgaccacaag

SEQ ID NO: 14617 - DNA, 162 bp, Homo sapiens
  MAP TO AL137016.5; EXPRESSED IN FETAL LIVER, SIGNAL = 1.5; EXPRESSED IN BONE MARROW, SIGNAL = 1.5; EXPRESSED IN HELA, SIGNAL = 2.4; EXPRESSED IN HEART, SIGNAL = 1.8; EXPRESSED IN BRAIN, SIGNAL = 1.7; EXPRESSED IN PLACENTA, SIGNAL = 1.6; EXPRESSED IN LUNG, SIGNAL = 1.3; EXPRESSED IN ADULT LIVER, SIGNAL = 2.3; NT HIT: AF067509.1, EVALUE 1.40e-01; SWISSPROT HIT: P18937, EVALUE 3.40e+00; EST_HUMAN HIT: AA092147.1, EVALUE 8.20e-01
cttttttccaaagctttctcattagtcctcataggaaccaagacaaggtgtacaatttggcagcgaggaaattgggatttaataagtcccctgcacaatccagcatgtctacaaataatttgtaggattaggctccccagcctcatttggaactggatgcag

SEQ ID NO: 14618 - DNA, 114 bp, Homo sapiens
  MAP TO AL136163.3; EXPRESSED IN BONE MARROW, SIGNAL = 1.8; EXPRESSED IN HEART, SIGNAL = 1.7; EXPRESSED IN PLACENTA, SIGNAL = 2.5; EXPRESSED IN LUNG, SIGNAL = 2.2; EXPRESSED IN HELA, SIGNAL = 2.6; EXPRESSED IN ADULT LIVER, SIGNAL = 1.9; EXPRESSED IN BRAIN, SIGNAL = 1.7; EXPRESSED IN FETAL LIVER, SIGNAL = 1.8; EST_HUMAN HIT: AI928409.1, EVALUE 1.00e-57; NT HIT: L47285.1, EVALUE 5.80e+00
cgagcaaaataactttgtttccgttccttcttctcttccttggtatccataatacacaatcaaaagtgcaaagtatttgaaaaagtccctctttttaatcagtgagtcgtaacc

SEQ ID NO: 14619 - DNA, 112 bp, Homo sapiens
  MAP TO AC017072.4; EXPRESSED IN BRAIN, SIGNAL = 0.49; EXPRESSED IN PLACENTA, SIGNAL = 0.49; EXPRESSED IN BONE MARROW, SIGNAL = 0.44; EXPRESSED IN ADULT LIVER, SIGNAL = 0.38; EST_HUMAN HIT: AA927155.1, EVALUE 6.00e-16; NT HIT: gi4505420, EVALUE 3.60e-01
ctttgggttccaggccattggagttaaagtgcatcctcttctgacactccgtacagctcatcaggaaccgggtcacggcctctctcgggaggaaggcataggtctctgcgat

SEQ ID NO: 14620 - DNA, 240 bp, Homo sapiens
  MAP TO AL136231.3; EXPRESSED IN PLACENTA, SIGNAL =  11; EXPRESSED IN LUNG, SIGNAL =  12; EXPRESSED IN HELA, SIGNAL = 7.3; EXPRESSED IN FETAL LIVER, SIGNAL =  10; EXPRESSED IN ADULT LIVER, SIGNAL =  11; EXPRESSED IN BONE MARROW, SIGNAL = 9.8; EXPRESSED IN BRAIN, SIGNAL =  10; EXPRESSED IN HEART, SIGNAL = 7.9; SWISSPROT HIT: P43005, EVALUE 5.00e-39; EST_HUMAN HIT: BE868406.1, EVALUE 1.00e-123; NT HIT: gi4759121, EVALUE 0.00e+00
tgtgaggtctgggtgaatgagatggtgtcagacttgtctactgcaaagcctccattgacataagacttcttggtgtctgagtcttcgttgtcaaggattgtggattccaaggcaaagggattcacaatgttgacttcagatgaaacatccatctgctccagctccttcttggagagcttttccacaatgcccgtcccaaaagcatcaccaaggacgttgaccatggtcctgaaccggtcc

SEQ ID NO: 14621 - DNA, 183 bp, Homo sapiens
  MAP TO CHR22_100.0; EXPRESSED IN HELA, SIGNAL = 1.1; EXPRESSED IN FETAL LIVER, SIGNAL = 2.3; EXPRESSED IN HEART, SIGNAL = 2.2; EXPRESSED IN ADULT LIVER, SIGNAL = 1.9; EXPRESSED IN LUNG, SIGNAL = 1.8; EXPRESSED IN PLACENTA, SIGNAL = 1.9; EXPRESSED IN BONE MARROW, SIGNAL = 2.2; EXPRESSED IN BRAIN, SIGNAL = 1.9; SWISSPROT HIT: P70281, EVALUE 1.30e-01; EST_HUMAN HIT: BI015424.1, EVALUE 9.50e-01
caagctgggagcatactcagcaggcttcccggggcctcctgatagacaaggtcgcatcccagcagctgtgagaaaggaggcgtgccggcctggcagctgtgctgggcgccgggaggctgccagcgaacgtggcatcacacaggagagggagatgcacttctgtgaccccccgctctcaggcag

SEQ ID NO: 14622 - DNA, 199 bp, Homo sapiens
  MAP TO AC013648.3; EXPRESSED IN PLACENTA, SIGNAL = 1.1; EXPRESSED IN LUNG, SIGNAL = 0.99; EXPRESSED IN FETAL LIVER, SIGNAL = 0.99; EXPRESSED IN BONE MARROW, SIGNAL = 0.85; EXPRESSED IN BRAIN, SIGNAL = 1.1; SWISSPROT HIT: P18377, EVALUE 9.00e-07; EST_HUMAN HIT: BG755990.1, EVALUE 1.00e-103
aaggagcttggcgctgtcatctataactgcagccacctggcccaagacctggagaagaccttccagacctactgggtactgggggtgcccaaggctgtcctccccaaaacctggcctcagaacttctcatctcacttcaaccgtttccagcccttccacggcctctttgatggggtgcccaccactgcctacttctcag

SEQ ID NO: 14623 - DNA, 151 bp, Homo sapiens
  MAP TO AL138499.1; EXPRESSED IN BRAIN, SIGNAL = 1.8; EXPRESSED IN PLACENTA, SIGNAL = 2.6; EXPRESSED IN LUNG, SIGNAL = 2.3; EXPRESSED IN ADULT LIVER, SIGNAL = 2.7; EXPRESSED IN HELA, SIGNAL = 1.7; EXPRESSED IN FETAL LIVER, SIGNAL = 2.2; EXPRESSED IN BONE MARROW, SIGNAL = 2.1; NT HIT: AL163300.2, EVALUE 5.20e-01; SWISSPROT HIT: P14166, EVALUE 5.10e-01; EST_HUMAN HIT: AL582555.1, EVALUE 7.60e-01
ctgccaggaaatgcccctgaaagctgccatcaagtgccttctgcaagcactgcggctgctggaagtttcaggaggaagagaaccacttcaaattttgggctatctggaagattctccatcctactccctctacatgggagacttcgccatt

SEQ ID NO: 14624 - DNA, 148 bp, Homo sapiens
  MAP TO AL135786.2; EXPRESSED IN BONE MARROW, SIGNAL = 1.1; EXPRESSED IN PLACENTA, SIGNAL =   1; EXPRESSED IN LUNG, SIGNAL = 0.89; EXPRESSED IN ADULT LIVER, SIGNAL = 0.99; EXPRESSED IN BRAIN, SIGNAL = 0.9; EXPRESSED IN FETAL LIVER, SIGNAL =   1; NT HIT: AJ277546.2, EVALUE 3.00e-05; SWISSPROT HIT: P98088, EVALUE 6.80e-01; EST_HUMAN HIT: AI560286.1, EVALUE 1.00e-05
ccatggacacaaagctaataagtggtggtggcaggatgcaaatgcagacagtctggttgcaaggcccagacgtggccccttcactgcgcctctcccttgtgctgccttgtgcaaacatcaccaccctccatctccagaacatttccat

SEQ ID NO: 14625 - DNA, 256 bp, Homo sapiens
  MAP TO AL138478.1; EXPRESSED IN FETAL LIVER, SIGNAL = 1.1; EXPRESSED IN PLACENTA, SIGNAL = 1.2; EXPRESSED IN BONE MARROW, SIGNAL =   1; EXPRESSED IN LUNG, SIGNAL = 1.2; EXPRESSED IN BRAIN, SIGNAL = 0.93; EST_HUMAN HIT: BF738879.1, EVALUE 3.40e-01; SWISSPROT HIT: P38459, EVALUE 5.70e+00
atgtctttctaccacttggctggaggtggaagtctttggtcatctcttctcttccatgtctacttgcagttgattttcaaaagaagctttgaacttgctccagtcccctgcttctacaatcccattaatcccatctacttttcacatttggcaaaagatcagagtcctcaactaaatccctggggaggacaactaccctacatgatatcctttagaattagagccattagttccagagagactcctagtgcaccag

SEQ ID NO: 14626 - DNA, 243 bp, Homo sapiens
  MAP TO AC012186.3; EXPRESSED IN HELA, SIGNAL =   4; EXPRESSED IN BRAIN, SIGNAL = 3.6; EXPRESSED IN FETAL LIVER, SIGNAL = 3.7; EXPRESSED IN BONE MARROW, SIGNAL = 3.5; EXPRESSED IN PLACENTA, SIGNAL = 3.8; EXPRESSED IN LUNG, SIGNAL = 4.7; EXPRESSED IN ADULT LIVER, SIGNAL = 4.3; EST_HUMAN HIT: AL532275.1, EVALUE 0.00e+00; NT HIT: gi14777330, EVALUE 0.00e+00; SWISSPROT HIT: P35294, EVALUE 7.00e-08
tcagacctcagcgagcttcgggaggtctccttggctgaggcacagagcctggctgagcactatgacatcctgtgtgccattgagacgtctgccaaggactcgagcaacgtggaggaggccttcctgagggtggccacggagctcatcatgcggcacgggggccccttgttcagcgagaagagccccgaccacatccagctgaacagcaaggacatcggagaaggctggggctgcgggtgctga

SEQ ID NO: 14627 - DNA, 91 bp, Homo sapiens
  MAP TO AL137863.3; EXPRESSED IN HEART, SIGNAL = 1.2; EXPRESSED IN BRAIN, SIGNAL =   1; EXPRESSED IN HELA, SIGNAL = 0.9; EXPRESSED IN FETAL LIVER, SIGNAL = 1.1; EXPRESSED IN BONE MARROW, SIGNAL = 1.1; EXPRESSED IN ADULT LIVER, SIGNAL = 1.3; EXPRESSED IN LUNG, SIGNAL = 1.3; EXPRESSED IN PLACENTA, SIGNAL = 1.2; SWISSPROT HIT: P08547, EVALUE 6.20e+00; EST_HUMAN HIT: T10574.1, EVALUE 3.00e-14; NT HIT: AF008191.1, EVALUE 5.00e-12
cattttgcattcccaccgcaatgaatgagattttctgttcttccacatctttgccagcatttgatcttgttaatgttttgacttgaaccat

SEQ ID NO: 14628 - DNA, 95 bp, Homo sapiens
  MAP TO AC024445.2; EXPRESSED IN LUNG, SIGNAL = 0.49; EXPRESSED IN ADULT LIVER, SIGNAL = 0.48; EXPRESSED IN HELA, SIGNAL = 0.56; EXPRESSED IN BRAIN, SIGNAL = 0.64; EXPRESSED IN FETAL LIVER, SIGNAL = 0.67; NT HIT: AP000395.1, EVALUE 1.20e+00
tcaatctcaatggactgtgcactgtggaaaggattattagacacaggacctgagatgatgatgttaatgcctggagatgtcatcacaactcctcc

SEQ ID NO: 14629 - DNA, 175 bp, Homo sapiens
  MAP TO AC021609.3; EXPRESSED IN HEART, SIGNAL = 1.2; EXPRESSED IN HELA, SIGNAL = 0.91; EXPRESSED IN BRAIN, SIGNAL = 1.1; EXPRESSED IN PLACENTA, SIGNAL = 1.2; EXPRESSED IN FETAL LIVER, SIGNAL = 0.95; EXPRESSED IN LUNG, SIGNAL = 1.2; EXPRESSED IN ADULT LIVER, SIGNAL = 1.2; SWISSPROT HIT: P45386, EVALUE 7.50e+00; EST_HUMAN HIT: BE042360.1, EVALUE 5.80e-02; NT HIT: M14660.1, EVALUE 3.90e-02
gtttccccaagcagaagccctaccccttactgaaactgcatggcagagtgtggctgatgctgggaccaaagaagtccctgcagacaagagcagtgcttctgaaagtgaagcacctgctaaacaagctattactggtccccacacaagccttccttgacctcctgggccctgagag

SEQ ID NO: 14630 - DNA, 246 bp, Homo sapiens
  MAP TO AF239614.1; EXPRESSED IN BRAIN, SIGNAL = 0.55; EXPRESSED IN FETAL LIVER, SIGNAL = 0.57; EXPRESSED IN LUNG, SIGNAL = 0.49; EXPRESSED IN ADULT LIVER, SIGNAL = 0.42; SWISSPROT HIT: Q02817, EVALUE 4.00e-05; EST_HUMAN HIT: BI911184.1, EVALUE 5.10e+00; NT HIT: AF037275.1, EVALUE 2.20e-01
tcagggggacacgtgggggaagtgatggcacccggcgaggttatcagggggacacgtggggaagtgatggcaccgggtgaggttatcagggggacatgtggggaagtgacggcacccggtgaggttatcagggggacacgtggggaactgatggcacccggcgaggttatcagggggacacgtggggaagtgatggcaccgggcgtcggccatggctttgggcatcacgtgggcacagctgcagcc

SEQ ID NO: 14631 - DNA, 216 bp, Homo sapiens
  MAP TO AC011803.4; EXPRESSED IN FETAL LIVER, SIGNAL = 0.54; EXPRESSED IN BONE MARROW, SIGNAL = 0.56; EXPRESSED IN PLACENTA, SIGNAL = 0.64; EXPRESSED IN LUNG, SIGNAL = 0.54; EXPRESSED IN BRAIN, SIGNAL = 0.59; EXPRESSED IN ADULT LIVER, SIGNAL = 0.53; NT HIT: X55348.1, EVALUE 4.90e-02
gtagacagagtggcgatggttggtggacagtgttggtaaggatggtgaaggaactgtggagatggatatggggatgatgaggatgacggtggtagtggtggagctggcaacattggtgattgaactggtgccattggtggtagagctgatgtcgtttgtggtggtggaactagtaatggaggttttagaggtgaagatggtgagctgggagcagag

SEQ ID NO: 14632 - DNA, 149 bp, Homo sapiens
  MAP TO AL160237.1; EXPRESSED IN FETAL LIVER, SIGNAL = 1.2; EXPRESSED IN BONE MARROW, SIGNAL = 1.2; EXPRESSED IN HEART, SIGNAL = 1.3; EXPRESSED IN PLACENTA, SIGNAL = 1.3; EXPRESSED IN LUNG, SIGNAL = 1.2; EXPRESSED IN BRAIN, SIGNAL =   1; EXPRESSED IN ADULT LIVER, SIGNAL = 1.1; EXPRESSED IN HELA, SIGNAL = 0.59; NT HIT: gi14736718, EVALUE 5.10e-01; SWISSPROT HIT: Q99558, EVALUE 4.50e+00; EST_HUMAN HIT: AW856918.1, EVALUE 8.00e-07
tcaggggagagctgatttcctctccgggctgaagttcttccagtggtacctggggtcacaggtctcctgaggcccagggctccagcgcccagagccaaaggaaacagtaaacctgctgtctctggtccttttgtggtcaccaaaaatgt

SEQ ID NO: 14633 - DNA, 179 bp, Homo sapiens
  MAP TO AL132996.2; EXPRESSED IN PLACENTA, SIGNAL = 1.8; EXPRESSED IN LUNG, SIGNAL = 2.1; EXPRESSED IN BONE MARROW, SIGNAL = 1.6; EXPRESSED IN ADULT LIVER, SIGNAL = 2.7; EXPRESSED IN BRAIN, SIGNAL = 1.2; EXPRESSED IN HELA, SIGNAL = 0.61; EXPRESSED IN FETAL LIVER, SIGNAL = 1.4; NT HIT: U60822.1, EVALUE 2.00e-31; SWISSPROT HIT: P56671, EVALUE 2.50e+00; EST_HUMAN HIT: BF922594.1, EVALUE 3.00e-50
atgtgggaaagtttggaacatcctagagacttggagtgctcagaagacagaaagacgtgggaaagtttggaacttcctagagacttcttgaatgacttcaaccaaaatgttaacagtgatatggacaatgaagtccaggctgagatgatctcagatgaagatgaggaacttcttgggaa

SEQ ID NO: 14634 - DNA, 184 bp, Homo sapiens
  MAP TO AL136140.2; EXPRESSED IN PLACENTA, SIGNAL = 2.1; EXPRESSED IN LUNG, SIGNAL = 2.5; EXPRESSED IN ADULT LIVER, SIGNAL = 2.6; EXPRESSED IN BONE MARROW, SIGNAL =   2; EXPRESSED IN BRAIN, SIGNAL = 1.7; EXPRESSED IN HELA, SIGNAL = 1.2; EXPRESSED IN FETAL LIVER, SIGNAL = 1.9; EXPRESSED IN HEART, SIGNAL = 1.5; NT HIT: AF114156.1, EVALUE 2.50e+00; SWISSPROT HIT: P06792, EVALUE 4.30e+00
atgatgacagaaggaactaggacacatacccaacacctcaaccttcccagctacatctatgcatctggcttctgccttactgatcacagggtactaatggaatatggcaccaagaatagagacaacagtctgaacaaatacaaagatttaaaaggtatcttaaaatctctagctggatggattg

SEQ ID NO: 14635 - DNA, 483 bp, Homo sapiens
  MAP TO AL137251.2; EXPRESSED IN BRAIN, SIGNAL = 0.63; EXPRESSED IN FETAL LIVER, SIGNAL = 0.59; EXPRESSED IN LUNG, SIGNAL = 0.88; EXPRESSED IN ADULT LIVER, SIGNAL = 0.94; NT HIT: gi16172557, EVALUE 0.00e+00; SWISSPROT HIT: P26410, EVALUE 4.40e+00
cttcatttaacataagttcatcctcctccacggagctgtccattcgaaaactgctccgaaaacccgagaaagaggcgatcgtatttgctgccaatctcgaggcacaggagctcccattctgttttacttctgtttctcccatcaaaccagtgtacatgccgttcatttgcctttgctccttgattcttagcgtgtgaatgtcaatgactgtggaatagatatccctcatgtgtatgattttggtctctttgtcacggttttcatgaagaatggcattagcacaaatgaaaatgaaaatgccaatccccatggtgaatgggccaagcattttcatcttatcagaatgcaaatgctgctcaaagaagcgaaccaccacaccgccttcattccgaatgacctgagtttcatttgttgacagtgttgtttcagcatcaataaaatgttctttttggggccaatatccaagaacggccatagcaattc

SEQ ID NO: 14636 - DNA, 95 bp, Homo sapiens
  MAP TO AC018608.4; EXPRESSED IN BRAIN, SIGNAL = 0.71; EXPRESSED IN LUNG, SIGNAL = 0.69; EXPRESSED IN FETAL LIVER, SIGNAL = 0.74; EXPRESSED IN PLACENTA, SIGNAL = 0.73; EXPRESSED IN ADULT LIVER, SIGNAL = 0.56; EXPRESSED IN BONE MARROW, SIGNAL = 0.82; SWISSPROT HIT: P38826, EVALUE 2.70e+00
caggcagtatcccacacaactacacaatatcacccaaggaatcatcagggtctgcctattgatgttgtgctcttcattgtttatgaattgagaag

SEQ ID NO: 14637 - DNA, 132 bp, Homo sapiens
  MAP TO AL138747.1; EXPRESSED IN FETAL LIVER, SIGNAL = 0.73; EXPRESSED IN PLACENTA, SIGNAL = 0.8; EXPRESSED IN LUNG, SIGNAL = 0.75; EXPRESSED IN ADULT LIVER, SIGNAL = 0.83; EXPRESSED IN BONE MARROW, SIGNAL = 0.62; EXPRESSED IN BRAIN, SIGNAL = 0.74; EXPRESSED IN HELA, SIGNAL = 1.6; SWISSPROT HIT: P20946, EVALUE 4.50e+00; NT HIT: gi15809023, EVALUE 1.00e-38; EST_HUMAN HIT: BI824988.1, EVALUE 4.20e-02
ctgtgttagaattaagatcatcaggctctgattcggtcccattttggcttccatttccctgaagagtgttcatagccataagcttcatcttctgaagtttcatcgcctcagccatcgctgcagctgttatac

SEQ ID NO: 14638 - DNA, 175 bp, Homo sapiens
  MAP TO AL137071.3; EXPRESSED IN BRAIN, SIGNAL = 0.82; EXPRESSED IN HELA, SIGNAL = 0.7; EXPRESSED IN FETAL LIVER, SIGNAL = 0.78; EXPRESSED IN PLACENTA, SIGNAL = 0.88; EXPRESSED IN LUNG, SIGNAL = 0.88; EXPRESSED IN ADULT LIVER, SIGNAL = 0.81; EXPRESSED IN BONE MARROW, SIGNAL = 0.88; EST_HUMAN HIT: AL602137.1, EVALUE 2.00e-05; SWISSPROT HIT: Q9ZK28, EVALUE 5.70e+00; NT HIT: AL163247.2, EVALUE 4.00e-11
gctaacagcagtgaacagagaaacatgagtgtgaaaggttttcaaaaggagtttgacgtgaaggatgctttatatgctgttgtcaatgcctggaacacagtgattaaagacacagttggacatgcctggcacaaattctggcctggaaccatattcagtgatgatgaccaagatg

SEQ ID NO: 14639 - DNA, 177 bp, Homo sapiens
  MAP TO AC022619.3; EXPRESSED IN HELA, SIGNAL = 0.98; EXPRESSED IN ADULT LIVER, SIGNAL = 1.8; EXPRESSED IN BONE MARROW, SIGNAL = 1.9; EXPRESSED IN BRAIN, SIGNAL = 2.2; EXPRESSED IN LUNG, SIGNAL = 2.5; EXPRESSED IN PLACENTA, SIGNAL =   2; EXPRESSED IN HEART, SIGNAL = 1.7; EXPRESSED IN FETAL LIVER, SIGNAL =   2; EST_HUMAN HIT: R77369.1, EVALUE 2.00e-07; SWISSPROT HIT: Q9Y6C7, EVALUE 1.50e+00; NT HIT: AL163303.2, EVALUE 1.00e-05
ctcagtgggctgagaagaacaacacccaggagcaatgggcatacttggcacccagatcttggtttctagtattatcctccaataaaaggaaccacagctgcttggataaactgctggttgtgggactgaagcagaaaatatacaagatgagtgtggagcatcttgtagtcccagaag

SEQ ID NO: 14640 - DNA, 443 bp, Homo sapiens
  MAP TO CHR22_154.0; EXPRESSED IN BRAIN, SIGNAL = 0.36; EXPRESSED IN ADULT LIVER, SIGNAL = 0.36; NT HIT: AE006620.1, EVALUE 6.50e+00
tttagataacactcaataccaatgtgtgctgatgatgaaaatgatgatggtgatggagataatggtgatgtttgatgatggcgatggtgatgataaggatggtaatgatggcaatggtattggtgataatagcaatgatgacaataatagtagtgatggtgataatgatggtgatgatgatggtggtgataatggtgatgataatagttaggatgataatggttagaataatgatgatgatgatagtgttgataataatggtgatgacaatgaaggtgctgatggcaatggtgatgatggtgatgatgacaataatggtgataatggtgatgatggtaatgatgatgatgatgacatcatgatgatagtgatgatgatgatgatggtggcgatgatgatggctgatgatgacaatggtgatgatgataatgatgataccattt

SEQ ID NO: 14641 - DNA, 171 bp, Homo sapiens
  MAP TO AL138895.4; EXPRESSED IN BONE MARROW, SIGNAL = 1.1; EXPRESSED IN PLACENTA, SIGNAL = 1.2; EXPRESSED IN LUNG, SIGNAL = 1.2; EXPRESSED IN BRAIN, SIGNAL = 1.3; NT HIT: gi13375939, EVALUE 5.90e-01; EST_HUMAN HIT: AA428136.1, EVALUE 8.80e-01; SWISSPROT HIT: P70687, EVALUE 1.50e+00
aagcaacaaagcctcagaggaactggtcatggtcacccacagagagcactgatctttcacgtcacattccagctgctacagatgtcacaaaatcccatttatgcacttcttggcttcacagttacagcagttactgactcactgctcaaccctgttattgctgtcctaaag

SEQ ID NO: 14642 - DNA, 259 bp, Homo sapiens
  MAP TO AL137118.3; EXPRESSED IN BONE MARROW, SIGNAL = 1.1; EXPRESSED IN BRAIN, SIGNAL = 1.1; EXPRESSED IN HELA, SIGNAL = 0.69; EXPRESSED IN PLACENTA, SIGNAL = 1.3; EXPRESSED IN LUNG, SIGNAL = 1.2; EXPRESSED IN FETAL LIVER, SIGNAL = 0.9; EXPRESSED IN ADULT LIVER, SIGNAL = 1.1; NT HIT: AF254664.1, EVALUE 0.00e+00; EST_HUMAN HIT: AI056396.1, EVALUE 8.80e-02; SWISSPROT HIT: P32250, EVALUE 1.00e-18
aggaagccatgataaggatccatatgatcccacagaggatccaggcactcctgatgctggtgacatgcagaagccgaaaggggtgaaccattgccaggaaacgcacaacactcagcacggtcaggaaataaatactgctgtacatgttgacatacaaggaataagacataatcctgcaggccaggtctccaaatatccaattggagcctctaagataatagtcagccctgaagggaagcgtgcttatgaacaggagatc

SEQ ID NO: 14643 - DNA, 139 bp, Homo sapiens
  MAP TO AL136094.1; EXPRESSED IN BONE MARROW, SIGNAL = 0.92; EXPRESSED IN BRAIN, SIGNAL = 0.79; EXPRESSED IN PLACENTA, SIGNAL = 0.97; EXPRESSED IN LUNG, SIGNAL = 1.1; EXPRESSED IN ADULT LIVER, SIGNAL =   1; NT HIT: AF280107.1, EVALUE 1.00e-16; EST_HUMAN HIT: BG993909.1, EVALUE 2.00e-26; SWISSPROT HIT: P51944, EVALUE 7.70e+00
aatgcaagaaacacacttaccagtccaaaccaaaagaatggacttagagacaggaagaacaatggaagtgagacttttaatggtggtcttgcgagatcgggtgtctggtaggcaggcacatccaggacagttgcagcag

SEQ ID NO: 14644 - DNA, 153 bp, Homo sapiens
  MAP TO CHR22_166.0; EXPRESSED IN PLACENTA, SIGNAL = 1.2; EXPRESSED IN LUNG, SIGNAL = 0.6; EXPRESSED IN BRAIN, SIGNAL = 0.71; EXPRESSED IN FETAL LIVER, SIGNAL = 0.72; SWISSPROT HIT: P32927, EVALUE 2.00e-16; NT HIT: gi11418060, EVALUE 6.00e-50; EST_HUMAN HIT: BF884753.1, EVALUE 1.00e-27
ccgtggcccctgcacccaacgtcacagactcattcacccggcgaatgagggtcacgttgacgagccgctgggcatcctgggtgtctgcccacccgcaggtgatgtggctggtatagtcactgtagcagcgcagggtctgcagcaggacggttt

SEQ ID NO: 14645 - DNA, 98 bp, Homo sapiens
  MAP TO AL139253.1; EXPRESSED IN BRAIN, SIGNAL = 0.44; EXPRESSED IN PLACENTA, SIGNAL = 0.46; EXPRESSED IN LUNG, SIGNAL = 0.46; EXPRESSED IN FETAL LIVER, SIGNAL = 0.43; EXPRESSED IN BONE MARROW, SIGNAL = 0.42; SWISSPROT HIT: P06599, EVALUE 3.60e+00; NT HIT: Z71298.1, EVALUE 3.10e-01; EST_HUMAN HIT: BI601563.1, EVALUE 7.10e+00
atgcccaccttgggggtggtgaagaaccagctcttgctggggtggcacagcgaggactgtgccttggaggagctgctgtgtgaaccacatgcccctgg

SEQ ID NO: 14646 - DNA, 107 bp, Homo sapiens
  MAP TO AL136972.1; EXPRESSED IN BRAIN, SIGNAL = 0.91; EXPRESSED IN PLACENTA, SIGNAL = 0.75; EXPRESSED IN ADULT LIVER, SIGNAL = 0.68; EXPRESSED IN FETAL LIVER, SIGNAL = 0.64; EXPRESSED IN BONE MARROW, SIGNAL = 0.77; SWISSPROT HIT: Q61548, EVALUE 5.00e-14; NT HIT: gi7662227, EVALUE 1.00e-53; EST_HUMAN HIT: BG286057.1, EVALUE 6.00e-19
ctctgcaaccttgagaaattcagacactcgtgtcattctagttagaaatcgtttgtaaatttctagagcatctttacattgtcctttcttcatttcaaaaaactttt

SEQ ID NO: 14647 - DNA, 218 bp, Homo sapiens
  MAP TO CHR22_102.0; EXPRESSED IN FETAL LIVER, SIGNAL = 4.8; EXPRESSED IN PLACENTA, SIGNAL = 5.5; EXPRESSED IN ADULT LIVER, SIGNAL = 5.4; EXPRESSED IN BRAIN, SIGNAL = 4.7; EXPRESSED IN HELA, SIGNAL = 4.1; EXPRESSED IN LUNG, SIGNAL = 5.9; EXPRESSED IN HEART, SIGNAL = 4.4; EXPRESSED IN BONE MARROW, SIGNAL = 5.1; EST_HUMAN HIT: AA720719.1, EVALUE 1.10e+00; SWISSPROT HIT: P15265, EVALUE 2.00e-01; NT HIT: U29185.1, EVALUE 2.00e-01
ccagaggagctgctcccatatgcaacggcatgtccacagaccggccagagggcattgcggatgcggggggcaacagcttttctgcagaggtggggtttagtgggaaggggtgtagagtcagcaaggaggcgggagagcattccaggtggaagctcaggcaggaggatgcccttgaagaactgaaggaaggctgctgggccaggtcctcgggggcagag

SEQ ID NO: 14648 - DNA, 145 bp, Homo sapiens
  MAP TO AL121909.4; EXPRESSED IN BONE MARROW, SIGNAL = 4.2; EXPRESSED IN PLACENTA, SIGNAL = 4.4; EXPRESSED IN LUNG, SIGNAL = 4.2; EXPRESSED IN BRAIN, SIGNAL = 4.2; EXPRESSED IN ADULT LIVER, SIGNAL = 3.7; EXPRESSED IN HELA, SIGNAL = 2.1; EXPRESSED IN FETAL LIVER, SIGNAL = 4.6; NT HIT: AF378903.2, EVALUE 5.00e-04; EST_HUMAN HIT: BG181414.1, EVALUE 8.00e-07
tatgtatcgagcaacaatgaaacgtcagaacttcttctaagtcatttcaatattaacgcctttaattctcaaaacaacgctcttgaagtaagcactgtgattattcccattttacaaatgaggaaactgaaatacggagaggtta

SEQ ID NO: 14649 - DNA, 171 bp, Homo sapiens
  MAP TO AC011802.4; EXPRESSED IN BRAIN, SIGNAL = 0.62; EXPRESSED IN BONE MARROW, SIGNAL = 0.57; EXPRESSED IN ADULT LIVER, SIGNAL = 0.79; NT HIT: U69609.1, EVALUE 1.00e-91; EST_HUMAN HIT: AL538666.1, EVALUE 2.00e-91; SWISSPROT HIT: P02566, EVALUE 5.00e-03
gactctctagcagaagttgaagagaaatataagaaggctatggtttccaatgctcagctagacaatgaaaagacaaacttcatgtaccaggttgataccctaaaagatatgttgctggagcttgaagaacagctggctgaatctaggcggcagtacgaagagaaaaacaaa

SEQ ID NO: 14650 - DNA, 228 bp, Homo sapiens
  MAP TO CHR22_55.0; EXPRESSED IN BRAIN, SIGNAL = 1.4; EXPRESSED IN LUNG, SIGNAL =   1; EXPRESSED IN HELA, SIGNAL = 1.5; EXPRESSED IN HEART, SIGNAL = 1.2; EXPRESSED IN FETAL LIVER, SIGNAL =   2; NT HIT: gi14778462, EVALUE 1.00e-125; EST_HUMAN HIT: BI256535.1, EVALUE 1.00e-125; SWISSPROT HIT: Q9Y3I1, EVALUE 2.00e-39
ttagggcctagtcaaaattttgaagctgagtcaattcaagataatgcgcatatggcagagggcacaggtttctatccctcagaacccatgctctgtagtgaatcggtggaagggcaagtgccacattcattagagaccttgtatcaatcagctgactgttctgatgccaatgatgccttgatagtgttgatacatcttctcatgttggagtcaggttacatacctcag

SEQ ID NO: 14651 - DNA, 434 bp, Homo sapiens
  MAP TO CHR22_6.0; EXPRESSED IN BONE MARROW, SIGNAL = 2.2; EXPRESSED IN BRAIN, SIGNAL = 2.2; EXPRESSED IN HEART, SIGNAL = 2.2; EXPRESSED IN FETAL LIVER, SIGNAL = 2.3; EXPRESSED IN HELA, SIGNAL = 3.7; EXPRESSED IN ADULT LIVER, SIGNAL = 3.7; EXPRESSED IN LUNG, SIGNAL = 2.9; EXPRESSED IN PLACENTA, SIGNAL = 2.5; NT HIT: AF182714.1, EVALUE 1.00e-84; EST_HUMAN HIT: R88591.1, EVALUE 9.40e+00; SWISSPROT HIT: Q14681, EVALUE 5.00e-02
gtgccctgctgcaggaggagaggctggacgcggtgaccctgctttacgccacctcgctgcccagcttctgcctgctggcgggtgcagccctggtgctggaggctggcgttgccccaccgcccactgctggcgactctcgcctctgggcctgcatcctgctcagctgcctcctgtctgttctctataacctggccagcttctccctgctggccctcacctctgccctcaccgtccacgtcctgggcaacctcaccgtggtgggcaacctcatcctgtcccggctgttgtttggcagccgcctcagtgccctcagctacgtgggcatcgcactcactctttcaggaatgttcctttaccacaactgcgagttcgtggcctcctgggctgcccgtcgggggctgtggcggagggaccagcccagcaagggtctttga

SEQ ID NO: 14652 - DNA, 205 bp, Homo sapiens
  MAP TO AL138832.2; EXPRESSED IN BRAIN, SIGNAL = 5.8; EXPRESSED IN FETAL LIVER, SIGNAL = 5.1; EXPRESSED IN LUNG, SIGNAL = 5.9; EXPRESSED IN BONE MARROW, SIGNAL = 4.7; NT HIT: AF281870.1, EVALUE 1.00e-24; EST_HUMAN HIT: BF892989.1, EVALUE 3.00e-87; SWISSPROT HIT: P39194, EVALUE 1.40e+00
atggaataacttgctggaagagattgctgagcagctacagtccagcaaggccctacttcagctttggcaaagatacaaggactactccaaacagtgtgcttcgacagttcagcagcaggaggatcgaaccaatgagctgttgaaggcagccacaaacaaggacattgccgatgatgaggttgccacatggattcaagattgcaac

SEQ ID NO: 14653 - DNA, 114 bp, Homo sapiens
  MAP TO AC025745.1; EXPRESSED IN HELA, SIGNAL = 2.5; EXPRESSED IN HEART, SIGNAL = 4.5; EXPRESSED IN LUNG, SIGNAL = 5.5; EXPRESSED IN ADULT LIVER, SIGNAL = 4.7; EXPRESSED IN FETAL LIVER, SIGNAL = 4.8; EXPRESSED IN BONE MARROW, SIGNAL = 5.6; EXPRESSED IN BRAIN, SIGNAL = 4.8; SWISSPROT HIT: P55118, EVALUE 4.60e+00; NT HIT: AL163303.2, EVALUE 4.00e-13; EST_HUMAN HIT: AL133738.1, EVALUE 5.00e-26
atggatgactttgaggaattcaagacttcatcagacaaagttactgcagatttggtagaaatagcaaaagaactagaattagaagtggagtctgaagatgggactgaactcctg

SEQ ID NO: 14654 - DNA, 231 bp, Homo sapiens
  MAP TO CHR22_163.0; EXPRESSED IN BRAIN, SIGNAL = 0.47; EXPRESSED IN BONE MARROW, SIGNAL = 0.57; EXPRESSED IN LUNG, SIGNAL = 0.53; EST_HUMAN HIT: BI463836.1, EVALUE 1.00e-122; SWISSPROT HIT: O95180, EVALUE 4.10e-01; NT HIT: gi12232476, EVALUE 1.00e-127
acaggggtggctctgcgactttgaccctggtctcagctcctgagtgggcaatgagagggcagatctggtgccttccgagacgtcagggacactgctccctctctgggccacggccgagtcaccagtggccattggtgtggctgctgtctcggaactgaacctgctcaggaagtccgggtatttcagcctccccttggcattgactggcatctcgttccagagtctgtcaaa

SEQ ID NO: 14655 - DNA, 172 bp, Homo sapiens
  MAP TO AL136450.1; EXPRESSED IN BRAIN, SIGNAL = 1.8; EXPRESSED IN HEART, SIGNAL = 1.6; EXPRESSED IN BONE MARROW, SIGNAL = 1.8; EXPRESSED IN LUNG, SIGNAL = 1.9; EXPRESSED IN ADULT LIVER, SIGNAL =   4; EXPRESSED IN PLACENTA, SIGNAL = 2.2; NT HIT: gi13650211, EVALUE 6.00e-78; EST_HUMAN HIT: AU116901.1, EVALUE 9.00e-78; SWISSPROT HIT: Q00653, EVALUE 1.10e-02
cctgtatcacctccacaggccagttcatgatgcggtggtcaatgacaacctggagaccatctggctcctgctgtcctatggggccgatcccacactggctacctactcgggtcagacagccatgaagctggccagcagcgacaccatgaagcgctttctcagtggtaagcat

SEQ ID NO: 14656 - DNA, 218 bp, Homo sapiens
  MAP TO CHR22_180.0; EXPRESSED IN PLACENTA, SIGNAL = 2.3; EXPRESSED IN LUNG, SIGNAL = 2.6; EXPRESSED IN ADULT LIVER, SIGNAL = 3.3; EXPRESSED IN BONE MARROW, SIGNAL = 2.2; EXPRESSED IN BRAIN, SIGNAL = 2.1; EXPRESSED IN HELA, SIGNAL = 2.3; EXPRESSED IN FETAL LIVER, SIGNAL = 2.6; NT HIT: gi15319117, EVALUE 1.00e-119; EST_HUMAN HIT: BE783410.1, EVALUE 1.00e-89; SWISSPROT HIT: O30280, EVALUE 4.00e+00
cagttgtggccctgggggtgctggacggtggggtgtgtggctgccactgagggcttggtccagggcccggccagcagtggggcagggctagtggtcgtcatggtgacctggagcagctgctcgccctgtatcagtctcaggagggcccgcaggcggtccagggatgactgggtgcccctctggcgggccagcaggcttgtcttcaactccaggcattt

SEQ ID NO: 14657 - DNA, 177 bp, Homo sapiens
  MAP TO AC011792.5; EXPRESSED IN LUNG, SIGNAL = 0.79; EXPRESSED IN BRAIN, SIGNAL = 0.78; EXPRESSED IN ADULT LIVER, SIGNAL = 0.86; EXPRESSED IN FETAL LIVER, SIGNAL = 0.79; EXPRESSED IN BONE MARROW, SIGNAL = 0.83; NT HIT: AF288742.1, EVALUE 7.00e-16; EST_HUMAN HIT: AL521707.1, EVALUE 7.00e-20; SWISSPROT HIT: P26364, EVALUE 3.80e-01
atggatgaggagttgcttctgatggatgagcaaataaagtggtttcttaacatgaaatctgttcccggggaagatgctgtaaacactgctgatatgataacaaaggacttagaatataacataaatttatttgacaaagcagtggagcagtttaagaggactgactcaaatattaaa

SEQ ID NO: 14658 - DNA, 136 bp, Homo sapiens
  MAP TO AC006349.3; EXPRESSED IN BRAIN, SIGNAL = 0.54; EXPRESSED IN FETAL LIVER, SIGNAL = 0.42; EXPRESSED IN PLACENTA, SIGNAL = 0.49; NT HIT: gi7662123, EVALUE 2.90e-02; EST_HUMAN HIT: BF374545.1, EVALUE 4.30e-02; SWISSPROT HIT: P42065, EVALUE 6.80e-01
accctctgcagtccttccaggatcgccctcctaaatacctcctgaaggagacattgtgcatgacagatgccctttgcacattctggtctcctcgctacctcaggccctgccctgccatcttgccacatgccatcag

SEQ ID NO: 14659 - DNA, 234 bp, Homo sapiens
  MAP TO AL121954.3; EXPRESSED IN BONE MARROW, SIGNAL = 0.48; EXPRESSED IN PLACENTA, SIGNAL = 0.48; EXPRESSED IN LUNG, SIGNAL = 0.74; EXPRESSED IN BRAIN, SIGNAL = 0.57; EXPRESSED IN FETAL LIVER, SIGNAL = 0.47; SWISSPROT HIT: Q03933, EVALUE 2.00e-20; NT HIT: M65217.1, EVALUE 1.00e-129; EST_HUMAN HIT: BG929480.1, EVALUE 1.00e-129
tttcccaaaagattgatgttatcattcaaaatggaatccatcatggtcactggatcttctgaggtcagactggatgagccatttagctggacagcactagacatgagagggctgctgccatcactgcctgaacttagggattctctggctggttcattctgctctccactctgaatgacaggtgcatactcatcttcattgtcatcttcaacgatgacaatatcagggtactgg

SEQ ID NO: 14660 - DNA, 166 bp, Homo sapiens
  MAP TO AC021010.3; EXPRESSED IN BRAIN, SIGNAL = 0.5; EXPRESSED IN FETAL LIVER, SIGNAL = 0.55; EXPRESSED IN LUNG, SIGNAL = 0.53; EXPRESSED IN BONE MARROW, SIGNAL = 0.64; EXPRESSED IN ADULT LIVER, SIGNAL = 0.44; EST_HUMAN HIT: BE253605.1, EVALUE 9.00e-41; SWISSPROT HIT: O43830, EVALUE 8.00e-14; NT HIT: gi14758035, EVALUE 4.00e-36
atgagtgtggcaagaccttcagtcagaagtcttaccttcaatgccatcatagacttcatactggacagaaaccttacaaatgagaataatgtgacaaagtttacagttgcagatcacaacttaaaacacataggagaattcatactggaggaaaaagcatacaaat

SEQ ID NO: 14661 - DNA, 134 bp, Homo sapiens
  MAP TO CHR22_1.0; EXPRESSED IN BONE MARROW, SIGNAL = 3.8; EXPRESSED IN HEART, SIGNAL = 3.4; EXPRESSED IN LUNG, SIGNAL = 4.6; EXPRESSED IN BRAIN, SIGNAL = 3.4; EXPRESSED IN PLACENTA, SIGNAL =   4; EXPRESSED IN FETAL LIVER, SIGNAL = 3.7; NT HIT: M64933.1, EVALUE 1.80e+00; EST_HUMAN HIT: AA180256.1, EVALUE 4.20e-02; SWISSPROT HIT: Q01955, EVALUE 1.80e-01
tcagaaagccaagagggcaaagccatggaagtgtggggaggcagagggtgccaggggtgccggctgtcccaggacagcagcgaggaagggggtctctactcctttctcctcctcctggtggacgatctcagacc

SEQ ID NO: 14662 - DNA, 195 bp, Homo sapiens
  MAP TO CHR22_11.0; EXPRESSED IN HEART, SIGNAL = 3.5; EXPRESSED IN HELA, SIGNAL =  17; EXPRESSED IN BRAIN, SIGNAL = 3.9; EXPRESSED IN LUNG, SIGNAL = 4.2; EXPRESSED IN ADULT LIVER, SIGNAL = 4.5; EXPRESSED IN PLACENTA, SIGNAL = 4.2; EXPRESSED IN FETAL LIVER, SIGNAL = 4.3; EXPRESSED IN BONE MARROW, SIGNAL =   4; NT HIT: AF421855.1, EVALUE 1.70e-01
ctttggcacagcctcagctgcctccaacaggcctttcaccagccaccagcccttggtcacctccctctcctgggtcctcatctgtaacacaggaccgtcataggacagacctccagcggtgattgtgaggatgctcagagcttggagcagagcctggagcatggtgagagctccatgagcgtgagcactcagcat

SEQ ID NO: 14663 - DNA, 125 bp, Homo sapiens
  MAP TO AC016714.2; EXPRESSED IN LUNG, SIGNAL = 1.3; EXPRESSED IN FETAL LIVER, SIGNAL = 0.94; EXPRESSED IN BONE MARROW, SIGNAL = 0.92; EXPRESSED IN BRAIN, SIGNAL =   1; NT HIT: U57785.1, EVALUE 4.10e-01; EST_HUMAN HIT: BI054042.1, EVALUE 3.90e-02; SWISSPROT HIT: P29121, EVALUE 4.60e+00
tcaggtttccatctcttcctgtacctccaattcccctttcaccttctccatcatatgagcagcatgaaagagctcaccagaagctggggacatgcccttgagcttctcagccttcaaatcatggg

SEQ ID NO: 14664 - DNA, 174 bp, Homo sapiens
  MAP TO CHR21_24.0; EXPRESSED IN FETAL LIVER, SIGNAL = 0.98; EXPRESSED IN ADULT LIVER, SIGNAL = 0.47; EXPRESSED IN PLACENTA, SIGNAL = 0.64; EXPRESSED IN HELA, SIGNAL =   3; EXPRESSED IN BRAIN, SIGNAL = 1.2; NT HIT: gi4758763, EVALUE 2.00e-93; EST_HUMAN HIT: AI500562.1, EVALUE 3.00e-93; SWISSPROT HIT: O15394, EVALUE 3.00e-28
acgtgccatccagtccctatggagtgaagatcatagagctgtcgcagaccacggccaaggtttccttcaacaaaccggactcccatggaggtgtacctattcatcactatcaggtggatgtcaaagaagtagcgtcagaaatctggaaaattgtacgctcccatggagttcaaa

SEQ ID NO: 14665 - DNA, 86 bp, Homo sapiens
  MAP TO CHR21_27.0; EXPRESSED IN BONE MARROW, SIGNAL = 1.1; EXPRESSED IN PLACENTA, SIGNAL = 0.68; EXPRESSED IN BRAIN, SIGNAL = 1.1; EXPRESSED IN ADULT LIVER, SIGNAL = 0.51; EXPRESSED IN HELA, SIGNAL = 2.8; EXPRESSED IN FETAL LIVER, SIGNAL = 0.86; NT HIT: AF315580.1, EVALUE 2.70e-01
tgctattaaaaatcaccatctttgttctcggcagcccccaacctgagatcatcttctgtcagtatcacttggtcagcctccagaaa

SEQ ID NO: 14666 - DNA, 174 bp, Homo sapiens
  MAP TO CHR22_163.0; EXPRESSED IN FETAL LIVER, SIGNAL = 0.46; EXPRESSED IN PLACENTA, SIGNAL = 0.5; EXPRESSED IN LUNG, SIGNAL = 0.49; EXPRESSED IN ADULT LIVER, SIGNAL = 0.59; EXPRESSED IN BONE MARROW, SIGNAL = 0.46; EXPRESSED IN BRAIN, SIGNAL = 0.39; SWISSPROT HIT: O60481, EVALUE 7.50e+00; EST_HUMAN HIT: AF012354.1, EVALUE 2.00e-44; NT HIT: gi14779488, EVALUE 2.00e-93
ctctcagaaagatctggctgctgctgttcatctttttgtaaatgttcacttaacagctgatcctttggaacaagaactggagagacagtgggtgggccatcaattcctatgcatgccaaaagtttcttgtaaaggattcttcctgaaccaatgtcctgaatcttactgcagagt

SEQ ID NO: 14667 - DNA, 59 bp, Homo sapiens
  MAP TO CHR21_22.0; EXPRESSED IN BONE MARROW, SIGNAL = 0.85; EXPRESSED IN LUNG, SIGNAL = 0.61; EXPRESSED IN BRAIN, SIGNAL = 0.83; EXPRESSED IN ADULT LIVER, SIGNAL = 0.55; EXPRESSED IN HELA, SIGNAL = 2.6; EXPRESSED IN FETAL LIVER, SIGNAL = 0.84; NT HIT: AJ303345.1, EVALUE 9.90e+00
gcaatttatgtgtcaccacaatgatgataacaatcttcataaaaattcttttgtccatc

SEQ ID NO: 14668 - DNA, 116 bp, Homo sapiens
  MAP TO AL121994.3; EXPRESSED IN BRAIN, SIGNAL = 0.92; EXPRESSED IN FETAL LIVER, SIGNAL = 0.94; EXPRESSED IN PLACENTA, SIGNAL = 1.1; EXPRESSED IN LUNG, SIGNAL = 0.97; EXPRESSED IN ADULT LIVER, SIGNAL = 1.2; EXPRESSED IN BONE MARROW, SIGNAL = 0.93; SWISSPROT HIT: P18201, EVALUE 4.60e+00; NT HIT: gi15295478, EVALUE 5.90e+00; EST_HUMAN HIT: BI907377.1, EVALUE 1.40e-01
atggcgtattctaccgccttccggaaatgcggtgagggcctgaggtcctgtttccttctgccagtgagctcggccctcagcgggaagggttggcagacgaccgtattttacaccag

SEQ ID NO: 14669 - DNA, 179 bp, Homo sapiens
  MAP TO AL133553.2; EXPRESSED IN BRAIN, SIGNAL = 1.1; EXPRESSED IN HELA, SIGNAL = 0.59; EXPRESSED IN FETAL LIVER, SIGNAL = 0.95; EXPRESSED IN BONE MARROW, SIGNAL = 0.99; EXPRESSED IN PLACENTA, SIGNAL = 1.3; EXPRESSED IN ADULT LIVER, SIGNAL = 1.4; SWISSPROT HIT: Q07008, EVALUE 4.00e-03; EST_HUMAN HIT: BG714827.1, EVALUE 1.00e-64; NT HIT: gi14730477, EVALUE 9.00e-65
ttgacttgttgacggcaaactgatctcagtcacggaaacagccagacactcaccaatacaggttccattttctgccttggtcattccatttggacaaagatcaatgcacttatagccaccacgggtgttcttacagtgctgatctggtctgcatacattttgtctacactcgttcacat

SEQ ID NO: 14670 - DNA, 256 bp, Homo sapiens
  MAP TO AL160058.2; EXPRESSED IN BONE MARROW, SIGNAL =   1; EXPRESSED IN LUNG, SIGNAL = 0.99; EXPRESSED IN BRAIN, SIGNAL = 0.96; EXPRESSED IN PLACENTA, SIGNAL =   1; EXPRESSED IN HELA, SIGNAL = 0.73; EXPRESSED IN FETAL LIVER, SIGNAL = 1.1; SWISSPROT HIT: P33951, EVALUE 3.30e+00; EST_HUMAN HIT: AI284358.1, EVALUE 8.70e-02; NT HIT: AF272652.1, EVALUE 5.90e-02
gaaagtagcttgtagagcagaaagtatcagtgaccactgactgctgcaagaggaagacagggaggggaggaagggccacattaagattggccttgttggccataataaggatcaaattcttatgcaccaccacatagccctttccaaagcccacattgatcttcatcccccacagcaccatcctgctgtacaaaagggcccagttgtgataatcactacaactggggagatgttggtcatcacaggctctgggggt

SEQ ID NO: 14671 - DNA, 187 bp, Homo sapiens
  MAP TO CHR22_85.0; EXPRESSED IN LUNG, SIGNAL = 0.75; EXPRESSED IN BRAIN, SIGNAL = 0.69; EXPRESSED IN PLACENTA, SIGNAL = 0.72; EXPRESSED IN ADULT LIVER, SIGNAL = 0.76; EXPRESSED IN FETAL LIVER, SIGNAL = 0.62; EXPRESSED IN BONE MARROW, SIGNAL = 0.64; SWISSPROT HIT: P22329, EVALUE 4.30e+00; NT HIT: AF243382.1, EVALUE 4.20e-02; EST_HUMAN HIT: AA169742.1, EVALUE 6.20e-02
gtctccttccagctcagggatagccctttctctctggtcagcagccactttacacatggcccctgccgaggccccaaccatctctgcagctgctgtggctgctgcgtctgtctgtggagctcatgtaaaccctgggcagaagccttgggctatgagaaggaagatgccttctgctttctgtgcaaag

SEQ ID NO: 14672 - DNA, 115 bp, Homo sapiens
  MAP TO CHR22_104.0; EXPRESSED IN HELA, SIGNAL =   2; EXPRESSED IN LUNG, SIGNAL =   3; EXPRESSED IN PLACENTA, SIGNAL = 3.5; EXPRESSED IN ADULT LIVER, SIGNAL = 3.1; EXPRESSED IN HEART, SIGNAL = 2.4; EXPRESSED IN FETAL LIVER, SIGNAL = 2.8; EXPRESSED IN BONE MARROW, SIGNAL = 2.8; EXPRESSED IN BRAIN, SIGNAL = 2.8; SWISSPROT HIT: P10220, EVALUE 2.70e+00; NT HIT: D30811.1, EVALUE 5.90e+00; EST_HUMAN HIT: BE439734.1, EVALUE 5.50e-01
cttcagcaggccctgcccctcaacccccaaccctgggaatctaagggcgagaagccagtccaagatcctggcgtgtcagcacatcagacccgtggggccctttggagccccaggg

SEQ ID NO: 14673 - DNA, 133 bp, Homo sapiens
  MAP TO AL136382.1; EXPRESSED IN PLACENTA, SIGNAL = 0.64; EXPRESSED IN FETAL LIVER, SIGNAL = 0.63; EXPRESSED IN LUNG, SIGNAL = 0.8; EXPRESSED IN ADULT LIVER, SIGNAL = 0.64; EXPRESSED IN BONE MARROW, SIGNAL = 0.59; EXPRESSED IN BRAIN, SIGNAL = 0.7; NT HIT: AB033055.1, EVALUE 4.00e-69; EST_HUMAN HIT: BG610801.1, EVALUE 6.00e-69
cctgaagcaggacattctaaatgaaaagactgaattggaagcaacacttaaggaagcggagttggtaactcattctgtagaattgcttttgccactatttaaggacaccattgaaaagattaattttgaaaat

SEQ ID NO: 14674 - DNA, 148 bp, Homo sapiens
  MAP TO AC015930.3; EXPRESSED IN PLACENTA, SIGNAL = 1.1; EXPRESSED IN LUNG, SIGNAL =   1; EXPRESSED IN HELA, SIGNAL = 0.97; EXPRESSED IN BRAIN, SIGNAL = 1.1; EXPRESSED IN ADULT LIVER, SIGNAL = 2.5; EXPRESSED IN BONE MARROW, SIGNAL = 1.1; NT HIT: gi9628510, EVALUE 7.90e+00
tgagaaagtcccctgatcctccctcctgtccttttccaaagaatctatctctctttgtctctgtctctgcctcactctccgtctctctctcactctctctctgtctctctctctctctctctttggcagcctcattcatttcctcact

SEQ ID NO: 14675 - DNA, 154 bp, Homo sapiens
  MAP TO AL121993.2; EXPRESSED IN BRAIN, SIGNAL = 0.53; EXPRESSED IN PLACENTA, SIGNAL = 0.64; EXPRESSED IN LUNG, SIGNAL = 0.67; EXPRESSED IN FETAL LIVER, SIGNAL = 0.5; EXPRESSED IN BONE MARROW, SIGNAL = 0.44; SWISSPROT HIT: P36328, EVALUE 2.30e-01; NT HIT: gi8923142, EVALUE 1.00e-81; EST_HUMAN HIT: BE741077.1, EVALUE 2.00e-81
ggtgccgaacaggtgaagcaaaattgacaaaaggattcaatctagctgcccggttcatcattcacacagtgggacctaaatataaaagccgctatcgcacagcagctgagagttccctttatagctgctacagaaacgtacttcaactagcaaa

SEQ ID NO: 14676 - DNA, 313 bp, Homo sapiens
  MAP TO CHR22_198.0; EXPRESSED IN HELA, SIGNAL = 0.52; EXPRESSED IN FETAL LIVER, SIGNAL = 0.6; EXPRESSED IN BONE MARROW, SIGNAL = 0.53; EXPRESSED IN BRAIN, SIGNAL = 0.6; SWISSPROT HIT: P20268, EVALUE 9.70e-01; EST_HUMAN HIT: BG771236.1, EVALUE 6.70e+00
taaagaaatgaaagttcaaaagagggtgttggaggatcaatgcaaaagtcaccaatctctcttcctgaagctggtgcaagtggacaaactggagctggcagaaaaacctgagaagccaagcatgtctagctgcggaactaggattgtgaaggtggtgtgtggaggggatctgtggggaagatgttgcttccatgtaatcattacgaggcatttggtgatggacctgggactgctgttggtcagcaagatcagcagtcacctggagaaagatgaaaaactggaacttaccaggcaccatcacattagtcaatga

SEQ ID NO: 14677 - DNA, 227 bp, Homo sapiens
  MAP TO AL133543.2; EXPRESSED IN HELA, SIGNAL = 1.4; EXPRESSED IN BRAIN, SIGNAL = 0.68; EXPRESSED IN FETAL LIVER, SIGNAL = 0.8; EXPRESSED IN LUNG, SIGNAL = 1.7; EXPRESSED IN BONE MARROW, SIGNAL = 0.76; EXPRESSED IN ADULT LIVER, SIGNAL = 1.5; SWISSPROT HIT: P15924, EVALUE 1.00e-34; NT HIT: gi15300899, EVALUE 1.00e-110; EST_HUMAN HIT: AW370867.1, EVALUE 1.00e-118
ctgaaaacaatgcggcaggaagattacatgaagacgatagccgaccttgagttacattaccaagagttcatcagaaatagccaaggctcagagatgtttggagatgatgacaagcggaaaatacagtctcagttcaccgatgcccagaagcattaccagaccctggtcattcagctccctggctatccccagcaccagacaggtcggcttgggacatctttctcttt

SEQ ID NO: 14678 - DNA, 137 bp, Homo sapiens
  MAP TO CHR22_107.0; EXPRESSED IN HELA, SIGNAL = 2.6; EXPRESSED IN HEART, SIGNAL = 2.7; EXPRESSED IN LUNG, SIGNAL = 3.6; EXPRESSED IN FETAL LIVER, SIGNAL = 3.2; EXPRESSED IN PLACENTA, SIGNAL = 3.7; EXPRESSED IN ADULT LIVER, SIGNAL = 3.8; EXPRESSED IN BONE MARROW, SIGNAL = 3.5; EXPRESSED IN BRAIN, SIGNAL = 3.3; SWISSPROT HIT: P57783, EVALUE 4.00e-01; NT HIT: gi15318205, EVALUE 2.00e-71; EST_HUMAN HIT: BG696148.1, EVALUE 3.00e-71
gcgggaagcaattatccccgctgttggaactgcggcggcccatggggccccgggcgggaggacaggttcttctgcccacagtgccgagcgctgcaggcacctgaccccactcgagactacttcagccttatggactg

SEQ ID NO: 14679 - DNA, 133 bp, Homo sapiens
  MAP TO CHR21_8.0; EXPRESSED IN BRAIN, SIGNAL =   1; EXPRESSED IN HELA, SIGNAL = 2.5; EXPRESSED IN PLACENTA, SIGNAL = 0.78; EXPRESSED IN FETAL LIVER, SIGNAL = 0.93; EXPRESSED IN BONE MARROW, SIGNAL =   1; NT HIT: AL163213.2, EVALUE 4.00e-69; EST_HUMAN HIT: BF808137.1, EVALUE 4.20e-02
gttaattcagtcaaagaaaccatttgatctgaatgtgtgaccgaatgaccagtggtttgactgaattcacagccaccgtggctgctctgcccatgcgagtccacaagggctttgtttgcttgctggcagtctc

SEQ ID NO: 14680 - DNA, 156 bp, Homo sapiens
  MAP TO CHR21_29.0; EXPRESSED IN BONE MARROW, SIGNAL = 1.3; EXPRESSED IN HELA, SIGNAL = 3.9; EXPRESSED IN BRAIN, SIGNAL = 1.3; EXPRESSED IN LUNG, SIGNAL = 0.9; SWISSPROT HIT: P51820, EVALUE 8.80e-01; NT HIT: AE002289.1, EVALUE 5.40e-01; EST_HUMAN HIT: BE093705.1, EVALUE 2.00e-01
atggccaagatggaagagcctctcatactcagagaccagaccactaagaagacctgcacagtccaagatcttcagaaggaaggcactgagaatatacagcccagggaagatgcagaccctgggctaagggagagaaagctgggaacgcttcacagg

SEQ ID NO: 14681 - DNA, 195 bp, Homo sapiens
  MAP TO AL137145.3; EXPRESSED IN PLACENTA, SIGNAL = 0.43; EXPRESSED IN BONE MARROW, SIGNAL = 0.58; EXPRESSED IN BRAIN, SIGNAL = 0.55; EXPRESSED IN FETAL LIVER, SIGNAL = 0.43; EST_HUMAN HIT: AI365263.1, EVALUE 2.00e-23; SWISSPROT HIT: O09037, EVALUE 6.40e-01; NT HIT: AF111167.2, EVALUE 1.00e-48
agatgtctttaactctctggaggttggcgagggaggaatcccttacattgagctggtgagcaaggccatgctcgagctgaagcctctggagtcttcagacctcaccaaagtcgtggtttatggctactatttgtacaagctccagaccaagtggatgctccagtccgtggctgagtggcaccgccagcgccagga

SEQ ID NO: 14682 - DNA, 139 bp, Homo sapiens
  MAP TO CHR22_202.0; EXPRESSED IN BONE MARROW, SIGNAL = 0.52; EXPRESSED IN BRAIN, SIGNAL = 0.56; NT HIT: X14614.1, EVALUE 5.00e-07; EST_HUMAN HIT: BF898946.1, EVALUE 4.40e-02; SWISSPROT HIT: Q12680, EVALUE 2.60e+00
tcagaaagcccatcctttgaagatgctactgagatccctgtgtggaggaggtgtgttgtgtggtgctttatgcaaatctttaccacattcaccacctttagcaccacccaggttctcagccctgagagcagccacactg

SEQ ID NO: 14683 - DNA, 217 bp, Homo sapiens
  MAP TO AF168787.1; EXPRESSED IN FETAL LIVER, SIGNAL = 0.78; EXPRESSED IN BONE MARROW, SIGNAL = 0.68; EXPRESSED IN LUNG, SIGNAL = 0.84; EXPRESSED IN BRAIN, SIGNAL = 0.75; EXPRESSED IN ADULT LIVER, SIGNAL = 0.79; EXPRESSED IN PLACENTA, SIGNAL = 0.75; SWISSPROT HIT: P38570, EVALUE 1.00e-15; NT HIT: gi15314182, EVALUE 2.00e-53
cagcttcctcctcctcctcgtcttcctcctcctccttgtcttcctcctcctccttctccagagcccggcgctgcctggctgtgttcacatcgtcttctccaccgccttctttgttgctgtagcagtctccagtgtccacacgtgcatctggatccaggagattttctttaaaaacacacatggaagagctcagagtcagaaaggctccatcctcgcc

SEQ ID NO: 14684 - DNA, 114 bp, Homo sapiens
  MAP TO AC017082.3; EXPRESSED IN LUNG, SIGNAL = 0.6; EXPRESSED IN BONE MARROW, SIGNAL = 0.61; EXPRESSED IN PLACENTA, SIGNAL = 0.62; EXPRESSED IN ADULT LIVER, SIGNAL = 0.58; EXPRESSED IN BRAIN, SIGNAL = 0.73; EXPRESSED IN FETAL LIVER, SIGNAL = 0.75; SWISSPROT HIT: Q9Y5I3, EVALUE 6.00e+00; EST_HUMAN HIT: BF680531.1, EVALUE 3.50e-02
ttctcttattctccctcttgttttgtctcttgctcccaccttcacttttcttctttgtcttagcatccatagcagcagcaatagtcacaaagcctctagctcttccaccaactt

SEQ ID NO: 14685 - DNA, 155 bp, Homo sapiens
  MAP TO AC018691.5; EXPRESSED IN HEART, SIGNAL = 1.3; EXPRESSED IN PLACENTA, SIGNAL = 1.6; EXPRESSED IN HELA, SIGNAL = 0.85; EXPRESSED IN BRAIN, SIGNAL = 1.4; EXPRESSED IN LUNG, SIGNAL = 1.8; EXPRESSED IN ADULT LIVER, SIGNAL = 1.7; EXPRESSED IN FETAL LIVER, SIGNAL = 1.2; EXPRESSED IN BONE MARROW, SIGNAL = 1.3; SWISSPROT HIT: P04951, EVALUE 1.50e+00; NT HIT: AF109906.1, EVALUE 2.10e+00; EST_HUMAN HIT: BG477528.1, EVALUE 7.80e-01
gagacgaacaagaagacagtccatgcaaaatattgcagcaggtttgtccatgctccctggaaggatgggagcttggtccacgtcaacattaccaaagagaagtgcaagtggtacagtgagagaatccacacagccctggcccggatccgaaggag

SEQ ID NO: 14686 - DNA, 144 bp, Homo sapiens
  MAP TO AL133406.3; EXPRESSED IN FETAL LIVER, SIGNAL = 1.2; EXPRESSED IN BONE MARROW, SIGNAL =   1; EXPRESSED IN PLACENTA, SIGNAL = 1.2; EXPRESSED IN BRAIN, SIGNAL =   1; EXPRESSED IN LUNG, SIGNAL = 1.2; EXPRESSED IN HELA, SIGNAL = 0.72; NT HIT: AJ012013.1, EVALUE 3.10e-02; SWISSPROT HIT: Q13563, EVALUE 2.60e+00
gatggaccagggcaccagagcagctgttcccaaggcagcagggatgaccacagccatgctcagagcccagcccttgactcgggaggccgacacagtagcagtgttaggagggcagacagtgatggtggtggtggggatgtccat

SEQ ID NO: 14687 - DNA, 147 bp, Homo sapiens
  MAP TO AC021722.4; EXPRESSED IN FETAL LIVER, SIGNAL = 1.6; EXPRESSED IN BONE MARROW, SIGNAL = 1.4; EXPRESSED IN HEART, SIGNAL = 2.8; EXPRESSED IN HELA, SIGNAL = 0.78; EXPRESSED IN BRAIN, SIGNAL = 1.6; EXPRESSED IN PLACENTA, SIGNAL = 1.8; EXPRESSED IN LUNG, SIGNAL = 1.5; EXPRESSED IN ADULT LIVER, SIGNAL = 1.6; SWISSPROT HIT: P48280, EVALUE 5.20e-01; NT HIT: gi11418013, EVALUE 1.00e-07; EST_HUMAN HIT: BI827007.1, EVALUE 2.00e-07
ctatttgatatgcttacattggatgctccagaggtcatcagaaataataaagaagttatgggtcgtgtcaacatccaaggtcacgtccacttggaacttcagcattctaggattcatctgtagaaaagctctcagctggggctccat

SEQ ID NO: 14688 - DNA, 130 bp, Homo sapiens
  MAP TO CHR22_77.0; EXPRESSED IN HELA, SIGNAL = 0.9; EXPRESSED IN BRAIN, SIGNAL = 0.44; EXPRESSED IN LUNG, SIGNAL = 0.5; SWISSPROT HIT: P40489, EVALUE 3.50e+00; NT HIT: gi14772550, EVALUE 1.70e+00; EST_HUMAN HIT: AW898189.1, EVALUE 6.40e-01
tgccacccagccctgagactggacctacagggataatctctgagatgagatttaagtcaattccaagcatggaaatcggtgaaattaccctccaccgctccaacaacatctctgggcaggcaaggttggg

SEQ ID NO: 14689 - DNA, 168 bp, Homo sapiens
  MAP TO AL160002.2; EXPRESSED IN BRAIN, SIGNAL = 0.74; EXPRESSED IN FETAL LIVER, SIGNAL = 0.68; EXPRESSED IN LUNG, SIGNAL = 0.65; EXPRESSED IN ADULT LIVER, SIGNAL = 0.63; EXPRESSED IN BONE MARROW, SIGNAL = 0.75; EXPRESSED IN PLACENTA, SIGNAL = 0.77; SWISSPROT HIT: Q61789, EVALUE 7.00e-09; NT HIT: gi13507635, EVALUE 2.00e-81
ctatgcacacattctcatcgtccagttgtgcagaagcatttctgaagtagcccagcctgcataactcacagtgctgccctctagtgttgtgtttacagctcacgcaaatgactgtatttagcagatcgatataactgcatcgattggagtggccgaagcattcacaat

SEQ ID NO: 14690 - DNA, 157 bp, Homo sapiens
  MAP TO AL132765.16; EXPRESSED IN BRAIN, SIGNAL = 0.44; EXPRESSED IN FETAL LIVER, SIGNAL = 0.53; EXPRESSED IN PLACENTA, SIGNAL = 0.45; EXPRESSED IN ADULT LIVER, SIGNAL = 0.39; EXPRESSED IN BONE MARROW, SIGNAL = 0.44; SWISSPROT HIT: Q9YE67, EVALUE 5.80e+00; NT HIT: gi15920163, EVALUE 3.50e-02; EST_HUMAN HIT: N33576.1, EVALUE 5.10e-02
ctatgttgaggcatacttcatgctgtgcagaagcatctctttgtacctcagggcagccctgtcctcctggttgtgttcctgctgtctggagtctgtgtgttttcctttctcccacatatccctgcataagggtttgtgggcttctatggcactgctc

SEQ ID NO: 14691 - DNA, 61 bp, Homo sapiens
  MAP TO CHR22_87.0; EXPRESSED IN BRAIN, SIGNAL = 0.28; EXPRESSED IN PLACENTA, SIGNAL = 0.36; EXPRESSED IN HELA, SIGNAL = 2.2; EST_HUMAN HIT: H82812.1, EVALUE 3.00e-22
gtgcagacagcacagacgtagaacgtgtcggcgttgcaggaagttctgcacagcactgtgc

SEQ ID NO: 14692 - DNA, 131 bp, Homo sapiens
  MAP TO AL133263.2; EXPRESSED IN PLACENTA, SIGNAL = 0.6; EXPRESSED IN ADULT LIVER, SIGNAL = 0.29; EXPRESSED IN BONE MARROW, SIGNAL = 0.6; EXPRESSED IN BRAIN, SIGNAL = 0.58; SWISSPROT HIT: P70444, EVALUE 1.80e-01; EST_HUMAN HIT: BI562222.1, EVALUE 2.00e-38
atcataatctactttctcagcccaaggagcatagcattgttcagaagcatcaccaggaggaaataattcacaagttggccatgcagctgagacacattggggacaacattgatcataggatggttcgagag

SEQ ID NO: 14693 - DNA, 48 bp, Homo sapiens
  MAP TO CHR22_117.0; EXPRESSED IN PLACENTA, SIGNAL = 0.43; EXPRESSED IN LUNG, SIGNAL = 0.47; EXPRESSED IN FETAL LIVER, SIGNAL = 0.45; EXPRESSED IN BRAIN, SIGNAL = 0.44; NT HIT: AL163206.2, EVALUE 5.00e-04; EST_HUMAN HIT: BE972360.1, EVALUE 1.10e-02
gccacaaaacaaatgttaacaaatttgaaaatatgaagctcatgcaag

SEQ ID NO: 14694 - DNA, 141 bp, Homo sapiens
  MAP TO AC023123.3; EXPRESSED IN HELA, SIGNAL = 1.2; EXPRESSED IN HEART, SIGNAL = 1.6; EXPRESSED IN LUNG, SIGNAL =   2; EXPRESSED IN FETAL LIVER, SIGNAL = 1.8; EXPRESSED IN PLACENTA, SIGNAL = 1.9; EXPRESSED IN ADULT LIVER, SIGNAL = 1.6; EXPRESSED IN BONE MARROW, SIGNAL = 1.8; EXPRESSED IN BRAIN, SIGNAL = 1.8; EST_HUMAN HIT: BF679842.1, EVALUE 1.00e-73; SWISSPROT HIT: Q00975, EVALUE 2.60e+00; NT HIT: gi14770736, EVALUE 7.00e-74
atggcagcgctggaggaagaattcacgttgtcttcggtagtcctgagcgccgggcctgaaggactcctaggcgtggagcagagcgacaaaacagaccagtttctagtgacagacagcggcaggacagtcatcctctataag

SEQ ID NO: 14695 - DNA, 400 bp, Homo sapiens
  MAP TO AL133499.1; EXPRESSED IN BONE MARROW, SIGNAL = 0.66; EXPRESSED IN BRAIN, SIGNAL = 0.9; EXPRESSED IN PLACENTA, SIGNAL = 0.87; EXPRESSED IN LUNG, SIGNAL = 0.98; EXPRESSED IN HELA, SIGNAL = 2.7; EXPRESSED IN ADULT LIVER, SIGNAL = 0.76; NT HIT: gi7669476, EVALUE 0.00e+00; EST_HUMAN HIT: BG955496.1, EVALUE 0.00e+00; SWISSPROT HIT: P78563, EVALUE 2.00e-52
atgcagctgaatgagatcaagcctggtttgcagtacacactcctgtcccagactgggcccgtgcacgcgcctttgtttgtcatgtctgtggaggtgaatggccaggtttttgagggctctggtcccacaaagaaaaaggcaaaactccatgctgctgagaaggccttgaggtctttcgttcagtttcctaatgcctctgaggcccacctggccatggggaggaccctgtctgtcaacacggacttcacatctgaccaggccgacttccctgacacgctcttcaatggttttgaaactcctgacaaggcggagcctcccttttacgtgggctccaatggggatgactccttcagttccagcggggacctcagcttgtctgcttccccggtgcctgccagcc

SEQ ID NO: 14696 - DNA, 89 bp, Homo sapiens
  MAP TO CHR22_120.0; EXPRESSED IN BRAIN, SIGNAL = 0.41; EXPRESSED IN PLACENTA, SIGNAL = 0.44; NT HIT: V01218.1, EVALUE 4.30e+00; EST_HUMAN HIT: BI870609.1, EVALUE 4.00e-01
tgcacactgtcatggaagcacaccggcaccagggccagaggcactcggcacttcctggaaactttggaagggaagtgcatctgtatttc

SEQ ID NO: 14697 - DNA, 158 bp, Homo sapiens
  MAP TO CHR21_16.0; EXPRESSED IN HELA, SIGNAL =   3; EXPRESSED IN FETAL LIVER, SIGNAL = 0.83; EXPRESSED IN BONE MARROW, SIGNAL = 0.95; EXPRESSED IN ADULT LIVER, SIGNAL = 0.49; EXPRESSED IN BRAIN, SIGNAL = 0.95; SWISSPROT HIT: P31641, EVALUE 1.00e-15; NT HIT: AF346763.1, EVALUE 2.00e-28; EST_HUMAN HIT: AA058932.1, EVALUE 3.20e+00
aggatgtcaggtccacggggaaggtcgtctacttcacagccacgttccagttcgccatgctcctgaggcagctggtccgagggctgatgctgcccggcatgggtgccggcatcaatttttctctgtatccagacatcacctgcctcgagggcgcacag

SEQ ID NO: 14698 - DNA, 157 bp, Homo sapiens
  MAP TO AL133472.2; EXPRESSED IN FETAL LIVER, SIGNAL = 0.44; EXPRESSED IN ADULT LIVER, SIGNAL = 0.47; EXPRESSED IN BRAIN, SIGNAL = 0.38; SWISSPROT HIT: Q92562, EVALUE 2.00e-24; NT HIT: gi7662033, EVALUE 2.00e-83; EST_HUMAN HIT: AU120505.1, EVALUE 4.00e-83
gttttgtcaggttcttagaaggctattatattgtgttaataactaaaaggaggaagatggcggatattggaggtcatgcaatctataaggtcgaagatacaaatatgatctatatacccaatgattctgtacgggttactcatcctgatgaagctag

SEQ ID NO: 14699 - DNA, 132 bp, Homo sapiens
  MAP TO AL160313.1; EXPRESSED IN FETAL LIVER, SIGNAL = 0.61; EXPRESSED IN ADULT LIVER, SIGNAL = 0.65; EXPRESSED IN BONE MARROW, SIGNAL = 0.64; EXPRESSED IN BRAIN, SIGNAL = 0.6; NT HIT: gi15300951, EVALUE 2.00e-68; EST_HUMAN HIT: BF032133.1, EVALUE 6.50e-01
cggcctcgtcctccccgaaggagatgatgtacgggtagtagttgttgatgaggcctgggaactcacaggtctggccgtggcccatgcagatctcactgtactgccactggcctgtccctgggttctcttgga

SEQ ID NO: 14700 - DNA, 242 bp, Homo sapiens
  MAP TO AL160191.1; EXPRESSED IN PLACENTA, SIGNAL = 1.8; EXPRESSED IN LUNG, SIGNAL = 2.1; EXPRESSED IN ADULT LIVER, SIGNAL =   2; EXPRESSED IN BONE MARROW, SIGNAL = 2.1; EXPRESSED IN BRAIN, SIGNAL = 1.5; EXPRESSED IN HELA, SIGNAL = 2.4; EXPRESSED IN FETAL LIVER, SIGNAL = 2.2; SWISSPROT HIT: P91697, EVALUE 1.00e+00; NT HIT: AE004470.1, EVALUE 8.70e-01; EST_HUMAN HIT: BG251782.1, EVALUE 3.20e-01
cctttggtatcactgacataaaactgaatgtatgtgctgagggtgcttgtgtcttggtgatagacaaggtaggtggtccagcccatggtactggcagcttaaagtcagccagccatcagtgggaagtgcctgtgaattatgcaggagtgggaggggagggagtaggcagtaaagtaatgcatttctgtggatccaaagctttccaaactacctgcaagtcagcaaatatgggggatgttgta

SEQ ID NO: 14701 - DNA, 294 bp, Homo sapiens
  MAP TO CHR22_176.0; EXPRESSED IN PLACENTA, SIGNAL =   1; EXPRESSED IN LUNG, SIGNAL = 1.1; EXPRESSED IN HELA, SIGNAL = 1.2; EXPRESSED IN BRAIN, SIGNAL = 0.93; EXPRESSED IN ADULT LIVER, SIGNAL = 1.1; EXPRESSED IN FETAL LIVER, SIGNAL =   1; EXPRESSED IN BONE MARROW, SIGNAL = 1.2; EST_HUMAN HIT: AL041608.1, EVALUE 0.00e+00; SWISSPROT HIT: Q29442, EVALUE 1.20e+00; NT HIT: gi12742752, EVALUE 0.00e+00
cacttcctctatggctgcgctgtctcccagcagcggctcctcagccagcagggacagcaccagccctttgacgcagtgagtgtagagattcatcctcacgagccccatgcaggactctgctggtgtcagcctggagctgattccatctgcagaggggccagcaccctgacagtttgctgagcctgaactgcattccagaccaggggctgcgtggctttcacagaccccatcaacatcctcatccaggccttgttcccccgtgggaagcttgtttcctctctgtcctggatctaa

SEQ ID NO: 14702 - DNA, 110 bp, Homo sapiens
  MAP TO AC024066.3; EXPRESSED IN BONE MARROW, SIGNAL = 2.5; EXPRESSED IN ADULT LIVER, SIGNAL = 2.4; EXPRESSED IN BRAIN, SIGNAL = 2.5; EXPRESSED IN FETAL LIVER, SIGNAL = 2.5; EXPRESSED IN LUNG, SIGNAL = 2.4; EXPRESSED IN PLACENTA, SIGNAL = 2.5; EXPRESSED IN HEART, SIGNAL = 2.3; EXPRESSED IN HELA, SIGNAL = 1.7; NT HIT: AF325711.1, EVALUE 3.60e-01; EST_HUMAN HIT: AI827899.1, EVALUE 3.00e-55; SWISSPROT HIT: P02469, EVALUE 1.60e+00
caattgtaatgaacagcataactatttgtgtgactacacttggtataattctattaagcatggagattgcaacttttgcattaaatgcaaccacatacaattggtcaaac

SEQ ID NO: 14703 - DNA, 88 bp, Homo sapiens
  MAP TO AC015889.3; EXPRESSED IN HELA, SIGNAL = 2.8; EXPRESSED IN FETAL LIVER, SIGNAL = 6.2; EXPRESSED IN LUNG, SIGNAL = 6.1; EXPRESSED IN BONE MARROW, SIGNAL = 6.8; EXPRESSED IN BRAIN, SIGNAL =   6; EXPRESSED IN ADULT LIVER, SIGNAL =   6; EXPRESSED IN PLACENTA, SIGNAL = 6.7; EXPRESSED IN HEART, SIGNAL = 5.6; NT HIT: Z47378.1, EVALUE 1.10e+00; EST_HUMAN HIT: BI008543.1, EVALUE 1.60e+00
ctgttgcctcttcagccagctggagctttggcctccagagcaacgtcctatctttctgctccatttctgacttctcagttcccaacat

SEQ ID NO: 14704 - DNA, 168 bp, Homo sapiens
  MAP TO AL023656.8; EXPRESSED IN BONE MARROW, SIGNAL = 1.4; EXPRESSED IN BRAIN, SIGNAL = 1.6; EXPRESSED IN HELA, SIGNAL = 1.7; EXPRESSED IN HEART, SIGNAL = 1.6; NT HIT: Y09060.1, EVALUE 2.30e+00; SWISSPROT HIT: Q58805, EVALUE 3.30e+00; EST_HUMAN HIT: AI656894.1, EVALUE 5.00e-67
aatccttcagagactgagtaagggtagaaatcaagtggatgacaacctgctggtccaatgttgctactgtttctaaaatgctgtaaacctggtaatagtacctcataccataatcctggataaactgcctgaaagtaaaacaggtttatttaggattactcctggggc

SEQ ID NO: 14705 - DNA, 180 bp, Homo sapiens
  MAP TO AC025170.2; EXPRESSED IN BONE MARROW, SIGNAL = 0.67; EXPRESSED IN ADULT LIVER, SIGNAL = 0.62; EXPRESSED IN BRAIN, SIGNAL = 0.66; EXPRESSED IN FETAL LIVER, SIGNAL = 0.67; NT HIT: gi13385681, EVALUE 6.00e-35; EST_HUMAN HIT: BG756187.1, EVALUE 8.00e-97; SWISSPROT HIT: Q99523, EVALUE 4.30e+00
catagcaactttggcttcataatcattggaaatctggatacaaacttcttcagctcttgcttgacaagctctttctaccacatctttccactgcttttgcactacggaacgccagactttccagactttcttcagtaaagttctctggtagtactggtcagctagtttaccttcataaac

SEQ ID NO: 14706 - DNA, 241 bp, Homo sapiens
  MAP TO AL160168.1; EXPRESSED IN BONE MARROW, SIGNAL = 1.7; EXPRESSED IN HELA, SIGNAL = 0.66; EXPRESSED IN BRAIN, SIGNAL = 1.7; EXPRESSED IN PLACENTA, SIGNAL = 2.3; EXPRESSED IN FETAL LIVER, SIGNAL = 1.5; EXPRESSED IN ADULT LIVER, SIGNAL = 1.8; SWISSPROT HIT: Q43415, EVALUE 6.60e+00; NT HIT: D14256.1, EVALUE 8.70e-01; EST_HUMAN HIT: BF676126.1, EVALUE 1.30e+00
tccccttgcaatgccctacaaagagaagagatcctttaatgaaatggagattcatcctgtacctttgcagctgcccttccatttggtgtgcagtcaactgtgtatttcatacaaatattgcttcaggatttccatagcagataagaagactgctgatgtcagaatgcagtacagagagaatctgcacacaggtagccctgtgaaatttagcttggtgaataattaccgtgatgatcataat

SEQ ID NO: 14707 - DNA, 417 bp, Homo sapiens
  MAP TO CHR21_49.0; EXPRESSED IN BONE MARROW, SIGNAL = 0.65; EXPRESSED IN HELA, SIGNAL = 0.71; EXPRESSED IN BRAIN, SIGNAL = 0.68; EXPRESSED IN FETAL LIVER, SIGNAL = 0.65; EXPRESSED IN LUNG, SIGNAL = 0.53; EXPRESSED IN PLACENTA, SIGNAL = 0.56; NT HIT: AL163252.2, EVALUE 0.00e+00; EST_HUMAN HIT: AU127583.1, EVALUE 9.00e-03; SWISSPROT HIT: P02840, EVALUE 2.10e-02
cccaaagtactcaatctgcagtggtttagagtttggaaactcttggataagcagttaagttgtccaaagcagttggaaccgttgcggagggtttggcaggctttggatgcatttcgagtgggtatgtggcaattgcatacatacccattggtctgggtgcttgggctgcagctggggctggggctgacgttggtagtttcacagacactgaagacttggcctgctgatggggagttgcagggcacagaggagtttgacgggtcacaaccagtggtactgcaggtcttgggctcacagctgggagatttgcaggttggtgcttcaccgtaggattcttggcagtaatccaggagccagagatttccttggtagctactgggtaagcagtgtccaaaggtagggcttaaatcactggag

SEQ ID NO: 14708 - DNA, 295 bp, Homo sapiens
  MAP TO AL138967.2; EXPRESSED IN FETAL LIVER, SIGNAL = 0.67; EXPRESSED IN PLACENTA, SIGNAL =   1; EXPRESSED IN BONE MARROW, SIGNAL = 0.94; EXPRESSED IN BRAIN, SIGNAL = 0.92; NT HIT: AL163246.2, EVALUE 9.00e-63; EST_HUMAN HIT: AA984295.1, EVALUE 3.00e-60; SWISSPROT HIT: P03364, EVALUE 7.00e-07
atgccggctgacggcaaattgcttctggtgggccttatggacaggaatgtagaaacaggcatttcccaagtcaatgactgcataccaggtacacagagatatgttaatttgctcaagcaacgaaaccacatctggtacagctgctgcaattggagtcaccacttgtttaagcttgtaatactccgctgtcattctccaagatccgtctgtcttctgcacaggccaaatagaagagttgaagggggatgtggtgggaatcaccacttctgtgtctttcaagtctttgatggtggca

SEQ ID NO: 14709 - DNA, 110 bp, Homo sapiens
  MAP TO AL160231.1; EXPRESSED IN PLACENTA, SIGNAL = 2.9; EXPRESSED IN LUNG, SIGNAL = 4.9; EXPRESSED IN BONE MARROW, SIGNAL = 4.3; EXPRESSED IN ADULT LIVER, SIGNAL = 4.6; EXPRESSED IN BRAIN, SIGNAL = 1.8; NT HIT: AB038490.1, EVALUE 2.00e-55; EST_HUMAN HIT: BG286493.1, EVALUE 3.00e-55; SWISSPROT HIT: P49815, EVALUE 5.00e-03
cagctacaaaatcttcatatgcttgacttcctcctgtattggtgagaatggagtgtttgtcttcttgtccttcagcaacataaaatactgcaatcttgtgtgtctctcgg

SEQ ID NO: 14710 - DNA, 79 bp, Homo sapiens
  MAP TO AL050339.4; EXPRESSED IN BONE MARROW, SIGNAL = 0.73; EXPRESSED IN BRAIN, SIGNAL = 0.81; EXPRESSED IN HELA, SIGNAL = 0.89; NT HIT: AF074284.1, EVALUE 9.40e-01; EST_HUMAN HIT: BI757035.1, EVALUE 5.40e+00; SWISSPROT HIT: O95918, EVALUE 6.00e-03
tctttgtggctgttttgatatcctatctccttacccttgtgggaaatacagtaattattctgatctgctctgtagaccc

SEQ ID NO: 14711 - DNA, 108 bp, Homo sapiens
  MAP TO AC016569.2; EXPRESSED IN BRAIN, SIGNAL = 0.39; EXPRESSED IN PLACENTA, SIGNAL = 0.48; EXPRESSED IN LUNG, SIGNAL = 0.44; SWISSPROT HIT: P48736, EVALUE 2.10e+00; NT HIT: gi16077068, EVALUE 1.40e+00; EST_HUMAN HIT: BI033095.1, EVALUE 2.00e+00
taagtgttgtgctaggtgcacatgaaacattaattgaaccttgcccttggattcacttgcgggccatattacagctggcagtgattatgaaggtccttggaagtccag

SEQ ID NO: 14712 - DNA, 140 bp, Homo sapiens
  MAP TO AC018691.5; EXPRESSED IN FETAL LIVER, SIGNAL = 0.41; EXPRESSED IN BRAIN, SIGNAL = 0.49; EXPRESSED IN ADULT LIVER, SIGNAL = 0.36; EST_HUMAN HIT: BG677050.1, EVALUE 7.00e-01; SWISSPROT HIT: Q13133, EVALUE 2.60e+00
cgcactggtctgcacggactcattctccggtttggcttttatatccacaaccccatcagcgtggcggaaagagcagtcggcaagcacatcatacaaggatagcttctgggccttcaagccatatttctgcagccatgtct

SEQ ID NO: 14713 - DNA, 183 bp, Homo sapiens
  MAP TO CHR22_130.0; EXPRESSED IN BONE MARROW, SIGNAL = 2.8; EXPRESSED IN BRAIN, SIGNAL = 2.4; EXPRESSED IN HEART, SIGNAL =   2; EXPRESSED IN HELA, SIGNAL = 1.6; EXPRESSED IN PLACENTA, SIGNAL = 2.9; EXPRESSED IN LUNG, SIGNAL = 2.4; EXPRESSED IN FETAL LIVER, SIGNAL = 2.2; EXPRESSED IN ADULT LIVER, SIGNAL = 2.6; NT HIT: AJ271735.1, EVALUE 1.00e-36; EST_HUMAN HIT: H49327.1, EVALUE 1.00e-33; SWISSPROT HIT: P11369, EVALUE 9.00e-13
actagaagtcctagccagagcaatcaaacaagagagagaaataaagggcatccatactaaaacagaaaaagacaaattagccttgtttgcagatgatatgatcttatgtttggaaaaacctaaagactccaccaaagaactattagaactgataaacaaattcagtaaagtacaggatagaaa

SEQ ID NO: 14714 - DNA, 155 bp, Homo sapiens
  MAP TO CHR22_133.0; EXPRESSED IN BONE MARROW, SIGNAL = 0.47; EXPRESSED IN BRAIN, SIGNAL = 0.48; EXPRESSED IN PLACENTA, SIGNAL = 0.6; EXPRESSED IN LUNG, SIGNAL = 0.59; EXPRESSED IN ADULT LIVER, SIGNAL = 0.69; NT HIT: AB017030.1, EVALUE 5.30e-01; EST_HUMAN HIT: H27198.1, EVALUE 2.00e-69; SWISSPROT HIT: P75959, EVALUE 2.60e+00
acatagtcacagttggcagcaacgtctccttttgggtgtggatttatttgttccccaatgcaactgtgagcaccatgagtgcaggaaagtgcctgtttctgatcatggtatttcctgggtgtgacttcatgtacagtcaagaggagaaactctga

SEQ ID NO: 14715 - DNA, 136 bp, Homo sapiens
  MAP TO AC021010.3; EXPRESSED IN PLACENTA, SIGNAL = 0.44; EXPRESSED IN BRAIN, SIGNAL = 0.43; EXPRESSED IN FETAL LIVER, SIGNAL = 0.44; NT HIT: gi9631294, EVALUE 4.60e-01; EST_HUMAN HIT: AI291232.1, EVALUE 6.70e-01
cagcaaacatgaactaatatatagtgatttttggaatattcaggatgaagataataatcaggaacattgtgattccaaacacttcctgaaagtggcctgtgaaacaaaactgcagctttttgagaaagcaggagtt

SEQ ID NO: 14716 - DNA, 142 bp, Homo sapiens
  MAP TO AL138788.1; EXPRESSED IN HEART, SIGNAL = 2.6; EXPRESSED IN PLACENTA, SIGNAL = 3.7; EXPRESSED IN LUNG, SIGNAL = 3.1; EXPRESSED IN ADULT LIVER, SIGNAL = 3.3; EXPRESSED IN HELA, SIGNAL = 3.6; EXPRESSED IN BONE MARROW, SIGNAL = 2.7; EXPRESSED IN BRAIN, SIGNAL = 2.8; EXPRESSED IN FETAL LIVER, SIGNAL = 2.8
aaactataatgagaaacatcaccaacaaaaagtcaagcttcaaaaagtcaagtatcgtttaactaatgaagtagaactacgagataagagaattaaccaatttgaagatgaaattggaatcctgcaacataaaatagaaaag

SEQ ID NO: 14717 - DNA, 174 bp, Homo sapiens
  MAP TO AL136978.3; EXPRESSED IN PLACENTA, SIGNAL = 0.38; EXPRESSED IN BRAIN, SIGNAL = 0.47; SWISSPROT HIT: O67827, EVALUE 2.50e+00; EST_HUMAN HIT: BF930866.1, EVALUE 8.90e-01; NT HIT: AY035122.1, EVALUE 6.10e-01
atgaagcccaagagtaatggagtccaggtgatgcagtctctagaggtcatcctctcagagaagggatgtcaatcattcagggaagagaggatgaagaataaccagcatataccctcaaatcagcacctgagacttggtgaagatttcccttccaagcaggcttctagtgaagtg

SEQ ID NO: 14718 - DNA, 286 bp, Homo sapiens
  MAP TO CHR22_174.0; EXPRESSED IN PLACENTA, SIGNAL = 4.6; EXPRESSED IN LUNG, SIGNAL = 4.3; EXPRESSED IN ADULT LIVER, SIGNAL =   4; EXPRESSED IN BONE MARROW, SIGNAL = 4.9; EXPRESSED IN HELA, SIGNAL = 2.7; EXPRESSED IN BRAIN, SIGNAL = 4.4; EXPRESSED IN FETAL LIVER, SIGNAL = 4.3; EXPRESSED IN HEART, SIGNAL = 3.6; EST_HUMAN HIT: BI758586.1, EVALUE 0.00e+00; SWISSPROT HIT: P19474, EVALUE 9.00e-05; NT HIT: gi11418011, EVALUE 0.00e+00
cttggaacttccgcatccttgggttcatctgcagaatcttcttcagcttgggctccagttccttgatgtgggaagccagcctctctagctgccgattgcgcctgattttgttcttccgagagaccatggaagagcaacagcaaagtagatcctccccatggggctccttctgcagtgaattaatgcacttgaggcagacggcgcatccacactccagggacattggtttttccagatagtctgagcagacgggacagctgcttgcttcttggaagagtgcagccat

SEQ ID NO: 14719 - DNA, 122 bp, Homo sapiens
  MAP TO AC015819.4; EXPRESSED IN PLACENTA, SIGNAL = 0.78; EXPRESSED IN BONE MARROW, SIGNAL = 0.68; EXPRESSED IN LUNG, SIGNAL = 0.68; EXPRESSED IN BRAIN, SIGNAL = 0.52; EXPRESSED IN FETAL LIVER, SIGNAL = 0.67; NT HIT: AF217490.1, EVALUE 1.00e-01; EST_HUMAN HIT: BE775089.1, EVALUE 9.30e+00; SWISSPROT HIT: P14347, EVALUE 6.00e+00
gctccatcttcaacaggagtgacagcggtgtgtgtcacaaccctaacgagcagcccgggctggggcacagcttggactcacttcgtcctgcagcccagctccccagcttctcctgggcatgg

SEQ ID NO: 14720 - DNA, 85 bp, Homo sapiens
  MAP TO AL137793.1; EXPRESSED IN FETAL LIVER, SIGNAL = 1.2; EXPRESSED IN BONE MARROW, SIGNAL = 1.2; EXPRESSED IN HEART, SIGNAL = 1.2; EXPRESSED IN PLACENTA, SIGNAL = 1.3; EXPRESSED IN BRAIN, SIGNAL = 1.3; EXPRESSED IN LUNG, SIGNAL = 1.2; EXPRESSED IN ADULT LIVER, SIGNAL = 1.4; NT HIT: D89013.1, EVALUE 1.00e+00; EST_HUMAN HIT: AL550832.1, EVALUE 1.50e+00; SWISSPROT HIT: P49263, EVALUE 4.80e+00
cctggccccatcctctccccggtgtggcagcagtctttgtcttgaaacacagcagccagccttgttccaatttcctccttgtaaa

SEQ ID NO: 14721 - DNA, 76 bp, Homo sapiens
  MAP TO CHR22_125.0; EXPRESSED IN FETAL LIVER, SIGNAL =   5; EXPRESSED IN HEART, SIGNAL = 3.5; EXPRESSED IN BONE MARROW, SIGNAL =   3; EXPRESSED IN PLACENTA, SIGNAL = 4.7; EXPRESSED IN ADULT LIVER, SIGNAL = 4.2; EXPRESSED IN HELA, SIGNAL = 1.9; EXPRESSED IN BRAIN, SIGNAL = 3.5; EXPRESSED IN LUNG, SIGNAL = 3.8; NT HIT: gi13775205, EVALUE 3.50e+00; EST_HUMAN HIT: BE001041.1, EVALUE 3.30e-01; SWISSPROT HIT: P13419, EVALUE 6.30e+00
tccagaggcaagaggtacgtccctcatggccaccccaaagttgtcaggagccccaacttctgcagaatcacctccc

SEQ ID NO: 14722 - DNA, 124 bp, Homo sapiens
  MAP TO AC020721.4; EXPRESSED IN LUNG, SIGNAL = 3.7; EXPRESSED IN BONE MARROW, SIGNAL = 3.6; EXPRESSED IN ADULT LIVER, SIGNAL = 3.6; EXPRESSED IN BRAIN, SIGNAL = 3.2; EXPRESSED IN HELA, SIGNAL = 1.4; EXPRESSED IN FETAL LIVER, SIGNAL = 3.8; NT HIT: U65229.1, EVALUE 1.60e+00; SWISSPROT HIT: Q08605, EVALUE 4.60e+00
ttagtggctgtggctgcggtatggatgggcggtggcagcattgggtggtgggggcagtgatgatgggttgggagtgctgaaggtgacaatggtgttggtagtgatggtgccagttttgttggca

SEQ ID NO: 14723 - DNA, 141 bp, Homo sapiens
  MAP TO AL121876.23; EXPRESSED IN HELA, SIGNAL = 2.4; EXPRESSED IN BRAIN, SIGNAL = 2.3; EXPRESSED IN FETAL LIVER, SIGNAL = 3.1; EXPRESSED IN LUNG, SIGNAL = 2.1; EXPRESSED IN PLACENTA, SIGNAL = 2.3; EXPRESSED IN BONE MARROW, SIGNAL = 3.5; NT HIT: gi14786266, EVALUE 1.20e-01; EST_HUMAN HIT: R00882.1, EVALUE 1.80e-01; SWISSPROT HIT: O64668, EVALUE 8.90e-01
tgggtaatgtaatgtagccccatccctcaaggaccagctcaggtgcagcctcctccatgaagccttccatgatttcatttcccctatctccaacagatgtgacctctcctgtggctatgggtttggggtggggcatctgtg

SEQ ID NO: 14724 - DNA, 50 bp, Homo sapiens
  MAP TO CHR22_118.0; EXPRESSED IN PLACENTA, SIGNAL = 0.5; EXPRESSED IN BONE MARROW, SIGNAL = 0.43; EXPRESSED IN BRAIN, SIGNAL = 0.38; NT HIT: X15333.1, EVALUE 3.20e-02; EST_HUMAN HIT: BG180427.1, EVALUE 7.30e-01
atgccaggccttaagaaattatttttctcagacgtgtttggagtgataac

SEQ ID NO: 14725 - DNA, 118 bp, Homo sapiens
  MAP TO AC011802.4; EXPRESSED IN BONE MARROW, SIGNAL = 0.75; EXPRESSED IN BRAIN, SIGNAL = 0.66; EXPRESSED IN LUNG, SIGNAL = 1.3; EXPRESSED IN PLACENTA, SIGNAL = 0.63; NT HIT: AF115510.1, EVALUE 3.00e-60; EST_HUMAN HIT: BG220423.1, EVALUE 5.00e-60
tttgtaggtccattacatgcatgtctgtcccgttttccaagacatcatcttcagatcgaagattgtctagtttgccaatcttctgtctctcctccagctgccctttgagtttcttaat

SEQ ID NO: 14726 - DNA, 199 bp, Homo sapiens
  MAP TO CHR22_121.0; EXPRESSED IN PLACENTA, SIGNAL = 1.4; EXPRESSED IN LUNG, SIGNAL = 1.2; EXPRESSED IN BONE MARROW, SIGNAL = 1.2; EXPRESSED IN BRAIN, SIGNAL = 0.87; SWISSPROT HIT: Q9Y3A4, EVALUE 2.00e-19; EST_HUMAN HIT: BE563211.1, EVALUE 1.00e-108; NT HIT: gi14779288, EVALUE 1.00e-108
gctccatcttgctctctcgatgctgccaggcgtagaagttgagcagctcttttcggctgcgcttccgtctctccctctccagcacccgcaagctggctgcctcagtccgggggagcacaggccgccggccccggcgggtcaccttcacccagccctcctcgtcagggaccccctcctcctccttggccttagcttcttc

SEQ ID NO: 14727 - DNA, 135 bp, Homo sapiens
  MAP TO AC025179.2; EXPRESSED IN PLACENTA, SIGNAL = 2.3; EXPRESSED IN LUNG, SIGNAL = 2.3; EXPRESSED IN FETAL LIVER, SIGNAL = 2.2; EXPRESSED IN HEART, SIGNAL = 2.2; EXPRESSED IN ADULT LIVER, SIGNAL = 2.3; EXPRESSED IN BONE MARROW, SIGNAL = 2.3; EXPRESSED IN HELA, SIGNAL = 1.1; EXPRESSED IN BRAIN, SIGNAL = 2.4; NT HIT: AL163303.2, EVALUE 1.00e-35; EST_HUMAN HIT: BF736370.1, EVALUE 6.00e-32
tcaagttctatcatgagattgcagcaatttaatcacatcttcaggctccacttctaattctagttctcttgctgtttccaccacatctgcagtaacttcctctacggaagtcttgagcacttcaaagttattcat

SEQ ID NO: 14728 - DNA, 103 bp, Homo sapiens
  MAP TO AL137790.1; EXPRESSED IN FETAL LIVER, SIGNAL = 2.1; EXPRESSED IN HEART, SIGNAL = 2.3; EXPRESSED IN PLACENTA, SIGNAL = 2.7; EXPRESSED IN LUNG, SIGNAL = 2.3; EXPRESSED IN ADULT LIVER, SIGNAL = 2.3; EXPRESSED IN HELA, SIGNAL = 1.2; EXPRESSED IN BONE MARROW, SIGNAL = 2.2; EXPRESSED IN BRAIN, SIGNAL = 2.1; SWISSPROT HIT: Q06316, EVALUE 8.00e+00; NT HIT: gi15899949, EVALUE 1.30e+00
cttctctagctgggaatgccttccatgatgatgggtgttctgctgaccccgggatgacagatacgattgcagcagatggccctgggtctgcttggctaggaag

SEQ ID NO: 14729 - DNA, 185 bp, Homo sapiens
  MAP TO AC013816.3; EXPRESSED IN BRAIN, SIGNAL = 3.6; EXPRESSED IN PLACENTA, SIGNAL = 4.7; EXPRESSED IN LUNG, SIGNAL = 5.1; EXPRESSED IN ADULT LIVER, SIGNAL = 7.1; EXPRESSED IN HEART, SIGNAL = 4.2; EXPRESSED IN FETAL LIVER, SIGNAL = 4.3; EXPRESSED IN BONE MARROW, SIGNAL = 4.7; SWISSPROT HIT: Q9PQB4, EVALUE 7.40e+00; EST_HUMAN HIT: H01278.1, EVALUE 9.60e-01; NT HIT: Z97342.2, EVALUE 1.60e-01
tactactgctgctgttgctgctgctactactactactactaccactactgctactagtactactactactactactattaccaattattgttatatttgcatcaagacaatgtgaccttaggtggaaattcagccatagctttccaattatttcctttttggcccaagaggagcagcacttttcc

SEQ ID NO: 14730 - DNA, 112 bp, Homo sapiens
  MAP TO AL160233.1; EXPRESSED IN BRAIN, SIGNAL =   1; EXPRESSED IN HELA, SIGNAL = 0.81; EXPRESSED IN PLACENTA, SIGNAL = 1.2; EXPRESSED IN LUNG, SIGNAL =   1; EXPRESSED IN ADULT LIVER, SIGNAL = 0.94; EXPRESSED IN FETAL LIVER, SIGNAL = 0.9; EXPRESSED IN BONE MARROW, SIGNAL = 1.1; NT HIT: AE007832.1, EVALUE 3.60e-01
tcagagtcgaaattatgcctctgcaaatgagcttccaagagaataaatgagcttccaatagaatcagtggcgaagatctggacaatagtgatgatctttcctgcagctttgg

SEQ ID NO: 14731 - DNA, 102 bp, Homo sapiens
  MAP TO AL133418.2; EXPRESSED IN BONE MARROW, SIGNAL = 1.2; EXPRESSED IN BRAIN, SIGNAL = 1.1; EXPRESSED IN HELA, SIGNAL = 0.67; EXPRESSED IN FETAL LIVER, SIGNAL =   1; EST_HUMAN HIT: AL036009.2, EVALUE 3.00e-48; NT HIT: AF276013.1, EVALUE 5.10e+00
atgaaagtgaaagacagtgcttgccaaaaagcactcctgtggagaattagagaagagaaggaaatggactgcccgggaaaagattctaacacgaaaataacg

SEQ ID NO: 14732 - DNA, 123 bp, Homo sapiens
  MAP TO AL118512.8; EXPRESSED IN BRAIN, SIGNAL = 0.36; SWISSPROT HIT: P28685, EVALUE 1.60e-02; EST_HUMAN HIT: BG471277.1, EVALUE 2.40e+00; NT HIT: gi14730477, EVALUE 4.00e-63
tttcccgaatcttcagtctctgctttgaggagctgcaggaccattccatgggtgctgactgtcagatgggcatcaagccccagaggctggccatctctaagccaggccatactgggagctggg

SEQ ID NO: 14733 - DNA, 181 bp, Homo sapiens
  MAP TO CHR22_176.0; EXPRESSED IN BONE MARROW, SIGNAL = 0.91; EXPRESSED IN BRAIN, SIGNAL = 0.98; EXPRESSED IN PLACENTA, SIGNAL = 1.2; EXPRESSED IN LUNG, SIGNAL = 0.86; EXPRESSED IN ADULT LIVER, SIGNAL = 0.94; EXPRESSED IN FETAL LIVER, SIGNAL = 0.94; SWISSPROT HIT: P53674, EVALUE 5.00e-11; EST_HUMAN HIT: BF726742.1, EVALUE 2.00e-97; NT HIT: gi14251218, EVALUE 1.00e-97
cctgtagttcccaggaggcagttccgccgccttggcgctggtaataggcacggttgttggggccagggtagtgccgggactaggggatgttcctgcaggtggggcccccttccccttggtgtcaggccctgggttcaccgccactgtggccgaggccgaggcctttgcagcctgagacatg

SEQ ID NO: 14734 - DNA, 79 bp, Homo sapiens
  MAP TO AC011792.5; EXPRESSED IN BONE MARROW, SIGNAL = 1.4; EXPRESSED IN BRAIN, SIGNAL =   1; EXPRESSED IN HELA, SIGNAL = 0.7; EXPRESSED IN PLACENTA, SIGNAL = 1.1; EXPRESSED IN LUNG, SIGNAL = 0.9; EXPRESSED IN FETAL LIVER, SIGNAL = 1.1; EXPRESSED IN ADULT LIVER, SIGNAL = 0.99; EST_HUMAN HIT: BF963023.1, EVALUE 9.00e-05
ccatcatgttgtacaagctctgtggggcaaactgccttggcattttctgaattgcttccttgtatacactaagggcttc

SEQ ID NO: 14735 - DNA, 136 bp, Homo sapiens
  MAP TO AL133520.2; EXPRESSED IN BONE MARROW, SIGNAL = 0.91; EXPRESSED IN ADULT LIVER, SIGNAL = 0.29; EXPRESSED IN BRAIN, SIGNAL = 0.86; EXPRESSED IN HELA, SIGNAL = 0.68; EXPRESSED IN FETAL LIVER, SIGNAL = 0.85; SWISSPROT HIT: P46333, EVALUE 3.00e-05; NT HIT: AL137188.3, EVALUE 7.00e-71; EST_HUMAN HIT: AL449904.1, EVALUE 1.00e-70
cgtctcttctggaactgctggtctatctctgccaacgactggccttttgtttcaggaacaaataaatagatgaagcccaggccgaggacagcggtcagtccgtagagcaggaaggtccaggacaagccgatggtgc

SEQ ID NO: 14736 - DNA, 92 bp, Homo sapiens
  MAP TO CHR22_214.0; EXPRESSED IN BONE MARROW, SIGNAL = 1.4; EXPRESSED IN LUNG, SIGNAL = 1.2; EXPRESSED IN ADULT LIVER, SIGNAL = 0.86; EXPRESSED IN BRAIN, SIGNAL = 1.3; EXPRESSED IN FETAL LIVER, SIGNAL = 0.93; NT HIT: AF031611.1, EVALUE 7.20e-02; EST_HUMAN HIT: BE962685.2, EVALUE 7.00e-03
ctgtccagtgtcaaagatgtgggaggaagcagcggagaaaccaaaggaggaggaagacgccaccatcactgtccccagccatgcagcctaaa

SEQ ID NO: 14737 - DNA, 123 bp, Homo sapiens
  MAP TO AC011980.3; EXPRESSED IN BONE MARROW, SIGNAL = 0.55; EXPRESSED IN BRAIN, SIGNAL = 0.53; EXPRESSED IN LUNG, SIGNAL = 0.6; EST_HUMAN HIT: AI766210.1, EVALUE 1.00e-02; NT HIT: AF189277.1, EVALUE 1.00e-01
agagcccctgctagtgccctccctgggtttcccgctgctggcagctcgggtcctgatccttagcagggcagccccagcccttcttcccagagccctatccttcctcgagtttattactttcat

SEQ ID NO: 14738 - DNA, 134 bp, Homo sapiens
  MAP TO CHR22_216.0; EXPRESSED IN BONE MARROW, SIGNAL = 4.3; EXPRESSED IN BRAIN, SIGNAL = 3.9; EXPRESSED IN FETAL LIVER, SIGNAL = 3.3; EXPRESSED IN LUNG, SIGNAL = 4.5; EXPRESSED IN ADULT LIVER, SIGNAL =   4; EST_HUMAN HIT: AI057566.1, EVALUE 2.00e-69; NT HIT: X52696.1, EVALUE 1.00e-69; SWISSPROT HIT: P20472, EVALUE 7.00e-20
cccagctcatcctcctcgatgaagccacttttgtccttgtccagcatgtgaaacaccttcttcacatcatccgcactctttttcttcaggccgaccatttggaagaactttttgtggtcgaaggagtcggtagc

SEQ ID NO: 14739 - DNA, 119 bp, Homo sapiens
  MAP TO AC024195.2; EXPRESSED IN LUNG, SIGNAL = 0.66; EXPRESSED IN ADULT LIVER, SIGNAL = 0.69; EXPRESSED IN BRAIN, SIGNAL = 0.46; EXPRESSED IN FETAL LIVER, SIGNAL = 0.46; SWISSPROT HIT: P26342, EVALUE 2.00e-10; EST_HUMAN HIT: BI768198.1, EVALUE 2.00e-56; NT HIT: AJ251961.1, EVALUE 1.00e-56
atggagagcttcactgttttgtcaggctgtgccagcagaggcacaactgggctgccacaggaggtgcatgtcctgaatctccgcactgcggccaggggcctggccagctacagagagag

SEQ ID NO: 14740 - DNA, 201 bp, Homo sapiens
  MAP TO CHR22_129.0; EXPRESSED IN LUNG, SIGNAL = 0.82; EXPRESSED IN PLACENTA, SIGNAL = 0.9; EXPRESSED IN ADULT LIVER, SIGNAL = 0.9; EXPRESSED IN BONE MARROW, SIGNAL =   1; EXPRESSED IN BRAIN, SIGNAL = 0.88; EXPRESSED IN FETAL LIVER, SIGNAL = 0.88; SWISSPROT HIT: P35228, EVALUE 1.10e+00
tatttcttatatttgttgtccacctccccaggctgcactgtgagctccacaagggcaaatgtctcttctgttcgttgggaggcgagggccttggggcagtgcttccagctgaaggacggcaccttccctggtcctctcgcccaggccttggagacgggagggctcacagccaccactgcatccacagtgcttgcccaagac

SEQ ID NO: 14741 - DNA, 113 bp, Homo sapiens
  MAP TO CHR22_93.0; EXPRESSED IN HEART, SIGNAL = 1.4; EXPRESSED IN LUNG, SIGNAL = 1.6; EXPRESSED IN ADULT LIVER, SIGNAL = 1.5; EXPRESSED IN FETAL LIVER, SIGNAL = 1.5; EXPRESSED IN PLACENTA, SIGNAL = 1.7; EXPRESSED IN BONE MARROW, SIGNAL = 1.6; EXPRESSED IN HELA, SIGNAL =   7; EXPRESSED IN BRAIN, SIGNAL = 1.7; SWISSPROT HIT: Q16647, EVALUE 7.90e+00; EST_HUMAN HIT: BE409806.1, EVALUE 5.40e-01
tcccaggtaaggacaggcctcccacgtccagggcaggtcccccaggcttcagcagtcccctctggctcagatcttccagcaacttcatgctggtaagtgagccagcagccata

SEQ ID NO: 14742 - DNA, 116 bp, Homo sapiens
  MAP TO AL160168.1; EXPRESSED IN HELA, SIGNAL = 0.66; EXPRESSED IN BRAIN, SIGNAL = 4.6; EXPRESSED IN FETAL LIVER, SIGNAL = 3.6; EXPRESSED IN BONE MARROW, SIGNAL =   3; EXPRESSED IN PLACENTA, SIGNAL = 3.9; EXPRESSED IN LUNG, SIGNAL = 4.7; EXPRESSED IN ADULT LIVER, SIGNAL = 5.9; SWISSPROT HIT: Q93105, EVALUE 1.60e+00; NT HIT: AF224669.1, EVALUE 2.00e-03; EST_HUMAN HIT: AA369683.1, EVALUE 9.00e-03
atggcctttaaggtagtatatcagcttttcctggttctacagcagcttccagcctttggacatgaactgggacatctgctctggcagattttggacctgccaggctccataatcat

SEQ ID NO: 14743 - DNA, 76 bp, Homo sapiens
  MAP TO CHR22_219.0; EXPRESSED IN HELA, SIGNAL = 3.1; EXPRESSED IN HEART, SIGNAL = 1.2; EXPRESSED IN BRAIN, SIGNAL = 1.8; EXPRESSED IN PLACENTA, SIGNAL =   1; EXPRESSED IN LUNG, SIGNAL = 1.1; EXPRESSED IN ADULT LIVER, SIGNAL =   1; EXPRESSED IN FETAL LIVER, SIGNAL = 1.3; EXPRESSED IN BONE MARROW, SIGNAL = 1.5; NT HIT: gi14746198, EVALUE 9.00e-01; EST_HUMAN HIT: AW804970.1, EVALUE 1.30e+00
aggaaggtgaagatagataccaaatacactttgacgaatttaagaatccagattgtcattactgggataaacactg

SEQ ID NO: 14744 - DNA, 142 bp, Homo sapiens
  MAP TO AC024052.2; EXPRESSED IN BONE MARROW, SIGNAL = 1.1; EXPRESSED IN BRAIN, SIGNAL = 0.68; EXPRESSED IN PLACENTA, SIGNAL =   1; EXPRESSED IN LUNG, SIGNAL = 0.97; SWISSPROT HIT: O43108, EVALUE 7.70e+00; NT HIT: U67522.1, EVALUE 7.50e+00
atgacccaatattttaagaaagaggttaagattatatgttctgcttatctcaaacaacatccatcttctggtttaactgcagcagaatctgttgctggtaatcttgaaatacatggctatcacactagtgattttcttgtag

SEQ ID NO: 14745 - DNA, 82 bp, Homo sapiens
  MAP TO AC013637.3; EXPRESSED IN FETAL LIVER, SIGNAL = 0.95; EXPRESSED IN LUNG, SIGNAL = 0.83; EXPRESSED IN BONE MARROW, SIGNAL = 1.1; EXPRESSED IN BRAIN, SIGNAL = 0.68; NT HIT: AJ224085.1, EVALUE 2.50e-01; EST_HUMAN HIT: BG401197.1, EVALUE 1.40e+00
atgggtgaagacgccatcgaagtgacacagagggagggtgatgaagacctgcaacagggatggattagtgagaagagagcag

SEQ ID NO: 14746 - DNA, 194 bp, Homo sapiens
  MAP TO CHR22_132.0; EXPRESSED IN BRAIN, SIGNAL = 0.35; EXPRESSED IN FETAL LIVER, SIGNAL = 0.41; EXPRESSED IN PLACENTA, SIGNAL = 0.55; EXPRESSED IN LUNG, SIGNAL = 0.51; EXPRESSED IN ADULT LIVER, SIGNAL = 0.54; SWISSPROT HIT: P32908, EVALUE 8.00e-04; NT HIT: AF303827.1, EVALUE 1.00e-23
tcttccttctctaattttgcttgtctgcgctctgccgctatattttttttcttattaaagttaaactgtgcatcctcttcggctttttgtaactttcttttcttttcttcatattctcctataagctctcctgaagtgctgatttcctcaaaaaactgggtcctttctttgggtttcttcactgaaattgactc

SEQ ID NO: 14747 - DNA, 330 bp, Homo sapiens
  MAP TO AL133215.16; EXPRESSED IN BRAIN, SIGNAL = 0.28; SWISSPROT HIT: O60299, EVALUE 1.00e-05; EST_HUMAN HIT: BF981192.1, EVALUE 3.00e-76; NT HIT: gi14747301, EVALUE 2.00e-79
gtgcccgcctggggagctggtggttggctcggcacctccggtgctgtaggtgggcaggctggacagtgagtttcggccagagtcggatagcgtccctgatgggcagccactggcccagccactaaatgccaggggtttgtcagcagctgaagaggaggaggaagaggaggaggaggaggcagggcccccaaacagctgcgtcaggctgccctggctcccagacagcccggtggcccgaggacccatgaagctaggcagggacggagcccctcgaggtttgggcagcactggcttgaaggctgttgggcggatcaggatcttctccatgtt

SEQ ID NO: 14748 - DNA, 277 bp, Homo sapiens
  MAP TO AF168787.1; EXPRESSED IN HELA, SIGNAL = 1.5; EXPRESSED IN HEART, SIGNAL = 1.7; EXPRESSED IN LUNG, SIGNAL = 1.7; EXPRESSED IN FETAL LIVER, SIGNAL = 1.9; EXPRESSED IN PLACENTA, SIGNAL = 1.8; EXPRESSED IN ADULT LIVER, SIGNAL = 2.2; EXPRESSED IN BONE MARROW, SIGNAL = 1.9; EXPRESSED IN BRAIN, SIGNAL = 1.8; SWISSPROT HIT: P06186, EVALUE 2.20e+00; NT HIT: gi14774377, EVALUE 2.00e-88
cttctctatcatgacggcatagatgcccatctgctggaaaccgcgggtgtagtagagcatgttggtccagcccaaggccagggagaataccatggaagccacatactccttgaggtggctgaagtacagcaccacggtggccagcatgaacagtgactgcagaaagctgcgggtggaggggcagaaagctccgtctacgggaacccaggaggcctggcacccccagaacaaaaggtcacaggccgctcagaggtccagactgcaggccgcaatagga

SEQ ID NO: 14749 - DNA, 285 bp, Homo sapiens
  MAP TO AL138740.2; EXPRESSED IN BRAIN, SIGNAL = 1.4; EXPRESSED IN LUNG, SIGNAL = 1.3; EXPRESSED IN FETAL LIVER, SIGNAL = 1.4; EXPRESSED IN BONE MARROW, SIGNAL = 1.1; EXPRESSED IN HEART, SIGNAL = 1.4; SWISSPROT HIT: P38213, EVALUE 9.00e-01; EST_HUMAN HIT: BG435891.1, EVALUE 6.00e+00; NT HIT: gi14756099, EVALUE 0.00e+00
actaaagaagaagaaataagaaaaaggctacggagtgaccgacttttgccttcagccaatcactcagattcagctgaattagatggggccgaggttgcatttgccaaaggacttcaaagggtgaggtctgctggatttgaaccatctgacctgcagggaggaaaaccattgaagaggaagaagagtaaatgtgatgcaaccttgattgatagaaacgaaagtgatgaaagttttggggtcgtggagtcagacatgtcctacaaccaagcagatgacatagtctac

SEQ ID NO: 14750 - DNA, 218 bp, Homo sapiens
  MAP TO AL160058.2; EXPRESSED IN FETAL LIVER, SIGNAL = 0.56; EXPRESSED IN PLACENTA, SIGNAL = 0.8; EXPRESSED IN LUNG, SIGNAL = 0.63; EXPRESSED IN ADULT LIVER, SIGNAL = 0.64; EXPRESSED IN BONE MARROW, SIGNAL = 0.54; EXPRESSED IN BRAIN, SIGNAL = 0.59; SWISSPROT HIT: P53166, EVALUE 2.30e+00
aggaagaaactgaggctcaataatttgtgtaatttgtctaagatctccctgcaagtgaacgtagaacttgggaatggaaccaagattagtcttctaagtcctatgttcttcaccagtgagctacacagccttacggtgcagatagcacagcgtctgtgggcatccaacactcgaatagtttggaaaatcatcagcctgtgttccccaaatgagatctg

SEQ ID NO: 14751 - DNA, 110 bp, Homo sapiens
  MAP TO CHR22_34.0; EXPRESSED IN FETAL LIVER, SIGNAL = 3.1; EXPRESSED IN BONE MARROW, SIGNAL = 3.8; EXPRESSED IN HEART, SIGNAL = 3.5; EXPRESSED IN ADULT LIVER, SIGNAL = 1.2; EXPRESSED IN HELA, SIGNAL = 2.8; EXPRESSED IN BRAIN, SIGNAL = 3.7; EST_HUMAN HIT: BI025042.1, EVALUE 3.00e-55; NT HIT: gi14778014, EVALUE 2.00e-55; SWISSPROT HIT: O96017, EVALUE 5.00e-14
tgcctctcttgctgaaccaatagcaaacttccttttgctgatgatctttatggctactttcttacatgttttcctctcgaaagccagctttacctctccacaggcaccac

SEQ ID NO: 14752 - DNA, 291 bp, Homo sapiens
  MAP TO CHR21_73.0; EXPRESSED IN PLACENTA, SIGNAL = 0.73; EXPRESSED IN BONE MARROW, SIGNAL = 1.2; EXPRESSED IN ADULT LIVER, SIGNAL = 0.72; EXPRESSED IN HELA, SIGNAL = 2.3; EXPRESSED IN BRAIN, SIGNAL = 1.1; EXPRESSED IN FETAL LIVER, SIGNAL =   1; EXPRESSED IN LUNG, SIGNAL = 0.79; SWISSPROT HIT: O75144, EVALUE 2.00e-43; EST_HUMAN HIT: R23544.1, EVALUE 0.00e+00; NT HIT: gi14780683, EVALUE 0.00e+00
ctgtctggctgccgacagtcaggttctgctgcagaagcacgttctctatgcagcagccaatgttcacgctgggggtccgtgcgatcctcagcacgctgaccacgtcatacaagccccgcatgttcaagaagacggtgtcattctgcagagcctggtccagcaggctgttgtccgtcttattgatccagtacacgttgggcctggggtagccgtttatggatgtacacgtgaaggtgagctcatcctgggaggggctgtggggggcgctgacgacgggcacgctgaagtttg

SEQ ID NO: 14753 - DNA, 227 bp, Homo sapiens
  MAP TO AC017082.3; EXPRESSED IN FETAL LIVER, SIGNAL = 2.8; EXPRESSED IN BONE MARROW, SIGNAL = 2.4; EXPRESSED IN BRAIN, SIGNAL = 1.9; EXPRESSED IN HEART, SIGNAL = 2.2; EXPRESSED IN PLACENTA, SIGNAL = 1.6; EXPRESSED IN LUNG, SIGNAL = 2.2; EXPRESSED IN HELA, SIGNAL = 1.9; EXPRESSED IN ADULT LIVER, SIGNAL = 3.7; SWISSPROT HIT: Q09530, EVALUE 1.50e+00; EST_HUMAN HIT: AA339664.1, EVALUE 1.20e+00; NT HIT: AB012085.1, EVALUE 3.20e+00
acctcttttctgaagacctgtaaattcagctcttccaatatttttctgagagtatcaatcatagctagcatggtgttgctttttttcacttgaacttgactgataactacaatctgttctatgaaaattggaaggaccaccatggctggagtccctggcacgccgtgaacaatctccaaaatcccatctgatttcttgccataatacagcatggcagtgggaagcat

SEQ ID NO: 14754 - DNA, 368 bp, Homo sapiens
  MAP TO CHR21_68.0; EXPRESSED IN FETAL LIVER, SIGNAL = 1.5; EXPRESSED IN LUNG, SIGNAL = 0.77; EXPRESSED IN PLACENTA, SIGNAL = 0.79; EXPRESSED IN ADULT LIVER, SIGNAL = 1.1; EXPRESSED IN BONE MARROW, SIGNAL = 1.5; EXPRESSED IN HELA, SIGNAL = 2.9; EXPRESSED IN BRAIN, SIGNAL = 1.4; NT HIT: AB039887.1, EVALUE 0.00e+00; SWISSPROT HIT: P57081, EVALUE 6.00e-09; EST_HUMAN HIT: BG722541.1, EVALUE 1.00e-69
ctgcttgctatggaggtggccaggaatcggctgccgccccgcaccaccaacgtctgcccgcacaacgccagtcccacagagcccgccatgtacccgcccgcctcaccgccatacacatgtgccagcccagagcctcttcctgtccgcaccggtcggtgacgccaggcgcagacgccgagagatgacgtataccccacgtaccgcgcatgctcaaggacgagcctgccttgagcatgcgtgaaaggtgctgtgaccgccctccgggttgtggctggtggccttcggtgtttcgggtttggcagttcactcaccaaggtgatctgatggagtgcacttcgcacgattccaagtacttgcctaatgttcat

SEQ ID NO: 14755 - DNA, 155 bp, Homo sapiens
  MAP TO AL160002.2; EXPRESSED IN HEART, SIGNAL = 1.3; EXPRESSED IN BRAIN, SIGNAL = 1.2; EXPRESSED IN PLACENTA, SIGNAL = 1.4; EXPRESSED IN ADULT LIVER, SIGNAL = 1.3; EXPRESSED IN HELA, SIGNAL = 0.64; EXPRESSED IN FETAL LIVER, SIGNAL = 1.2; EXPRESSED IN BONE MARROW, SIGNAL = 1.3; EXPRESSED IN LUNG, SIGNAL = 1.4; SWISSPROT HIT: P02467, EVALUE 2.60e+00; EST_HUMAN HIT: AI468400.1, EVALUE 2.00e-01
gacagttaggacttatttccccttcagccccaggagaagcagcagagccaggttgtgacagtctctccatctttctctgtctgcctggctccccctctttcaggatactagatgagggtaaagagcaacaaaacaatgcttgtgttattgaagag

SEQ ID NO: 14756 - DNA, 81 bp, Homo sapiens
  MAP TO AL136478.2; EXPRESSED IN PLACENTA, SIGNAL = 0.62; EXPRESSED IN LUNG, SIGNAL = 0.56; EXPRESSED IN BRAIN, SIGNAL = 0.51; EXPRESSED IN FETAL LIVER, SIGNAL = 0.58; NT HIT: gi9558758, EVALUE 6.20e-02; EST_HUMAN HIT: BG929497.1, EVALUE 5.00e-34
atgctgggagcaggggcttcaaaagacctgtgcttttgcagtgagaacattctgcagagacacacctggaagctgatgaaa

SEQ ID NO: 14757 - DNA, 322 bp, Homo sapiens
  MAP TO AC022263.3; EXPRESSED IN BONE MARROW, SIGNAL =  12; EXPRESSED IN LUNG, SIGNAL =  11; EXPRESSED IN PLACENTA, SIGNAL = 5.9; EXPRESSED IN ADULT LIVER, SIGNAL =  21; EXPRESSED IN BRAIN, SIGNAL = 5.3; EXPRESSED IN FETAL LIVER, SIGNAL =  15; NT HIT: X07499.1, EVALUE 0.00e+00; EST_HUMAN HIT: BG199424.1, EVALUE 0.00e+00; SWISSPROT HIT: P02248, EVALUE 2.00e-31
gtcaaaatgcggatcttcgtgaaaacccttaccggcaagatcatcacccttgaagtggagcccagtgccactatcgaaaatgtcaaagccaaaatccaagataaagaaggcaatccctgtgaccagcagaggctcatctttgcaggcaagcagcgggaagatggccgcagtctttctgactacaacatccagaaagagtcgaccctgcatctggtcctgcgtcggagaggtggtatgcagatcttcgtgaagaccctgaccggcaagaccatcaccctggaagtggagcccagtgacaccatcgaaaatgtgaaggccaaga

SEQ ID NO: 14758 - DNA, 508 bp, Homo sapiens
  MAP TO AL132765.16; EXPRESSED IN FETAL LIVER, SIGNAL =  11; EXPRESSED IN BONE MARROW, SIGNAL = 9.2; EXPRESSED IN BRAIN, SIGNAL = 9.5; EXPRESSED IN PLACENTA, SIGNAL =  12; EXPRESSED IN LUNG, SIGNAL =  11; EXPRESSED IN ADULT LIVER, SIGNAL =  15; SWISSPROT HIT: P75595, EVALUE 1.00e-10; NT HIT: AB037819.2, EVALUE 0.00e+00; EST_HUMAN HIT: AI355276.1, EVALUE 0.00e+00
agcccccctcggcctttctgccctgggttggggccccctccacctttttcccctggtttggggttgtatctacctttttaccctggttctgggccccctccgcctttttgccttggtttggggttccttctgcctttttgccttggtttggggttccctctgcctttttcccttggtttggggttccctctgtctttttgccctggtttggggttccctctgcctttctgccctggtttggggctccttcagcctttttgctttgattctgagtcccctccgcctttttgccctgagtagtgccagtggctggtgtgttgcccttggcacccactgggggcaccaccaccatcggcacctccttgggagcagtttccaagatggcagccttcgaagtgagaacctggatggaattcactacagagctgacagctggttccacttttgccacttttttctccttcttctttttgtccttgggggaggaggccagcttctcctggggcat

SEQ ID NO: 14759 - DNA, 76 bp, Homo sapiens
  MAP TO AL137840.3; EXPRESSED IN PLACENTA, SIGNAL = 1.3; EXPRESSED IN ADULT LIVER, SIGNAL = 0.6; EXPRESSED IN FETAL LIVER, SIGNAL = 1.3; EXPRESSED IN LUNG, SIGNAL = 0.97; EXPRESSED IN BONE MARROW, SIGNAL = 1.2; EXPRESSED IN BRAIN, SIGNAL = 1.4; NT HIT: AB043701.1, EVALUE 9.00e-01; EST_HUMAN HIT: BE962954.2, EVALUE 3.30e-01
gcactatgctgtgtactgaggatatgatgcagaacaagactgacattaccactgaacttaaacctgtgaaaagcag

SEQ ID NO: 14760 - DNA, 235 bp, Homo sapiens
  MAP TO AL158832.2; EXPRESSED IN LUNG, SIGNAL = 1.1; EXPRESSED IN FETAL LIVER, SIGNAL = 1.1; EXPRESSED IN PLACENTA, SIGNAL = 1.3; EXPRESSED IN ADULT LIVER, SIGNAL = 0.86; EXPRESSED IN BONE MARROW, SIGNAL = 1.4; EXPRESSED IN BRAIN, SIGNAL = 0.99; SWISSPROT HIT: P27316, EVALUE 8.20e+00; EST_HUMAN HIT: BI768494.1, EVALUE 1.00e-127
gacaaccacctggagaagttcttcaccctctgccactccctggagagccaggtgaccttccccatccgcgtgctggatcagaaaatcagcgagatggcgctggagcatgagctgaagctcagcatcatctgcctgaactcctcccgcctggagccgctcgtgctcttcctgcacctggtgctggacaagctcttccagctgtccgtgcagcccatggtcatcgctggccagacag

SEQ ID NO: 14761 - DNA, 159 bp, Homo sapiens
  MAP TO CHR21_27.0; EXPRESSED IN FETAL LIVER, SIGNAL = 1.4; EXPRESSED IN BONE MARROW, SIGNAL = 1.5; EXPRESSED IN HEART, SIGNAL = 1.2; EXPRESSED IN PLACENTA, SIGNAL = 0.78; EXPRESSED IN HELA, SIGNAL = 4.2; EXPRESSED IN BRAIN, SIGNAL = 1.5; EXPRESSED IN LUNG, SIGNAL = 0.87; EXPRESSED IN ADULT LIVER, SIGNAL = 0.9; SWISSPROT HIT: P30835, EVALUE 4.40e+00; NT HIT: AF305712.1, EVALUE 2.20e+00; EST_HUMAN HIT: BF154800.1, EVALUE 2.00e-01
tttatactgagatgtcaatttcctttcatcttggtcagctggtaccatatactggatgtggggtctggggtgctgaagagatttttgtgttcctaatctactttccgctttccgtaatttctgaacaagcctgtgccacagagagtgtttatatatcat

SEQ ID NO: 14762 - DNA, 137 bp, Homo sapiens
  MAP TO CHR22_200.0; EXPRESSED IN HEART, SIGNAL = 1.5; EXPRESSED IN BRAIN, SIGNAL = 1.5; EXPRESSED IN LUNG, SIGNAL = 1.7; EXPRESSED IN HELA, SIGNAL = 1.3; EXPRESSED IN ADULT LIVER, SIGNAL = 1.7; EXPRESSED IN FETAL LIVER, SIGNAL = 1.1; EXPRESSED IN BONE MARROW, SIGNAL = 1.3; EXPRESSED IN PLACENTA, SIGNAL = 1.7; SWISSPROT HIT: P41557, EVALUE 2.60e+00; NT HIT: AF193473.1, EVALUE 1.80e+00; EST_HUMAN HIT: AA349271.1, EVALUE 1.70e-01
tccttctctgttcaggatattctggccatgctggcttcttgtcagttgttcaaatgccccaaactctaaggacttatctctggccaagcccagagttgaatcctgagtgtccacaggtccctggctcagccgttccc

SEQ ID NO: 14763 - DNA, 170 bp, Homo sapiens
  MAP TO AL132765.16; EXPRESSED IN HELA, SIGNAL = 2.7; EXPRESSED IN BRAIN, SIGNAL = 1.6; EXPRESSED IN FETAL LIVER, SIGNAL =   3; EXPRESSED IN LUNG, SIGNAL = 2.2; EXPRESSED IN BONE MARROW, SIGNAL = 2.2; EXPRESSED IN PLACENTA, SIGNAL = 2.9; EXPRESSED IN ADULT LIVER, SIGNAL = 3.4; NT HIT: gi14786602, EVALUE 4.00e-45; EST_HUMAN HIT: H89869.1, EVALUE 6.00e-45; SWISSPROT HIT: P12270, EVALUE 1.50e+00
acagagacaatcctgtcaactctcccctgggcttcatgtgctccacggcgccgggaggcaggcagggctgcatataccttctggagctcctcctctgcggcgcccaccttggccctccacacctgctcctcctcctccacgctcttctgcaggtctctgagcatgccctc

SEQ ID NO: 14764 - DNA, 212 bp, Homo sapiens
  MAP TO CHR21_69.0; EXPRESSED IN LUNG, SIGNAL = 0.93; EXPRESSED IN FETAL LIVER, SIGNAL = 1.6; EXPRESSED IN PLACENTA, SIGNAL = 0.84; EXPRESSED IN ADULT LIVER, SIGNAL = 1.1; EXPRESSED IN BONE MARROW, SIGNAL = 1.6; EXPRESSED IN HELA, SIGNAL = 3.3; EXPRESSED IN BRAIN, SIGNAL = 1.6; NT HIT: U05569.1, EVALUE 1.00e-116; EST_HUMAN HIT: BF727348.1, EVALUE 1.00e-116; SWISSPROT HIT: P02493, EVALUE 9.00e-33
tccccgtggtaccaaagctgaacatggacgtgaccatccagcacccctggttcaagcgcaccctggggcccttctaccccagccggctgttcgaccagtttttcggcgagggcctttttgagtatgacctgctgcccttcctgtcgtccaccatcagcccctactaccgccagtccctcttccgcaccgtgctggactccggcatctctgag

SEQ ID NO: 14765 - DNA, 123 bp, Homo sapiens
  MAP TO CHR22_83.0; EXPRESSED IN BRAIN, SIGNAL = 0.59; EXPRESSED IN ADULT LIVER, SIGNAL = 0.65; EXPRESSED IN HELA, SIGNAL = 1.8; EXPRESSED IN PLACENTA, SIGNAL = 0.67; EXPRESSED IN FETAL LIVER, SIGNAL = 0.62; EXPRESSED IN BONE MARROW, SIGNAL = 0.56; SWISSPROT HIT: Q9LRE6, EVALUE 8.00e-02; NT HIT: J03541.1, EVALUE 1.00e-01; EST_HUMAN HIT: BF684006.1, EVALUE 1.50e-01
ttccctggctggagcacccaggttggctgcgggtgtggatggcgcctctgtgggccgccctccttcagcaccgccagctgaaggaggtacagcttccctttccccgcctctgccccctgtccc

SEQ ID NO: 14766 - DNA, 138 bp, Homo sapiens
  MAP TO AC015845.4; EXPRESSED IN BRAIN, SIGNAL = 0.54; EXPRESSED IN LUNG, SIGNAL = 0.48; SWISSPROT HIT: O04682, EVALUE 1.50e+00; NT HIT: gi14752434, EVALUE 4.60e-01
ctgcaactggggccaaggttgtgtgtgtgtagcggtctccagggccaggggtgggggcgttgggctgcggttgggagggatcctcacagagcaccttctgtaggcttctgccattcatgctgttgtaattcttggcct

SEQ ID NO: 14767 - DNA, 373 bp, Homo sapiens
  MAP TO AL160314.1; EXPRESSED IN FETAL LIVER, SIGNAL = 1.7; EXPRESSED IN LUNG, SIGNAL = 1.4; EXPRESSED IN PLACENTA, SIGNAL = 1.2; EXPRESSED IN ADULT LIVER, SIGNAL = 1.3; EXPRESSED IN BONE MARROW, SIGNAL = 1.4; EXPRESSED IN BRAIN, SIGNAL = 0.97; SWISSPROT HIT: O14249, EVALUE 7.00e-15; NT HIT: gi11545766, EVALUE 0.00e+00; EST_HUMAN HIT: BI908581.1, EVALUE 0.00e+00
gtctccagaataagttcctggccagatatgtatccctcccaaaccagaataagatctggacggtgactgtgagccccgagcaaaacgaccgcacccccttggtgatggtgcatggttttgggggcggcgtgggtctctggatcctcaacatggactcactgagtgcccgccgcacactgcacaccttcgatctgcttggcttcgggcgaagctcaaggccagcattcccaagggacccggagggggctgaggatgagtttgtgacatcgatagagacatggcgggagaccatggggatccccagcatgatcctcctggggcacagtttgggaggattcctggccacttcttactcaatcaagtaccctgatag

SEQ ID NO: 14768 - DNA, 194 bp, Homo sapiens
  MAP TO CHR21_71.0; EXPRESSED IN FETAL LIVER, SIGNAL = 1.4; EXPRESSED IN BONE MARROW, SIGNAL = 1.5; EXPRESSED IN BRAIN, SIGNAL = 1.4; EXPRESSED IN HEART, SIGNAL = 1.3; EXPRESSED IN LUNG, SIGNAL = 0.98; EXPRESSED IN HELA, SIGNAL = 3.5; EXPRESSED IN PLACENTA, SIGNAL = 0.91; EXPRESSED IN ADULT LIVER, SIGNAL = 1.2; SWISSPROT HIT: P56182, EVALUE 4.00e-17; EST_HUMAN HIT: AL515182.1, EVALUE 1.00e-104; NT HIT: U79775.1, EVALUE 1.00e-105
ttccttggttttgaacaacatcactcgaggcatctttgagacgattgtggagcaggccccgcttgccattgaagacctcctgaatgaactggacacacaggatgaggaggtggcgtcggacagtgatgagtcctctgagggtggtgagcgtggagacgcgctgtcccagaagaggtctgagaagccgcccgcag

SEQ ID NO: 14769 - DNA, 209 bp, Homo sapiens
  MAP TO AC025758.1; EXPRESSED IN BONE MARROW, SIGNAL = 1.7; EXPRESSED IN HELA, SIGNAL = 1.3; EXPRESSED IN BRAIN, SIGNAL = 1.6; EXPRESSED IN FETAL LIVER, SIGNAL = 1.7; EXPRESSED IN LUNG, SIGNAL = 1.7; EXPRESSED IN PLACENTA, SIGNAL = 1.8; EXPRESSED IN ADULT LIVER, SIGNAL = 1.6; NT HIT: gi7110678, EVALUE 1.00e-112; SWISSPROT HIT: O76332, EVALUE 2.40e+00; EST_HUMAN HIT: BG776736.1, EVALUE 1.00e-111
ccatactggctccttcatccttcagctgtttacttttctcagcacagccttcaagaagaatttctttcctacgtttaatggcatgaagccagttcccttcatcgttgtcaactacatccttctcatcagcagcttcagcttcaaactgctgggaagtgacctttgagaccttctcaccaattttcctcttccacccaaaggaagccatt

SEQ ID NO: 14770 - DNA, 106 bp, Homo sapiens
  MAP TO AL138722.2; EXPRESSED IN FETAL LIVER, SIGNAL = 2.3; EXPRESSED IN BONE MARROW, SIGNAL = 2.5; EXPRESSED IN LUNG, SIGNAL = 2.3; EXPRESSED IN HELA, SIGNAL = 1.3; EXPRESSED IN BRAIN, SIGNAL = 2.3; EXPRESSED IN PLACENTA, SIGNAL = 2.5; EXPRESSED IN ADULT LIVER, SIGNAL = 2.3; EST_HUMAN HIT: AW938682.1, EVALUE 6.00e-53
cctgctcttggcaagctgtgtactaattctagtgatgctgtcactactgagaataattttggagctcctgctttggagttgccttccgagtttgcaacacatttcc

SEQ ID NO: 14771 - DNA, 174 bp, Homo sapiens
  MAP TO CHR21_3.0; EXPRESSED IN LUNG, SIGNAL = 1.1; EXPRESSED IN BRAIN, SIGNAL = 2.5; EXPRESSED IN PLACENTA, SIGNAL = 1.1; EXPRESSED IN HEART, SIGNAL = 2.5; EXPRESSED IN ADULT LIVER, SIGNAL = 1.5; EXPRESSED IN BONE MARROW, SIGNAL = 2.4; EXPRESSED IN HELA, SIGNAL =  10; EXPRESSED IN FETAL LIVER, SIGNAL = 2.2; NT HIT: AL163202.2, EVALUE 2.00e-93; EST_HUMAN HIT: BG700885.1, EVALUE 1.00e-83; SWISSPROT HIT: O15084, EVALUE 4.00e-03
gctctgcaatgccagagggaggcttgtgcaaatattctcatagattctggtgctgatccaaatattgtagatgtgtatggcaacacagctgtccattatgctgttaacagtgagaatttgtcagtggtggcaaaattgctgtcctgtggtacagacattaaagtgaagaacaag

SEQ ID NO: 14772 - DNA, 290 bp, Homo sapiens
  MAP TO CHR22_206.0; EXPRESSED IN BRAIN, SIGNAL = 1.1; EXPRESSED IN FETAL LIVER, SIGNAL = 1.2; EXPRESSED IN HEART, SIGNAL = 1.5; EXPRESSED IN LUNG, SIGNAL = 1.5; EXPRESSED IN BONE MARROW, SIGNAL = 1.1; EXPRESSED IN ADULT LIVER, SIGNAL = 1.3; SWISSPROT HIT: Q26783, EVALUE 5.70e+00; NT HIT: gi13648116, EVALUE 0.00e+00; EST_HUMAN HIT: BG028472.1, EVALUE 0.00e+00
gaacagtgtttctgcagctgccctactccaagcgcaagttctcagggcagcagcggcggcggcggaactccaccagctccaccaaccagaacatgttctgcgaggagcgggtcggctacaactgggcctacaacaccatgctcaccaaaacatggcgctccagcgccacaggggatgaaaagtttgctgatcggctgctgaaggacttcacggacttctgcatcaaccgtgacaaccggctggtcacgttctggacaagttgcctggagaagatgcatgccagtgccccg

SEQ ID NO: 14773 - DNA, 107 bp, Homo sapiens
  MAP TO AL160237.1; EXPRESSED IN HEART, SIGNAL =   5; EXPRESSED IN FETAL LIVER, SIGNAL = 6.1; EXPRESSED IN PLACENTA, SIGNAL = 6.1; EXPRESSED IN ADULT LIVER, SIGNAL = 5.4; EXPRESSED IN BONE MARROW, SIGNAL = 6.7; EXPRESSED IN BRAIN, SIGNAL = 5.6; EXPRESSED IN LUNG, SIGNAL = 5.8; NT HIT: AF074950.1, EVALUE 3.40e-01; EST_HUMAN HIT: BG547173.1, EVALUE 7.90e+00
gatggaaaatgtctcttccaacagccttccaaacctgaaatgaactgctccttacagaactgccaaaaggaagaaatagaaaagaaaaaagaagcaataggtccaaa

SEQ ID NO: 14774 - DNA, 139 bp, Homo sapiens
  MAP TO AL137070.3; EXPRESSED IN BRAIN, SIGNAL = 0.55; EXPRESSED IN ADULT LIVER, SIGNAL = 0.67; EXPRESSED IN LUNG, SIGNAL = 0.61; EXPRESSED IN FETAL LIVER, SIGNAL = 0.6; SWISSPROT HIT: Q04542, EVALUE 7.70e+00; NT HIT: D38044.1, EVALUE 4.00e-26; EST_HUMAN HIT: BG943889.1, EVALUE 6.00e-20
gatcaggatcatcgatataattgtgttttaccttcacacctcgtcccactggaaggtcttcaggggcaataacatgcatggacctgtagtctgctgtgataacaatgccttcttctgaaatatctcctgaaggacctgc

SEQ ID NO: 14775 - DNA, 210 bp, Homo sapiens
  MAP TO AL138895.4; EXPRESSED IN HELA, SIGNAL = 0.72; EXPRESSED IN BRAIN, SIGNAL = 0.74; EXPRESSED IN FETAL LIVER, SIGNAL = 0.61; EXPRESSED IN PLACENTA, SIGNAL = 0.69; EXPRESSED IN LUNG, SIGNAL = 0.66; EXPRESSED IN ADULT LIVER, SIGNAL = 0.66; SWISSPROT HIT: P42852, EVALUE 2.80e-01; NT HIT: gi16160466, EVALUE 1.00e-115; EST_HUMAN HIT: BG478553.1, EVALUE 1.00e-114
cctggccgagctgacggtggtggaggtgccgtggctgcctgtggatgaacccgtgtcactgtaggagaccatggagtaggtgtccccagccccggggcctgggggctgccgcgccttcatggactcaatctcacgcctcagcaccaggtggtcgaagcgttctaggtcttgcggggaaatggtgcctctcacctcagagaggagtgagaa

SEQ ID NO: 14776 - DNA, 204 bp, Homo sapiens
  MAP TO CHR21_73.0; EXPRESSED IN FETAL LIVER, SIGNAL = 1.1; EXPRESSED IN HEART, SIGNAL = 1.2; EXPRESSED IN BONE MARROW, SIGNAL = 1.2; EXPRESSED IN LUNG, SIGNAL = 0.78; EXPRESSED IN BRAIN, SIGNAL = 1.2; EXPRESSED IN ADULT LIVER, SIGNAL = 0.91; EXPRESSED IN HELA, SIGNAL = 2.5; NT HIT: gi13385987, EVALUE 4.60e-02; EST_HUMAN HIT: AA825172.1, EVALUE 1.10e+00; SWISSPROT HIT: Q43125, EVALUE 4.90e-01
tcagcgctgacgaggtctgccgaggacgcgtttctctctgcagcccggcaccagtctcaaggccatcggctccgacagcgtcacctcctgggaccttcccttcatgtatggtcccagcggcatgcgggcctggtggaggaggtcctggcctgccgcccagggatggccggtccaggcgcagggccgattgtccacttctggccc

SEQ ID NO: 14777 - DNA, 170 bp, Homo sapiens
  MAP TO AL136978.3; EXPRESSED IN BRAIN, SIGNAL = 0.63; EXPRESSED IN FETAL LIVER, SIGNAL = 0.6; EXPRESSED IN LUNG, SIGNAL = 0.55; EXPRESSED IN BONE MARROW, SIGNAL = 0.59; EXPRESSED IN PLACENTA, SIGNAL = 0.63; EXPRESSED IN ADULT LIVER, SIGNAL = 0.69; EST_HUMAN HIT: AA961470.1, EVALUE 4.00e-03; SWISSPROT HIT: P09182, EVALUE 1.90e+00
agaagatcactaaagaaataaaggacttcatcaacactgtagttcaaattgaagtaaaagatagatatataaaggacattctactcaacaacaatataatatatggttttcttaagtatacacatggaacatccttcaggataaaacatattaagccacaaagcacgtct

SEQ ID NO: 14778 - DNA, 197 bp, Homo sapiens
  MAP TO AC020759.3; EXPRESSED IN HELA, SIGNAL = 2.2; EXPRESSED IN FETAL LIVER, SIGNAL =   3; EXPRESSED IN BONE MARROW, SIGNAL = 3.8; EXPRESSED IN PLACENTA, SIGNAL = 3.2; EXPRESSED IN BRAIN, SIGNAL = 2.2; EXPRESSED IN ADULT LIVER, SIGNAL = 2.8; SWISSPROT HIT: P01024, EVALUE 7.30e+00; NT HIT: AJ278578.1, EVALUE 1.00e-107; EST_HUMAN HIT: BG256261.1, EVALUE 1.00e-107
tggtttgagaacaaagacagcgtcatccagaacgtagtagtcattatacatgtcgccttcacacaggtatggtagtctggtgaaagcttcgataacaaaaccagcttttctgaaaacttcaggcagactattcacttgttcttcccagttctgtcctttgatttccaaaatttctgatggtttctcccacttgccac

SEQ ID NO: 14779 - DNA, 384 bp, Homo sapiens
  MAP TO AL138748.1; EXPRESSED IN FETAL LIVER, SIGNAL = 0.56; EXPRESSED IN BONE MARROW, SIGNAL = 0.55; EXPRESSED IN PLACENTA, SIGNAL = 0.6; EXPRESSED IN BRAIN, SIGNAL = 0.65; SWISSPROT HIT: P24386, EVALUE 1.00e-68; NT HIT: gi14759325, EVALUE 0.00e+00; EST_HUMAN HIT: AI126362.1, EVALUE 0.00e+00
gatttgcatgaagatgtcgaagaagctggtgcactgcagaaaaatcatgctcttgtgacatctgcaaactccacagaagctgcagattctgccttcctgcctacggaggatgagtcattaagcactatgagctgtgaaatgctcacagaacaaactccaagcagcgatccagagaatgcgctagaagtaaatggtgctgaagtgacaggggaaaaagaaaaccattgtgatgataaaacttgtgtgccatcaacttcagcagaagacatgagtgaaaatgtgcctatagcagaagataccacagagcaaccaaagaaaaacagaattacttactcacaaattattaaagaaggcaggagatttaatattgatttagtatcaaag

SEQ ID NO: 14780 - DNA, 184 bp, Homo sapiens
  MAP TO AF239614.1; EXPRESSED IN FETAL LIVER, SIGNAL = 0.49; EXPRESSED IN BONE MARROW, SIGNAL = 0.43; EXPRESSED IN BRAIN, SIGNAL = 0.64; EXPRESSED IN ADULT LIVER, SIGNAL = 0.38; SWISSPROT HIT: P54296, EVALUE 8.00e-29; NT HIT: gi15300154, EVALUE 2.00e-99
tccgtggtggggagcggcagctggcagagagtcaacgcccagacggctgtgagatccccgagatatgccgtgtttgacctcatggaagggaagtcttatgtgttccgagtgctgtcagcaaaccggcatggcctgagcgaaccttcggagataacgtcccccattcaggcccaggatgtgaccg

SEQ ID NO: 14781 - DNA, 142 bp, Homo sapiens
  MAP TO AL137145.3; EXPRESSED IN FETAL LIVER, SIGNAL = 0.51; EXPRESSED IN PLACENTA, SIGNAL = 0.64; EXPRESSED IN ADULT LIVER, SIGNAL = 0.67; EXPRESSED IN BRAIN, SIGNAL = 0.63; SWISSPROT HIT: Q02111, EVALUE 3.00e-14; NT HIT: gi16156411, EVALUE 2.00e-74; EST_HUMAN HIT: BE840877.1, EVALUE 2.00e-69
cttggtctggaatgtacaaaacatgtgcgtcagaaacggatgctcccaggccaaggaaagaactctcttctctaccatcgtgcactcaacatcatcgtccatcaagaccacatctttctttaaggcctttattgcgaaaaat

SEQ ID NO: 14782 - DNA, 105 bp, Homo sapiens
  MAP TO CHR21_60.0; EXPRESSED IN FETAL LIVER, SIGNAL = 1.7; EXPRESSED IN HEART, SIGNAL = 1.5; EXPRESSED IN LUNG, SIGNAL =   1; EXPRESSED IN ADULT LIVER, SIGNAL = 1.2; EXPRESSED IN BONE MARROW, SIGNAL = 1.7; EXPRESSED IN BRAIN, SIGNAL = 1.7; EXPRESSED IN HELA, SIGNAL = 4.5; EST_HUMAN HIT: AA582133.1, EVALUE 5.00e-04; SWISSPROT HIT: P38983, EVALUE 3.60e-02; NT HIT: AL163278.2, EVALUE 2.00e-52
ccacaggtctgatgtaggcgatgctggcccaggaagttctgtgcatggtggcacccctgtgacacccatggaaggccatgtctgatctccagttccacagagatc

SEQ ID NO: 14783 - DNA, 362 bp, Homo sapiens
  MAP TO CHR22_151.0; EXPRESSED IN BONE MARROW, SIGNAL = 0.77; EXPRESSED IN ADULT LIVER, SIGNAL = 0.81; EXPRESSED IN HELA, SIGNAL = 4.9; EXPRESSED IN BRAIN, SIGNAL = 0.79; EXPRESSED IN FETAL LIVER, SIGNAL = 0.76; NT HIT: gi13646374, EVALUE 0.00e+00; EST_HUMAN HIT: AU135172.1, EVALUE 0.00e+00; SWISSPROT HIT: P50839, EVALUE 1.30e+00
tggataacatgtgtctgcaagtcaaaataagctcttcttccatgcgttcccagtttacgttgctgttaaattcagctgcttttttggcagctttcttaatatcctcaggcactttactggcttcaactttctgagtattctgttgttgcatttgggaatactctttataatggtctgtaattcgctgacattcattttcttgtagaataacagaatactcagcatgtttggctggatattcttttatcattaaatcaatcacttcatcactgcgcaatgctgttatacctagcatgcactgagtttcagtaatgactttagctctctcaggtagagtttctccttgtgagacaaatctcgct

SEQ ID NO: 14784 - DNA, 161 bp, Homo sapiens
  MAP TO CHR21_62.0; EXPRESSED IN BONE MARROW, SIGNAL = 1.8; EXPRESSED IN BRAIN, SIGNAL = 1.5; EXPRESSED IN PLACENTA, SIGNAL = 0.75; EXPRESSED IN HEART, SIGNAL = 1.3; EXPRESSED IN HELA, SIGNAL = 3.6; EXPRESSED IN FETAL LIVER, SIGNAL = 1.3; EXPRESSED IN ADULT LIVER, SIGNAL = 0.88; NT HIT: gi16157545, EVALUE 5.50e-01; EST_HUMAN HIT: T98677.1, EVALUE 5.20e-02; SWISSPROT HIT: P24025, EVALUE 3.90e-01
ccgagagagaccctgggggcagacccctgggcgaaacttcccaggacagccagacgtggagcagccagcaggtgcttccagaagaaatgaacattccaagccaaggcacctcccgccaacaccaccccccaaggcgctaaggatgcccagagccactccat

SEQ ID NO: 14785 - DNA, 214 bp, Homo sapiens
  MAP TO CHR22_153.0; EXPRESSED IN BONE MARROW, SIGNAL = 1.1; EXPRESSED IN BRAIN, SIGNAL = 0.94; EXPRESSED IN HELA, SIGNAL = 1.4; EXPRESSED IN FETAL LIVER, SIGNAL = 0.96; EXPRESSED IN ADULT LIVER, SIGNAL = 0.77; SWISSPROT HIT: P55957, EVALUE 2.00e-27; NT HIT: gi4557360, EVALUE 1.00e-117; EST_HUMAN HIT: BI833719.1, EVALUE 1.00e-117
gaccggaacagggacctggccactgccctggagcagctgctgcaggcctaccctagagacatggagaaggagaagaccatgctggtgctggccctgctgctggccaagaaggtggccagtcacacgccgtccttgctccgtgatgtctttcacacaacagtgaattttattaaccagaacctacgcacctacgtgaggagcttagccagaaatg

SEQ ID NO: 14786 - DNA, 80 bp, Homo sapiens
  MAP TO AL136457.1; EXPRESSED IN PLACENTA, SIGNAL = 2.8; EXPRESSED IN HELA, SIGNAL = 2.3; EXPRESSED IN BRAIN, SIGNAL = 1.6; EXPRESSED IN LUNG, SIGNAL = 2.8; EXPRESSED IN ADULT LIVER, SIGNAL = 3.6; EXPRESSED IN FETAL LIVER, SIGNAL = 1.7; EXPRESSED IN BONE MARROW, SIGNAL = 1.6; EXPRESSED IN HEART, SIGNAL = 1.4; NT HIT: gi14727273, EVALUE 1.00e-37; EST_HUMAN HIT: AI825836.1, EVALUE 1.00e-37
ttgtttccctgacactgatacagcgtctccacctctcgaaacaccctactccgactgtgccctgcttgtttctcgatgat

SEQ ID NO: 14787 - DNA, 87 bp, Homo sapiens
  MAP TO AL136975.1; EXPRESSED IN FETAL LIVER, SIGNAL = 0.88; EXPRESSED IN ADULT LIVER, SIGNAL = 0.94; EXPRESSED IN BONE MARROW, SIGNAL = 0.78; EXPRESSED IN PLACENTA, SIGNAL =   1; EXPRESSED IN LUNG, SIGNAL = 0.89; EXPRESSED IN HELA, SIGNAL = 0.62; EXPRESSED IN BRAIN, SIGNAL = 0.9; NT HIT: AF305057.1, EVALUE 5.00e-09; EST_HUMAN HIT: AI800285.1, EVALUE 2.00e-06; SWISSPROT HIT: P08548, EVALUE 6.00e-04
ggtgtctttgaaggaattggttcatttcatcgaggttttcaaatttgtgtatatagagttgttcataatattctcttattatctttt

SEQ ID NO: 14788 - DNA, 166 bp, Homo sapiens
  MAP TO AC005629.2; EXPRESSED IN PLACENTA, SIGNAL = 0.66; EXPRESSED IN ADULT LIVER, SIGNAL = 0.45; EXPRESSED IN BRAIN, SIGNAL = 0.71; EXPRESSED IN HELA, SIGNAL = 0.8; EXPRESSED IN FETAL LIVER, SIGNAL = 0.77; EXPRESSED IN LUNG, SIGNAL = 0.49; SWISSPROT HIT: P93119, EVALUE 1.50e+00; NT HIT: AL163203.2, EVALUE 2.00e-62; EST_HUMAN HIT: AW296733.1, EVALUE 4.00e-86
atgcagacatggcactcaaaagatgacaccccccttgctcatgtaacaagcacctgtagtgctaatgcactgcctcgacacaaaaacattaatataagatccacaatcccctcgctgccgtgcagtcctaagacagcgatcataataatcaacattgacatagtca

SEQ ID NO: 14789 - DNA, 119 bp, Homo sapiens
  MAP TO AL136371.1; EXPRESSED IN BONE MARROW, SIGNAL = 0.63; EXPRESSED IN ADULT LIVER, SIGNAL = 0.38; EXPRESSED IN BRAIN, SIGNAL = 0.63; EXPRESSED IN FETAL LIVER, SIGNAL = 0.66; NT HIT: AL445067.1, EVALUE 1.50e+00; EST_HUMAN HIT: BI834236.1, EVALUE 5.80e-01
ttagctaggagtttggtcggtacattcatactcacagaagggaaggtcgttataaacacaaacggaatatttgtgttctgcattatcagtttcctgaatgttatctccaaggaagagac

SEQ ID NO: 14790 - DNA, 106 bp, Homo sapiens
  MAP TO AC022057.2; EXPRESSED IN BONE MARROW, SIGNAL = 0.61; EXPRESSED IN BRAIN, SIGNAL = 0.53; EXPRESSED IN FETAL LIVER, SIGNAL = 0.68; EXPRESSED IN LUNG, SIGNAL = 0.62; EXPRESSED IN ADULT LIVER, SIGNAL = 0.72; EST_HUMAN HIT: BG186733.1, EVALUE 2.00e+00; SWISSPROT HIT: O47478, EVALUE 8.00e+00; NT HIT: AJ293055.1, EVALUE 3.40e-01
cagatttaccaaccactgggaatttgagattttctttagatacaataatataaaggtcatcgtgaattttgtgcttgtaattattaaaagaatctgttatatactg

SEQ ID NO: 14791 - DNA, 473 bp, Homo sapiens
  MAP TO AF238280.1; EXPRESSED IN FETAL LIVER, SIGNAL = 1.1; EXPRESSED IN LUNG, SIGNAL = 1.1; EXPRESSED IN ADULT LIVER, SIGNAL = 1.1; EXPRESSED IN BONE MARROW, SIGNAL = 1.2; EXPRESSED IN BRAIN, SIGNAL =   1; EXPRESSED IN HELA, SIGNAL = 0.73; EST_HUMAN HIT: BE162832.1, EVALUE 0.00e+00; SWISSPROT HIT: P13683, EVALUE 1.00e-62; NT HIT: gi14732082, EVALUE 1.00e-16
caaagccttcagtacacaattatttctcattcagcatcagagaattcatacaggagaaaagccctatgaatgtaatgaatgtgcaaaatcctttagcctgaaccgaactcttactgtccatcagagaattcacactggagagaaaccttataggtgtaatgaatgtgggaaatcctttagtcaatgctcacaagttattcaacataagagaattcacactggagagaaaccttatatctgcaatgagtgtggaaaatcatttggtgctcgtctatcccttatccagcatcagagaattcacactggagagaaaccttatggttgtagtgtgtgtgggaaaacctttagtcaaaagggacatcttattcagcatcagtgaattcacacaggagagaaaccctatgaatgtagtgagtgtggaaaagctttcagccagagttttaatcttattcaccatcaaagaacacacaatg

SEQ ID NO: 14792 - DNA, 81 bp, Homo sapiens
  MAP TO AC011799.5; EXPRESSED IN BONE MARROW, SIGNAL = 1.3; EXPRESSED IN HEART, SIGNAL = 1.2; EXPRESSED IN BRAIN, SIGNAL = 1.1; EXPRESSED IN ADULT LIVER, SIGNAL = 1.5; EXPRESSED IN HELA, SIGNAL = 0.8; EXPRESSED IN FETAL LIVER, SIGNAL = 1.3; NT HIT: gi4885602, EVALUE 2.00e-38; EST_HUMAN HIT: BF224056.1, EVALUE 4.00e-38
aagaagagttcttttgactctggctcagcaatgtgctttatgctgtaggatttcttcatttttctattgatgtcattatgc

SEQ ID NO: 14793 - DNA, 244 bp, Homo sapiens
  MAP TO CHR21_65.0; EXPRESSED IN HEART, SIGNAL = 1.3; EXPRESSED IN BRAIN, SIGNAL = 1.7; EXPRESSED IN LUNG, SIGNAL = 0.88; EXPRESSED IN HELA, SIGNAL = 4.2; EXPRESSED IN FETAL LIVER, SIGNAL = 1.5; NT HIT: AB038161.1, EVALUE 0.00e+00; EST_HUMAN HIT: BG394670.1, EVALUE 8.30e-02; SWISSPROT HIT: P13292, EVALUE 1.80e+00
tggtgccttctgcagggcactggagaacgctgtgtgtgctcatcttgggacaggcaggagaggagggcaggtggcaggatgagggcggctgtagcctgcaggtcacacagtgttatgccagaccacggtgcctgccacgctgggtctccaacggccacacgaggcactgcttccatgttatcagtgaggaaactgtggcctggagacaggtgggcgatgagttcaagttcctgctgccaacagg

SEQ ID NO: 14794 - DNA, 78 bp, Homo sapiens
  MAP TO AL136445.1; EXPRESSED IN HELA, SIGNAL = 0.62; EXPRESSED IN BRAIN, SIGNAL = 0.73; EXPRESSED IN ADULT LIVER, SIGNAL =   1; EXPRESSED IN FETAL LIVER, SIGNAL = 0.81; EXPRESSED IN PLACENTA, SIGNAL = 0.93; EXPRESSED IN BONE MARROW, SIGNAL = 0.7; EXPRESSED IN LUNG, SIGNAL = 0.93; NT HIT: gi10281666, EVALUE 1.00e-36; EST_HUMAN HIT: BI494617.1, EVALUE 1.30e+00; SWISSPROT HIT: P16252, EVALUE 7.20e-01
tgttctgccaggaattcctatcccttgtgggcctatgtcccctggggaaccgtgaacacctggaagtcctctttcacc

SEQ ID NO: 14795 - DNA, 233 bp, Homo sapiens
  MAP TO AC007029.3; EXPRESSED IN BONE MARROW, SIGNAL = 0.8; EXPRESSED IN HELA, SIGNAL = 0.82; EXPRESSED IN BRAIN, SIGNAL = 0.71; EXPRESSED IN LUNG, SIGNAL = 0.64; EXPRESSED IN FETAL LIVER, SIGNAL = 0.72; EXPRESSED IN PLACENTA, SIGNAL = 0.59; EXPRESSED IN ADULT LIVER, SIGNAL = 0.63; SWISSPROT HIT: P27113, EVALUE 9.40e-01
ctggagtgtgggctgttataacttggctgtgtggaacagaagcttcttcaacagcttcctggctcattgtgtgtaatgggcagtggctgcatgctgacattgattttgtggacatccagatgataaaacacacccttgtctactcttatcattttaagacagaacaggagacagcagatgttactcatcacttcttgtgggcatcaattgggctgccctctgaggagccctag

SEQ ID NO: 14796 - DNA, 211 bp, Homo sapiens
  MAP TO CHR21_52.0; EXPRESSED IN BONE MARROW, SIGNAL = 0.5; EXPRESSED IN BRAIN, SIGNAL = 0.56; EXPRESSED IN PLACENTA, SIGNAL = 0.49; EXPRESSED IN HELA, SIGNAL = 0.78; EXPRESSED IN LUNG, SIGNAL = 0.56; EXPRESSED IN ADULT LIVER, SIGNAL = 0.41; EST_HUMAN HIT: R20834.1, EVALUE 3.00e-04; SWISSPROT HIT: Q05002, EVALUE 6.30e-01; NT HIT: AJ229041.1, EVALUE 1.00e-115
cgttcaactacctctaacacacgaattgtatcaactaagcgcatcaaacagtaatggtgaaagggagagggactagtgcagtggctctcaactgggggcagtttttccccccaggagacgtttggtggtgtttggacacatttttgatggtcacagccagagaaagggatgctactggcatctggtacgtagaggccagggttgctgctac

SEQ ID NO: 14797 - DNA, 165 bp, Homo sapiens
  MAP TO AL133499.1; EXPRESSED IN ADULT LIVER, SIGNAL = 0.65; EXPRESSED IN FETAL LIVER, SIGNAL = 0.42; EXPRESSED IN BRAIN, SIGNAL = 0.41; NT HIT: AL163301.2, EVALUE 4.00e-88; SWISSPROT HIT: Q9Y5U5, EVALUE 8.70e-01
ctaaaaatcttcctggatatgacttccagtcataacgttatggattttattgtaaacaaggtagaattttatttgccttttaatcatttcattatggtgagtgtcctccttacagagcgtgtactgaatttgggttttactccttttttgttcatttccacaagt

SEQ ID NO: 14798 - DNA, 96 bp, Homo sapiens
  MAP TO AL137784.2; EXPRESSED IN PLACENTA, SIGNAL = 0.64; EXPRESSED IN BONE MARROW, SIGNAL = 0.61; EXPRESSED IN LUNG, SIGNAL = 0.56; EXPRESSED IN BRAIN, SIGNAL = 0.53; EXPRESSED IN ADULT LIVER, SIGNAL = 0.67; NT HIT: gi14754010, EVALUE 3.00e-47; EST_HUMAN HIT: AL530470.1, EVALUE 5.00e-47
cagctgagagtctgaggaaggaaaaatcttgagttttgtactactttctttgatctcattcatcagatcagtaagagtataagtctgtgccaagtt

SEQ ID NO: 14799 - DNA, 233 bp, Homo sapiens
  MAP TO AL121830.11; EXPRESSED IN HEART, SIGNAL =   2; EXPRESSED IN BONE MARROW, SIGNAL = 1.7; EXPRESSED IN PLACENTA, SIGNAL =   2; EXPRESSED IN LUNG, SIGNAL = 1.8; EXPRESSED IN BRAIN, SIGNAL = 1.9; EXPRESSED IN HELA, SIGNAL = 0.9; EXPRESSED IN ADULT LIVER, SIGNAL = 1.5; EXPRESSED IN FETAL LIVER, SIGNAL = 1.9; NT HIT: gi15304835, EVALUE 3.00e-74; EST_HUMAN HIT: AL603345.1, EVALUE 5.00e-74; SWISSPROT HIT: Q12053, EVALUE 7.20e-01
agggggtgtcgaatggtgtgtacggtccttcatcatcatcctcgtcctcctcttcctcctcatcattctcattgtcctcattttcattctctgtttcgttgccagcctcagccacaacatcgtccctccgtgtcccattcacgcccctgtctggggcactgctgggccctgtcccattctccacggtgtgcttaattgggattttgatggccacctcagattccccgttggta

SEQ ID NO: 14800 - DNA, 240 bp, Homo sapiens
  MAP TO CHR21_68.0; EXPRESSED IN BONE MARROW, SIGNAL = 1.6; EXPRESSED IN HELA, SIGNAL = 4.6; EXPRESSED IN BRAIN, SIGNAL = 1.6; EXPRESSED IN FETAL LIVER, SIGNAL = 1.3; EXPRESSED IN PLACENTA, SIGNAL = 0.8; EXPRESSED IN HEART, SIGNAL = 1.2; EXPRESSED IN LUNG, SIGNAL = 0.87; EXPRESSED IN ADULT LIVER, SIGNAL = 0.74; NT HIT: AB039887.1, EVALUE 0.00e+00; EST_HUMAN HIT: BI030377.1, EVALUE 0.00e+00; SWISSPROT HIT: P57081, EVALUE 8.00e-32
ctgccactggtcgcccacaggcctgtagagcaccaggggggcttcctggcagtcctggagcacccacagcccctgggtctcctcgaaagccacgtcccacacttggtgctggaacgccagctgctgcctgtacaccaactgctgtctgcgggcgtccagctggaagatgtagaccacaggagtgcttgccacgaagaaagagagcatgattactaggactgcaggcccacgggctccgct

SEQ ID NO: 14801 - DNA, 88 bp, Homo sapiens
  MAP TO CHR22_14.0; EXPRESSED IN BRAIN, SIGNAL = 4.5; EXPRESSED IN HEART, SIGNAL = 3.7; EXPRESSED IN LUNG, SIGNAL = 4.3; EXPRESSED IN HELA, SIGNAL = 3.3; EXPRESSED IN ADULT LIVER, SIGNAL = 4.3; EXPRESSED IN FETAL LIVER, SIGNAL = 4.2; EXPRESSED IN BONE MARROW, SIGNAL = 3.9; NT HIT: AF106072.1, EVALUE 4.00e-03; EST_HUMAN HIT: AW295137.1, EVALUE 2.50e-02; SWISSPROT HIT: Q9ZDL6, EVALUE 3.60e+00
ttaagccaagacctgaatgaaggagcaaaccatgtacagaaccaagaagagtgtcccaggctgcaggcgcagcaggtgcaaaggccct

SEQ ID NO: 14802 - DNA, 220 bp, Homo sapiens
  MAP TO CHR22_207.0; EXPRESSED IN FETAL LIVER, SIGNAL = 1.2; EXPRESSED IN BONE MARROW, SIGNAL = 1.4; EXPRESSED IN LUNG, SIGNAL = 0.7; EXPRESSED IN BRAIN, SIGNAL = 1.3; EXPRESSED IN ADULT LIVER, SIGNAL = 0.86; EXPRESSED IN HELA, SIGNAL = 2.7; NT HIT: L29333.1, EVALUE 1.00e-121; EST_HUMAN HIT: BF129822.1, EVALUE 1.20e+00; SWISSPROT HIT: P13866, EVALUE 4.00e-42
ttttcacgaagtgggaggctatgacgccttcatggaaaagtacatgaaagccattccaaccatagtgtctgatggcaacaccacctttcaggaaaaatgctacactccaagggccgactccttccacatcttccgagatcccctcacgggagacctcccatggcctgggttcatctttgggatgtccatccttaccttgtggtactggtgcacagatcag

SEQ ID NO: 14803 - DNA, 140 bp, Homo sapiens
  MAP TO AL137005.2; EXPRESSED IN LUNG, SIGNAL = 7.3; EXPRESSED IN BONE MARROW, SIGNAL = 7.7; EXPRESSED IN ADULT LIVER, SIGNAL = 7.9; EXPRESSED IN HELA, SIGNAL = 5.5; EXPRESSED IN BRAIN, SIGNAL =   7; EXPRESSED IN FETAL LIVER, SIGNAL = 7.4; EXPRESSED IN HEART, SIGNAL = 6.5; SWISSPROT HIT: Q15283, EVALUE 5.90e+00; NT HIT: D78577.1, EVALUE 5.00e-10; EST_HUMAN HIT: AL048984.1, EVALUE 2.00e-13
cttctggtggtgacatcagaccttggtgttccttggcttgtagatgcgtcactccagtcactgcctccattgtccatggtggtctccctgtgtgttttgcagtctcttctttttttataaaaacaccagtcagattagat

SEQ ID NO: 14804 - DNA, 142 bp, Homo sapiens
  MAP TO AL158832.2; EXPRESSED IN HEART, SIGNAL = 2.7; EXPRESSED IN PLACENTA, SIGNAL = 3.3; EXPRESSED IN HELA, SIGNAL = 1.9; EXPRESSED IN FETAL LIVER, SIGNAL = 2.7; EXPRESSED IN LUNG, SIGNAL = 3.1; EXPRESSED IN ADULT LIVER, SIGNAL = 2.7; EXPRESSED IN BONE MARROW, SIGNAL = 2.8; EXPRESSED IN BRAIN, SIGNAL = 2.9; EST_HUMAN HIT: BF899273.1, EVALUE 3.00e-74; SWISSPROT HIT: P34489, EVALUE 2.60e+00
gtcatccctgcaaccagttgacactggagctcagcagccagctgataggggccttcactcctcttgtcgagctgctcctctctcctctcaaagccctctttccttctctcctgctggctgacctagaagctcagctaaagag

SEQ ID NO: 14805 - DNA, 262 bp, Homo sapiens
  MAP TO CHR21_71.0; EXPRESSED IN HEART, SIGNAL = 1.2; EXPRESSED IN LUNG, SIGNAL =   1; EXPRESSED IN BONE MARROW, SIGNAL = 1.6; EXPRESSED IN BRAIN, SIGNAL = 1.3; EXPRESSED IN HELA, SIGNAL = 3.2; EXPRESSED IN FETAL LIVER, SIGNAL = 1.6; EST_HUMAN HIT: AL526390.1, EVALUE 0.00e+00; SWISSPROT HIT: P56182, EVALUE 3.00e-22; NT HIT: U79775.1, EVALUE 0.00e+00
gaaaggtgagaaggagcccccgagcccgggcatggagaggaagaggagcaggaggaggggtgtaggggccgaccccgaggcgcgggcagaggctggtgagcagccaggcacagctgagcgggccctgctccgagatcagcccaggggccgtggccagagaggggctcgccagagaaggaggacacctcggcccctgaccagtgcccgagcaaaggcggccaatgtccaggagccggagaagaagaagaaacgcagggagtga

SEQ ID NO: 14806 - DNA, 136 bp, Homo sapiens
  MAP TO AL160191.1; EXPRESSED IN BONE MARROW, SIGNAL = 0.82; EXPRESSED IN BRAIN, SIGNAL = 0.68; EXPRESSED IN HEART, SIGNAL = 1.6; EXPRESSED IN PLACENTA, SIGNAL = 1.1; EXPRESSED IN ADULT LIVER, SIGNAL = 1.2; NT HIT: AL163227.2, EVALUE 1.00e-07; EST_HUMAN HIT: AL566894.1, EVALUE 1.10e-02; SWISSPROT HIT: P09953, EVALUE 3.50e+00
atgatgataaaaataattgcaatttttaccattaaaagtcatggcaaaaccacaattactttggcaccagctgaatattttgaaactccctactctgatgttaaccaagttcatgattcaacgaacttgcagaggg

SEQ ID NO: 14807 - DNA, 175 bp, Homo sapiens
  MAP TO CHR22_18.0; EXPRESSED IN HELA, SIGNAL = 2.7; EXPRESSED IN BRAIN, SIGNAL = 3.4; EXPRESSED IN FETAL LIVER, SIGNAL = 3.2; EXPRESSED IN BONE MARROW, SIGNAL = 3.6; EXPRESSED IN LUNG, SIGNAL = 3.3; EXPRESSED IN HEART, SIGNAL =   3; EXPRESSED IN ADULT LIVER, SIGNAL = 3.1; NT HIT: AL163301.2, EVALUE 8.00e-22; EST_HUMAN HIT: BI465261.1, EVALUE 1.00e-15; SWISSPROT HIT: P00363, EVALUE 1.90e+00
gatggagattcctatgagccagactgcggtgattattattgcccttctgggtctagccacccagtggggctaccaggctctgggcccatgctggggaacgtctgcaaagaacccggtgatgtgatccatcttcagatctcccagctgtggataccagcacctgctgtggtggtgg

SEQ ID NO: 14808 - DNA, 255 bp, Homo sapiens
  MAP TO CHR22_211.0; EXPRESSED IN FETAL LIVER, SIGNAL = 1.1; EXPRESSED IN LUNG, SIGNAL = 0.74; EXPRESSED IN BONE MARROW, SIGNAL = 1.2; EXPRESSED IN ADULT LIVER, SIGNAL = 0.87; EXPRESSED IN BRAIN, SIGNAL = 1.3; EXPRESSED IN HELA, SIGNAL = 2.2; NT HIT: AY046029.1, EVALUE 2.30e-01; EST_HUMAN HIT: BF312374.1, EVALUE 2.20e-02; SWISSPROT HIT: Q07687, EVALUE 1.70e-01
gaccagcacatcagcaggatgtttgcgtctgaggagcagaggcatttacccaggcatttgtcttctattgatcatgtggaggaggaaggagagagagatcaaattagtccccgttgctacattcatctaagcagaaatgtggtccccaaccggatcattcactccatcactctggaggtaggaggtgtaaaaggtctggaggtgctgttgaaagtccccatcaagaaaatagtggtagaaaaaggactcccctga

SEQ ID NO: 14809 - DNA, 370 bp, Homo sapiens
  MAP TO AL080248.7; EXPRESSED IN PLACENTA, SIGNAL = 0.75; EXPRESSED IN LUNG, SIGNAL = 0.66; EXPRESSED IN FETAL LIVER, SIGNAL = 0.88; EXPRESSED IN ADULT LIVER, SIGNAL = 0.93; EXPRESSED IN BONE MARROW, SIGNAL = 0.84; EXPRESSED IN BRAIN, SIGNAL = 0.68; EXPRESSED IN HELA, SIGNAL = 0.61; EXPRESSED IN HEART, SIGNAL = 1.3; SWISSPROT HIT: P23201, EVALUE 7.60e-01; NT HIT: gi15295589, EVALUE 2.20e-02; EST_HUMAN HIT: AV732161.1, EVALUE 2.00e-12
ttgtgatgatgacaaagtggtgactttgaaggattccaaaagtcagatgagaagaaaaatgtcagatctccttacatatgcaaaaattgtatcttcagaatctgtcaatagggtggaacaggtggataacaaagaagttcttaacatcaataatgaggctccggttgttcattcattagtcagtagtgaaaaagccaaaatggctctgagtctagatgattgtgataatagtaacaatgaaaatgactttgttaacactacagaaaaagtgcttatacatgacatgctgaaaatatgtgatgggtttatcgaaggactagagcagcgtatgttcgtagctgatagcagaacaagaaatcacttcagttta

SEQ ID NO: 14810 - DNA, 86 bp, Homo sapiens
  MAP TO AL139112.1; EXPRESSED IN BRAIN, SIGNAL = 0.46; EXPRESSED IN FETAL LIVER, SIGNAL = 0.56; EXPRESSED IN ADULT LIVER, SIGNAL = 0.58; EST_HUMAN HIT: AI640259.1, EVALUE 1.50e+00
atgagcatggaggagcttcgtgatgctgataaagtatttctcaatctggattctgttcatgttggttcatacaatgtgaaaattga

SEQ ID NO: 14811 - DNA, 88 bp, Homo sapiens
  MAP TO AL138879.2; EXPRESSED IN PLACENTA, SIGNAL = 0.45; EXPRESSED IN ADULT LIVER, SIGNAL = 0.52; EXPRESSED IN FETAL LIVER, SIGNAL = 0.49; EXPRESSED IN BONE MARROW, SIGNAL = 0.47; EXPRESSED IN BRAIN, SIGNAL = 0.46; EXPRESSED IN LUNG, SIGNAL = 0.5; NT HIT: AL163208.2, EVALUE 4.00e-03; EST_HUMAN HIT: AV686900.1, EVALUE 1.60e+00
cctgagatatgaaaggtacatttcataattggattagcctcagcatagttctgttcacaaagcaacatatcacaaggggtatttcctt

SEQ ID NO: 14812 - DNA, 109 bp, Homo sapiens
  MAP TO AC020698.2; EXPRESSED IN PLACENTA, SIGNAL = 0.87; EXPRESSED IN ADULT LIVER, SIGNAL = 0.99; EXPRESSED IN BONE MARROW, SIGNAL = 0.48; EXPRESSED IN BRAIN, SIGNAL = 0.46; NT HIT: AL591784.1, EVALUE 1.40e+00; EST_HUMAN HIT: AW137342.1, EVALUE 3.30e-02; SWISSPROT HIT: P25439, EVALUE 1.20e+00
gtaaagggccgggaggccgcgcacactgccgctgttgtccgggtttgtgttgaaggtaaaggccgggaggccgcgcacactgccgctgttgtctgggtttgtgttgaag

SEQ ID NO: 14813 - DNA, 235 bp, Homo sapiens
  MAP TO AC015937.3; EXPRESSED IN FETAL LIVER, SIGNAL = 1.8; EXPRESSED IN BONE MARROW, SIGNAL = 1.8; EXPRESSED IN PLACENTA, SIGNAL = 2.9; EXPRESSED IN BRAIN, SIGNAL = 2.3; EXPRESSED IN HEART, SIGNAL = 1.7; EXPRESSED IN ADULT LIVER, SIGNAL = 1.9; NT HIT: gi14772401, EVALUE 1.00e-27; EST_HUMAN HIT: BI917304.1, EVALUE 2.00e-27; SWISSPROT HIT: P08489, EVALUE 1.30e-02
tttcagagttggtggcggcaaccggcatggtgaaggaggcaagggctctgaaacgtctctcctggagaggggagagaggaggatgagcagatacaagggcaaagcaatggggaagggaataggaagagcctccccttcaggacgagccagaaaggtaggggagaaggtgctgcccagaaagtgggggttggagaacaacaatgattccaacagtcctgggaagcaggaagagcag

SEQ ID NO: 14814 - DNA, 211 bp, Homo sapiens
  MAP TO AL136105.2; EXPRESSED IN BRAIN, SIGNAL = 2.3; EXPRESSED IN LUNG, SIGNAL = 3.5; EXPRESSED IN HEART, SIGNAL = 2.8; EXPRESSED IN PLACENTA, SIGNAL = 4.5; EXPRESSED IN ADULT LIVER, SIGNAL = 4.4; EXPRESSED IN HELA, SIGNAL = 3.4; EXPRESSED IN FETAL LIVER, SIGNAL = 3.1; EXPRESSED IN BONE MARROW, SIGNAL = 2.8; NT HIT: gi14741615, EVALUE 1.00e-115; EST_HUMAN HIT: BI464487.1, EVALUE 1.00e-115; SWISSPROT HIT: O00214, EVALUE 1.00e-36
attccaggtggatctgcagaatggcagcagcatgaaacctcgagccgatgtggcctttcatttcaatcctcgtttcaaaagggccggctgcattgtttgcaatactttgataaatgaaaaatggggacgggaagagatcacctatgacacgcctttcaaaagagaaaagtcttttgagatcgtgattatggtgctgaaggacaaattccag

SEQ ID NO: 14815 - DNA, 200 bp, Homo sapiens
  MAP TO AJ239319.2; EXPRESSED IN PLACENTA, SIGNAL = 2.6; EXPRESSED IN BRAIN, SIGNAL = 2.1; EXPRESSED IN HEART, SIGNAL = 2.2; EXPRESSED IN ADULT LIVER, SIGNAL = 2.7; EXPRESSED IN FETAL LIVER, SIGNAL = 2.1; EXPRESSED IN BONE MARROW, SIGNAL = 2.4; SWISSPROT HIT: P21675, EVALUE 5.00e-20; NT HIT: gi14759185, EVALUE 1.00e-109; EST_HUMAN HIT: AU123960.1, EVALUE 1.00e-108
ttatgggagctatgaggagcctgatcccaagtcgaacacccaagacacaagcttcagcagcatcggtgggtatgaggtatcagaggaggaagaagatgaggaggaggaagagcagcgctctgggccgagcgtactaagccaggtccacctgtcagaggacgaggaggacagtgaggatttccactccattgctggggaca

SEQ ID NO: 14816 - DNA, 114 bp, Homo sapiens
  MAP TO AC020996.4; EXPRESSED IN BONE MARROW, SIGNAL = 1.4; EXPRESSED IN BRAIN, SIGNAL = 0.85; EXPRESSED IN HELA, SIGNAL = 2.2; EXPRESSED IN FETAL LIVER, SIGNAL = 1.6; EXPRESSED IN LUNG, SIGNAL = 0.83; EXPRESSED IN PLACENTA, SIGNAL = 0.83; EXPRESSED IN ADULT LIVER, SIGNAL =   1; NT HIT: D15051.1, EVALUE 3.70e-01; EST_HUMAN HIT: AW850263.1, EVALUE 5.50e-01; SWISSPROT HIT: Q99748, EVALUE 4.60e+00
ctagtatttctgggcctgaagcgggatgttgatgtcttctttgctctcatcctggtttgtctgggacctatggatttcctgggacctgggattttccatgctaaaatcgagaaa

SEQ ID NO: 14817 - DNA, 104 bp, Homo sapiens
  MAP TO AL136970.1; EXPRESSED IN ADULT LIVER, SIGNAL = 0.69; EXPRESSED IN HELA, SIGNAL = 0.61; EXPRESSED IN FETAL LIVER, SIGNAL = 0.54; EXPRESSED IN BONE MARROW, SIGNAL = 0.58; EXPRESSED IN BRAIN, SIGNAL = 0.5; NT HIT: gi13435400, EVALUE 6.00e-52; EST_HUMAN HIT: AA443222.1, EVALUE 9.00e-52; SWISSPROT HIT: P48163, EVALUE 3.00e-13
ttggaagaaactgcctccatgaattcgtccaaaaaatcatcatattcagaacctcttactcttctctgccgtagtccaatgtagagtggatctttaagtaactc

SEQ ID NO: 14818 - DNA, 176 bp, Homo sapiens
  MAP TO CHR21_61.0; EXPRESSED IN HELA, SIGNAL = 3.4; EXPRESSED IN FETAL LIVER, SIGNAL = 1.3; EXPRESSED IN HEART, SIGNAL = 1.2; EXPRESSED IN PLACENTA, SIGNAL = 0.89; EXPRESSED IN LUNG, SIGNAL = 0.95; EXPRESSED IN BONE MARROW, SIGNAL = 1.4; EXPRESSED IN BRAIN, SIGNAL = 1.4; NT HIT: AL163285.2, EVALUE 1.00e-94; SWISSPROT HIT: O15393, EVALUE 1.00e-26; EST_HUMAN HIT: AA457407.1, EVALUE 7.00e-85
cagaaggaggacaggatagttaccctcatttgtcgataaatccagtccgtgaataccatcacattcccgtacactcctggtctgtaagctttggcacagccagaaccccagcttgtatcccctatcagccaccagatattgttcttcgaagtgaccagaggccctccactgtcacc

SEQ ID NO: 14819 - DNA, 99 bp, Homo sapiens
  MAP TO AL137016.5; EXPRESSED IN FETAL LIVER, SIGNAL = 0.64; EXPRESSED IN BONE MARROW, SIGNAL = 0.51; EXPRESSED IN BRAIN, SIGNAL = 0.54; EXPRESSED IN LUNG, SIGNAL = 0.54; EXPRESSED IN PLACENTA, SIGNAL = 0.61; EXPRESSED IN ADULT LIVER, SIGNAL = 0.52; NT HIT: AL163206.2, EVALUE 3.00e-29; SWISSPROT HIT: P11369, EVALUE 2.00e-08; EST_HUMAN HIT: AW073791.1, EVALUE 4.00e-26
atgaaggataaaaaccatatgatcatttcaattgatgctgaaaaagcatttcataaaattcagcatcccttcatgataaaaaccttcaaaaacagggtg

SEQ ID NO: 14820 - DNA, 217 bp, Homo sapiens
  MAP TO AL136381.1; EXPRESSED IN PLACENTA, SIGNAL = 0.94; EXPRESSED IN ADULT LIVER, SIGNAL = 1.1; EXPRESSED IN LUNG, SIGNAL = 0.91; EXPRESSED IN BONE MARROW, SIGNAL = 0.69; EXPRESSED IN BRAIN, SIGNAL = 0.64; NT HIT: gi5453973, EVALUE 1.00e-119; EST_HUMAN HIT: AU135111.1, EVALUE 1.00e-116; SWISSPROT HIT: Q16513, EVALUE 3.00e-34
gctcaagcaagatttaatgaatcaagtcagaagttggaccttttaaagtattcattagagcaaagattaaacgaagtccccaagaatcatcccaaaagcaggattattattgaagaactttcacttgttgctgcatcaccaacactaagtccacgtcaaagtatgatatctacgcaaaatcaatatagtacactatccaaaccagcagcactaacag

SEQ ID NO: 14821 - DNA, 212 bp, Homo sapiens
  MAP TO AL138743.1; EXPRESSED IN BONE MARROW, SIGNAL = 0.56; EXPRESSED IN BRAIN, SIGNAL = 0.51; EXPRESSED IN PLACENTA, SIGNAL = 0.69; EXPRESSED IN FETAL LIVER, SIGNAL = 0.52; EXPRESSED IN LUNG, SIGNAL = 0.62; SWISSPROT HIT: P11369, EVALUE 4.20e-01; NT HIT: gi14572198, EVALUE 3.00e-09; EST_HUMAN HIT: BF836398.1, EVALUE 2.80e-01
agaaaagggaacactcatacactgttggtgggaataacacatgttctcattcacatgtggatgctgaaaaatgtgtacacatggacgtagagcatggaatgatagataacagacttggaaaggtgagagagcaggaggtgggagatcatgagaaattacttaatgaatacaatgtgtgttatttgggtgatggaaactctaaaggcttgact

SEQ ID NO: 14822 - DNA, 134 bp, Homo sapiens
  MAP TO AC016078.3; EXPRESSED IN BONE MARROW, SIGNAL = 3.9; EXPRESSED IN BRAIN, SIGNAL = 3.1; EXPRESSED IN LUNG, SIGNAL = 4.9; EXPRESSED IN HELA, SIGNAL = 1.5; EXPRESSED IN PLACENTA, SIGNAL = 5.2; EXPRESSED IN ADULT LIVER, SIGNAL = 4.4; EXPRESSED IN FETAL LIVER, SIGNAL = 3.5; NT HIT: AL163252.2, EVALUE 5.00e-07; EST_HUMAN HIT: AA205629.1, EVALUE 1.00e-05; SWISSPROT HIT: O78489, EVALUE 5.90e+00
aggagtgagctcccaaggccctggaaagctctgcccttgtggctttgcaggatttagcccccacagctgctctcatgagctggggttgagtgtctgcatcttttccagacacagagtgaaagttgtcagtggat

SEQ ID NO: 14823 - DNA, 158 bp, Homo sapiens
  MAP TO AL136134.1; EXPRESSED IN FETAL LIVER, SIGNAL = 1.1; EXPRESSED IN LUNG, SIGNAL = 1.5; EXPRESSED IN BONE MARROW, SIGNAL = 1.3; EXPRESSED IN ADULT LIVER, SIGNAL = 1.5; EXPRESSED IN BRAIN, SIGNAL = 1.1; NT HIT: AL163248.2, EVALUE 3.00e-15; EST_HUMAN HIT: AI678268.1, EVALUE 2.00e-17; SWISSPROT HIT: P40969, EVALUE 2.00e+00
atgaagaagtggcagggcttgagaggatttactccaattttggaagaaattctactattggtaaaacgctatcaaatggcatctcacgttacaaagaaatctttcataaaaggaagagagagtccatcgatgcctcaatttccattgttgtcttactt

SEQ ID NO: 14824 - DNA, 87 bp, Homo sapiens
  MAP TO AL137071.3; EXPRESSED IN FETAL LIVER, SIGNAL = 0.56; EXPRESSED IN BONE MARROW, SIGNAL = 0.59; EXPRESSED IN BRAIN, SIGNAL = 0.52; EXPRESSED IN PLACENTA, SIGNAL = 0.77; EXPRESSED IN ADULT LIVER, SIGNAL = 0.88; NT HIT: AF106548.1, EVALUE 1.10e+00; EST_HUMAN HIT: BF963907.1, EVALUE 4.00e-04
ctggttgctatacattaccagcacaccactggcaatgacgatgaccaaattctgatcagaaagaaagacaaacacacacatacaaca

SEQ ID NO: 14825 - DNA, 182 bp, Homo sapiens
  MAP TO CHR22_9.0; EXPRESSED IN BONE MARROW, SIGNAL = 0.93; EXPRESSED IN BRAIN, SIGNAL = 0.88; EXPRESSED IN HELA, SIGNAL = 1.2; EXPRESSED IN FETAL LIVER, SIGNAL = 0.89; EXPRESSED IN LUNG, SIGNAL =   1; EXPRESSED IN ADULT LIVER, SIGNAL = 0.98; NT HIT: AF223391.1, EVALUE 6.40e-01; SWISSPROT HIT: P35442, EVALUE 4.30e+00; EST_HUMAN HIT: AW611542.1, EVALUE 2.00e-17
cctgcccacagtgacaaggatatggggtgctcgtggtcttttcccttctgactatcaacacattcttgccgtgctgctgcagactggcatagttctggagaaagtacacaatcagagggctcttcccataaatgttgaagaggtttgaagtcagctcagggcttttgcaggcagcacacgac

SEQ ID NO: 14826 - DNA, 124 bp, Homo sapiens
  MAP TO AL136147.2; EXPRESSED IN BONE MARROW, SIGNAL = 0.57; EXPRESSED IN PLACENTA, SIGNAL = 0.86; EXPRESSED IN BRAIN, SIGNAL = 0.57; EXPRESSED IN ADULT LIVER, SIGNAL = 0.81; EXPRESSED IN LUNG, SIGNAL = 0.79; EXPRESSED IN FETAL LIVER, SIGNAL = 0.6; EST_HUMAN HIT: BI909191.1, EVALUE 2.40e+00; SWISSPROT HIT: O09167, EVALUE 3.50e+00; NT HIT: AJ239026.1, EVALUE 1.60e+00
cttcctgatgaattcactcacttccaatgacagcagaaggattactcacactgataaaggaaattggcggaagctacccagaagggccacacctccaaaaggtttttttaagtacatgaaacat

SEQ ID NO: 14827 - DNA, 221 bp, Homo sapiens
  MAP TO AL137068.1; EXPRESSED IN FETAL LIVER, SIGNAL = 0.71; EXPRESSED IN BONE MARROW, SIGNAL = 0.82; EXPRESSED IN PLACENTA, SIGNAL = 0.85; EXPRESSED IN ADULT LIVER, SIGNAL = 1.1; EXPRESSED IN BRAIN, SIGNAL = 0.68; EXPRESSED IN LUNG, SIGNAL = 0.99; SWISSPROT HIT: P13648, EVALUE 8.00e-03; NT HIT: gi6754595, EVALUE 3.00e-71; EST_HUMAN HIT: BE900541.1, EVALUE 1.00e-121
gccagatagcagcaaatgaagccctgaagaaggatttagaaggtgttatcagtgggttgcaagaatacctggggaccattaaaggccaggcaactcaggcccagaatgagtgcaggaagctgcgggatgagaaagagacattgttgcagagattgacagaagtcgagcaggagagagaccagctggaaatagttgccatggatgcagaaaatatgaggaag

SEQ ID NO: 14828 - DNA, 125 bp, Homo sapiens
  MAP TO AL139100.1; EXPRESSED IN FETAL LIVER, SIGNAL =   1; EXPRESSED IN LUNG, SIGNAL = 1.2; EXPRESSED IN PLACENTA, SIGNAL = 1.1; EXPRESSED IN BONE MARROW, SIGNAL = 0.91; EXPRESSED IN BRAIN, SIGNAL = 0.86; NT HIT: gi4507126, EVALUE 2.00e-64; EST_HUMAN HIT: BE819357.1, EVALUE 3.00e-64
ttatctgtctggtcgagtcattccgggccgagtgggcaccatcatgggacgggcaggaggtctcatcattgggggcccaggcatcattggcatatggcctcccatgggcggcctcattccaggag

SEQ ID NO: 14829 - DNA, 164 bp, Homo sapiens
  MAP TO AL136312.1; EXPRESSED IN LUNG, SIGNAL = 1.9; EXPRESSED IN HELA, SIGNAL = 1.3; EXPRESSED IN BRAIN, SIGNAL = 1.9; EXPRESSED IN PLACENTA, SIGNAL = 2.1; EXPRESSED IN ADULT LIVER, SIGNAL = 1.9; EXPRESSED IN FETAL LIVER, SIGNAL = 1.9; EXPRESSED IN BONE MARROW, SIGNAL = 1.7; SWISSPROT HIT: P51582, EVALUE 2.30e-01; NT HIT: M36824.1, EVALUE 2.20e+00; EST_HUMAN HIT: BG287032.1, EVALUE 3.30e+00
ctgcctgccctaatttgtatctttgcactctccaattgttgcacctttgcatcttccatatgtgttgtccacatgggtatcctactctggtccattttgtgtcccatcttgtagcagaactgttttagattgtacagaaggtctctcagctgcaattgcttcat

SEQ ID NO: 14830 - DNA, 103 bp, Homo sapiens
  MAP TO CHR22_43.0; EXPRESSED IN FETAL LIVER, SIGNAL =  11; EXPRESSED IN BONE MARROW, SIGNAL =  12; EXPRESSED IN BRAIN, SIGNAL =  11; EXPRESSED IN HEART, SIGNAL =  10; EXPRESSED IN HELA, SIGNAL = 6.1; EXPRESSED IN LUNG, SIGNAL =  12; EXPRESSED IN ADULT LIVER, SIGNAL =  12; SWISSPROT HIT: Q08598, EVALUE 4.70e+00; NT HIT: L39472.1, EVALUE 8.30e-02; EST_HUMAN HIT: H55224.1, EVALUE 4.00e-51
gttcttggggaagatcccgacttagccattttccagtggcacctcttccaccatgagttcctgaggcagtccgatggggctactttattccagaacaatcaca

SEQ ID NO: 14831 - DNA, 220 bp, Homo sapiens
  MAP TO AL137019.1; EXPRESSED IN PLACENTA, SIGNAL = 1.4; EXPRESSED IN BONE MARROW, SIGNAL = 0.77; EXPRESSED IN LUNG, SIGNAL = 1.2; EXPRESSED IN ADULT LIVER, SIGNAL = 1.6; EXPRESSED IN BRAIN, SIGNAL = 0.7; EXPRESSED IN FETAL LIVER, SIGNAL = 1.1; SWISSPROT HIT: O46655, EVALUE 9.10e-02; NT HIT: U52111.2, EVALUE 8.00e-04; EST_HUMAN HIT: BE467175.1, EVALUE 2.90e-01
cagagaaggatttggggtcaacttttgaaatagaagtgggtgtcatcatgataggcaggcatggcattcttccagcactgttcagaggtgtgaccagacggacggtacaccgcatcttagcacacgcttctccttcatccttgctgccctctctcctcctcttccttgatacctggctaacacacccatttgacttggaggacttagcttcactctggat

SEQ ID NO: 14832 - DNA, 106 bp, Homo sapiens
  MAP TO AC020698.2; EXPRESSED IN BRAIN, SIGNAL = 0.75; EXPRESSED IN PLACENTA, SIGNAL = 1.2; EXPRESSED IN HELA, SIGNAL = 0.7; EXPRESSED IN ADULT LIVER, SIGNAL = 1.4; EXPRESSED IN FETAL LIVER, SIGNAL =   1; EXPRESSED IN BONE MARROW, SIGNAL = 0.94; NT HIT: AP003134.2, EVALUE 3.40e-01
ttagttctgaatatttgtctcagcaataataatgcaatttttcatatccaaaggcatctgttggagcaagtcttgatcattagagtcagattcagccctgcaatac

SEQ ID NO: 14833 - DNA, 95 bp, Homo sapiens
  MAP TO AL138840.1; EXPRESSED IN HELA, SIGNAL =   1; EXPRESSED IN BRAIN, SIGNAL = 1.3; EXPRESSED IN FETAL LIVER, SIGNAL = 1.2; EXPRESSED IN HEART, SIGNAL = 1.3; EXPRESSED IN PLACENTA, SIGNAL = 1.5; EXPRESSED IN LUNG, SIGNAL = 1.3; EXPRESSED IN ADULT LIVER, SIGNAL = 1.2; EXPRESSED IN BONE MARROW, SIGNAL = 1.1; SWISSPROT HIT: P12906, EVALUE 2.10e+00; EST_HUMAN HIT: W80362.1, EVALUE 1.10e-01; NT HIT: L77570.1, EVALUE 4.60e+00
acatagaagacttctacaaatccttcttagatgcctcttatgctcatgtttttcaacagaaagtgaatgtttggctctctcatgctccctcctag

SEQ ID NO: 14834 - DNA, 212 bp, Homo sapiens
  MAP TO AF235094.1; EXPRESSED IN BONE MARROW, SIGNAL = 8.2; EXPRESSED IN BRAIN, SIGNAL = 7.1; EXPRESSED IN HEART, SIGNAL = 6.9; EXPRESSED IN LUNG, SIGNAL = 8.7; EXPRESSED IN PLACENTA, SIGNAL = 9.6; EXPRESSED IN HELA, SIGNAL = 4.5; EXPRESSED IN FETAL LIVER, SIGNAL = 7.5; NT HIT: gi16162442, EVALUE 1.00e-111; SWISSPROT HIT: O43653, EVALUE 3.00e-19; EST_HUMAN HIT: BG765417.1, EVALUE 1.00e-111
gcgcagttggcctcctgaccgtcatcagcaaaggctgcagcttgaactgcgtggatgactcacaggactactacgtgggcaagaagaacatcacgtgctgtgacaccgacttgtgcaacgccagcggggcccatgccctgcagccggctgctgccatccttgcgctgctccctgcactcggcctgctgctctggggacccggccagctctag

SEQ ID NO: 14835 - DNA, 119 bp, Homo sapiens
  MAP TO AL138726.2; EXPRESSED IN FETAL LIVER, SIGNAL = 0.8; EXPRESSED IN BONE MARROW, SIGNAL = 0.78; EXPRESSED IN BRAIN, SIGNAL = 0.68; EXPRESSED IN LUNG, SIGNAL = 0.78; EXPRESSED IN PLACENTA, SIGNAL = 0.86; NT HIT: gi14752145, EVALUE 8.00e-61; SWISSPROT HIT: Q14916, EVALUE 1.00e-18
ctgctggaccagggaggatgtgatgtattccttttcactgatgcttatacatgggtggtctttggggtcatcataaaacagaacgaaccagagaagacatacggcacagccacaagcac

SEQ ID NO: 14836 - DNA, 98 bp, Homo sapiens
  MAP TO AC016078.3; EXPRESSED IN LUNG, SIGNAL = 1.2; EXPRESSED IN HELA, SIGNAL = 0.85; EXPRESSED IN BRAIN, SIGNAL =   1; EXPRESSED IN PLACENTA, SIGNAL = 1.3; EXPRESSED IN FETAL LIVER, SIGNAL = 1.6; EXPRESSED IN BONE MARROW, SIGNAL = 1.3; SWISSPROT HIT: P11369, EVALUE 6.20e-02; NT HIT: M55993.1, EVALUE 7.80e-02
ctaggacttccagtatggcattccataggaatggtgacagatgacatcctggccttgctcctgatgctggcagaagtgaccagtttcccatcatttaa

SEQ ID NO: 14837 - DNA, 192 bp, Homo sapiens
  MAP TO CHR22_235.0; EXPRESSED IN HEART, SIGNAL = 5.4; EXPRESSED IN LUNG, SIGNAL = 6.6; EXPRESSED IN HELA, SIGNAL = 8.7; EXPRESSED IN BRAIN, SIGNAL = 6.8; EXPRESSED IN FETAL LIVER, SIGNAL = 6.2; EXPRESSED IN BONE MARROW, SIGNAL = 6.8; SWISSPROT HIT: P79987, EVALUE 8.50e-01; EST_HUMAN HIT: BG435165.1, EVALUE 2.50e-01
ggcatgagaaatgcacccgtggcccacagagaagacacaacaacatccacagtggccgctgggaggactctggaggccagcgtggggacggccgagccgtcgttctcctcgtctgcacctcctcttccagcctggatctctgaagcaagcctggtgtgggtctcctcgccctcccccggccccccgcagccc

SEQ ID NO: 14838 - DNA, 213 bp, Homo sapiens
  MAP TO AL121836.9; EXPRESSED IN FETAL LIVER, SIGNAL = 0.63; EXPRESSED IN ADULT LIVER, SIGNAL = 0.89; EXPRESSED IN BRAIN, SIGNAL = 0.58; SWISSPROT HIT: Q9Z7W0, EVALUE 3.70e+00; EST_HUMAN HIT: BG990113.1, EVALUE 7.10e-02
ctaggactggagttcgacatgcaactggagatgatgtgtctgtgtaaaacgagctggtctgttttctaccactgtcatctaaaatgttaagtggatcgtggatgtcactgtaggggggcagtgaacgaatgctgctgatgacagaaacgtgctgattcaccattgatccgagcctgtgagactctgggtagtttatgttgcttccatagtatc

SEQ ID NO: 14839 - DNA, 113 bp, Homo sapiens
  MAP TO CHR22_47.0; EXPRESSED IN FETAL LIVER, SIGNAL = 1.1; EXPRESSED IN BONE MARROW, SIGNAL =   1; EXPRESSED IN LUNG, SIGNAL = 1.1; EXPRESSED IN BRAIN, SIGNAL = 1.1; EXPRESSED IN ADULT LIVER, SIGNAL =   1; EXPRESSED IN HELA, SIGNAL = 1.7; NT HIT: gi13162342, EVALUE 9.30e-02; EST_HUMAN HIT: AW362361.1, EVALUE 2.10e+00
ctttcggagtgtgcacgatgcaaatgaagatccgagagctcgcggaaggccgtttggagctaattctgggctggtttgacagccacgacactgaaggggaagcatcgagctga

SEQ ID NO: 14840 - DNA, 50 bp, Homo sapiens
  MAP TO CHR21_12.0; EXPRESSED IN BRAIN, SIGNAL = 0.98; EXPRESSED IN HELA, SIGNAL = 2.9; EXPRESSED IN FETAL LIVER, SIGNAL = 0.95; EXPRESSED IN BONE MARROW, SIGNAL = 1.1; EXPRESSED IN LUNG, SIGNAL = 0.69; EXPRESSED IN PLACENTA, SIGNAL = 0.8; EXPRESSED IN ADULT LIVER, SIGNAL = 0.66; NT HIT: AL163252.2, EVALUE 2.00e-06; EST_HUMAN HIT: AI419882.1, EVALUE 1.00e-11
tttgaaggctggaaagtccaagatcaaggcaccaacagatttggtgtctg

SEQ ID NO: 14841 - DNA, 146 bp, Homo sapiens
  MAP TO AL121957.3; EXPRESSED IN LUNG, SIGNAL = 0.57; EXPRESSED IN FETAL LIVER, SIGNAL = 0.45; EXPRESSED IN BONE MARROW, SIGNAL = 0.44; EXPRESSED IN BRAIN, SIGNAL = 0.42; EST_HUMAN HIT: BG958104.1, EVALUE 7.30e-01; NT HIT: gi15295339, EVALUE 5.00e-01
gtgggagagtccactgcctggtgtcaggacgttgctccatatgcctataggttgggagagcaagattcaaaatctttgtcttccacagtggaaggcaaggttatatatcccaacaagaccacactcagtgaggaattcctccaaag

SEQ ID NO: 14842 - DNA, 145 bp, Homo sapiens
  MAP TO CHR22_168.0; EXPRESSED IN BONE MARROW, SIGNAL = 9.1; EXPRESSED IN HEART, SIGNAL = 6.2; EXPRESSED IN LUNG, SIGNAL =   8; EXPRESSED IN PLACENTA, SIGNAL = 7.6; EXPRESSED IN ADULT LIVER, SIGNAL = 7.6; EXPRESSED IN HELA, SIGNAL = 5.5; EXPRESSED IN BRAIN, SIGNAL = 7.1; EXPRESSED IN FETAL LIVER, SIGNAL =   8; EST_HUMAN HIT: BG574910.1, EVALUE 5.00e-76; NT HIT: gi7661861, EVALUE 3.00e-76; SWISSPROT HIT: P45896, EVALUE 1.50e+00
gccaggaccccagaggatggccatgccccgtgcctggcagaggtctggtgccagcactgggagctgctccgcccttgccttggggccgagggagccctcgtccacccctgcacagcagctgggcacagaggagcgctcttccatc

SEQ ID NO: 14843 - DNA, 215 bp, Homo sapiens
  MAP TO CHR22_185_1.0; EXPRESSED IN FETAL LIVER, SIGNAL = 0.55; EXPRESSED IN PLACENTA, SIGNAL = 0.65; EXPRESSED IN LUNG, SIGNAL = 0.52; EXPRESSED IN ADULT LIVER, SIGNAL = 0.49; EXPRESSED IN BONE MARROW, SIGNAL = 0.5; EXPRESSED IN BRAIN, SIGNAL = 0.44; SWISSPROT HIT: O84741, EVALUE 1.70e+00; NT HIT: AL163252.2, EVALUE 7.70e-01; EST_HUMAN HIT: BE972619.1, EVALUE 1.80e-02
ccgtgaccactccgagtgtgatccaggtacaaaaagcatcagcatcacctgggagctgctcaagaagacacaactgcaggcccatcccaagattatgaatcagagcccgcattttaacaagatcccaggaaatccatgttcctcttacagggtgagaaacactgctgtcaacgtctttgtcctcactgccagctgctcacctcagaccacggatg

SEQ ID NO: 14844 - DNA, 309 bp, Homo sapiens
  MAP TO CHR22_155.0; EXPRESSED IN BRAIN, SIGNAL = 1.2; EXPRESSED IN FETAL LIVER, SIGNAL = 1.1; EXPRESSED IN LUNG, SIGNAL = 1.1; EXPRESSED IN ADULT LIVER, SIGNAL = 1.2; EXPRESSED IN BONE MARROW, SIGNAL = 1.1; SWISSPROT HIT: P19440, EVALUE 2.00e-26; NT HIT: gi14777659, EVALUE 0.00e+00; EST_HUMAN HIT: AI806336.1, EVALUE 0.00e+00
ctggtcaatgtttctctccactgtcgtgacgttgggcagaagctggttgtgcagccggggctcctccacggcccgcttcacgtcatagccgaaccagaggttgtagatgatggcctggggcatgggagtgtgatcagcatggcttgggggctgtgcagggtgggcacggccagggagaaaaggggtgacacatatcagtgcagtggctgtggtgatctgtgtgcccccagcagctcccaccaccatccggacctggccgtcctggcccaccatgatcgtcgggcacattgacgagagcggctgcttccc

SEQ ID NO: 14845 - DNA, 20 bp, Homo sapiens
  MAP TO CHR22_52.0; EXPRESSED IN LUNG, SIGNAL = 1.2; EXPRESSED IN BONE MARROW, SIGNAL =   1; EXPRESSED IN HELA, SIGNAL = 1.4; EXPRESSED IN BRAIN, SIGNAL = 1.1; EXPRESSED IN FETAL LIVER, SIGNAL = 1.1; NT HIT: U07000.1, EVALUE 4.00e-03; EST_HUMAN HIT: BF886891.1, EVALUE 2.70e-01
caaggccctgctgatttgtt

SEQ ID NO: 14846 - DNA, 200 bp, Homo sapiens
  MAP TO CHR22_171.0; EXPRESSED IN BONE MARROW, SIGNAL = 0.91; EXPRESSED IN BRAIN, SIGNAL = 0.68; EXPRESSED IN HELA, SIGNAL = 0.9; EXPRESSED IN FETAL LIVER, SIGNAL = 0.99; EXPRESSED IN LUNG, SIGNAL = 0.96; EXPRESSED IN ADULT LIVER, SIGNAL = 0.98; NT HIT: gi7662251, EVALUE 1.00e-109; EST_HUMAN HIT: BI963761.1, EVALUE 1.00e-108; SWISSPROT HIT: P98089, EVALUE 1.90e+00
gaagtgactgctgccccagccgtggctgtgccccccgaggctactgtggccatcaccacagcactgagcaaggctggccccgccatacccaccccagcagtctcttctgcactggccgtggcggtccccctagggcccatcatggcagtcacagcagccccagccatggtggccaccctggggacagtgacaaaggacgg

SEQ ID NO: 14847 - DNA, 102 bp, Homo sapiens
  MAP TO AL137016.5; EXPRESSED IN HEART, SIGNAL = 1.8; EXPRESSED IN LUNG, SIGNAL = 2.1; EXPRESSED IN FETAL LIVER, SIGNAL = 1.9; EXPRESSED IN PLACENTA, SIGNAL = 2.3; EXPRESSED IN BONE MARROW, SIGNAL = 2.1; EXPRESSED IN BRAIN, SIGNAL = 2.1; EXPRESSED IN HELA, SIGNAL =   1; EST_HUMAN HIT: AW380020.1, EVALUE 8.00e-03; NT HIT: AF131221.1, EVALUE 2.10e-02
ttagagggttattacttccaagtcttcattggcggtagtagtggtggtggtgatggtaatgatgatgatgatgatgatgatgatgatgatagctaacacata

SEQ ID NO: 14848 - DNA, 231 bp, Homo sapiens
  MAP TO CHR22_161.0; EXPRESSED IN FETAL LIVER, SIGNAL = 0.98; EXPRESSED IN LUNG, SIGNAL =   1; EXPRESSED IN PLACENTA, SIGNAL = 1.3; EXPRESSED IN ADULT LIVER, SIGNAL = 1.1; EXPRESSED IN BONE MARROW, SIGNAL = 1.1; EXPRESSED IN BRAIN, SIGNAL = 0.92; EXPRESSED IN HELA, SIGNAL = 0.69; EST_HUMAN HIT: BE970302.1, EVALUE 1.20e+00; NT HIT: AJ131710.1, EVALUE 8.30e-01; SWISSPROT HIT: P29400, EVALUE 1.60e+00
ctttcctccatcacgaggactctgagtgtccctctcgagtgcatcttggcagctaggctgttctgtgcccctctccagaatactgtaattcaccgagcgattgttttctggagagagtgttctcctctggggcacctcctcccattgggttggggatgcgtctgacacgcgtgtaaccaggcggttgtgacccgatgccctttctgccagggctacttggaaatcacgcat

SEQ ID NO: 14849 - DNA, 126 bp, Homo sapiens
  MAP TO AC012482.3; EXPRESSED IN BONE MARROW, SIGNAL = 1.4; EXPRESSED IN BRAIN, SIGNAL = 1.1; EXPRESSED IN HEART, SIGNAL = 1.7; EXPRESSED IN LUNG, SIGNAL = 2.1; EXPRESSED IN FETAL LIVER, SIGNAL = 1.5; EXPRESSED IN PLACENTA, SIGNAL = 1.6; EXPRESSED IN ADULT LIVER, SIGNAL = 1.6; EST_HUMAN HIT: BG769296.1, EVALUE 9.60e+00; SWISSPROT HIT: P53573, EVALUE 7.80e+00
ctgcacgtggctctaaagcggcagatgcaggggcctcaggacaggaaccagtgcgagctgtccaggcccactggatacctaacctctgtcaggcagcaggcaaggaaggcttttgcagatgcagat

SEQ ID NO: 14850 - DNA, 193 bp, Homo sapiens
  MAP TO CHR22_13.0; EXPRESSED IN HELA, SIGNAL =  15; EXPRESSED IN BRAIN, SIGNAL =  19; EXPRESSED IN HEART, SIGNAL =  15; EXPRESSED IN LUNG, SIGNAL =  19; EXPRESSED IN ADULT LIVER, SIGNAL =  18; EXPRESSED IN FETAL LIVER, SIGNAL =  19; EXPRESSED IN PLACENTA, SIGNAL =  20; EXPRESSED IN BONE MARROW, SIGNAL =  20; NT HIT: gi4885270, EVALUE 1.00e-104; EST_HUMAN HIT: BI764878.1, EVALUE 5.00e-98; SWISSPROT HIT: P19440, EVALUE 4.00e-31
cacaagacaggctgctgctcgatgacggtccgcttgttttccagggctgccgccaagcccttgcccacggggaagccctggcgggccagctggatgctgggctggaagaggcgagcccagggcagccgcccatgccgctggtgtgccagctcatagcctcggatctccccaggcaccgccaccgacagccccc

SEQ ID NO: 14851 - DNA, 146 bp, Homo sapiens
  MAP TO AL136163.3; EXPRESSED IN FETAL LIVER, SIGNAL = 2.9; EXPRESSED IN BONE MARROW, SIGNAL = 3.1; EXPRESSED IN BRAIN, SIGNAL = 2.9; EXPRESSED IN HEART, SIGNAL = 2.5; EXPRESSED IN HELA, SIGNAL = 1.4; EXPRESSED IN PLACENTA, SIGNAL = 3.3; EXPRESSED IN LUNG, SIGNAL =   3; EXPRESSED IN ADULT LIVER, SIGNAL = 2.7
aagaagaaagaaaagaaagaagaagaaagtaaggaggaggaggaaggaggaggtgggagaaagaaggaagggggagaagcgggaagggggaggaggaagaagaggaggaagaggagcaggaagaggagcaggaagaaagggaggag

SEQ ID NO: 14852 - DNA, 111 bp, Homo sapiens
  MAP TO AF235095.1; EXPRESSED IN FETAL LIVER, SIGNAL = 1.6; EXPRESSED IN LUNG, SIGNAL = 1.5; EXPRESSED IN BONE MARROW, SIGNAL = 1.6; EXPRESSED IN BRAIN, SIGNAL = 1.4; NT HIT: AF298141.1, EVALUE 1.40e+00; EST_HUMAN HIT: AI564831.1, EVALUE 1.30e-01; SWISSPROT HIT: Q9QY06, EVALUE 4.60e+00
ctccggctgcgatgcttcatcactgtttgtgtaggtctcggcacagatgaaggcaagggtcgcaggtccaaggtcagctcgcatggcattgcgggcaggggagaggaggcc

SEQ ID NO: 14853 - DNA, 213 bp, Homo sapiens
  MAP TO CHR22_207.0; EXPRESSED IN FETAL LIVER, SIGNAL = 1.6; EXPRESSED IN BONE MARROW, SIGNAL = 1.8; EXPRESSED IN HELA, SIGNAL =   4; EXPRESSED IN BRAIN, SIGNAL = 1.7; EXPRESSED IN LUNG, SIGNAL =   1; EXPRESSED IN ADULT LIVER, SIGNAL = 0.85; EXPRESSED IN PLACENTA, SIGNAL = 0.86; SWISSPROT HIT: P13866, EVALUE 6.00e-20; NT HIT: L29328.1, EVALUE 1.00e-114; EST_HUMAN HIT: AU100445.1, EVALUE 1.00e-65
gagctagcggccctggcgagagggaaggacgcaacgctgccaccatggacagtagcacctggagccccaagaccaccgcggtcacccggcctgttgagacccacgagctcattcgcaatgcagccgatatctccatcatcgttatctacttcgtggtagtgatggccgtcggactgtgggtatgcagcgggttctgggatgcgggtggggagg

SEQ ID NO: 14854 - DNA, 116 bp, Homo sapiens
  MAP TO CHR21_17.0; EXPRESSED IN HELA, SIGNAL = 3.4; EXPRESSED IN FETAL LIVER, SIGNAL = 1.1; EXPRESSED IN LUNG, SIGNAL = 0.81; EXPRESSED IN PLACENTA, SIGNAL = 0.62; EXPRESSED IN ADULT LIVER, SIGNAL = 0.82; EXPRESSED IN BRAIN, SIGNAL = 1.2; NT HIT: AB025576.1, EVALUE 9.60e-02; EST_HUMAN HIT: BF766154.1, EVALUE 2.00e-03
tccattttctgggagtcactttccttttctaactgtaaatcctctccaaccacacggcaatgccagagtctgtctaaacctgttctggtttgggagggctgcctgattcgaatcat

SEQ ID NO: 14855 - DNA, 55 bp, Homo sapiens
  MAP TO CHR21_21.0; EXPRESSED IN PLACENTA, SIGNAL = 0.51; EXPRESSED IN LUNG, SIGNAL = 0.68; EXPRESSED IN FETAL LIVER, SIGNAL =   1; EXPRESSED IN ADULT LIVER, SIGNAL = 0.77; EXPRESSED IN BONE MARROW, SIGNAL = 1.2; EXPRESSED IN BRAIN, SIGNAL = 1.2; EXPRESSED IN HELA, SIGNAL = 3.8; EST_HUMAN HIT: AI241814.1, EVALUE 3.30e+00; NT HIT: U45479.1, EVALUE 8.90e+00
aaatctggccatacttccactgaatacaaggattacttcggagaagttatacttt

SEQ ID NO: 14856 - DNA, 199 bp, Homo sapiens
  MAP TO AL133418.2; EXPRESSED IN BONE MARROW, SIGNAL = 1.1; EXPRESSED IN PLACENTA, SIGNAL = 1.2; EXPRESSED IN LUNG, SIGNAL = 1.3; EXPRESSED IN ADULT LIVER, SIGNAL = 1.2; EXPRESSED IN HELA, SIGNAL =   1; EXPRESSED IN BRAIN, SIGNAL = 1.3; EXPRESSED IN FETAL LIVER, SIGNAL = 1.3; EXPRESSED IN HEART, SIGNAL = 1.3; EST_HUMAN HIT: AV709169.1, EVALUE 3.00e-78; NT HIT: gi14741779, EVALUE 2.00e-78; SWISSPROT HIT: gi6685501, EVALUE 1.10e+00
cttgaagtccattaaggatcgaagtaatttctatggacttaatatgagcagtatcagagtttttggcatcagtgagatccagtttggataccatttcaggagatggatttgtctgaaatggtggtttggacaagcgccgaagtttacagttttttggagagtatttttcatctttgtctttttctttgtctaatttatt

SEQ ID NO: 14857 - DNA, 141 bp, Homo sapiens
  MAP TO AL137855.1; EXPRESSED IN FETAL LIVER, SIGNAL = 8.4; EXPRESSED IN HEART, SIGNAL = 7.1; EXPRESSED IN PLACENTA, SIGNAL = 9.3; EXPRESSED IN BONE MARROW, SIGNAL = 8.5; EXPRESSED IN LUNG, SIGNAL =  11; EXPRESSED IN ADULT LIVER, SIGNAL = 9.6; EXPRESSED IN BRAIN, SIGNAL = 8.2; EST_HUMAN HIT: AW874361.1, EVALUE 8.00e-13; NT HIT: gi14575809, EVALUE 6.00e-13; SWISSPROT HIT: Q01233, EVALUE 2.60e+00
atgttgctcacagaaagcctgtttggtggtctctccacacggatgcgcgtgaaaggtaccttgaccgaggtcatccaggggccagccctgggtactttccaggtatcacccatggagaacgtgtttgagcagggcctacag

SEQ ID NO: 14858 - DNA, 258 bp, Homo sapiens
  MAP TO AC012186.3; EXPRESSED IN BONE MARROW, SIGNAL = 3.6; EXPRESSED IN BRAIN, SIGNAL =   3; EXPRESSED IN PLACENTA, SIGNAL = 3.4; EXPRESSED IN ADULT LIVER, SIGNAL =   4; EXPRESSED IN LUNG, SIGNAL = 4.4; EXPRESSED IN HEART, SIGNAL = 4.9; EXPRESSED IN HELA, SIGNAL = 2.3; EXPRESSED IN FETAL LIVER, SIGNAL = 3.1; EST_HUMAN HIT: BG751105.1, EVALUE 0.00e+00; NT HIT: gi14777330, EVALUE 0.00e+00; SWISSPROT HIT: P35294, EVALUE 7.00e-33
atgtgcgtggtgcagcgcttcaagaccggcgccttctcggagcgccagggaagcaccatcggcgtcgacttcaccatgaagacgctggagatccagggcaagcgggtcaagctgcagatctgggacacggccggccaggagcggttccgcaccatcacccagagctactaccgcagtgccaatggggccatccttgcctacgacatcaccaagaggagctccttcctgtcggtgcctcactggattgaggatgtgagg

SEQ ID NO: 14859 - DNA, 187 bp, Homo sapiens
  MAP TO CHR22_162.0; EXPRESSED IN BRAIN, SIGNAL = 1.1; EXPRESSED IN LUNG, SIGNAL = 2.9; EXPRESSED IN PLACENTA, SIGNAL = 2.1; EXPRESSED IN ADULT LIVER, SIGNAL = 4.7; EXPRESSED IN FETAL LIVER, SIGNAL = 4.3; EXPRESSED IN BONE MARROW, SIGNAL = 3.4; SWISSPROT HIT: P39023, EVALUE 2.00e-30; EST_HUMAN HIT: BG739801.1, EVALUE 1.00e-101; NT HIT: gi14778996, EVALUE 1.00e-101
ctttgtagcctttgcccttggtcaccccgatgacgtcgatcatctcatcctgcccaaacacttggttcacaggtacctgctgctcaagcctctcgcgggcccagtccagcttctcggccacagtgcctccgttcacctggatctccatcaggtgggccttcttctggcgcagaggaagcaggcgcat

SEQ ID NO: 14860 - DNA, 132 bp, Homo sapiens
  MAP TO AC024445.2; EXPRESSED IN HEART, SIGNAL = 1.3; EXPRESSED IN BONE MARROW, SIGNAL = 1.8; EXPRESSED IN LUNG, SIGNAL = 2.7; EXPRESSED IN PLACENTA, SIGNAL =   3; EXPRESSED IN ADULT LIVER, SIGNAL = 1.7; EXPRESSED IN BRAIN, SIGNAL = 1.4; EXPRESSED IN FETAL LIVER, SIGNAL = 1.6; SWISSPROT HIT: P14350, EVALUE 1.00e-04; EST_HUMAN HIT: BE064410.1, EVALUE 2.00e-53; NT HIT: AL163246.2, EVALUE 5.00e-47
atggtattccacacagcattgcctctgaccaaggcactcactttacggctaaagaagtgcggcagtgggctcatgctcatggaattcactggtcttaccatgttccccatcatcctgaagcagctggattga

SEQ ID NO: 14861 - DNA, 142 bp, Homo sapiens
  MAP TO CHR22_181.0; EXPRESSED IN BONE MARROW, SIGNAL = 0.4; EXPRESSED IN LUNG, SIGNAL = 0.51; EXPRESSED IN BRAIN, SIGNAL = 0.37; EXPRESSED IN PLACENTA, SIGNAL = 0.58; EST_HUMAN HIT: AI914702.1, EVALUE 2.80e+00
tgtccagtgtccacaaatagctgtaatggatcatttccaaccctgtaggctcagagaaaacatcccgtaaacgtagcatcacttccacaaccacatcaacagcagctccacacatctcagggacttcataaacgactccccc

SEQ ID NO: 14862 - DNA, 128 bp, Homo sapiens
  MAP TO AC011985.3; EXPRESSED IN LUNG, SIGNAL = 0.81; EXPRESSED IN HELA, SIGNAL = 0.95; EXPRESSED IN BRAIN, SIGNAL = 0.89; EXPRESSED IN PLACENTA, SIGNAL = 0.85; EXPRESSED IN FETAL LIVER, SIGNAL = 0.86; EXPRESSED IN BONE MARROW, SIGNAL = 0.8; EST_HUMAN HIT: AA865460.1, EVALUE 6.30e-01
ctgccttctttagcttcagcaggtttttcttgagcaggaggtcactgtgcggcggctgggtgcatgccggagtaggaaaccactccagtttggtgtccgtgctcgactccacccttcggaggaggagg

SEQ ID NO: 14863 - DNA, 155 bp, Homo sapiens
  MAP TO CHR22_215.0; EXPRESSED IN HEART, SIGNAL = 1.4; EXPRESSED IN LUNG, SIGNAL = 0.95; EXPRESSED IN BONE MARROW, SIGNAL = 1.7; EXPRESSED IN ADULT LIVER, SIGNAL = 0.8; EXPRESSED IN PLACENTA, SIGNAL = 1.1; EXPRESSED IN HELA, SIGNAL =   4; EXPRESSED IN BRAIN, SIGNAL = 1.8; EXPRESSED IN FETAL LIVER, SIGNAL = 1.6; NT HIT: gi9966767, EVALUE 3.40e-02; SWISSPROT HIT: P06589, EVALUE 1.00e-01; EST_HUMAN HIT: BF772469.1, EVALUE 1.00e-45
gaaacccctgacattgacaagcagtatgtcttagtgaccattttcatagtagaattagttgctgccaatttgtgtaatttcagggatactgagcagactcacaacttcccaaccaaggaggaaaacacttcctctaccatcttgtccaaattcag

SEQ ID NO: 14864 - DNA, 249 bp, Homo sapiens
  MAP TO CHR21_25.0; EXPRESSED IN FETAL LIVER, SIGNAL = 1.2; EXPRESSED IN BONE MARROW, SIGNAL = 1.2; EXPRESSED IN HELA, SIGNAL = 3.5; EXPRESSED IN BRAIN, SIGNAL = 1.3; EXPRESSED IN LUNG, SIGNAL = 0.76; EXPRESSED IN ADULT LIVER, SIGNAL = 0.75; EXPRESSED IN PLACENTA, SIGNAL = 0.74; NT HIT: AL163227.2, EVALUE 0.00e+00; SWISSPROT HIT: Q59025, EVALUE 6.40e-01; EST_HUMAN HIT: BE391030.1, EVALUE 1.00e-83
gtatgtctttatcagcagcatgaaaatgaactaatacagttaattggtaccaggagtggtgtgatgctgaaaagacacctgaaaatgtgcaagaggctttggaactgggtaacaggcaaaggttctaacagtttggagggctcagaagaagacaggaaaatgtgggaaagtttggaacctcctagagacttgttgaatgcctttgaccaaaatactgatggtgatatgaacaataaggtccaggctaag

SEQ ID NO: 14865 - DNA, 329 bp, Homo sapiens
  MAP TO CHR22_164.0; EXPRESSED IN BRAIN, SIGNAL = 0.41; EXPRESSED IN FETAL LIVER, SIGNAL = 0.66; EXPRESSED IN LUNG, SIGNAL = 1.2; EXPRESSED IN BONE MARROW, SIGNAL = 0.69; EXPRESSED IN ADULT LIVER, SIGNAL = 0.93; NT HIT: gi13642099, EVALUE 0.00e+00; SWISSPROT HIT: P91621, EVALUE 1.10e+00; EST_HUMAN HIT: AW404639.1, EVALUE 0.00e+00
acctgctcccgggcgactccgggcagcccgagacactcgtgctgcgggtaagacccagcttctgtttgtgcacaagtaacacgacgactgaaatctgcaactactgcaaagacgcgggcacttttacagtgttctgctacggagccaggacaaaggccggtcagaagccggaccagcagtcagctggtgacgacgagcctccctccagcaggcaccacgtcagagaggccccaggcccactgagcccgggaggagacccagccggccagccagacgtgtgcctgaatgccacagacttcaagcagtttacaaacgaaactcactgttaa

SEQ ID NO: 14866 - DNA, 323 bp, Homo sapiens
  MAP TO CHR22_182.0; EXPRESSED IN PLACENTA, SIGNAL = 0.63; EXPRESSED IN LUNG, SIGNAL = 0.56; EXPRESSED IN BONE MARROW, SIGNAL = 0.72; EXPRESSED IN BRAIN, SIGNAL = 0.43; EXPRESSED IN FETAL LIVER, SIGNAL = 0.68; SWISSPROT HIT: Q9UKI3, EVALUE 2.00e-59; EST_HUMAN HIT: AI760999.1, EVALUE 0.00e+00; NT HIT: gi14777728, EVALUE 0.00e+00
ctagggactaaagccgtagccaacagagcagtagtaatccgcgtcgtcttcaggctgcacgggactaatggtgaggacacaggcattgtgggcctcatccttggctgccgagaatcgatcggggatgtcagcaggccggtggtgatcctcctccgagcggtagtagaggagatatcgaggggcactgcctgcccgctgctggtaccaggacacaccgtagtccctgatggtgacgtgctgggggctgagcgtgcaggagagttgagccacttggcctgggaagaccagcagtgcatccagctgggccaggactgtctgggaaa

SEQ ID NO: 14867 - DNA, 135 bp, Homo sapiens
  MAP TO AF235096.1; EXPRESSED IN HELA, SIGNAL = 0.91; EXPRESSED IN FETAL LIVER, SIGNAL = 2.2; EXPRESSED IN LUNG, SIGNAL =   2; EXPRESSED IN ADULT LIVER, SIGNAL = 2.2; EXPRESSED IN BONE MARROW, SIGNAL = 1.9; EXPRESSED IN BRAIN, SIGNAL =   2; SWISSPROT HIT: Q9P784, EVALUE 3.50e+00; EST_HUMAN HIT: BG390704.1, EVALUE 4.00e-70; NT HIT: gi14748908, EVALUE 3.00e-70
catattggaccagctatcccagaagtcagctctgtctggtttaaactgtacatttatcatgtcactggacaaggaccaccatcccttttattgtccaaaggtacaagacttcgaaaactgccagatatatttcag

SEQ ID NO: 14868 - DNA, 283 bp, Homo sapiens
  MAP TO AL118512.8; EXPRESSED IN PLACENTA, SIGNAL = 3.7; EXPRESSED IN LUNG, SIGNAL = 3.6; EXPRESSED IN ADULT LIVER, SIGNAL = 3.1; EXPRESSED IN HELA, SIGNAL = 2.8; EXPRESSED IN HEART, SIGNAL =   3; EXPRESSED IN FETAL LIVER, SIGNAL = 3.4; EXPRESSED IN BONE MARROW, SIGNAL = 4.2; EXPRESSED IN BRAIN, SIGNAL = 3.4; SWISSPROT HIT: P11799, EVALUE 2.00e-09; NT HIT: AF156100.1, EVALUE 0.00e+00; EST_HUMAN HIT: BI517675.1, EVALUE 3.80e-01
catggacacttaagtcatattttttgtcagtcattcctgctacattcacagcaacacacacataacggcctgtgtcagatacatgaatgttcttcagctgaaggatgtgaccttcatccagtatttctactccctttgccttgatcaaggggtggccatctttcatccaggtcactgttggtggtggaataccctgcacctcacactccaaggagatactcttccctcgggtcacaataatttcagtagggtggctgccactgttggttatggttggtctaac

SEQ ID NO: 14869 - DNA, 162 bp, Homo sapiens
  MAP TO AL137799.2; EXPRESSED IN BONE MARROW, SIGNAL = 6.1; EXPRESSED IN HEART, SIGNAL = 3.2; EXPRESSED IN PLACENTA, SIGNAL =   4; EXPRESSED IN LUNG, SIGNAL = 5.5; EXPRESSED IN BRAIN, SIGNAL = 3.6; SWISSPROT HIT: P18490, EVALUE 5.10e-01; NT HIT: gi14779101, EVALUE 5.60e-01; EST_HUMAN HIT: BG612254.1, EVALUE 2.10e-01
gatcctatcacactggaattttatcaaatttcccagacggacagcaaccctgagaccaccagtccaacctcaacatccatcccaacatcagtccccatccaaaccaaggtcagaggatgcacctacatcaacatcatcattcagtcaacagacactccttga

SEQ ID NO: 14870 - DNA, 207 bp, Homo sapiens
  MAP TO CHR22_167.0; EXPRESSED IN FETAL LIVER, SIGNAL = 1.4; EXPRESSED IN PLACENTA, SIGNAL = 1.4; EXPRESSED IN LUNG, SIGNAL = 1.4; EXPRESSED IN ADULT LIVER, SIGNAL = 1.5; EXPRESSED IN BONE MARROW, SIGNAL = 1.3; EXPRESSED IN BRAIN, SIGNAL = 1.1; EXPRESSED IN HELA, SIGNAL = 0.82; SWISSPROT HIT: Q10201, EVALUE 6.40e-01; NT HIT: AB052913.1, EVALUE 1.90e-01; EST_HUMAN HIT: AA582625.1, EVALUE 1.00e-108
atggctttcccgatgctcaccggtgcagaggagccagctggggagcctctgtgtatcctttttattaacttatttctgaagttctccaagacgcccagagttgaattcctccagagctctgtgcagacagtccaagcagcggatggcagagaggtccttgctagcaagaaacttacaggccaggctgtctcctgctccagcatgccg

SEQ ID NO: 14871 - DNA, 154 bp, Homo sapiens
  MAP TO CHR22_183_2.0; EXPRESSED IN BONE MARROW, SIGNAL = 0.83; EXPRESSED IN HELA, SIGNAL = 0.55; EXPRESSED IN BRAIN, SIGNAL = 0.9; EXPRESSED IN PLACENTA, SIGNAL =   1; EXPRESSED IN LUNG, SIGNAL = 0.85; EXPRESSED IN FETAL LIVER, SIGNAL = 0.71; SWISSPROT HIT: O02607, EVALUE 4.40e+00; EST_HUMAN HIT: AW814907.1, EVALUE 2.00e-01
tgtcagtctgtaggaccctgactcagggatggagtgggccagcctgaggccttgatggccctccttagagcccaggtccactgacatgaagcagagagacctggtgactgggcagccctgtgctctctgcctgcccctggccatggaggtggcc

SEQ ID NO: 14872 - DNA, 207 bp, Homo sapiens
  MAP TO AL139021.1; EXPRESSED IN BONE MARROW, SIGNAL = 0.64; EXPRESSED IN BRAIN, SIGNAL = 0.47; EXPRESSED IN PLACENTA, SIGNAL = 0.6; EXPRESSED IN LUNG, SIGNAL = 0.83; EST_HUMAN HIT: BG120453.1, EVALUE 1.00e-113; SWISSPROT HIT: P29374, EVALUE 6.00e-36; NT HIT: gi14753118, EVALUE 1.00e-113
gacaaagcagtgatagtgaagatcttcctgtcctagacaattcaagtaaatgtaccccagtaaagcatcttaatgtatctaagccacagaaacttgcacgatctcctgcaagaatatccccgcacatcaaagatggagagaaagataaacacagagaaaaacatccgaattcatcccctaggacatataaatggagctttcagctca

SEQ ID NO: 14873 - DNA, 163 bp, Homo sapiens
  MAP TO AC012661.4; EXPRESSED IN BRAIN, SIGNAL = 0.62; EXPRESSED IN LUNG, SIGNAL = 0.63; EXPRESSED IN ADULT LIVER, SIGNAL = 0.52; EXPRESSED IN FETAL LIVER, SIGNAL = 0.59; SWISSPROT HIT: Q06730, EVALUE 9.00e-11; NT HIT: gi7305646, EVALUE 3.00e-18; EST_HUMAN HIT: BG764597.1, EVALUE 2.00e-63
ccaatgataccaggctgctgtaggtctccagcatcacgtccctgtacagggtcctctgagcatcatccaggtcctgccactcctcccaggtgaagtgcacagctacctcctcaaaggacaccaactcctgtaatgataccaggctgttgtaggtctccagcat

SEQ ID NO: 14874 - DNA, 190 bp, Homo sapiens
  MAP TO CHR22_225.0; EXPRESSED IN LUNG, SIGNAL = 0.97; EXPRESSED IN HELA, SIGNAL = 3.4; EXPRESSED IN ADULT LIVER, SIGNAL = 0.96; EXPRESSED IN BRAIN, SIGNAL = 1.6; EXPRESSED IN PLACENTA, SIGNAL = 0.98; EXPRESSED IN FETAL LIVER, SIGNAL = 1.6; EXPRESSED IN BONE MARROW, SIGNAL = 1.8; EXPRESSED IN HEART, SIGNAL = 1.3; SWISSPROT HIT: P37443, EVALUE 1.30e-01; NT HIT: AF153980.1, EVALUE 7.00e-04; EST_HUMAN HIT: AA831470.1, EVALUE 2.00e-08
caggtctacaaaggaggtggcttctgccatgatggccattttacagatggggaaactgaggcacagaagaaggggccacttggccaagttcacataggggcatacagcagggtcagggatggtctgaattccagagtctgggctcttgaccactaccctgctgccggatggctgtgggagcttgggccac

SEQ ID NO: 14875 - DNA, 117 bp, Homo sapiens
  MAP TO AC011580.4; EXPRESSED IN LUNG, SIGNAL = 0.75; EXPRESSED IN FETAL LIVER, SIGNAL = 0.56; EXPRESSED IN PLACENTA, SIGNAL = 0.57; EXPRESSED IN BONE MARROW, SIGNAL = 0.46; EXPRESSED IN BRAIN, SIGNAL = 0.54; EST_HUMAN HIT: AW953081.1, EVALUE 2.00e-59; NT HIT: gi11436372, EVALUE 1.00e-59
gattgaaagccacaaccactgatgtcaggaagaatgactccatcatttcaaacgtaacagtaacaagtgttacacttccaaatgctgtttcaacattacaaagttccaaacccaaga

SEQ ID NO: 14876 - DNA, 103 bp, Homo sapiens
  MAP TO AL138735.2; EXPRESSED IN PLACENTA, SIGNAL = 0.81; EXPRESSED IN LUNG, SIGNAL = 0.74; EXPRESSED IN HELA, SIGNAL = 0.68; EXPRESSED IN BRAIN, SIGNAL = 0.79; EXPRESSED IN FETAL LIVER, SIGNAL = 0.68; EXPRESSED IN BONE MARROW, SIGNAL = 0.77; NT HIT: gi4503576, EVALUE 8.30e-02
tggctacaccattttccatccctactgggaatgcatagggtgccagtgtctccacttccaggtcaacacttgtgattttgtgtttttggttgtggccaacctg

SEQ ID NO: 14877 - DNA, 236 bp, Homo sapiens
  MAP TO CHR22_184_2.0; EXPRESSED IN PLACENTA, SIGNAL =   1; EXPRESSED IN LUNG, SIGNAL = 0.82; EXPRESSED IN BRAIN, SIGNAL = 0.77; EXPRESSED IN ADULT LIVER, SIGNAL = 0.89; EXPRESSED IN FETAL LIVER, SIGNAL = 0.75; EXPRESSED IN BONE MARROW, SIGNAL = 0.89; SWISSPROT HIT: P25146, EVALUE 3.70e+00; NT HIT: gi9629267, EVALUE 8.50e-01
gttgaggctatctgtgatattttgtcatatgacatgtactggtgggataaggtggatcttaggaaacctctgactcttagaaaggtaagactcactggagatcatatcatccgtctccttcacaccacaaatggagaagcagaaggcaagaaatgggcaataatgtacccaaagctacccagtgacttctgccacttaccagcagattacaccaaaaaccaggtcttttatggaag

SEQ ID NO: 14878 - DNA, 105 bp, Homo sapiens
  MAP TO AL138691.2; EXPRESSED IN BONE MARROW, SIGNAL = 0.65; EXPRESSED IN LUNG, SIGNAL = 0.56; EXPRESSED IN BRAIN, SIGNAL = 0.56; NT HIT: S52655.1, EVALUE 1.30e+00; EST_HUMAN HIT: AW020231.1, EVALUE 5.00e-01
aaccgtgtccatcagcttgtcgcctattttggtcacagatgctccccatgccaggatttctacgaactttctaaagaagatgcttagtctaatagttttgaccat

SEQ ID NO: 14879 - DNA, 123 bp, Homo sapiens
  MAP TO AL133338.2; EXPRESSED IN BONE MARROW, SIGNAL = 2.5; EXPRESSED IN ADULT LIVER, SIGNAL = 5.6; EXPRESSED IN PLACENTA, SIGNAL = 3.2; EXPRESSED IN LUNG, SIGNAL = 5.8; EXPRESSED IN BRAIN, SIGNAL = 2.5; EXPRESSED IN FETAL LIVER, SIGNAL = 2.9; EXPRESSED IN HEART, SIGNAL = 2.9; NT HIT: gi15300842, EVALUE 7.00e-49; EST_HUMAN HIT: AI554879.1, EVALUE 7.00e-47; SWISSPROT HIT: Q9PJT0, EVALUE 6.00e+00
ctaatatgccctatccatctccagggccatatcctgttcctcctcctccccaagcctctggggcagcaccacctgttccatggggcaccgttccactaggagcctggggaccaccagcaccat

SEQ ID NO: 14880 - DNA, 245 bp, Homo sapiens
  MAP TO AL137222.3; EXPRESSED IN HELA, SIGNAL = 2.6; EXPRESSED IN BRAIN, SIGNAL =   3; EXPRESSED IN BONE MARROW, SIGNAL = 3.3; EXPRESSED IN PLACENTA, SIGNAL = 3.6; EXPRESSED IN LUNG, SIGNAL = 3.4; EXPRESSED IN ADULT LIVER, SIGNAL =   4; NT HIT: AF001433.1, EVALUE 1.00e-83; EST_HUMAN HIT: AU130112.1, EVALUE 6.00e-86; SWISSPROT HIT: Q92785, EVALUE 6.00e-22
acacagaccccaccctgaagaaggaggggctgatctctcaggacagcagcagtttagaggttctgttgcacactgaccccctggggaagcgaggtaccccagatccccgagttgatgatgacagcctgggcaagtttcctgtgacaaacagtcaagcacgaaagcggatcctagaaccagatgacttcctggatgacctcgatgatgagtactgtgaagatgctcccaagcatcggggaaagggg

SEQ ID NO: 14881 - DNA, 240 bp, Homo sapiens
  MAP TO AL136361.2; EXPRESSED IN HEART, SIGNAL = 2.9; EXPRESSED IN PLACENTA, SIGNAL = 3.2; EXPRESSED IN LUNG, SIGNAL = 3.1; EXPRESSED IN BONE MARROW, SIGNAL = 3.4; EXPRESSED IN ADULT LIVER, SIGNAL = 3.3; EXPRESSED IN BRAIN, SIGNAL = 3.1; EXPRESSED IN HELA, SIGNAL = 2.2; SWISSPROT HIT: P18736, EVALUE 2.30e+00; NT HIT: U70210.1, EVALUE 2.20e-01; EST_HUMAN HIT: AW972758.1, EVALUE 1.30e+00
ttcatgggcttccgcagaaggaatttgcccactctgcttcctaaaatgtgcagctgcattttgctgctgggaaaatattgattgaaggtctggaggagtctgacaacttgtaaggcacatacagtttttatctgcaggatgaagttagtttttgtttgggcctggtgttttcgaaagaaggaaatcactttcataagcatcagattagatccaggaagcgtccgcaggacaatgagaagc

SEQ ID NO: 14882 - DNA, 135 bp, Homo sapiens
  MAP TO AC018691.5; EXPRESSED IN BRAIN, SIGNAL = 1.8; EXPRESSED IN LUNG, SIGNAL = 1.8; EXPRESSED IN BONE MARROW, SIGNAL =   1; EXPRESSED IN ADULT LIVER, SIGNAL =   4; SWISSPROT HIT: Q25117, EVALUE 4.00e-14; NT HIT: gi14759671, EVALUE 3.00e-39; EST_HUMAN HIT: AA316745.1, EVALUE 1.00e-39
taaggtcagatgaatgaaccacatgctactcatgcccaggtagctctgactggactgactgtggctgaatacttcagagaccaagaagttcaagatgtactcctgtttattgataatatctttcacttcacccat

SEQ ID NO: 14883 - DNA, 110 bp, Homo sapiens
  MAP TO AL133543.2; EXPRESSED IN BRAIN, SIGNAL = 0.83; EXPRESSED IN HELA, SIGNAL = 0.55; EXPRESSED IN FETAL LIVER, SIGNAL = 0.81; EXPRESSED IN BONE MARROW, SIGNAL = 0.69; EXPRESSED IN PLACENTA, SIGNAL = 0.8; EXPRESSED IN LUNG, SIGNAL = 0.75; EXPRESSED IN ADULT LIVER, SIGNAL = 0.69; NT HIT: AL161577.2, EVALUE 5.60e+00; EST_HUMAN HIT: R69536.1, EVALUE 1.30e-01
aagagaggctggaagatcaacaattttctagccaagccagcttcagacatttgtcagctgaggtcattctttatattcccatatttgatataagacttcaacatggcaaa

SEQ ID NO: 14884 - DNA, 198 bp, Homo sapiens
  MAP TO AL138967.2; EXPRESSED IN BONE MARROW, SIGNAL = 2.3; EXPRESSED IN HELA, SIGNAL = 1.1; EXPRESSED IN BRAIN, SIGNAL = 2.5; EXPRESSED IN FETAL LIVER, SIGNAL = 2.9; EXPRESSED IN PLACENTA, SIGNAL = 3.2; EXPRESSED IN LUNG, SIGNAL = 2.8; EXPRESSED IN ADULT LIVER, SIGNAL = 2.7; EST_HUMAN HIT: AV654352.1, EVALUE 3.00e-04; SWISSPROT HIT: P40034, EVALUE 7.30e+00
atgtttgataactgctactctagtccagtggttctcaaagagtggccccagaccaccaccaccaccgccatcgccatcatcatcatcatgcctgggaacttgttagaaacatcagtcctcaggccccactctaaatctactgaattagaaactctggggatgaggcccagcaggttctgttttaacaagctttccagg

SEQ ID NO: 14885 - DNA, 122 bp, Homo sapiens
  MAP TO CHR22_209.0; EXPRESSED IN FETAL LIVER, SIGNAL = 2.1; EXPRESSED IN PLACENTA, SIGNAL = 1.3; EXPRESSED IN ADULT LIVER, SIGNAL = 1.3; EXPRESSED IN HELA, SIGNAL = 4.6; EXPRESSED IN LUNG, SIGNAL = 1.2; EXPRESSED IN HEART, SIGNAL = 1.7; EXPRESSED IN BONE MARROW, SIGNAL = 2.1; EXPRESSED IN BRAIN, SIGNAL =   2; NT HIT: U84790.1, EVALUE 1.60e+00; EST_HUMAN HIT: AW860637.1, EVALUE 5.90e-01; SWISSPROT HIT: Q12767, EVALUE 1.60e+00
tcgctcgcccacttcatctgccctggggtctctgcagcttctcactcctcccgggatatctctggccaagtccttgaggccgatcagtgggaatttccccctgtatgctgtcattttcctct

SEQ ID NO: 14886 - DNA, 169 bp, Homo sapiens
  MAP TO CHR22_213.0; EXPRESSED IN FETAL LIVER, SIGNAL = 1.5; EXPRESSED IN BONE MARROW, SIGNAL = 1.6; EXPRESSED IN BRAIN, SIGNAL = 1.5; EXPRESSED IN HELA, SIGNAL = 2.9; EXPRESSED IN PLACENTA, SIGNAL = 0.79; EXPRESSED IN ADULT LIVER, SIGNAL = 0.83; EST_HUMAN HIT: BF940519.1, EVALUE 8.60e-01; SWISSPROT HIT: P15619, EVALUE 1.10e+00
gataagacagatgaaagggccacggaggaggcgcaggttgcagctgtaaatagggtggttggactagatcccattgagaaggtggcgtctgagcaaaggcctggaggacatggaatgagccagccaggcagagaggatgaactagccagtgtaaatgctctcagaaagg

SEQ ID NO: 14887 - DNA, 201 bp, Homo sapiens
  MAP TO AC018678.5; EXPRESSED IN FETAL LIVER, SIGNAL = 0.48; EXPRESSED IN LUNG, SIGNAL = 0.49; EXPRESSED IN BRAIN, SIGNAL = 0.5; EXPRESSED IN ADULT LIVER, SIGNAL = 0.41; SWISSPROT HIT: P23701, EVALUE 1.40e+00; NT HIT: gi14751907, EVALUE 2.80e+00; EST_HUMAN HIT: BE068784.1, EVALUE 4.10e+00
tttttttcttcctgggagcaagatgctgatcagtccccagaactctgtgtccatccttgcctcttttccaaatgtcatggcacctatttccaataaacatcatctggtcatttacaggcatatccccaaccccaaatacagaaatattcctccaggaacgactcaagaaaccgtcaggaactttatagatcagctcctccc

SEQ ID NO: 14888 - DNA, 120 bp, Homo sapiens
  MAP TO CHR21_4.0; EXPRESSED IN PLACENTA, SIGNAL = 1.2; EXPRESSED IN ADULT LIVER, SIGNAL = 1.5; EXPRESSED IN BRAIN, SIGNAL = 1.8; EXPRESSED IN LUNG, SIGNAL = 1.3; EXPRESSED IN HEART, SIGNAL = 1.3; EXPRESSED IN HELA, SIGNAL = 4.2; EXPRESSED IN FETAL LIVER, SIGNAL = 1.9; EXPRESSED IN BONE MARROW, SIGNAL = 2.1; EST_HUMAN HIT: AI183661.1, EVALUE 6.00e-35; NT HIT: AL163204.2, EVALUE 2.00e-61
taaggttgattgccatacaactccttttctgaagttttacttatttccaacaaggcaagttttcctgcttccatgatgatggagagcaggcacctcctttcttgagtttcagcttgcttc

SEQ ID NO: 14889 - DNA, 171 bp, Homo sapiens
  MAP TO CHR22_136.0; EXPRESSED IN BONE MARROW, SIGNAL = 0.8; EXPRESSED IN BRAIN, SIGNAL = 0.72; EXPRESSED IN HELA, SIGNAL = 1.6; EXPRESSED IN LUNG, SIGNAL = 0.72; EXPRESSED IN ADULT LIVER, SIGNAL = 0.73
gtactgcagagaatgtagcaaggctgaaggcactgcgatgactttagtgccctgggcctgtggatgggagcttctgcatatgtttcaacaggctgcagccacagccctgagagatgaacacttggctcagggtcaagacataaatggagacaatcaagagggaagaggatg

SEQ ID NO: 14890 - DNA, 170 bp, Homo sapiens
  MAP TO CHR22_72.0; EXPRESSED IN BONE MARROW, SIGNAL =   1; EXPRESSED IN HELA, SIGNAL = 2.4; EXPRESSED IN BRAIN, SIGNAL = 0.85; EXPRESSED IN PLACENTA, SIGNAL = 0.97; EXPRESSED IN LUNG, SIGNAL = 0.95; EXPRESSED IN ADULT LIVER, SIGNAL =   1; EST_HUMAN HIT: H55106.1, EVALUE 7.00e-91; SWISSPROT HIT: Q13615, EVALUE 3.00e-28; NT HIT: U58034.1, EVALUE 5.00e-91
tgaaactggtgcagcatacctattcctgcctgtttggaacattcctgtgcaacaacgccaaggagagaggggaaaagcatactcaggaacggacatgttccgtgtggtcacttcttcgggcaggcaacaaggctttcaaaaacctactgtattcctctcagtcagaagcc

SEQ ID NO: 14891 - DNA, 327 bp, Homo sapiens
  MAP TO AC012661.4; EXPRESSED IN BRAIN, SIGNAL = 0.34; EST_HUMAN HIT: BI064298.1, EVALUE 5.00e-50; SWISSPROT HIT: P18175, EVALUE 1.00e-04; NT HIT: AL163202.2, EVALUE 1.00e-62
atggaatcctatgtgagggataaacattcagaccacaacaggcgtgttctggtgtcctatgtgagggacaaatactcagaacccagcagcagtgttctggaatcctatgtgagggacatacattcagaccccagcagcagtgttctggaatcctatgtgagggacaaacattcagaccccagcagcagtgttcttgagtactacatggggtacaaacattcagaccacagcaggagagttctggaatcctatgtgagggacaagcattcagatgctcctagcagtgctctggaatcctatgtgagggacaaacattcagaccccagc

SEQ ID NO: 14892 - DNA, 311 bp, Homo sapiens
  MAP TO CHR21_4.0; EXPRESSED IN BONE MARROW, SIGNAL = 1.2; EXPRESSED IN BRAIN, SIGNAL = 1.1; EXPRESSED IN HELA, SIGNAL = 3.4; EXPRESSED IN FETAL LIVER, SIGNAL = 1.2; EXPRESSED IN LUNG, SIGNAL = 1.1; NT HIT: AL163203.2, EVALUE 0.00e+00; SWISSPROT HIT: O95013, EVALUE 7.00e-27; EST_HUMAN HIT: BI063591.1, EVALUE 4.20e-01
cttattaggaccacaaaatggcagattaacagtgaatgccaactggctggtggtatggatgaagcccacaaaccaggaaatgaggaagagcacaacacatacacagcagctcatgattgtcatgtagtggggaggtttgcatatagcaacataacggtcataggccatggaaactaggagcaccatttcactgccagtgaagagatgaacaaagaaaatctgggccaggcgggcatcaaaagaaatagtcttgtgctcaaccagaaagtctgcaatcattttaggggtagcagaagaggcaacacatacgt

SEQ ID NO: 14893 - DNA, 334 bp, Homo sapiens
  MAP TO CHR22_215.0; EXPRESSED IN BONE MARROW, SIGNAL = 1.6; EXPRESSED IN LUNG, SIGNAL = 0.79; EXPRESSED IN HELA, SIGNAL = 3.2; EXPRESSED IN PLACENTA, SIGNAL = 0.73; EXPRESSED IN ADULT LIVER, SIGNAL = 0.8; EXPRESSED IN BRAIN, SIGNAL = 1.4; NT HIT: M81105.1, EVALUE 0.00e+00; SWISSPROT HIT: P35579, EVALUE 4.00e-60; EST_HUMAN HIT: BG720685.1, EVALUE 0.00e+00
gtagatgagccctgagtagtaacgctccttgaggttgtgcagcaccgaggcttcgttgaggcacgtgagctctgccatgtcctccaccttggagaacttgggcgggttcatcttctggatgtcatccttgttcaccttcaccttcttcccattctccaccagctccacgatggcctcttcgcccacctcctccttgaggctggctggctcaaagccactcttgtcggaaggcacccataccagcttcttggcagcccagtcggcctgggccagcggattgttgatgaagtttttatccacatagagatacttatcggcagcttgctgtgccatg

SEQ ID NO: 14894 - DNA, 272 bp, Homo sapiens
  MAP TO AC015822.3; EXPRESSED IN BRAIN, SIGNAL = 0.47; EXPRESSED IN FETAL LIVER, SIGNAL = 0.46; EXPRESSED IN PLACENTA, SIGNAL = 0.55; EXPRESSED IN ADULT LIVER, SIGNAL = 0.54; NT HIT: gi6755441, EVALUE 2.50e-01
gatacgcattgcacccagagacatggctcccaagttcctgtcacaggaaatgtcatacaatatattgatcataaacatcctgaaaattggatctggtctctttaatatcatatttgctgttgcaatggaaatgtttcctaataaaagtatccagacctgccaaaccagtgtagtgatctccagtgtaatgtactgctttccaagtactctacaattttatgatactaatgccatgtcaccaaacttggccaccaagcttgctgcagaaagtt

SEQ ID NO: 14895 - DNA, 165 bp, Homo sapiens
  MAP TO CHR22_218.0; EXPRESSED IN BONE MARROW, SIGNAL = 1.5; EXPRESSED IN LUNG, SIGNAL = 0.9; EXPRESSED IN PLACENTA, SIGNAL = 0.69; EXPRESSED IN ADULT LIVER, SIGNAL = 0.72; EXPRESSED IN HELA, SIGNAL = 3.5; EXPRESSED IN BRAIN, SIGNAL = 1.6; EXPRESSED IN FETAL LIVER, SIGNAL = 1.4; NT HIT: gi14778916, EVALUE 4.00e-88; SWISSPROT HIT: Q92841, EVALUE 8.00e-27; EST_HUMAN HIT: AV650587.1, EVALUE 6.00e-88
tgtggtctttttcactttccatgcagacatccactatctggaggatgttgtggttggcactcaactccagattgcctacgttgatctgggtgtaatcacgaaggaaatcctctgcaagctgtcttacttcttttggccaggttgcactccacatcagtgtctgcc

SEQ ID NO: 14896 - DNA, 317 bp, Homo sapiens
  MAP TO CHR22_236.0; EXPRESSED IN BRAIN, SIGNAL = 2.1; EXPRESSED IN HELA, SIGNAL = 4.2; EXPRESSED IN FETAL LIVER, SIGNAL =   2; EXPRESSED IN HEART, SIGNAL = 1.7; EXPRESSED IN LUNG, SIGNAL = 1.1; EXPRESSED IN ADULT LIVER, SIGNAL = 1.2; EXPRESSED IN BONE MARROW, SIGNAL = 2.3; EXPRESSED IN PLACENTA, SIGNAL = 1.1; NT HIT: U82695.2, EVALUE 1.90e-02; SWISSPROT HIT: P10354, EVALUE 5.80e-01; EST_HUMAN HIT: AV701609.1, EVALUE 2.80e-02
tgtatgtgctgctgaagcaagcacctggtattcttataagaagagaaattgggacacagacacacagagcaaagacagctatgtgacaatggagacagagcagagtaatgtggccacaagccaaggaatgcaaagtattgacggccaccagaagccgaaagaggcaggaaagacccctctttatgggtttcagagggaacacagtcctgctgatgcctggacttcgggcttccgacctccagagctgtgggagagtgagttgctgccattctcagccccccaggctgtggcgctttgtcatagcagccataggacat

SEQ ID NO: 14897 - DNA, 168 bp, Homo sapiens
  MAP TO CHR22_50.0; EXPRESSED IN HELA, SIGNAL = 2.4; EXPRESSED IN HEART, SIGNAL = 2.5; EXPRESSED IN LUNG, SIGNAL = 2.8; EXPRESSED IN FETAL LIVER, SIGNAL = 2.6; EXPRESSED IN PLACENTA, SIGNAL =   3; EXPRESSED IN ADULT LIVER, SIGNAL = 3.1; EXPRESSED IN BONE MARROW, SIGNAL = 2.9; EXPRESSED IN BRAIN, SIGNAL = 2.6; SWISSPROT HIT: P00464, EVALUE 9.80e+00
agctccactgttgccgagctactgtgcttctcatcgcatgctttcatcatagacagcagcagcatcgaagccaagaagataattattttatggtttgggattttaatatatttttggcagcaaagcaacttgactctcttaattgtgctttgcttcatcttgaattaa

SEQ ID NO: 14898 - DNA, 89 bp, Homo sapiens
  MAP TO AL136444.1; EXPRESSED IN FETAL LIVER, SIGNAL = 2.8; EXPRESSED IN BONE MARROW, SIGNAL = 3.1; EXPRESSED IN BRAIN, SIGNAL =   4; EXPRESSED IN PLACENTA, SIGNAL = 3.8; EXPRESSED IN LUNG, SIGNAL =   4; EXPRESSED IN ADULT LIVER, SIGNAL = 3.9; EXPRESSED IN HELA, SIGNAL = 2.1; NT HIT: AF250547.1, EVALUE 2.80e-01; EST_HUMAN HIT: BF244934.1, EVALUE 4.00e-01
gctgcacaagcagaagcagtgaacagtctaccagggaatattaacttcaaggatcatctcaaagccaataatcatcacactgttgaaga

SEQ ID NO: 14899 - DNA, 188 bp, Homo sapiens
  MAP TO CHR22_76.0; EXPRESSED IN BONE MARROW, SIGNAL = 1.2; EXPRESSED IN PLACENTA, SIGNAL =   1; EXPRESSED IN LUNG, SIGNAL = 1.1; EXPRESSED IN BRAIN, SIGNAL =   1; EXPRESSED IN ADULT LIVER, SIGNAL =   1; EXPRESSED IN HELA, SIGNAL = 4.9; EXPRESSED IN FETAL LIVER, SIGNAL = 1.2; NT HIT: AF312032.1, EVALUE 2.60e+00; SWISSPROT HIT: P12752, EVALUE 8.50e-01; EST_HUMAN HIT: BF958013.1, EVALUE 6.20e-02
tccggcagcctctccaccaggtgacggccgatgccagagaccagggctgcagcggcacatccgaggagtgggcacagaagagcagcagcagcccctgcccagtgactcctggaacaagcttcccctgcggggtgttggcggggggtggtgagagaatccccatggcaactcacagaaacatcatctgg

SEQ ID NO: 14900 - DNA, 195 bp, Homo sapiens
  MAP TO AL159176.2; EXPRESSED IN BONE MARROW, SIGNAL = 0.54; EXPRESSED IN LUNG, SIGNAL = 0.68; EXPRESSED IN BRAIN, SIGNAL = 0.54; EXPRESSED IN FETAL LIVER, SIGNAL = 0.5; SWISSPROT HIT: P17948, EVALUE 3.30e+00; EST_HUMAN HIT: AU126824.1, EVALUE 2.60e-01
gattcaagtatttggaaaaatgtatttatggtgattggttatgaagtatttctagatgttttgatggttctggtgaacagcatcgtattctgttcactaatgttttataaaaaggcagaaattttctggctttctggggaaccacgtaactcaaatgagtttgcagctcgttttctattccaattattgcactaa

SEQ ID NO: 14901 - DNA, 159 bp, Homo sapiens
  MAP TO CHR21_60.0; EXPRESSED IN BONE MARROW, SIGNAL = 1.3; EXPRESSED IN BRAIN, SIGNAL = 1.5; EXPRESSED IN LUNG, SIGNAL = 0.64; EXPRESSED IN HELA, SIGNAL = 4.4; EST_HUMAN HIT: BI549344.1, EVALUE 3.00e-03; NT HIT: AL163278.2, EVALUE 2.00e-84; SWISSPROT HIT: P45931, EVALUE 1.50e+00
cagttctcataatcttctctccaaacaaattctgccacgttctcccgggacaccctcttgctttctctctccctcttgatgcaacagtagttctcaaaccttcccatggaaaatcccaccagtttcttccttcctgggaccctctctcctttcctttcc

SEQ ID NO: 14902 - DNA, 180 bp, Homo sapiens
  MAP TO AC013697.3; EXPRESSED IN BRAIN, SIGNAL = 0.46; EXPRESSED IN FETAL LIVER, SIGNAL = 0.45; EXPRESSED IN PLACENTA, SIGNAL = 0.53; EXPRESSED IN BONE MARROW, SIGNAL = 0.46; EXPRESSED IN ADULT LIVER, SIGNAL = 0.47; SWISSPROT HIT: P08547, EVALUE 9.00e-09; EST_HUMAN HIT: AI867092.1, EVALUE 1.00e-24; NT HIT: U15422.1, EVALUE 1.00e-32
ttagaattcagcaatgaagccatcaggtcttgggcttttctttactgggagaatttttattatggtttcgatctcattacttgttattggtctgttcagattttggattgcttcatggtcaatcttggtaggtctgttcagattttggattgcttcatggtcaatcttgctaggttgcat

SEQ ID NO: 14903 - DNA, 158 bp, Homo sapiens
  MAP TO CHR22_30.0; EXPRESSED IN FETAL LIVER, SIGNAL = 1.7; EXPRESSED IN LUNG, SIGNAL = 1.6; EXPRESSED IN BONE MARROW, SIGNAL = 1.6; EXPRESSED IN PLACENTA, SIGNAL = 1.7; EXPRESSED IN ADULT LIVER, SIGNAL = 1.6; EXPRESSED IN BRAIN, SIGNAL = 1.7; SWISSPROT HIT: P27510, EVALUE 5.80e+00
gtttggcacagctctgggttgtgaaataatggtatccaaccttctgagagttatcgcctctatagaatcctccctgctacatttatctgatatttacattgcactgccagcccagacagcccaattcatacccccaatagcacccaagaacaatgcag

SEQ ID NO: 14904 - DNA, 108 bp, Homo sapiens
  MAP TO CHR22_223.0; EXPRESSED IN BONE MARROW, SIGNAL = 1.4; EXPRESSED IN HELA, SIGNAL = 2.3; EXPRESSED IN BRAIN, SIGNAL = 1.3; EXPRESSED IN FETAL LIVER, SIGNAL = 1.2; EXPRESSED IN LUNG, SIGNAL = 0.75; EXPRESSED IN ADULT LIVER, SIGNAL = 0.75; NT HIT: X72019.1, EVALUE 5.40e+00; EST_HUMAN HIT: AI829839.1, EVALUE 1.30e-01
ttgctcggcaggccctggctataactcattggctgttcagcccagcaaagcgtgcagccactgtgccttgctggagcccctgggagatatactgaacaatgacaacag

SEQ ID NO: 14905 - DNA, 188 bp, Homo sapiens
  MAP TO CHR22_33.0; EXPRESSED IN LUNG, SIGNAL = 1.6; EXPRESSED IN PLACENTA, SIGNAL = 1.8; EXPRESSED IN ADULT LIVER, SIGNAL = 1.8; EXPRESSED IN BONE MARROW, SIGNAL = 1.5; EXPRESSED IN HELA, SIGNAL = 1.6; EXPRESSED IN BRAIN, SIGNAL = 1.6; NT HIT: AF106656.1, EVALUE 4.20e-02; SWISSPROT HIT: P26660, EVALUE 1.50e+00
gtctggggccttgggagttgctttctcggggtggaggaagagcacagagcgccacctcttctgttttgagactgggtctggctgctgccaagttctcaggtttattgatggtgcagtaggtgattcctgtgcggccacagctgcctcctggaagggctggtagagggttgttggctgtgggccgcatt

SEQ ID NO: 14906 - DNA, 205 bp, Homo sapiens
  MAP TO AC018432.4; EXPRESSED IN PLACENTA, SIGNAL = 0.52; EXPRESSED IN ADULT LIVER, SIGNAL = 0.43; EXPRESSED IN BONE MARROW, SIGNAL = 0.41; EXPRESSED IN BRAIN, SIGNAL = 0.44; NT HIT: AE002153.1, EVALUE 7.30e-01; SWISSPROT HIT: P40389, EVALUE 3.70e-01; EST_HUMAN HIT: BG202368.1, EVALUE 1.00e-111
agcagcttgtccaggaagtagtgatggtagaccacatctgaggctaggacgtaatcatagtaaaaagctgacttgggaaagtttttgtccaggtcttccccccataccagttctttcacttcaggcagatgtgctgtacattgtagtgtgttttttaaaagattgtattgaaggtttcccaggacatcaggcaaatctgttgctg

SEQ ID NO: 14907 - DNA, 113 bp, Homo sapiens
  MAP TO AL136312.1; EXPRESSED IN FETAL LIVER, SIGNAL = 0.48; EXPRESSED IN BONE MARROW, SIGNAL = 0.45; EXPRESSED IN LUNG, SIGNAL = 0.59; EXPRESSED IN PLACENTA, SIGNAL = 0.57; EXPRESSED IN BRAIN, SIGNAL = 0.51; NT HIT: AF224669.1, EVALUE 2.00e-27; SWISSPROT HIT: O95750, EVALUE 6.00e+00; EST_HUMAN HIT: AI591341.1, EVALUE 4.00e-20
atgggggagtggcacagaagtagggactgcgttaaggataaaaaccccctggtcttctttgtttggtgtgctcttgcaatcttgattgacacaggtagcacccttctgcagaa

SEQ ID NO: 14908 - DNA, 142 bp, Homo sapiens
  MAP TO AL136382.1; EXPRESSED IN BONE MARROW, SIGNAL = 1.6; EXPRESSED IN HEART, SIGNAL = 3.8; EXPRESSED IN LUNG, SIGNAL = 3.2; EXPRESSED IN PLACENTA, SIGNAL = 2.7; EXPRESSED IN ADULT LIVER, SIGNAL =   3; EXPRESSED IN BRAIN, SIGNAL = 2.4; EXPRESSED IN FETAL LIVER, SIGNAL = 1.6; NT HIT: gi14727196, EVALUE 2.00e-74; SWISSPROT HIT: Q90339, EVALUE 5.20e-01; EST_HUMAN HIT: AW966584.1, EVALUE 3.00e-74
ctggccctgaagctccctaatggtgtgttcctggtctgcacacttccccttgcagcactgcagactctcctgacactcgtgaagcctccgttccgccgccgtcaaggaatcgcagacacgctctaactccttcagatgagac

SEQ ID NO: 14909 - DNA, 204 bp, Homo sapiens
  MAP TO CHR22_144.0; EXPRESSED IN HELA, SIGNAL = 2.1; EXPRESSED IN FETAL LIVER, SIGNAL = 0.89; EXPRESSED IN PLACENTA, SIGNAL = 0.95; EXPRESSED IN LUNG, SIGNAL = 0.83; EXPRESSED IN ADULT LIVER, SIGNAL = 1.2; EXPRESSED IN BONE MARROW, SIGNAL = 0.8; EXPRESSED IN BRAIN, SIGNAL = 0.75; EST_HUMAN HIT: BI832330.1, EVALUE 1.00e-104; SWISSPROT HIT: P14172, EVALUE 5.50e+00; NT HIT: X87940.1, EVALUE 2.90e+00
ctaggaaataccagagtagcacccccgccgaagccagcacgagcagggccagcagcacaaacaggggcaccaggcggaggtagccccgggcttttctcttggagtcctcacaggccttgaacatcccctccggctccgcttcctcgccatcacctccgtccccctgcccgccagccacctggggggcctcggccacgggcatcc

SEQ ID NO: 14910 - DNA, 135 bp, Homo sapiens
  MAP TO AL121993.2; EXPRESSED IN FETAL LIVER, SIGNAL = 0.6; EXPRESSED IN LUNG, SIGNAL = 0.63; EXPRESSED IN BONE MARROW, SIGNAL = 0.61; EXPRESSED IN BRAIN, SIGNAL = 0.64; EST_HUMAN HIT: AA608775.1, EVALUE 4.00e-70
aggtaggaacagaacctcatgctctgtcataatctcgatattgtgagagatgtgtgctgatcccttggccccatcctctccaacagctgtggcaaataactctatattcagttctgtctgcataccagctgccac

SEQ ID NO: 14911 - DNA, 266 bp, Homo sapiens
  MAP TO AL133520.2; EXPRESSED IN FETAL LIVER, SIGNAL = 1.8; EXPRESSED IN LUNG, SIGNAL = 1.3; EXPRESSED IN PLACENTA, SIGNAL = 2.2; EXPRESSED IN BRAIN, SIGNAL = 1.1; EST_HUMAN HIT: AL543135.1, EVALUE 0.00e+00; SWISSPROT HIT: Q13183, EVALUE 1.00e-27; NT HIT: gi12383071, EVALUE 0.00e+00
gaaggccgctgcttgtttgtcatcctgctcatggcggtgtactggtgcacggaggccctgccgctctcagtgacggcgctgctgcccatcgtcctcttccccttcatgggcatcttgccctccaacaaggtctgcccccagtacttcctcgacaccaacttcctcttcctcagtgggctgatcatggccagcgccattgaggagtggaacctgcaccggcgaatcgccctcaagatcctgatgcttgttggagtccagccggccag

SEQ ID NO: 14912 - DNA, 254 bp, Homo sapiens
  MAP TO AL139021.1; EXPRESSED IN HELA, SIGNAL = 0.58; EXPRESSED IN BRAIN, SIGNAL = 0.7; EXPRESSED IN FETAL LIVER, SIGNAL = 0.64; EXPRESSED IN BONE MARROW, SIGNAL = 0.65; SWISSPROT HIT: P22438, EVALUE 7.40e+00; NT HIT: gi7662189, EVALUE 0.00e+00; EST_HUMAN HIT: R61450.1, EVALUE 0.00e+00
tgtaatgtctgtggctaaggatgaagaaccagagagtatggatttccctgctcagcctccacctccagagccagttccctttatgccatttcctgccggcaccaaggccccttccccctcacagatgccaggttctgattcatcaacactggagagcacattgagtgttactgtcactgaaactgaaactttagataaacccatctctgaaggagagattttatttagctgtggtcaaaaattggcccccaaga

SEQ ID NO: 14913 - DNA, 111 bp, Homo sapiens
  MAP TO AL138732.2; EXPRESSED IN FETAL LIVER, SIGNAL = 0.72; EXPRESSED IN BONE MARROW, SIGNAL = 0.69; EXPRESSED IN BRAIN, SIGNAL = 0.78; EXPRESSED IN PLACENTA, SIGNAL = 0.54; EXPRESSED IN HELA, SIGNAL = 1.2; SWISSPROT HIT: P21953, EVALUE 2.00e-15; NT HIT: X52446.1, EVALUE 5.00e-56; EST_HUMAN HIT: BI827628.1, EVALUE 7.00e-56
gttcatgtgatccgagaggtagcttccatggcaaaagaaaagcttggagtgtcttgtgaagtcattgatctgaggactataataccttgggatgtggacacaatttgtaag

SEQ ID NO: 14914 - DNA, 251 bp, Homo sapiens
  MAP TO CHR22_84.0; EXPRESSED IN BONE MARROW, SIGNAL = 0.76; EXPRESSED IN BRAIN, SIGNAL = 0.65; EXPRESSED IN HELA, SIGNAL =   3; EXPRESSED IN PLACENTA, SIGNAL = 0.93; EXPRESSED IN FETAL LIVER, SIGNAL = 0.79; EXPRESSED IN LUNG, SIGNAL = 0.77; EXPRESSED IN ADULT LIVER, SIGNAL = 0.9; SWISSPROT HIT: P40657, EVALUE 1.10e+00; NT HIT: AL163303.2, EVALUE 2.30e-01; EST_HUMAN HIT: AI332452.1, EVALUE 0.00e+00
cacctgcccctctgctgagcagcccaggcctctcccatcctcactgcctggctgaacccatgagcagcagatttttggacaccaagagctgtgtttccaagcatggcgctaaagaggatgggctggcccagaaccatcctgagaaccaggcccagagacagctcaagggacagaagcattcagggcccccacagcagcacatgaacgtgaacatcagtctcaggatataccccaattccggaaacacaaat

SEQ ID NO: 14915 - DNA, 79 bp, Homo sapiens
  MAP TO AC018704.5; EXPRESSED IN HELA, SIGNAL = 0.85; EXPRESSED IN BRAIN, SIGNAL = 1.2; EXPRESSED IN PLACENTA, SIGNAL = 1.2; EXPRESSED IN LUNG, SIGNAL = 1.1; EXPRESSED IN ADULT LIVER, SIGNAL =   1; EXPRESSED IN FETAL LIVER, SIGNAL = 1.1; EXPRESSED IN BONE MARROW, SIGNAL = 1.1; NT HIT: gi14731752, EVALUE 2.40e-01; EST_HUMAN HIT: BG941958.1, EVALUE 3.50e-01
aaacaaccaggaatgttttcagtaaagatggcttcactgaagcaatgcacaaagatgacaagagaggagagacctttgg

SEQ ID NO: 14916 - DNA, 161 bp, Homo sapiens
  MAP TO AC013341.3; EXPRESSED IN FETAL LIVER, SIGNAL = 0.96; EXPRESSED IN BONE MARROW, SIGNAL = 0.83; EXPRESSED IN HELA, SIGNAL = 0.61; EXPRESSED IN BRAIN, SIGNAL = 0.88; EXPRESSED IN PLACENTA, SIGNAL = 0.99; EXPRESSED IN LUNG, SIGNAL = 0.82; EXPRESSED IN ADULT LIVER, SIGNAL = 0.97; SWISSPROT HIT: P34348, EVALUE 5.80e+00; NT HIT: AJ229043.1, EVALUE 8.70e+00
ctcgggggaattaaattgatatctggaatgcaaaggagactatcagcacaacctctgcccctaacacatctacctacacccccctccacacacacatatgtgcagttatcagaagactcagaaacactttcagcaagggttccatccgtatgactgctcat

SEQ ID NO: 14917 - DNA, 134 bp, Homo sapiens
  MAP TO AC018671.5; EXPRESSED IN HELA, SIGNAL = 0.6; EXPRESSED IN FETAL LIVER, SIGNAL = 2.4; EXPRESSED IN BONE MARROW, SIGNAL = 1.7; EXPRESSED IN LUNG, SIGNAL = 2.1; EXPRESSED IN PLACENTA, SIGNAL = 2.2; EXPRESSED IN HEART, SIGNAL = 2.4; EXPRESSED IN ADULT LIVER, SIGNAL = 2.1; EXPRESSED IN BRAIN, SIGNAL = 2.4; EST_HUMAN HIT: BG747595.1, EVALUE 2.00e-69; SWISSPROT HIT: P36417, EVALUE 4.50e+00; NT HIT: M71245.1, EVALUE 1.80e+00
catgacaacaccaccaacgtattcaaaagcacaatgagctatacagccatattgaatagtatagccaacaagtcgaaaggttttccccagaacaccacgaagcatagttctatgtagactctgccaccattggc

SEQ ID NO: 14918 - DNA, 153 bp, Homo sapiens
  MAP TO AL137070.3; EXPRESSED IN BRAIN, SIGNAL = 0.83; EXPRESSED IN LUNG, SIGNAL = 0.82; EXPRESSED IN FETAL LIVER, SIGNAL = 0.73; EXPRESSED IN BONE MARROW, SIGNAL = 0.72; EST_HUMAN HIT: AI589066.1, EVALUE 7.00e-69; SWISSPROT HIT: P11586, EVALUE 5.00e-18; NT HIT: gi14757749, EVALUE 1.00e-66
cgttccgaccaaagggtaaatgaacccagcgtctgtgctgacccggacatcactgataggtaagatgaagtcccttggcacaccttttttgtcaggttggtgagacagagaaaggtcggtctttgccatgcagatgggcaaatttccaaaacc

SEQ ID NO: 14919 - DNA, 167 bp, Homo sapiens
  MAP TO AC011981.3; EXPRESSED IN BRAIN, SIGNAL = 0.4; EXPRESSED IN ADULT LIVER, SIGNAL = 0.35; NT HIT: gi13632014, EVALUE 3.00e-89; EST_HUMAN HIT: BG106942.1, EVALUE 8.50e-01; SWISSPROT HIT: Q00959, EVALUE 2.00e-06
gtaaaatatggaaattatgctttcgtatgggatgcagctgtattggaatatgtggctatcaatgacccagattgttccttttacaccattggaaatactgttgctgatcggggatatggaattgcattacaacatggcagtccttaccgagatgttttttcacaaag

SEQ ID NO: 14920 - DNA, 186 bp, Homo sapiens
  MAP TO AC016672.4; EXPRESSED IN HELA, SIGNAL = 0.99; EXPRESSED IN BRAIN, SIGNAL = 0.97; EXPRESSED IN FETAL LIVER, SIGNAL =   1; EXPRESSED IN PLACENTA, SIGNAL = 1.1; EXPRESSED IN LUNG, SIGNAL =   1; EXPRESSED IN ADULT LIVER, SIGNAL = 0.98; NT HIT: AF112374.1, EVALUE 1.70e-01; SWISSPROT HIT: P02863, EVALUE 1.30e-01
ccgaaccccttccacgaaggctgcttgctgttcaacaaacacaggtgcagaagccactccagctggaagcagggttgcagcagcgtcctctcggccagagctcactccgtccttctcaacacttccatggacttgtcccagcgcccggagggcagcagggcacaggctgacctggcacagtatgct

SEQ ID NO: 14921 - DNA, 202 bp, Homo sapiens
  MAP TO AC015819.4; EXPRESSED IN PLACENTA, SIGNAL = 0.64; EXPRESSED IN LUNG, SIGNAL = 0.57; EXPRESSED IN ADULT LIVER, SIGNAL = 0.57; EXPRESSED IN FETAL LIVER, SIGNAL = 0.51; EXPRESSED IN BONE MARROW, SIGNAL = 0.46; EXPRESSED IN BRAIN, SIGNAL = 0.53; SWISSPROT HIT: P42916, EVALUE 5.50e+00; NT HIT: AL021127.2, EVALUE 1.80e-01; EST_HUMAN HIT: AA877598.1, EVALUE 1.00e+00
tcctacaacaaagcacatgtaggtacagcaaaggaatggtgtgcattttccctcagcagcaaacatgactgaaatttccaggttcaccaggtgggcttcgttaatgacaaccaccacagggatcacactcttactgtgagccgggagctgaacttggggcttcccaagagcctcgcccgtttggtcatcattcccatcctgc

SEQ ID NO: 14922 - DNA, 184 bp, Homo sapiens
  MAP TO CHR22_115.0; EXPRESSED IN HELA, SIGNAL = 0.6; EXPRESSED IN FETAL LIVER, SIGNAL = 0.8; EXPRESSED IN PLACENTA, SIGNAL = 0.85; EXPRESSED IN LUNG, SIGNAL = 0.87; EXPRESSED IN ADULT LIVER, SIGNAL =   1; EXPRESSED IN BONE MARROW, SIGNAL =   1; EXPRESSED IN BRAIN, SIGNAL = 0.87; SWISSPROT HIT: P45539, EVALUE 3.80e-01; NT HIT: AF305894.1, EVALUE 2.50e+00
gcccacacacatccgaggcattgttcttgttggctgcgagagctcgttaggctctgggcagaggctggctggactccaggaggcagacatcaagccccacaactcaaagaatggaggagcctggggcttggcattagatgatgccagtccactcctccgcatgcactggggctctgatgcccag

SEQ ID NO: 14923 - DNA, 220 bp, Homo sapiens
  MAP TO CHR21_30.0; EXPRESSED IN HEART, SIGNAL = 1.4; EXPRESSED IN LUNG, SIGNAL = 1.3; EXPRESSED IN FETAL LIVER, SIGNAL = 1.8; EXPRESSED IN PLACENTA, SIGNAL = 1.1; EXPRESSED IN BONE MARROW, SIGNAL = 1.9; EXPRESSED IN HELA, SIGNAL = 3.8; EXPRESSED IN BRAIN, SIGNAL = 1.9; EST_HUMAN HIT: BE148728.1, EVALUE 9.00e-14; SWISSPROT HIT: Q58865, EVALUE 4.00e+00; NT HIT: U72847.1, EVALUE 7.90e-01
tgaaaccaaaggaaagtgctgggtctgaccttgatatcataccaaacttagattttggtgagtctgagctttggccactagcctcagagccacccctcaaaggcaaaattatgcaaggacaacagaaagtacctccgagtcctgtggttaccaagaaagtactcaatgtggggaaagggcaaaacaaagtgatgaataaaaccacaggacatagtgtgaa

SEQ ID NO: 14924 - DNA, 86 bp, Homo sapiens
  MAP TO AC017072.4; EXPRESSED IN BRAIN, SIGNAL = 1.1; EXPRESSED IN PLACENTA, SIGNAL = 1.1; EXPRESSED IN LUNG, SIGNAL = 1.1; EXPRESSED IN ADULT LIVER, SIGNAL = 1.1; EXPRESSED IN FETAL LIVER, SIGNAL = 1.2; EST_HUMAN HIT: BF329643.1, EVALUE 2.50e-02
gggatgcaataggagagaatgatccagagggccctcaggaacagggcaaggagtggggctgcgtgaaggaaggcttcacagaggag

SEQ ID NO: 14925 - DNA, 84 bp, Homo sapiens
  MAP TO AL049828.3; EXPRESSED IN HELA, SIGNAL = 1.4; EXPRESSED IN FETAL LIVER, SIGNAL = 1.3; EXPRESSED IN HEART, SIGNAL = 1.2; EXPRESSED IN PLACENTA, SIGNAL = 1.3; EXPRESSED IN LUNG, SIGNAL = 1.3; EXPRESSED IN BONE MARROW, SIGNAL = 1.3; EXPRESSED IN BRAIN, SIGNAL = 1.4; NT HIT: AF239237.1, EVALUE 3.00e-16; EST_HUMAN HIT: BE088634.1, EVALUE 1.00e-16; SWISSPROT HIT: P08547, EVALUE 6.00e-04
gctgtaccactttgcattctcatcagcagtgaatgagagttcctgttgcttcacatccttgccaacatttgttgtagtggtgtt

SEQ ID NO: 14926 - DNA, 141 bp, Homo sapiens
  MAP TO AL136987.1; EXPRESSED IN LUNG, SIGNAL = 0.58; EXPRESSED IN BRAIN, SIGNAL = 0.53; EXPRESSED IN ADULT LIVER, SIGNAL = 0.46; NT HIT: AJ243308.1, EVALUE 1.20e-01; EST_HUMAN HIT: BF974464.1, EVALUE 7.00e-01; SWISSPROT HIT: P18125, EVALUE 5.90e+00
gctcattaatccccagcatcagtgtgcctcatcacagatgagaaaatgcaggaggttcctgtttggggccttgctgtcatggtttcttgttgctagcaacacacagaagcatgaccagctgctgctgctgctgctgttcct

SEQ ID NO: 14927 - DNA, 204 bp, Homo sapiens
  MAP TO AL133330.5; EXPRESSED IN BONE MARROW, SIGNAL =   7; EXPRESSED IN LUNG, SIGNAL = 8.9; EXPRESSED IN ADULT LIVER, SIGNAL =  12; EXPRESSED IN BRAIN, SIGNAL = 6.3; EXPRESSED IN FETAL LIVER, SIGNAL =  12; SWISSPROT HIT: P43004, EVALUE 7.00e-15; NT HIT: U01824.1, EVALUE 7.00e-72; EST_HUMAN HIT: AV719930.1, EVALUE 1.00e-71
ctgaacttctctgttctcatagcctcacagccaccctggcaagcgtcggcgcggccagtatccccagtgccgggctggtcaccatgctcctcattctgacagccgtgggcctgccaacagaggacatcagcctgctggtggctgtggactggctgctgtaagtgtctgtggatggggttctgctgggactgtgagtactgcctc

SEQ ID NO: 14928 - DNA, 137 bp, Homo sapiens
  MAP TO AC023115.3; EXPRESSED IN PLACENTA, SIGNAL = 0.54; EXPRESSED IN FETAL LIVER, SIGNAL = 0.51; EXPRESSED IN LUNG, SIGNAL = 0.45; EXPRESSED IN ADULT LIVER, SIGNAL = 0.52; EXPRESSED IN BONE MARROW, SIGNAL = 0.46; EXPRESSED IN BRAIN, SIGNAL = 0.53; SWISSPROT HIT: gi1351900, EVALUE 4.50e+00; NT HIT: gi6753681, EVALUE 3.00e-02; EST_HUMAN HIT: BF847222.1, EVALUE 4.40e-02
gctttggatcactgtttcttctgtagagctcgaatctccagcatggcatctaaatatccctaaaggtaatattaatgatgatgacaatgacagtgatggtgatacccaccaattactgaactctaaccatatcccag

SEQ ID NO: 14929 - DNA, 110 bp, Homo sapiens
  MAP TO AC012580.3; EXPRESSED IN BONE MARROW, SIGNAL = 1.2; EXPRESSED IN BRAIN, SIGNAL = 1.1; EXPRESSED IN HELA, SIGNAL = 0.63; EXPRESSED IN LUNG, SIGNAL = 1.3; EXPRESSED IN FETAL LIVER, SIGNAL = 1.2; EXPRESSED IN PLACENTA, SIGNAL = 1.3; EXPRESSED IN ADULT LIVER, SIGNAL = 1.2; SWISSPROT HIT: P08120, EVALUE 6.10e+00; NT HIT: gi16190364, EVALUE 2.00e-55; EST_HUMAN HIT: BE465867.1, EVALUE 3.00e-55
caccagttcactgaacatgacatccagctcctccacagggggcatgggcaatgctggttccatggtctgaagcgcaaagttgctatcatttcgcagccgatacgtgattt

SEQ ID NO: 14930 - DNA, 198 bp, Homo sapiens
  MAP TO AC021311.4; EXPRESSED IN HELA, SIGNAL = 0.52; EXPRESSED IN BRAIN, SIGNAL = 0.77; EXPRESSED IN PLACENTA, SIGNAL = 0.8; EXPRESSED IN LUNG, SIGNAL = 0.68; EXPRESSED IN FETAL LIVER, SIGNAL = 0.76; EXPRESSED IN ADULT LIVER, SIGNAL = 0.65; EXPRESSED IN BONE MARROW, SIGNAL = 0.75; SWISSPROT HIT: P11369, EVALUE 2.00e-07; NT HIT: AL163206.2, EVALUE 5.00e-14; EST_HUMAN HIT: AW269791.1, EVALUE 6.60e-02
tcagccttcagcttctctccattggacggtgatgctagttctgggtttttcataagcagccacaaccactattgtgttgagcaacttgcattctatactgttgagagtttttctcaagaaaggatgttgatctttgttgaatgctttttctgcattaagtgcgatgatcatgtggttattatcttccatcagctgaga

SEQ ID NO: 14931 - DNA, 168 bp, Homo sapiens
  MAP TO AL121836.9; EXPRESSED IN PLACENTA, SIGNAL = 0.74; EXPRESSED IN LUNG, SIGNAL = 0.79; EXPRESSED IN BONE MARROW, SIGNAL = 0.6; EXPRESSED IN ADULT LIVER, SIGNAL = 0.67; EXPRESSED IN BRAIN, SIGNAL = 0.71; EST_HUMAN HIT: BF378563.1, EVALUE 8.60e-01; SWISSPROT HIT: Q49116, EVALUE 2.90e-01; NT HIT: AJ278289.1, EVALUE 2.30e+00
atggcaaacttcaaaaatgtacaagctgaaagctacaaaaagctcaacccaaccgtctttggaaaggcaatcccagtccttgggaatgtcatagagcaaatctattaccacatacatgaactctcagtgctaatatggcttgccaatgaaaatttggctctcatggac

SEQ ID NO: 14932 - DNA, 233 bp, Homo sapiens
  MAP TO CHR22_100.0; EXPRESSED IN BRAIN, SIGNAL = 2.6; EXPRESSED IN HELA, SIGNAL = 1.5; EXPRESSED IN FETAL LIVER, SIGNAL = 3.1; EXPRESSED IN HEART, SIGNAL = 2.3; EXPRESSED IN BONE MARROW, SIGNAL = 2.9; EXPRESSED IN PLACENTA, SIGNAL = 2.7; EXPRESSED IN LUNG, SIGNAL = 2.7; EXPRESSED IN ADULT LIVER, SIGNAL = 2.8; EST_HUMAN HIT: N41521.1, EVALUE 1.20e+00; SWISSPROT HIT: O95644, EVALUE 6.20e+00
cactgcaaggaagccagatttctccccctgctgccttcagctcccccactcacccccgcattgatctccagctttacgagggtgacgggccataccttttaattgcattattacatctttatggtctgatcattgagctgggcagccaggtgctggaatttatatgcggaactgaaacgtttactggaatcatattgataaaggcatattgtgaaaaggcctgtggctcttaa

SEQ ID NO: 14933 - DNA, 163 bp, Homo sapiens
  MAP TO AL109804.24; EXPRESSED IN BONE MARROW, SIGNAL = 4.2; EXPRESSED IN BRAIN, SIGNAL = 4.5; EXPRESSED IN HEART, SIGNAL = 3.8; EXPRESSED IN FETAL LIVER, SIGNAL = 3.8; SWISSPROT HIT: Q63358, EVALUE 4.40e+00; NT HIT: gi14771623, EVALUE 3.00e-21; EST_HUMAN HIT: AW298312.1, EVALUE 1.00e-86
ctagttgatctcgcggacgaagtggcctctgtctaccagagctaccagcctcgtgagcgtcctgcccttgccctcctggacccccagcctgctccctggcctccgctctccttttctctctccctgtacttcctgcctttctctgtcatcctctttcttgtca

SEQ ID NO: 14934 - DNA, 235 bp, Homo sapiens
  MAP TO AL138832.2; EXPRESSED IN BONE MARROW, SIGNAL = 1.3; EXPRESSED IN LUNG, SIGNAL = 1.7; EXPRESSED IN HELA, SIGNAL = 0.7; EXPRESSED IN BRAIN, SIGNAL = 1.1; EXPRESSED IN PLACENTA, SIGNAL = 2.5; SWISSPROT HIT: P30427, EVALUE 6.00e-03; NT HIT: AF281870.1, EVALUE 4.00e-49; EST_HUMAN HIT: AL589430.1, EVALUE 1.00e-129
ctgcacttcatcaaagagggtccttgcttgttgcagtggtataggaacacttccgagaccactcatggggaggtaggacacttcaaccaaccatttacgaagcttttctgccatctccctatagcgctgccactggcgaatctggctgtcaatgatcccccgcctctgctgggccctgcgaatcactccctgccattgattactgaggagtgtcaatttcaggttgaattcatcc

SEQ ID NO: 14935 - DNA, 101 bp, Homo sapiens
  MAP TO CHR22_212.0; EXPRESSED IN HELA, SIGNAL = 5.7; EXPRESSED IN BRAIN, SIGNAL = 4.3; EXPRESSED IN LUNG, SIGNAL = 3.9; EXPRESSED IN BONE MARROW, SIGNAL = 3.7; NT HIT: gi14861872, EVALUE 3.00e-07; EST_HUMAN HIT: AV686833.1, EVALUE 5.00e-07
agcaccctagccaccctgtggcatctgtcacttccacctcacctctaagaacagtcatgcatcccttaacaatggggatacactctgagaaatgcatcatt

SEQ ID NO: 14936 - DNA, 145 bp, Homo sapiens
  MAP TO AC023120.3; EXPRESSED IN FETAL LIVER, SIGNAL = 1.4; EXPRESSED IN BONE MARROW, SIGNAL = 1.4; EXPRESSED IN LUNG, SIGNAL = 1.5; EXPRESSED IN BRAIN, SIGNAL = 1.3; EXPRESSED IN PLACENTA, SIGNAL = 1.5; EXPRESSED IN ADULT LIVER, SIGNAL = 1.4; EXPRESSED IN HELA, SIGNAL = 0.53; SWISSPROT HIT: P57110, EVALUE 5.00e-04; NT HIT: gi13376209, EVALUE 3.00e-76; EST_HUMAN HIT: AL556670.1, EVALUE 5.00e-76
tgttccaagagctgccagggtggctttcgggtccgggaagtgcggtgtctgtctgatgacatgactctaagtaacctctgtgaccctcagttgaaaccagaagagagagaatcttgtaaccctcaggactgtgtccctgaagttg

SEQ ID NO: 14937 - DNA, 354 bp, Homo sapiens
  MAP TO CHR22_22.0; EXPRESSED IN HELA, SIGNAL = 4.6; EXPRESSED IN FETAL LIVER, SIGNAL = 2.7; EXPRESSED IN BONE MARROW, SIGNAL = 2.5; EXPRESSED IN BRAIN, SIGNAL = 3.7; EXPRESSED IN HEART, SIGNAL = 2.7; EXPRESSED IN PLACENTA, SIGNAL = 2.6; SWISSPROT HIT: Q12772, EVALUE 2.00e-38; NT HIT: gi11418194, EVALUE 0.00e+00; EST_HUMAN HIT: BF983518.1, EVALUE 0.00e+00
ggagattttgcagctgctgccggcaacctacaaacctgcctggcagttttgggccgggcactgcccacctcccgcctggacctggcctgcagcctctcctggaacgtgatccgctacagcctgcagaagctacgcctggtgcgctggctgctcaagaaagtcttccagtgccggcgggccacgccagccactgaggcaggctttgaagacgaagctaagaccagcgcccgggatgcggctctggcctatcaccggctgcaccagctgcacatcacaggtgagggggcagctgctgctgcctggcttgctgcaaggcatctcatgctacctctcctccttagcttgatttgccag

SEQ ID NO: 14938 - DNA, 399 bp, Homo sapiens
  MAP TO AL136450.1; EXPRESSED IN PLACENTA, SIGNAL = 0.63; EXPRESSED IN LUNG, SIGNAL = 0.76; EXPRESSED IN FETAL LIVER, SIGNAL = 0.49; EXPRESSED IN ADULT LIVER, SIGNAL = 0.69; EXPRESSED IN BONE MARROW, SIGNAL = 0.6; EXPRESSED IN BRAIN, SIGNAL = 0.58; EST_HUMAN HIT: BG338075.1, EVALUE 0.00e+00; SWISSPROT HIT: P02812, EVALUE 1.70e-01; NT HIT: gi4503554, EVALUE 0.00e+00
ggctcagccatcagcagggaccctgagcctgaggagagctcaagttcagccactggggtcagcccaacagtggggcggctgggaggagacaaagtctggttgcccagaaggctcggattgtgggaacccctggaaaccacctgggttggaagtggctgaagatgagcctgatctctcaggagctccctcagggtctcttcaggaaccagcagcccctccatgggggcccccgtcaccataccctgaacataggaggaggacctcagtggcccctccttgaccctaggggctgctgtagtgccagaagtcctgatgaaggcagcaatgacagtcccagggggctgagagctgggccctgctggtccagcccctgtgaccgtgggtggcgccgggttggtc

SEQ ID NO: 14939 - DNA, 187 bp, Homo sapiens
  MAP TO CHR22_177.0; EXPRESSED IN HELA, SIGNAL = 0.86; EXPRESSED IN FETAL LIVER, SIGNAL = 0.73; EXPRESSED IN PLACENTA, SIGNAL = 0.69; EXPRESSED IN BONE MARROW, SIGNAL = 0.58; EXPRESSED IN LUNG, SIGNAL = 0.84; EXPRESSED IN BRAIN, SIGNAL = 0.59; NT HIT: gi11418322, EVALUE 1.00e-101; EST_HUMAN HIT: AW602409.1, EVALUE 1.00e-101; SWISSPROT HIT: P43048, EVALUE 1.10e+00
ctggtccatcccatagtccaaggtcatggtgaccaggtgcttcatctcactgtcctccttaacattcttcagctcgatcagcaggtggtgccactccccgtcggtcacccgcaacccggacagcatcacggactccacatcggaggggccgtgggacacctcaaactggaggtagttgttcaggatc

SEQ ID NO: 14940 - DNA, 231 bp, Homo sapiens
  MAP TO AL136374.1; EXPRESSED IN FETAL LIVER, SIGNAL =   1; EXPRESSED IN PLACENTA, SIGNAL = 1.1; EXPRESSED IN BONE MARROW, SIGNAL = 1.1; EXPRESSED IN LUNG, SIGNAL = 1.3; EXPRESSED IN ADULT LIVER, SIGNAL = 1.1; EXPRESSED IN BRAIN, SIGNAL = 1.2; EXPRESSED IN HELA, SIGNAL = 0.76; SWISSPROT HIT: P53261, EVALUE 1.60e-01
agagtcaaggatgctataaaaaaggaatttgaagagaataagaaaaaactcttatacattcacaatatagcaaaaattaaaaatttaaaagaagaactggaacatgaagttgatgaagtctcactgaaagtaaaacacaaagatatgaataagaagagaaaaaacataaggaaaatggagaattctaacatcaaactaatagacgttgtagaaagctataacagagaaaaa

SEQ ID NO: 14941 - DNA, 107 bp, Homo sapiens
  MAP TO AC022117.2; EXPRESSED IN HELA, SIGNAL = 0.68; EXPRESSED IN FETAL LIVER, SIGNAL =   1; EXPRESSED IN PLACENTA, SIGNAL = 0.89; EXPRESSED IN BONE MARROW, SIGNAL = 0.77; EXPRESSED IN LUNG, SIGNAL = 0.82; EXPRESSED IN ADULT LIVER, SIGNAL = 0.94; EXPRESSED IN BRAIN, SIGNAL =   1; SWISSPROT HIT: Q62763, EVALUE 7.00e-14; NT HIT: gi16159776, EVALUE 1.00e-53; EST_HUMAN HIT: AV649945.1, EVALUE 2.00e-53
ttggtttcatccatcacttctacttcagtaggggctgtgatgggtgcatttgaacgtcctgcggtggggtcatctgtgtttaactctccatttgtagaacttacaac

SEQ ID NO: 14942 - DNA, 112 bp, Homo sapiens
  MAP TO AL121876.23; EXPRESSED IN FETAL LIVER, SIGNAL = 0.82; EXPRESSED IN PLACENTA, SIGNAL = 0.74; EXPRESSED IN BONE MARROW, SIGNAL = 0.97; EXPRESSED IN BRAIN, SIGNAL = 0.89; EXPRESSED IN LUNG, SIGNAL = 0.73; EXPRESSED IN ADULT LIVER, SIGNAL = 0.73; SWISSPROT HIT: O75969, EVALUE 1.60e+00; NT HIT: gi11467607, EVALUE 5.70e+00; EST_HUMAN HIT: BG990208.1, EVALUE 2.10e+00
gttttatatgtttgacactaactttcctgagaagaatgctcaaaataacttgttcttttccatgataggcaatgattttatctatatgtacaaccagatcaactggtttgac

SEQ ID NO: 14943 - DNA, 75 bp, Homo sapiens
  MAP TO AC016569.2; EXPRESSED IN PLACENTA, SIGNAL = 1.2; EXPRESSED IN LUNG, SIGNAL = 1.1; EXPRESSED IN HELA, SIGNAL = 0.72; EXPRESSED IN BRAIN, SIGNAL = 0.96; EXPRESSED IN ADULT LIVER, SIGNAL =   1; EXPRESSED IN FETAL LIVER, SIGNAL = 0.95; EXPRESSED IN BONE MARROW, SIGNAL = 1.1; NT HIT: AJ002604.1, EVALUE 8.80e-01; EST_HUMAN HIT: BE972696.1, EVALUE 8.20e-02
ggtcaggtacagggtgctgtgtgaagtggaggacgtagaagcaacttgggggtctagactgcaagcttgcaccat

SEQ ID NO: 14944 - DNA, 82 bp, Homo sapiens
  MAP TO AL160191.1; EXPRESSED IN LUNG, SIGNAL = 0.74; EXPRESSED IN BONE MARROW, SIGNAL = 0.8; EXPRESSED IN PLACENTA, SIGNAL = 1.1; EXPRESSED IN ADULT LIVER, SIGNAL = 0.76; EXPRESSED IN BRAIN, SIGNAL = 0.77; EXPRESSED IN FETAL LIVER, SIGNAL = 0.62; NT HIT: AJ250726.2, EVALUE 3.90e+00
tcacagggcgttgtctttgtgtgtctctgacttcacatagccctcttcttcttctttttgtgtgtgtctgtgtgtgtccact

SEQ ID NO: 14945 - DNA, 170 bp, Homo sapiens
  MAP TO CHR22_5.0; EXPRESSED IN PLACENTA, SIGNAL = 0.73; EXPRESSED IN LUNG, SIGNAL = 0.62; EXPRESSED IN BONE MARROW, SIGNAL = 0.58; EXPRESSED IN ADULT LIVER, SIGNAL = 0.61; EXPRESSED IN HELA, SIGNAL = 0.55; EXPRESSED IN BRAIN, SIGNAL = 0.71; SWISSPROT HIT: P45533, EVALUE 1.10e+00; EST_HUMAN HIT: BE959484.2, EVALUE 8.70e-01; NT HIT: AF124050.1, EVALUE 5.90e-01
catattgttctgaaaggatgtggatataaggacaatcaaagttcattctaatgttttttgttccagtagaggggcctgacgtgggaaaggtggaacactggttgggcagtacatctgtattggtaaccatgaccctcttcacagcttcacattcagacacacttttcttc

SEQ ID NO: 14946 - DNA, 106 bp, Homo sapiens
  MAP TO AL133553.2; EXPRESSED IN LUNG, SIGNAL = 0.97; EXPRESSED IN ADULT LIVER, SIGNAL = 1.2; EXPRESSED IN FETAL LIVER, SIGNAL = 0.97; EXPRESSED IN BONE MARROW, SIGNAL = 0.95; EXPRESSED IN BRAIN, SIGNAL = 0.88; EXPRESSED IN HELA, SIGNAL = 0.64; SWISSPROT HIT: P71360, EVALUE 8.00e+00; EST_HUMAN HIT: BF724457.1, EVALUE 3.00e-39; NT HIT: gi5031924, EVALUE 6.00e-46
caagggtacctacggtacctgaaaacaacgatggcatggaaaacacttcccatttacctgttgttgctgctgtctgttttcgtgattcagcaagtttcatctcaag

SEQ ID NO: 14947 - DNA, 75 bp, Homo sapiens
  MAP TO AC008432.2; EXPRESSED IN PLACENTA, SIGNAL = 0.48; EXPRESSED IN FETAL LIVER, SIGNAL = 0.4; EXPRESSED IN ADULT LIVER, SIGNAL = 0.47; EXPRESSED IN BONE MARROW, SIGNAL = 0.43; EXPRESSED IN BRAIN, SIGNAL = 0.51; EXPRESSED IN HELA, SIGNAL = 0.51; EST_HUMAN HIT: BI524560.1, EVALUE 3.20e-01
ctgactgtgctctgtgatgtcttcctgccttgttttctgtgttcaggactttgattcgatgaactgcacggtttt

SEQ ID NO: 14948 - DNA, 221 bp, Homo sapiens
  MAP TO AL138735.2; EXPRESSED IN HELA, SIGNAL = 1.9; EXPRESSED IN BRAIN, SIGNAL = 3.7; EXPRESSED IN FETAL LIVER, SIGNAL =   3; EXPRESSED IN HEART, SIGNAL =   3; EXPRESSED IN BONE MARROW, SIGNAL = 3.3; NT HIT: gi15812225, EVALUE 5.10e-02; SWISSPROT HIT: Q02025, EVALUE 6.30e-01; EST_HUMAN HIT: AW175671.1, EVALUE 2.90e-01
gtcttggtctcctaagtcctcttctcccccgggaccttcctcagcagcctttgctgggtcctcgtcctgggtgggcccatcagctgctgggttcttcagggctccatcccaggtcactcctccgacctctccctgattgatactcactgttcccatgctgaagccagatgtcctgactgtgctctttgggtcactcctgcaggccctggctgtggagaatg

SEQ ID NO: 14949 - DNA, 122 bp, Homo sapiens
  MAP TO AC011792.5; EXPRESSED IN BONE MARROW, SIGNAL = 0.59; EXPRESSED IN BRAIN, SIGNAL = 0.71; EXPRESSED IN LUNG, SIGNAL = 0.72; EXPRESSED IN ADULT LIVER, SIGNAL = 0.71; EST_HUMAN HIT: BF963284.1, EVALUE 2.00e-62; NT HIT: gi14766683, EVALUE 1.00e-01; SWISSPROT HIT: O88480, EVALUE 4.60e+00
tgttagagctagcagcttcccataggtgagatgagcagggatgtggtcagtcttggatctcagtgattccatataccaatgctctgcttcggggagtttgcttaaacgcatatatgcttcac

SEQ ID NO: 14950 - DNA, 198 bp, Homo sapiens
  MAP TO AL138691.2; EXPRESSED IN BONE MARROW, SIGNAL = 0.89; EXPRESSED IN BRAIN, SIGNAL = 0.94; EXPRESSED IN FETAL LIVER, SIGNAL = 0.88; SWISSPROT HIT: P33450, EVALUE 2.50e+00
atggatcttaatctagagaaacactatgtcatttgcaaattatttcttaatcggactaagctatttagaagtgcgagtggaggagtgagtgttttggaagccgccagagctcagatgttgactaggaacactcttcctagcagcctcgctttcccccaaaggcacgttggtctaagtgtcaaaagcaaaattaagcag

SEQ ID NO: 14951 - DNA, 115 bp, Homo sapiens
  MAP TO AC018432.4; EXPRESSED IN FETAL LIVER, SIGNAL = 0.51; EXPRESSED IN BRAIN, SIGNAL = 0.47; EXPRESSED IN PLACENTA, SIGNAL = 0.44; EXPRESSED IN ADULT LIVER, SIGNAL = 0.47; NT HIT: AL163302.2, EVALUE 1.50e+00; EST_HUMAN HIT: BE541518.1, EVALUE 2.20e+00; SWISSPROT HIT: Q92125, EVALUE 8.00e-02
gtgccagtacaagccgtcgccagcacaccactgggtggtggctcagagcatcagggacctgtaccagcccctgctggcttccctgccctgccccactctcatccaggccatgcct

SEQ ID NO: 14952 - DNA, 126 bp, Homo sapiens
  MAP TO AL160168.1; EXPRESSED IN PLACENTA, SIGNAL = 1.9; EXPRESSED IN LUNG, SIGNAL = 1.5; EXPRESSED IN BONE MARROW, SIGNAL = 1.2; EXPRESSED IN ADULT LIVER, SIGNAL = 1.6; EXPRESSED IN HELA, SIGNAL = 0.69; EXPRESSED IN BRAIN, SIGNAL = 1.1; NT HIT: U43887.1, EVALUE 7.00e-03; EST_HUMAN HIT: AW205606.1, EVALUE 6.00e-04
atgagagaacgctctacattggttaggttggttatctcaaaaagaaagagaaagaaaacaataagtgttggtgaaggtgtggaagaatttgaattcatgtgcattgctgatgaaaatataaatgat

SEQ ID NO: 14953 - DNA, 116 bp, Homo sapiens
  MAP TO AL137183.1; EXPRESSED IN FETAL LIVER, SIGNAL = 0.49; EXPRESSED IN PLACENTA, SIGNAL = 0.47; EXPRESSED IN BRAIN, SIGNAL = 0.66; EST_HUMAN HIT: BG953844.1, EVALUE 5.60e-01; NT HIT: Z99107.1, EVALUE 1.50e+00
taccaaatgttgctgtggaaaaatatgatgttattctgattgctccttcctatgaagtgtttttctctctagaagttagtgaatcctctctctatcactggtattatgatattgca

SEQ ID NO: 14954 - DNA, 165 bp, Homo sapiens
  MAP TO AL133543.2; EXPRESSED IN BONE MARROW, SIGNAL = 0.9; EXPRESSED IN BRAIN, SIGNAL = 1.1; EXPRESSED IN HELA, SIGNAL = 0.93; EXPRESSED IN LUNG, SIGNAL = 1.1; EXPRESSED IN ADULT LIVER, SIGNAL = 1.2; EXPRESSED IN FETAL LIVER, SIGNAL = 0.94; EST_HUMAN HIT: BG111179.1, EVALUE 1.00e-52; NT HIT: gi13385873, EVALUE 3.00e-33; SWISSPROT HIT: Q09282, EVALUE 1.50e+00
ctctctttccttcttctcgactcacagtttttatccttatctttgtttctttttcttttatgtgggcttctactcctatcccttctatgtcgtgaacactcagcatccaaatagcttccaccagactgccgtgaatctactgaagctgatcgcctttcttcattc

SEQ ID NO: 14955 - DNA, 116 bp, Homo sapiens
  MAP TO AL137863.3; EXPRESSED IN BONE MARROW, SIGNAL = 2.7; EXPRESSED IN HELA, SIGNAL = 2.2; EXPRESSED IN BRAIN, SIGNAL = 2.2; EXPRESSED IN HEART, SIGNAL =   2; SWISSPROT HIT: P14207, EVALUE 7.90e+00; EST_HUMAN HIT: R32346.1, EVALUE 1.40e-01; NT HIT: gi15616630, EVALUE 1.50e+00
atagtcattttttgaccatttactataggccaagctctgtgccaagaggttttcacagagtgcttcattaaattcatacaaccgctccacaaagtagaaattatcatcttcattct

SEQ ID NO: 14956 - DNA, 142 bp, Homo sapiens
  MAP TO AL136361.2; EXPRESSED IN BONE MARROW, SIGNAL = 4.7; EXPRESSED IN BRAIN, SIGNAL = 5.8; EXPRESSED IN HEART, SIGNAL = 6.5; EXPRESSED IN HELA, SIGNAL = 0.92; NT HIT: X91890.1, EVALUE 7.50e+00; SWISSPROT HIT: Q04592, EVALUE 7.70e+00
agatgcagagagagaaggctttggcaggacgcactgcctttggaaccagagctgctgctatctgtgccctggaccacatgctccatggccatggccgtgccagtcctactggttcctctgcaaccgccacccaagtcagcgc

SEQ ID NO: 14957 - DNA, 279 bp, Homo sapiens
  MAP TO AC022117.2; EXPRESSED IN BRAIN, SIGNAL = 0.59; EXPRESSED IN HELA, SIGNAL =  10; EXPRESSED IN LUNG, SIGNAL = 4.4; EXPRESSED IN ADULT LIVER, SIGNAL = 7.2; EXPRESSED IN FETAL LIVER, SIGNAL = 4.1; EXPRESSED IN BONE MARROW, SIGNAL = 0.81; NT HIT: X12883.1, EVALUE 1.00e-110; SWISSPROT HIT: P05783, EVALUE 8.00e-16; EST_HUMAN HIT: BG481611.1, EVALUE 1.00e-110
gcgaccagctacggcgcccggctggtcagcagcacagccagagtctatgcaggcgccgggggctctggttcccggatctctgtgtcccgctccaccagcttccagggcggcttggagtccgggggcctggccgcggggatggccgggggtctggcaggaataggaggcatccagcacgagaaggagaccatgcaaagcctgaaagactgcctggcctcctacctggacagagtgaggagcctggagaccgagaaccggaggctggagagcaaaatccgg

SEQ ID NO: 14958 - DNA, 139 bp, Homo sapiens
  MAP TO AL133520.2; EXPRESSED IN ADULT LIVER, SIGNAL = 1.8; EXPRESSED IN HELA, SIGNAL = 1.1; EXPRESSED IN FETAL LIVER, SIGNAL = 1.5; EXPRESSED IN BONE MARROW, SIGNAL = 1.5; EXPRESSED IN LUNG, SIGNAL = 1.9; EXPRESSED IN PLACENTA, SIGNAL = 2.2; EXPRESSED IN HEART, SIGNAL = 1.7; EXPRESSED IN BRAIN, SIGNAL = 1.6; SWISSPROT HIT: Q92448, EVALUE 1.20e+00; EST_HUMAN HIT: AV727463.1, EVALUE 2.00e-72
atgaaaagggtagtaaaggaggagctcaaaaataataattctgaaaaattcttcctaaatccaaagaaattagtgtttcaatattcccattttatgaatgaacaaactagtgaagaaggtacaaaatccttggctgaat

SEQ ID NO: 14959 - DNA, 163 bp, Homo sapiens
  MAP TO AL133472.2; EXPRESSED IN PLACENTA, SIGNAL = 4.6; EXPRESSED IN LUNG, SIGNAL = 4.7; EXPRESSED IN ADULT LIVER, SIGNAL = 3.8; EXPRESSED IN HELA, SIGNAL = 2.9; EXPRESSED IN FETAL LIVER, SIGNAL = 3.8; EXPRESSED IN HEART, SIGNAL = 3.3; EXPRESSED IN BONE MARROW, SIGNAL = 4.3; EXPRESSED IN BRAIN, SIGNAL = 4.2; EST_HUMAN HIT: BI859069.1, EVALUE 1.00e-86; NT HIT: gi7662033, EVALUE 7.00e-87; SWISSPROT HIT: Q92562, EVALUE 5.00e-26
atgtaataggtggtttaggcatcatagttgaaatgtcctgagaccagtataagggcacagatcctctaacttgtacatatgaagaataacttcctgcagtgaaagacatcacagaagcatcgcagagtatttgttcagtctccacttcatttgcaacatcacc

SEQ ID NO: 14960 - DNA, 111 bp, Homo sapiens
  MAP TO AC008432.2; EXPRESSED IN HELA, SIGNAL = 0.6; EXPRESSED IN BRAIN, SIGNAL = 0.56; EXPRESSED IN BONE MARROW, SIGNAL = 0.62; EXPRESSED IN PLACENTA, SIGNAL = 1.2; EXPRESSED IN ADULT LIVER, SIGNAL = 1.1; EXPRESSED IN LUNG, SIGNAL = 0.96; NT HIT: AJ271735.1, EVALUE 4.00e-10; EST_HUMAN HIT: BG288680.1, EVALUE 2.00e-06; SWISSPROT HIT: O87903, EVALUE 6.10e+00
atggagaaagatggcagactagaaagctccaccgatcactcccccaacaaggacaccaagttaacgattatctgtacagaaagaaacaccttcataagaaccaagaaacag

SEQ ID NO: 14961 - DNA, 153 bp, Homo sapiens
  MAP TO AL160191.1; EXPRESSED IN FETAL LIVER, SIGNAL = 0.55; EXPRESSED IN BONE MARROW, SIGNAL = 0.51; EXPRESSED IN BRAIN, SIGNAL = 0.48; EXPRESSED IN LUNG, SIGNAL = 0.55; SWISSPROT HIT: Q03045, EVALUE 4.40e+00
caagctctgtgactgggctgaatcctgtagcttctcgggtcctgagtttcttcccaacttgaaaatgaggtttgtggctcttgctcccaatgctgatgttacacagcttactttccatcttccttgtgaacatctccttgggttccagtacag

SEQ ID NO: 14962 - DNA, 378 bp, Homo sapiens
  MAP TO CHR22_2.0; EXPRESSED IN FETAL LIVER, SIGNAL = 1.2; EXPRESSED IN LUNG, SIGNAL = 1.5; EXPRESSED IN BRAIN, SIGNAL = 1.1; EXPRESSED IN HEART, SIGNAL = 1.2; EXPRESSED IN PLACENTA, SIGNAL = 1.5; EXPRESSED IN HELA, SIGNAL = 0.61; EXPRESSED IN ADULT LIVER, SIGNAL = 1.8; SWISSPROT HIT: O60755, EVALUE 2.00e-55; NT HIT: AF129513.2, EVALUE 0.00e+00; EST_HUMAN HIT: AL598293.1, EVALUE 8.10e+00
tgcccgtctgatggggagatggctgatgcccagaacatttcactggacagcccagggagtgtgggggccgtggcagtgcctgtggtctttgccctaatcttcctgctgggcacagtgggcaatgggctggtgctggcagtgctcctgcagcctggcccgagtgcctggcaggagcctggcagcaccacggacctgttcatcctcaacctggcggtggctgacctctgcttcatcctgtgctgcgtgcccttccaggccaccatctacacgctggatgcctggctctttggggccctcgtctgcaaggccgtgcacctgctcatctacctcaccatgtacgccagcagctttacgctggctgctgtctccgtggacagg

SEQ ID NO: 14963 - DNA, 105 bp, Homo sapiens
  MAP TO AC020721.4; EXPRESSED IN BONE MARROW, SIGNAL = 0.92; EXPRESSED IN BRAIN, SIGNAL = 0.89; EXPRESSED IN PLACENTA, SIGNAL = 0.82; EXPRESSED IN LUNG, SIGNAL = 0.9; EXPRESSED IN HELA, SIGNAL = 0.68; EXPRESSED IN ADULT LIVER, SIGNAL = 1.2; NT HIT: AF016184.1, EVALUE 2.20e-02; EST_HUMAN HIT: BG875964.1, EVALUE 2.00e+00
atggacaagaagcttcccagttctgaggcagagtggaagttcatgcaccaaaagggtcagatgagaaaaatagagacccaaactaagacagaagtgttgagtaag

SEQ ID NO: 14964 - DNA, 109 bp, Homo sapiens
  MAP TO AC024066.3; EXPRESSED IN BONE MARROW, SIGNAL = 0.46; EXPRESSED IN PLACENTA, SIGNAL = 0.38; EXPRESSED IN BRAIN, SIGNAL = 0.4; EXPRESSED IN FETAL LIVER, SIGNAL = 0.41; EST_HUMAN HIT: BE005146.1, EVALUE 2.00e-03
cgttttgtgccttgttgctttcactcaaaattatgtttgtatgaaatccatcaatgttgttatgtttagtagtagttttgttcattttcattgctatgttattttccat

SEQ ID NO: 14965 - DNA, 213 bp, Homo sapiens
  MAP TO AL159176.2; EXPRESSED IN FETAL LIVER, SIGNAL = 0.64; EXPRESSED IN BONE MARROW, SIGNAL = 0.65; EXPRESSED IN BRAIN, SIGNAL = 0.75; SWISSPROT HIT: P36312, EVALUE 4.80e-01; EST_HUMAN HIT: AW896241.1, EVALUE 2.00e-45
gatgaccttaaaagacgttcaatgtcaatagatgataccccaaggggtagctgggcctgtagtatctttgacttgaaaaattcacttcctgatgctttgcttcccaatttacttgatcgaactccaaatgaagaaatagaccgtcagaatgatgaccaaaggaaatcaaaccgtcacaaagaactttttgctttgcatccatcaccagatgag

SEQ ID NO: 14966 - DNA, 101 bp, Homo sapiens
  MAP TO AL136537.3; EXPRESSED IN BRAIN, SIGNAL = 0.58; EXPRESSED IN FETAL LIVER, SIGNAL = 0.52; EXPRESSED IN PLACENTA, SIGNAL = 0.44; NT HIT: AL163268.2, EVALUE 5.00e+00
agtccctcaatctccattcccttgctcttggtgagggtgatgagcaagacaatatctgccttgtaaatcagcaagacggaaatatacacatacatatacat

SEQ ID NO: 14967 - DNA, 160 bp, Homo sapiens
  MAP TO AL136147.2; EXPRESSED IN BONE MARROW, SIGNAL = 0.99; EXPRESSED IN BRAIN, SIGNAL = 1.1; EXPRESSED IN HELA, SIGNAL = 0.84; EXPRESSED IN FETAL LIVER, SIGNAL = 0.74; NT HIT: U14627.1, EVALUE 1.40e-01; EST_HUMAN HIT: AV723313.1, EVALUE 6.00e-85; SWISSPROT HIT: P27939, EVALUE 5.80e+00
tcatcggtggttagcctctatttcctcgaactcacagatgtcttcaaacctgtgcactctggatttagctgctatgaccggagtcttagcatgccgtacattgaaccaacccaggaggcaattccattcctcatgttgcttagcttggcttttgctggac

SEQ ID NO: 14968 - DNA, 161 bp, Homo sapiens
  MAP TO AL160058.2; EXPRESSED IN PLACENTA, SIGNAL = 1.5; EXPRESSED IN LUNG, SIGNAL = 1.5; EXPRESSED IN BONE MARROW, SIGNAL =   1; EXPRESSED IN BRAIN, SIGNAL = 0.95; EXPRESSED IN FETAL LIVER, SIGNAL = 0.98; EXPRESSED IN HEART, SIGNAL = 1.5; NT HIT: gi15297891, EVALUE 1.00e-85; EST_HUMAN HIT: BE178597.1, EVALUE 1.00e-85; SWISSPROT HIT: P48443, EVALUE 3.00e-15
ctgtgcaagaagaaagacagaggagccgagagcgagctgagagtgaggcagaatgtgctaccagtggtcatgaagacatgcctgtggagaggattctagaagctgaacttgctgttgaaccaaagacagaatcctatggtgacatgaatatggagaactcg

SEQ ID NO: 14969 - DNA, 201 bp, Homo sapiens
  MAP TO AC022247.2; EXPRESSED IN FETAL LIVER, SIGNAL = 0.88; EXPRESSED IN PLACENTA, SIGNAL = 0.92; EXPRESSED IN LUNG, SIGNAL = 0.86; EXPRESSED IN BONE MARROW, SIGNAL = 0.8; EXPRESSED IN BRAIN, SIGNAL = 0.85; NT HIT: AY014960.1, EVALUE 2.80e+00; EST_HUMAN HIT: BG201021.1, EVALUE 3.00e-81; SWISSPROT HIT: P36332, EVALUE 9.50e+00
gaaaagcaaaggaaaaaaagaagaggaaaaagtgaaagaggaggaagaggttatggtggtaccaaaatttgttggtgaaggaagctctgacaaagaatggtgtcctccctctgaccctgatttctctatgtatgtgtatgaggtgaccaaatcaatactgccaataaccaatattaaggaacagattgaggatctggcaaa

SEQ ID NO: 14970 - DNA, 123 bp, Homo sapiens
  MAP TO AC017072.4; EXPRESSED IN BONE MARROW, SIGNAL = 1.2; EXPRESSED IN ADULT LIVER, SIGNAL = 1.5; EXPRESSED IN BRAIN, SIGNAL = 1.2; EXPRESSED IN HELA, SIGNAL = 0.84; EXPRESSED IN FETAL LIVER, SIGNAL = 1.3; EXPRESSED IN LUNG, SIGNAL = 1.2; EXPRESSED IN PLACENTA, SIGNAL = 1.2; EST_HUMAN HIT: BF530321.1, EVALUE 6.00e-01; SWISSPROT HIT: P43681, EVALUE 2.00e+00
atggatctgaatgctcagcatgctaattcccaggctgcagacctaagagggggatcggcatgtcttaccaggccattagacaggctcctgccggggcgacctcagggagctcctgaatcggac

SEQ ID NO: 14971 - DNA, 242 bp, Homo sapiens
  MAP TO AC011734.4; EXPRESSED IN FETAL LIVER, SIGNAL = 0.38; EXPRESSED IN PLACENTA, SIGNAL = 0.45; EXPRESSED IN BRAIN, SIGNAL = 0.35; NT HIT: D63861.1, EVALUE 5.60e-02; EST_HUMAN HIT: BE149361.1, EVALUE 8.20e-02; SWISSPROT HIT: Q9HJ95, EVALUE 1.40e+00
aactccaaatttactcttcattgtctgctctgtgaaaatggagcttgactctattaatattcgtcctttgccagctagcaggatgttactctttgtagtagaaagcactagagagacatttcgaggggtttctcttacttttttcagtctactcagatttcccacttctgcaatgcacatagttcctctgacatctggcttctgcagtgtgagcagtttttctggggccaggctttcaacac

SEQ ID NO: 14972 - DNA, 163 bp, Homo sapiens
  MAP TO AL160002.2; EXPRESSED IN BRAIN, SIGNAL = 5.3; EXPRESSED IN FETAL LIVER, SIGNAL = 6.6; EXPRESSED IN LUNG, SIGNAL = 6.3; EXPRESSED IN ADULT LIVER, SIGNAL =  18; EXPRESSED IN BONE MARROW, SIGNAL =   4; SWISSPROT HIT: O00483, EVALUE 1.00e-20; NT HIT: AF201077.1, EVALUE 2.00e-77; EST_HUMAN HIT: F34396.1, EVALUE 3.00e-77
agacctctgccgcaaacatgctctgccagatcctcggtcaggccaagaagcatccgagcttgatccccctctttgtatttattggaactggagcttctggagcaacactgtatctcttgcatctggcattgttcaatccagatgtttgttgggacagaaataa

SEQ ID NO: 14973 - DNA, 214 bp, Homo sapiens
  MAP TO AC022263.3; EXPRESSED IN FETAL LIVER, SIGNAL = 2.1; EXPRESSED IN BONE MARROW, SIGNAL = 2.2; EXPRESSED IN BRAIN, SIGNAL = 1.6; EXPRESSED IN PLACENTA, SIGNAL = 3.3; EXPRESSED IN ADULT LIVER, SIGNAL = 3.1; EXPRESSED IN LUNG, SIGNAL =   3; EST_HUMAN HIT: AL602790.1, EVALUE 2.00e-57; SWISSPROT HIT: P49849, EVALUE 2.10e+00; NT HIT: AL163227.2, EVALUE 4.00e-55
agatctgtggaactttgaacttgagagagatgatttatggtatctggtggaagaaatgtctaagcagcaaagcattcaagatgtgacttggatgctgctaaaggcattcagttttataaaggaagcagagcataaaagttcagaaaatttgcagcctgacaatgtgatagaaaataaaatcccactttctgaagagaaactcaagccggctgca

SEQ ID NO: 14974 - DNA, 211 bp, Homo sapiens
  MAP TO AL132765.16; EXPRESSED IN BRAIN, SIGNAL = 1.5; EXPRESSED IN PLACENTA, SIGNAL = 5.2; EXPRESSED IN ADULT LIVER, SIGNAL = 6.8; EXPRESSED IN LUNG, SIGNAL = 3.5; EXPRESSED IN FETAL LIVER, SIGNAL = 3.9; EXPRESSED IN BONE MARROW, SIGNAL = 2.3; NT HIT: gi16195013, EVALUE 6.00e-60; EST_HUMAN HIT: R22338.1, EVALUE 9.00e-60; SWISSPROT HIT: Q03638, EVALUE 1.90e+00
acgactccgcccagctctgcctctcccggtcctgcctccccggggctcccggcagctcgactcctcccgccctgctttggcgccaggcacgcactgccttttccagctgttcctgcagcttcttcaccgtgtccttctcccttgccagctgctcctgggtcgtcttcagaagctcctgcagtctcgtggcggcgcgccccaggtcacttgt

SEQ ID NO: 14975 - DNA, 298 bp, Homo sapiens
  MAP TO CHR22_155.0; EXPRESSED IN HELA, SIGNAL = 2.9; EXPRESSED IN BRAIN, SIGNAL = 0.37; EXPRESSED IN ADULT LIVER, SIGNAL = 0.62; NT HIT: Z73666.1, EVALUE 0.00e+00; EST_HUMAN HIT: BG755759.1, EVALUE 1.00e-53; SWISSPROT HIT: P01717, EVALUE 9.00e-26
gagggattgtcctcatccccagacaaacagtaatagtcagcctcgtcttcggtcaggaccctgctgatggtcagggtggtcgtgttccctgaggtggacccagagaatcgttcagggattccagggtaccgctcactatcttcgtatatcaccaactcaggggcctggcctggcttctgctggtaccagtcagcataattttcccccagtacatctccagagcaggtgatcctggctgtctgtcctggggacactgacaccgagggtagctgtgtcagctcataggaggcaacagagc

SEQ ID NO: 14976 - DNA, 168 bp, Homo sapiens
  MAP TO AC015819.4; EXPRESSED IN BRAIN, SIGNAL = 0.44; EXPRESSED IN LUNG, SIGNAL = 0.45; SWISSPROT HIT: P23592, EVALUE 4.40e+00; EST_HUMAN HIT: AA419627.1, EVALUE 8.60e-01
agcagaaccggccaggccggcgctgcaggaaacgcagcgatgccccaaatccttgcttccgaaagcagcacctgggagccgaaggcacagcgctgcccaggcacagagcccagcggccttgccctgcgtccgcattcgcacagggcctctgcgtgcttccgggaacat

SEQ ID NO: 14977 - DNA, 370 bp, Homo sapiens
  MAP TO AC022263.3; EXPRESSED IN LUNG, SIGNAL = 0.78; EXPRESSED IN FETAL LIVER, SIGNAL = 0.83; EXPRESSED IN ADULT LIVER, SIGNAL = 0.71; EXPRESSED IN BONE MARROW, SIGNAL = 0.89; EXPRESSED IN HELA, SIGNAL = 0.64; EXPRESSED IN BRAIN, SIGNAL = 0.94; EST_HUMAN HIT: AW263217.1, EVALUE 4.00e-14; SWISSPROT HIT: P27048, EVALUE 5.80e-01; NT HIT: gi14775223, EVALUE 0.00e+00
ctgccactggctccatagagtgtgcagccttggccgtgactcctcgctgcgttttccctgcagtagtgcatgggcgaggtgcaggtggcatgggggccctggctaatgccgcacaaatgaacctgatgctcctggggccaatcctgcaagacccggctgccagcgctgatgggctcccagatgtggtaggaagcgaaattgaggccgccatggagggtctgcacctggcagtgggtcctgcccagccattagggggcggcggcgcagtcagatgccttggggacacagggaacggggtcctaccaccgccactgctgctcctgctgctgctcctgacaacactgcccatgcggcccaagcgctactggca

SEQ ID NO: 14978 - DNA, 381 bp, Homo sapiens
  MAP TO AL121909.4; EXPRESSED IN BONE MARROW, SIGNAL = 0.42; EXPRESSED IN BRAIN, SIGNAL = 0.46; EXPRESSED IN ADULT LIVER, SIGNAL = 0.53; EST_HUMAN HIT: BE255040.1, EVALUE 8.20e+00; SWISSPROT HIT: Q02817, EVALUE 7.00e-06; NT HIT: D21854.1, EVALUE 9.00e-02
ctagtgacattctgggttggttaattgttcattgtggagggctgtcatatagtgacattctgggttggttaactgttcattgtggagggctgtcatacagtgacattctgggttggttaactgttcattgtggagggctgtcatatagtgacattctgggttggttaactgttcattgtggagggctgtcatatagtgacattctgggttggttaagtgttcattgtggagggctgtcatatagtgacattctgggttggttaactgttcattgtggagggctgtcatatagtgacattctgggttggttaactgttcactgtggagggctgtcatatagtgacattctgggttggttaattgttcactgtggagggctgt

SEQ ID NO: 14979 - DNA, 91 bp, Homo sapiens
  MAP TO AC022247.2; EXPRESSED IN HELA, SIGNAL = 2.3; EXPRESSED IN BRAIN, SIGNAL = 5.1; EXPRESSED IN LUNG, SIGNAL = 5.3; EXPRESSED IN ADULT LIVER, SIGNAL = 5.4; EXPRESSED IN FETAL LIVER, SIGNAL = 5.3; EXPRESSED IN HEART, SIGNAL = 3.9; EXPRESSED IN BONE MARROW, SIGNAL = 4.9; EXPRESSED IN PLACENTA, SIGNAL = 5.9; EST_HUMAN HIT: BG985283.1, EVALUE 2.70e-02
atgagatcctggcccttgcatttaacccctgcagtcacagcgacccaggaggtgttagacacactcttgggatccaggactgtactggctg

SEQ ID NO: 14980 - DNA, 123 bp, Homo sapiens
  MAP TO AB017651.1; EXPRESSED IN BONE MARROW, SIGNAL = 0.47; EXPRESSED IN BRAIN, SIGNAL = 0.46; EXPRESSED IN PLACENTA, SIGNAL = 0.59; EXPRESSED IN ADULT LIVER, SIGNAL = 0.66; EXPRESSED IN FETAL LIVER, SIGNAL = 0.63; EXPRESSED IN LUNG, SIGNAL = 0.58; EST_HUMAN HIT: AA169316.1, EVALUE 6.00e-01; SWISSPROT HIT: P20401, EVALUE 1.20e+00
tgagtccagcctcatgtttgaccaaatcaaccagtcatttgggatatctgaagacttacggatagcaattgatcctgctatggtgctggaagacactggtgatttggttaaaacccatctctc

SEQ ID NO: 14981 - DNA, 121 bp, Homo sapiens
  MAP TO AC018715.3; EXPRESSED IN BONE MARROW, SIGNAL = 1.4; EXPRESSED IN BRAIN, SIGNAL = 1.4; EXPRESSED IN HELA, SIGNAL = 0.79; EXPRESSED IN PLACENTA, SIGNAL = 1.9; EXPRESSED IN ADULT LIVER, SIGNAL = 1.8; EXPRESSED IN LUNG, SIGNAL = 1.7; EXPRESSED IN FETAL LIVER, SIGNAL = 1.6; EXPRESSED IN HEART, SIGNAL = 1.3; NT HIT: AY046055.1, EVALUE 6.00e-03; SWISSPROT HIT: P40360, EVALUE 7.90e+00; EST_HUMAN HIT: BE696635.1, EVALUE 5.90e-01
gagttcaagaaattcaaaaatgatgccctatcactgctgccatcttcccacaatctgcacagatggtattttcaaaccccatctgctatatctccttgtgaccaagcatatactgaaagag

SEQ ID NO: 14982 - DNA, 180 bp, Homo sapiens
  MAP TO AC023120.3; EXPRESSED IN FETAL LIVER, SIGNAL = 0.69; EXPRESSED IN PLACENTA, SIGNAL = 0.88; EXPRESSED IN BONE MARROW, SIGNAL = 0.79; EXPRESSED IN HELA, SIGNAL = 0.54; EXPRESSED IN BRAIN, SIGNAL = 0.8; NT HIT: gi16192073, EVALUE 5.00e-97; SWISSPROT HIT: Q9P2N4, EVALUE 7.00e-07; EST_HUMAN HIT: BF372176.1, EVALUE 8.00e-97
tgttccatcgagtgtgggagcgggacgcaacagagggaggtgatttgtgttagaaagaatgcagacacctttgaagtgttggacccctctgaatgttctttcctggagaaaccccccagccagcaatcctgccacctcaagccttgcggagccaaatggtttagcaccgaatggagcatg

SEQ ID NO: 14983 - DNA, 85 bp, Homo sapiens
  MAP TO AC021010.3; EXPRESSED IN BONE MARROW, SIGNAL = 1.3; EXPRESSED IN ADULT LIVER, SIGNAL =   1; EXPRESSED IN BRAIN, SIGNAL = 1.1; EXPRESSED IN HELA, SIGNAL = 1.2; EXPRESSED IN FETAL LIVER, SIGNAL = 1.1; SWISSPROT HIT: P29001, EVALUE 6.20e+00; EST_HUMAN HIT: AV730237.1, EVALUE 2.00e-09; NT HIT: AJ310932.1, EVALUE 1.00e-09
gtttccagcaatgctgatgctgccggtccaggggccacactttgagaaccactgccctatacttaactatcctgagtttgaggag

SEQ ID NO: 14984 - DNA, 402 bp, Homo sapiens
  MAP TO AJ239319.2; EXPRESSED IN LUNG, SIGNAL = 3.8; EXPRESSED IN PLACENTA, SIGNAL = 3.9; EXPRESSED IN BONE MARROW, SIGNAL = 3.8; EXPRESSED IN HELA, SIGNAL = 2.3; EXPRESSED IN FETAL LIVER, SIGNAL = 3.6; EXPRESSED IN HEART, SIGNAL = 3.2; EXPRESSED IN ADULT LIVER, SIGNAL = 3.4; EXPRESSED IN BRAIN, SIGNAL = 3.6; EST_HUMAN HIT: BI827666.1, EVALUE 1.00e-72; SWISSPROT HIT: P03181, EVALUE 2.20e-01; NT HIT: AE005692.1, EVALUE 3.80e-01
ctccaggtccacccagttttcagcggacccttcagtagtggcgtcttcagggaacgggtgtccctggatgctggacggtggcacgatggcggctgtctcatcaaccaggtaggacgagtagtccacaccgtccccttggtcgtcgaccggggtgctaggccggccttcctggccccagagcaccacccttccctgctctatcaattcgctctcagactcgaagctgaagccctcgggatctgtgaacctgctctcgcccttgctgctgtgtggtgcccccagatcgaggcctcggctgtggccctgtggggctccggggctgactgtgcaggtgccagcctgctcgccaccccccaggtcgaaaccagccctccaaacggacacctcatcgggggagctcat

SEQ ID NO: 14985 - DNA, 336 bp, Homo sapiens
  MAP TO AC015937.3; EXPRESSED IN BONE MARROW, SIGNAL = 3.3; EXPRESSED IN BRAIN, SIGNAL = 3.2; EXPRESSED IN HELA, SIGNAL = 1.9; EXPRESSED IN FETAL LIVER, SIGNAL =   3; EXPRESSED IN LUNG, SIGNAL = 3.1; EXPRESSED IN PLACENTA, SIGNAL = 3.7; EXPRESSED IN ADULT LIVER, SIGNAL =   3; SWISSPROT HIT: Q08708, EVALUE 5.00e-15; EST_HUMAN HIT: BG723031.1, EVALUE 0.00e+00
gttatgaagccctggagggcccagaggaaatcagcgggttcgaaggggacactgtgtccctgcagtgcacctacagggaagagctgagggaccaccggaagtactggtgcaggaagggtgggatcctcttctctcgctgctctggcaccatctatgcagaagaagaaggccaggagacaatgaagggcagggtgtccatccgtgacagccgccaggagctctcgctcattgtgaccctgtggaacctcaccctgcaagacgctggggagtactggtgtggggtcgaaaaacggggccccgatgagtctttactgatctctctgttcgtctttccag

SEQ ID NO: 14986 - DNA, 413 bp, Homo sapiens
  MAP TO AL138895.4; EXPRESSED IN BRAIN, SIGNAL = 2.2; EXPRESSED IN LUNG, SIGNAL = 1.7; EXPRESSED IN HELA, SIGNAL = 2.1; EXPRESSED IN ADULT LIVER, SIGNAL = 3.2; EXPRESSED IN FETAL LIVER, SIGNAL = 1.7; EXPRESSED IN BONE MARROW, SIGNAL = 1.5; EXPRESSED IN HEART, SIGNAL = 4.1; EXPRESSED IN PLACENTA, SIGNAL = 1.6; NT HIT: AJ223271.1, EVALUE 3.90e-01; SWISSPROT HIT: Q44052, EVALUE 2.00e+00; EST_HUMAN HIT: BG981138.1, EVALUE 1.00e-130
cattatcaccaacaccatcactattaccaccaccatcatcaccatttttaccattaccgtcatcatcataaccatcaccgtcatcatcgtaaccatcaccattatcaccatcaccgttatcgtcatcaccatcattatctgcacagccaccatggagacaggcccgtggaaaagcaacaccccttagtgggatttgctcatcatgatgttggggggttatcttaactgcccccactgcaccaaggtcaggaatgagcagtttagggtgggcctggtggaaggggctccctggcccccaggcaagcaggctctcttgcttaagctgtataggtcccggctgtagccgaaaaatcaactccaagtgtggcatggtccccgccgcctccccctctttcaggcccagcctccccaga

SEQ ID NO: 14987 - DNA, 137 bp, Homo sapiens
  MAP TO AC015478.3; EXPRESSED IN BRAIN, SIGNAL = 1.5; EXPRESSED IN PLACENTA, SIGNAL = 2.1; EXPRESSED IN LUNG, SIGNAL = 1.8; EXPRESSED IN ADULT LIVER, SIGNAL = 1.9; EXPRESSED IN FETAL LIVER, SIGNAL = 1.6; EXPRESSED IN BONE MARROW, SIGNAL = 1.9; SWISSPROT HIT: O15255, EVALUE 4.50e+00; EST_HUMAN HIT: AW898320.1, EVALUE 6.80e-01
aggagggctcggtgacactggtgacagccacgggtggcacctgtgccctggtgatggtacctgtcctccttggcatgcagcgttttcagtagttgctggagacctagcacagacatggaggaagcagccagttgcat

SEQ ID NO: 14988 - DNA, 411 bp, Homo sapiens
  MAP TO AC005283.2; EXPRESSED IN LUNG, SIGNAL =   7; EXPRESSED IN BONE MARROW, SIGNAL = 5.6; EXPRESSED IN PLACENTA, SIGNAL =  10; EXPRESSED IN BRAIN, SIGNAL = 5.3; EXPRESSED IN ADULT LIVER, SIGNAL = 7.4; EXPRESSED IN FETAL LIVER, SIGNAL = 8.8; EST_HUMAN HIT: BI015928.1, EVALUE 1.00e-119; NT HIT: gi14741311, EVALUE 0.00e+00; SWISSPROT HIT: Q62786, EVALUE 2.00e-06
ctggctgtttcacagtgacttctgtgcgcccagaaacctcctctgccagcttgtaccaggcgtagttggggctcagcagccactactccacgtggcagtagtagctgccgctgtcgctgacctcggctctctggacggtgaggctgaacaggtcccccgacacatgcctctcaaactggagcctggctctcaggccctcctcctccacgtaagtaccgtattcgaaggcggagttgtgggtggtcttcaggataagcttgccgttggcatctgagggcttgtggacgtaccagagcaccgcaaagtgggagttctggctggtctgagacttgactgagcagttcagctgaatgggcttgttttccaccagggtgagggtcctcttcgatttgctcacctgcagctttgtca

SEQ ID NO: 14989 - DNA, 110 bp, Homo sapiens
  MAP TO AC005283.2; EXPRESSED IN BRAIN, SIGNAL = 1.5; EXPRESSED IN HELA, SIGNAL = 1.1; EXPRESSED IN PLACENTA, SIGNAL = 1.6; EXPRESSED IN BONE MARROW, SIGNAL = 0.99; EXPRESSED IN HEART, SIGNAL = 1.5; EXPRESSED IN LUNG, SIGNAL = 1.3; EXPRESSED IN ADULT LIVER, SIGNAL = 1.2; EST_HUMAN HIT: AI432126.1, EVALUE 9.00e-03; NT HIT: AL163201.2, EVALUE 2.00e-43
aatatctggatcagactatagttgttgtcgtcactgagaatgtaggagtgggaaagagaaaaatcatgcaaagtcttgctgatagcgttcacagtgacagcccgaaagta

SEQ ID NO: 14990 - DNA, 82 bp, Homo sapiens
  MAP TO AL158832.2; EXPRESSED IN BRAIN, SIGNAL = 0.62; EXPRESSED IN FETAL LIVER, SIGNAL = 0.92; EXPRESSED IN LUNG, SIGNAL = 0.77; EXPRESSED IN BONE MARROW, SIGNAL = 1.1; EXPRESSED IN PLACENTA, SIGNAL =   1; EXPRESSED IN ADULT LIVER, SIGNAL = 0.76; SWISSPROT HIT: P00477, EVALUE 8.20e+00; EST_HUMAN HIT: AW969060.1, EVALUE 9.00e-39; NT HIT: gi15920163, EVALUE 2.50e-01
cttttcctgtagtttttgaatgacagcatctttgttcatgcagttggctttgctgcatttccacttcatcaattttttggct

SEQ ID NO: 14991 - DNA, 314 bp, Homo sapiens
  MAP TO AL031283.26; EXPRESSED IN BRAIN, SIGNAL = 0.39; EXPRESSED IN ADULT LIVER, SIGNAL = 0.34; SWISSPROT HIT: P35978, EVALUE 8.70e-02; EST_HUMAN HIT: AI285302.1, EVALUE 0.00e+00; NT HIT: AB067524.1, EVALUE 1.00e-122
tacctggatatgagcaaaaccctcggaagtctcatgaacatcaagaatatgtcaggccacgtgtccatgaaatacctctcccgccaggagagggagaaggtcaaccagcttcgacaaagggacctcgacctggtgtttgataagatcacccaactcaagaaccagctggggaggaaagaggagctgttgagaggatatgaaaaggacgttgaacagctcaggtacctcggcacccccatgtccccacagaaaggcccgggcctcccttctcctggctaaactcaggctagcagcagacctctaggcctgggaca

SEQ ID NO: 14992 - DNA, 261 bp, Homo sapiens
  MAP TO CHR22_146.0; EXPRESSED IN BONE MARROW, SIGNAL = 0.94; EXPRESSED IN BRAIN, SIGNAL = 0.86; EXPRESSED IN LUNG, SIGNAL = 0.89; EXPRESSED IN HELA, SIGNAL =   2; EXPRESSED IN PLACENTA, SIGNAL = 0.8; EXPRESSED IN ADULT LIVER, SIGNAL = 0.83; SWISSPROT HIT: Q00312, EVALUE 3.00e+00; EST_HUMAN HIT: BG477968.1, EVALUE 5.50e+00; NT HIT: gi14743880, EVALUE 3.70e+00
cccagcatcaaattggagagggacgagccgggcactgaccggaaaccgcaggcgtggatactgctgtcttcctgcctcatctcacctaatccccatcacagccctgatcccattctaccacacgaagcaaccgaggagcggaggatgatcgggccggagccccacggccagcgggggatgaatatgaatgagctgggatggaacccacgcgtctactccaaagcccatcggctccttccacgacatcctgttcggcaggca

SEQ ID NO: 14993 - DNA, 132 bp, Homo sapiens
  MAP TO AL158832.2; EXPRESSED IN HEART, SIGNAL = 2.4; EXPRESSED IN PLACENTA, SIGNAL = 2.6; EXPRESSED IN BONE MARROW, SIGNAL = 2.4; EXPRESSED IN LUNG, SIGNAL = 2.4; EXPRESSED IN ADULT LIVER, SIGNAL = 2.3; EXPRESSED IN HELA, SIGNAL = 1.7; EXPRESSED IN BRAIN, SIGNAL = 2.5; NT HIT: gi12963480, EVALUE 4.40e-01; EST_HUMAN HIT: AU128957.1, EVALUE 6.50e-01; SWISSPROT HIT: Q94920, EVALUE 2.60e+00
atgcacaagaatctccaagcagatcaatcagcaccacgagctactccagcagctgtgctaggaaaccaaacagccctggaaggcttctccctggcttttgaccctcaaggaaaattctttcattatctgctg

SEQ ID NO: 14994 - DNA, 174 bp, Homo sapiens
  MAP TO AC004846.2; EXPRESSED IN PLACENTA, SIGNAL = 1.5; EXPRESSED IN LUNG, SIGNAL = 1.1; EXPRESSED IN BONE MARROW, SIGNAL = 0.98; EXPRESSED IN ADULT LIVER, SIGNAL =   1; EXPRESSED IN BRAIN, SIGNAL = 0.91; EXPRESSED IN FETAL LIVER, SIGNAL = 1.2; NT HIT: AF109907.1, EVALUE 2.00e-93; EST_HUMAN HIT: AW376952.1, EVALUE 3.00e-93; SWISSPROT HIT: P49768, EVALUE 9.00e-28
tttcctctgggtcttcaccagcgaggatactgctggaaagttcctggacagcagctcgtgactcaggtgtagagcgatgaggccctagatgactgtccctctgggcttcccattcctcactgaacccgccatcatcattctctgcaacagtgtcttgtgactccctttctgtgc

SEQ ID NO: 14995 - DNA, 192 bp, Homo sapiens
  MAP TO AL121994.3; EXPRESSED IN BONE MARROW, SIGNAL = 0.79; EXPRESSED IN PLACENTA, SIGNAL = 0.77; EXPRESSED IN BRAIN, SIGNAL = 0.65; EXPRESSED IN LUNG, SIGNAL = 0.9; EXPRESSED IN FETAL LIVER, SIGNAL = 0.78; NT HIT: gi14744848, EVALUE 4.00e-05; EST_HUMAN HIT: AA493896.1, EVALUE 4.00e-06; SWISSPROT HIT: Q9UPW6, EVALUE 4.90e-01
tcagatggcgatggatgttctggatccattgaaagacaagttgtagacagtagcatgcagtccaacggttgtaccagtgtcctcagcctctggcactccctctgcctccatgggtacacaggcttccacctctgccccatctttcttcttttgcgttttagcctgtgtttggctctcatggcaagtaggttt

SEQ ID NO: 14996 - DNA, 101 bp, Homo sapiens
  MAP TO AC012360.2; EXPRESSED IN FETAL LIVER, SIGNAL = 0.39; EXPRESSED IN BRAIN, SIGNAL = 0.46; SWISSPROT HIT: P04920, EVALUE 1.20e+00; NT HIT: M89953.1, EVALUE 5.00e+00; EST_HUMAN HIT: BG167870.1, EVALUE 4.70e-01
atggctggcttggccaacaggctgcctgctcaacaggagtctctcttcctgctgccaacagagctcagctttggtccggacacacccggacatccaggcag

SEQ ID NO: 14997 - DNA, 221 bp, Homo sapiens
  MAP TO AL138722.2; EXPRESSED IN LUNG, SIGNAL = 0.73; EXPRESSED IN PLACENTA, SIGNAL = 0.71; EXPRESSED IN BRAIN, SIGNAL = 0.42; SWISSPROT HIT: P47175, EVALUE 8.20e-01; NT HIT: gi13643675, EVALUE 1.00e-119; EST_HUMAN HIT: AA287162.1, EVALUE 1.00e-106
agaacttccctcagtgtgtgctagaaatctctgaccaagaagtgttggaatggtatactgctaaagacttcattgttgggaagtcactcactatccttgggagaactttcttcatttatgattgtgatccatttactcgacggtattacaaaaagaagtttggaatcactgatttaccacgtattgatgtgagcaagcgggaaccacctccagtaaaacag

SEQ ID NO: 14998 - DNA, 134 bp, Homo sapiens
  MAP TO AL133553.2; EXPRESSED IN HELA, SIGNAL =   2; EXPRESSED IN BRAIN, SIGNAL = 0.76; EXPRESSED IN FETAL LIVER, SIGNAL = 1.3; EXPRESSED IN ADULT LIVER, SIGNAL = 2.1; SWISSPROT HIT: P12270, EVALUE 3.00e-04; NT HIT: gi4507658, EVALUE 1.00e-69; EST_HUMAN HIT: W19650.1, EVALUE 2.00e-69
ctgaactggtggtcccaactcctgaggtggggcatgaatggtcagtcttgggggaagtggatgtggtgggcgtctcggtgactgaggtgctcgaggggcctgtctttcagatgctgatgatggctgttgttctc

SEQ ID NO: 14999 - DNA, 92 bp, Homo sapiens
  MAP TO AL139022.1; EXPRESSED IN FETAL LIVER, SIGNAL = 1.7; EXPRESSED IN HEART, SIGNAL =   2; EXPRESSED IN PLACENTA, SIGNAL =   2; EXPRESSED IN LUNG, SIGNAL = 1.9; EXPRESSED IN ADULT LIVER, SIGNAL = 2.1; EXPRESSED IN BONE MARROW, SIGNAL = 1.6; EXPRESSED IN BRAIN, SIGNAL = 1.7; EST_HUMAN HIT: BI754724.1, EVALUE 1.00e-44; SWISSPROT HIT: P49356, EVALUE 6.00e-13; NT HIT: L10414.1, EVALUE 8.00e-45
tctgtagccactatctgggggatgggttcatctagcagttccaagctgtgcaggatccaatagcagagccatgggcggctggcatccagaca

SEQ ID NO: 15000 - DNA, 166 bp, Homo sapiens
  MAP TO CHR22_84.0; EXPRESSED IN HELA, SIGNAL = 1.4; EXPRESSED IN BRAIN, SIGNAL =   1; EXPRESSED IN PLACENTA, SIGNAL = 1.1; EXPRESSED IN ADULT LIVER, SIGNAL = 1.1; EXPRESSED IN FETAL LIVER, SIGNAL = 1.2; EXPRESSED IN BONE MARROW, SIGNAL = 1.1; EXPRESSED IN LUNG, SIGNAL = 0.98; EST_HUMAN HIT: BF669149.1, EVALUE 1.40e-02; SWISSPROT HIT: Q07092, EVALUE 5.10e-01; NT HIT: gi16176135, EVALUE 2.30e+00
cccctgcggagaggcagccacaagggccagtgtgggaggctggagcgggtggacagacgtttgaaggggagccaggaacagcaccctcttgtccctggtgggagggagaggggaaggcaggtggggccgaggggcaggagagccagccaggaggggcagctgccaa

SEQ ID NO: 15001 - DNA, 107 bp, Homo sapiens
  MAP TO AL121993.2; EXPRESSED IN PLACENTA, SIGNAL =   1; EXPRESSED IN BONE MARROW, SIGNAL = 0.88; EXPRESSED IN LUNG, SIGNAL = 1.1; EXPRESSED IN ADULT LIVER, SIGNAL = 1.2; EXPRESSED IN BRAIN, SIGNAL = 0.8; EXPRESSED IN FETAL LIVER, SIGNAL = 0.96; EST_HUMAN HIT: AL516398.1, EVALUE 2.00e-52; SWISSPROT HIT: P47057, EVALUE 6.10e+00; NT HIT: gi14748712, EVALUE 1.00e-53
cctggcatcatattcaaggacaaaaggaggaaagtcaatctgttctggtgatatggcagaaaacagctggtggaggctgtccacatggtggattttgtccttcagtc

SEQ ID NO: 15002 - DNA, 141 bp, Homo sapiens
  MAP TO AL139017.1; EXPRESSED IN LUNG, SIGNAL = 0.93; EXPRESSED IN FETAL LIVER, SIGNAL =   1; EXPRESSED IN PLACENTA, SIGNAL = 1.1; EXPRESSED IN ADULT LIVER, SIGNAL =   1; EXPRESSED IN HELA, SIGNAL = 0.55; EXPRESSED IN BRAIN, SIGNAL = 0.89; NT HIT: gi15282445, EVALUE 3.10e-02; SWISSPROT HIT: P39014, EVALUE 7.70e+00
gagaacatgaccatattcatcttctacacacctacttttttcgacatcaaagagaatggaaagattatcaaaagatcttttccttttactgttattaaaacagtaataaatgaccatgattctcatggaattttaaccatc

SEQ ID NO: 15003 - DNA, 133 bp, Homo sapiens
  MAP TO AC017072.4; EXPRESSED IN HEART, SIGNAL =   7; EXPRESSED IN BONE MARROW, SIGNAL =   6; EXPRESSED IN BRAIN, SIGNAL = 6.1; EXPRESSED IN PLACENTA, SIGNAL =  12; EXPRESSED IN ADULT LIVER, SIGNAL =  12; EXPRESSED IN HELA, SIGNAL =   3; EXPRESSED IN FETAL LIVER, SIGNAL = 6.6; NT HIT: X54486.1, EVALUE 1.00e-04; EST_HUMAN HIT: BF857448.1, EVALUE 7.00e-04; SWISSPROT HIT: Q16587, EVALUE 1.50e+00
ctactggaatgtacattcctagagggcagagctctgtcctgttcactgcagtatctccaacatccagaacaatacctgacacgtagtaggtgtcccatatgtgtttactgaataaatgaatgaatgaaaatcc

SEQ ID NO: 15004 - DNA, 256 bp, Homo sapiens
  MAP TO AL138886.1; EXPRESSED IN BONE MARROW, SIGNAL =   9; EXPRESSED IN LUNG, SIGNAL =  13; EXPRESSED IN BRAIN, SIGNAL = 1.4; EXPRESSED IN ADULT LIVER, SIGNAL =  14; SWISSPROT HIT: P40429, EVALUE 1.00e-24; NT HIT: gi15305232, EVALUE 2.00e-48; EST_HUMAN HIT: BF679011.1, EVALUE 2.00e-42
agctgcttttcttccaatagcagatattggccttcttcctcttctcctgggtggctgtcactgcctggtacttccagccaaactcgtgaaccaggcaccccagataggcaaattttctcacaggcttcagacacacaaccttgggagcagcaggaagcatcatccactttttcttgtcatagggcagtgggatcccattaaacaccttggggtggtcagggacgtcctggcctcgcttggtcttgcgaagcagcat

SEQ ID NO: 15005 - DNA, 220 bp, Homo sapiens
  MAP TO AC011802.4; EXPRESSED IN BONE MARROW, SIGNAL = 2.3; EXPRESSED IN BRAIN, SIGNAL =   2; EXPRESSED IN HEART, SIGNAL = 2.6; EXPRESSED IN HELA, SIGNAL = 1.5; EXPRESSED IN LUNG, SIGNAL =   3; EXPRESSED IN PLACENTA, SIGNAL = 2.9; EXPRESSED IN ADULT LIVER, SIGNAL = 2.3; EXPRESSED IN FETAL LIVER, SIGNAL =   2; SWISSPROT HIT: P37296, EVALUE 2.00e-01; EST_HUMAN HIT: BE082943.1, EVALUE 2.00e-05
aagcacccctgaagatctggatgagatcatgagcacccctgaagatctggatgagatctggagcacccatgaagatctggatgagatcttgagcacccctgaagatctggatgagatcttgagcacccgtgaagatctggatgagatcatgagcacccctgaagatatgggcttccttataattcgcaagcagggcacttcggcaggtccccagcagagc

SEQ ID NO: 15006 - DNA, 132 bp, Homo sapiens
  MAP TO AL133500.2; EXPRESSED IN FETAL LIVER, SIGNAL = 0.72; EXPRESSED IN PLACENTA, SIGNAL = 0.7; EXPRESSED IN BONE MARROW, SIGNAL = 0.71; EXPRESSED IN BRAIN, SIGNAL = 0.79; EXPRESSED IN LUNG, SIGNAL = 0.7; SWISSPROT HIT: Q94517, EVALUE 5.00e-06; NT HIT: AF230097.1, EVALUE 2.00e-68; EST_HUMAN HIT: BG575585.1, EVALUE 2.00e-68
tacttaagacacttgccaattcccactggagtcatgttaaaggagcacatgggatccccagctattgtgtcagctcccagctgtaagaccactgctttgggattaaaggcttggtatacttcctttagtaca

SEQ ID NO: 15007 - DNA, 189 bp, Homo sapiens
  MAP TO AC011985.3; EXPRESSED IN BONE MARROW, SIGNAL = 4.2; EXPRESSED IN BRAIN, SIGNAL =   4; EXPRESSED IN LUNG, SIGNAL = 3.6; EXPRESSED IN HELA, SIGNAL = 1.8; EXPRESSED IN HEART, SIGNAL = 3.1; EXPRESSED IN PLACENTA, SIGNAL = 3.9; EXPRESSED IN FETAL LIVER, SIGNAL = 3.7; SWISSPROT HIT: P50273, EVALUE 3.30e+00; NT HIT: AE001536.1, EVALUE 6.60e-01; EST_HUMAN HIT: BF237733.1, EVALUE 9.80e-01
ggaaaggaaggcatcgtcaggcatgggagtaccaggatggaaatgggagcagtggtgggggctgaagctgagaggttggaccctaggactcaatttgtggactttgttgctttgctgaaggccgtggcagataatgttcccagaccactgaaaatcatccaggcttccagaaaacacaggcccatctaa

SEQ ID NO: 15008 - DNA, 135 bp, Homo sapiens
  MAP TO AC011731.4; EXPRESSED IN HEART, SIGNAL = 1.5; EXPRESSED IN PLACENTA, SIGNAL = 2.3; EXPRESSED IN LUNG, SIGNAL = 2.4; EXPRESSED IN ADULT LIVER, SIGNAL = 2.4; EXPRESSED IN BONE MARROW, SIGNAL = 2.3; EXPRESSED IN BRAIN, SIGNAL = 1.7; SWISSPROT HIT: O83644, EVALUE 5.90e+00; NT HIT: Y18218.1, EVALUE 1.10e-01
atggtggaggtgattgagaggaaggaaggaaggaaggaaggcgagatgagctctgataagttggtggtgactgcggaggtccgtctggttgtgagcaaggtgggaaccacgcagtgtgctgagcagaggtacgag

SEQ ID NO: 15009 - DNA, 106 bp, Homo sapiens
  MAP TO AC018608.4; EXPRESSED IN FETAL LIVER, SIGNAL = 0.69; EXPRESSED IN BONE MARROW, SIGNAL = 0.6; EXPRESSED IN PLACENTA, SIGNAL = 0.58; EXPRESSED IN LUNG, SIGNAL = 0.52; EXPRESSED IN BRAIN, SIGNAL = 0.53; NT HIT: AF038993.1, EVALUE 3.40e-01; SWISSPROT HIT: P45447, EVALUE 1.20e+00
attcacagacaattttcagatggattcagcattatcaagggagatactgtggaattattactatgtgatgatttcagggctgacatcatgttttactcttcgttaa

SEQ ID NO: 15010 - DNA, 102 bp, Homo sapiens
  MAP TO AC022619.3; EXPRESSED IN LUNG, SIGNAL = 0.65; EXPRESSED IN PLACENTA, SIGNAL = 0.82; EXPRESSED IN ADULT LIVER, SIGNAL = 0.8; EXPRESSED IN BONE MARROW, SIGNAL = 0.84; EXPRESSED IN BRAIN, SIGNAL = 0.93; EXPRESSED IN FETAL LIVER, SIGNAL = 0.85; EXPRESSED IN HEART, SIGNAL = 1.2; EST_HUMAN HIT: AA253497.1, EVALUE 4.80e-01
cttggcagcactttggtgttgccaggaagctttaaaaaggagagaggcctgggtcctattcaggggttctagcttcattagtttgagctgaatccgggacat

SEQ ID NO: 15011 - DNA, 131 bp, Homo sapiens
  MAP TO AC025735.1; EXPRESSED IN FETAL LIVER, SIGNAL = 7.2; EXPRESSED IN BONE MARROW, SIGNAL = 7.1; EXPRESSED IN LUNG, SIGNAL = 6.6; EXPRESSED IN HELA, SIGNAL = 2.9; EXPRESSED IN BRAIN, SIGNAL = 6.9; EXPRESSED IN PLACENTA, SIGNAL = 7.2; EXPRESSED IN ADULT LIVER, SIGNAL = 7.1; NT HIT: AE006384.1, EVALUE 4.40e-01; EST_HUMAN HIT: AA359781.1, EVALUE 2.60e+00
atgaagacatcccaggatcctcctggggaaggagatctgaaccatcaggcacctgaagaactgcttggtggcgaggtagtgtcgaggcatttcagtgtggttagtgctacacatagcctctatgcagatgg

SEQ ID NO: 15012 - DNA, 156 bp, Homo sapiens
  MAP TO CHR22_167.0; EXPRESSED IN LUNG, SIGNAL = 1.6; EXPRESSED IN FETAL LIVER, SIGNAL = 1.2; EXPRESSED IN BONE MARROW, SIGNAL = 1.2; EXPRESSED IN HEART, SIGNAL = 1.3; EXPRESSED IN BRAIN, SIGNAL = 1.1; EXPRESSED IN PLACENTA, SIGNAL = 1.5; EXPRESSED IN HELA, SIGNAL = 1.1; EXPRESSED IN ADULT LIVER, SIGNAL = 1.6; NT HIT: gi12738839, EVALUE 5.00e-26; EST_HUMAN HIT: AI921330.1, EVALUE 7.90e-01; SWISSPROT HIT: Q89455, EVALUE 2.00e+00
ccagcagcggctgcctggcggtctcctttgctcgtgcctggctgtggggccggaggtggcacttggcatctcggatcttgaagcgggccttctgtttgatgggggtggtgggggcatctggggaaagccaaaattcccccaggtggtggcctctcc

SEQ ID NO: 15013 - DNA, 145 bp, Homo sapiens
  MAP TO AL133515.2; EXPRESSED IN PLACENTA, SIGNAL = 0.95; EXPRESSED IN FETAL LIVER, SIGNAL = 0.91; EXPRESSED IN LUNG, SIGNAL = 0.98; EXPRESSED IN ADULT LIVER, SIGNAL = 1.1; EXPRESSED IN BRAIN, SIGNAL = 0.7; NT HIT: AF156100.1, EVALUE 3.00e-76; EST_HUMAN HIT: BG115636.1, EVALUE 5.00e-76; SWISSPROT HIT: O75325, EVALUE 9.00e-05
catgcacaaccacagaggtagttttgttattggtcccagcaacgttactggccacacaagtatattcaccaccatcctgaagctgaactctttcaatatggaggctcccatcactgcgcacagtgatgtaaggattttggagcaa

SEQ ID NO: 15014 - DNA, 113 bp, Homo sapiens
  MAP TO AC015930.3; EXPRESSED IN HEART, SIGNAL =  12; EXPRESSED IN LUNG, SIGNAL =  17; EXPRESSED IN FETAL LIVER, SIGNAL =  18; EXPRESSED IN ADULT LIVER, SIGNAL =  17; EXPRESSED IN BONE MARROW, SIGNAL =  18; EXPRESSED IN BRAIN, SIGNAL =  15; EXPRESSED IN HELA, SIGNAL = 8.7; EXPRESSED IN PLACENTA, SIGNAL =  17; NT HIT: gi12175745, EVALUE 9.30e-02; EST_HUMAN HIT: BE970056.1, EVALUE 5.40e-01
atggctactgactacaacatgccaagcctcatgctagatgtatgtgtattggaaatccctgaagatgcaaaagaactaaagaagttgggcatacttatcctcattttactcat

SEQ ID NO: 15015 - DNA, 105 bp, Homo sapiens
  MAP TO AL136303.3; EXPRESSED IN BONE MARROW, SIGNAL = 0.57; EXPRESSED IN LUNG, SIGNAL = 0.64; EXPRESSED IN BRAIN, SIGNAL = 0.65; EXPRESSED IN PLACENTA, SIGNAL = 0.73; EXPRESSED IN HELA, SIGNAL = 0.51; EXPRESSED IN FETAL LIVER, SIGNAL = 0.61; NT HIT: AJ005931.1, EVALUE 2.20e-02; SWISSPROT HIT: Q10283, EVALUE 8.00e+00
ctaatctataaccatgatatgaaagaaaatgtcaaaattaaattgtaggtcatacaccgggatattaagaagaatttctgcactgactacatagacttcatcagc

SEQ ID NO: 15016 - DNA, 137 bp, Homo sapiens
  MAP TO CHR22_169.0; EXPRESSED IN FETAL LIVER, SIGNAL = 0.68; EXPRESSED IN BONE MARROW, SIGNAL = 0.74; EXPRESSED IN PLACENTA, SIGNAL = 0.82; EXPRESSED IN ADULT LIVER, SIGNAL = 0.79; EXPRESSED IN BRAIN, SIGNAL = 0.58; EXPRESSED IN HELA, SIGNAL = 0.9; EXPRESSED IN LUNG, SIGNAL = 0.69; SWISSPROT HIT: O15371, EVALUE 1.00e-20; NT HIT: gi14778605, EVALUE 2.00e-71; EST_HUMAN HIT: BI824878.1, EVALUE 3.00e-71
ctgggcaaatctcattcgattccgctggtaggccgtcttctgtgtgcgcgctgtatccaccagctggaagctactttcatcctcctcatggaaataagcatattgacttccaccaccaaactgagaggagtacttat

SEQ ID NO: 15017 - DNA, 128 bp, Homo sapiens
  MAP TO CHR22_185_1.0; EXPRESSED IN BRAIN, SIGNAL = 1.1; EXPRESSED IN HELA, SIGNAL = 0.53; EXPRESSED IN FETAL LIVER, SIGNAL = 1.3; EXPRESSED IN PLACENTA, SIGNAL = 1.5; EXPRESSED IN ADULT LIVER, SIGNAL = 1.8; SWISSPROT HIT: O35621, EVALUE 6.00e+00; NT HIT: AF100154.1, EVALUE 4.30e-01; EST_HUMAN HIT: BF573531.1, EVALUE 2.50e+00
gtgcatccctggaacagtcagaaccttcatctaagcaggtagatagagccaattatgccatggcagtggatgggaagtttttggaaaagggactagagagaggaaggggaggtgatgttggtcttgat

SEQ ID NO: 15018 - DNA, 164 bp, Homo sapiens
  MAP TO CHR22_171.0; EXPRESSED IN PLACENTA, SIGNAL = 0.9; EXPRESSED IN BONE MARROW, SIGNAL = 0.86; EXPRESSED IN LUNG, SIGNAL = 0.91; EXPRESSED IN ADULT LIVER, SIGNAL = 1.6; EXPRESSED IN HELA, SIGNAL =   1; EXPRESSED IN BRAIN, SIGNAL = 0.75; EST_HUMAN HIT: BG768098.1, EVALUE 2.00e-87; SWISSPROT HIT: Q06846, EVALUE 2.60e+00; NT HIT: gi14779706, EVALUE 2.00e-87
gtttggagccccccatgcttcagagagttgctcaaagaatggcccagagcgtggaggccaggatgggaaggcgagcttggaagcacacagagatgcacctggggcaggtgccccaccggcccccgggaagaaggaagcgccccctgtggagggtgactcagaag

SEQ ID NO: 15019 - DNA, 255 bp, Homo sapiens
  MAP TO AL031283.26; EXPRESSED IN FETAL LIVER, SIGNAL = 1.6; EXPRESSED IN BONE MARROW, SIGNAL = 1.5; EXPRESSED IN BRAIN, SIGNAL = 1.3; EXPRESSED IN LUNG, SIGNAL = 2.1; EXPRESSED IN HELA, SIGNAL = 0.59; EXPRESSED IN PLACENTA, SIGNAL = 1.6; EXPRESSED IN ADULT LIVER, SIGNAL = 1.5; EST_HUMAN HIT: BE888078.1, EVALUE 6.00e-83; SWISSPROT HIT: P42567, EVALUE 4.20e-02; NT HIT: gi16168403, EVALUE 1.00e-112
atcatggtggaagagcggctaatcctgcagcagaagatggtaaaggccctccaggatgagcaggaatcacagagacacgggtttgaagaagagatcatggaatataaggagcaaatcaaacagcacgcccagacaattgtgagcctcgaagagaaactccagaaagtcactcagcaccataaaaaaatagaaggcgagattgcaacattgaaggacaatgacccaggtaagtccgaagggaggccaaggaaatct

SEQ ID NO: 15020 - DNA, 247 bp, Homo sapiens
  MAP TO AL139227.1; EXPRESSED IN LUNG, SIGNAL = 2.1; EXPRESSED IN BONE MARROW, SIGNAL = 1.3; EXPRESSED IN HEART, SIGNAL = 1.6; EXPRESSED IN PLACENTA, SIGNAL = 3.4; EXPRESSED IN BRAIN, SIGNAL = 1.6; EXPRESSED IN FETAL LIVER, SIGNAL = 1.9; EST_HUMAN HIT: BG261110.1, EVALUE 0.00e+00; SWISSPROT HIT: P22223, EVALUE 2.00e-42; NT HIT: gi15316582, EVALUE 0.00e+00
agtacctgatcttttgattctccttgtcagggtcttctgcagtgtagacacacacaggctccccagtggggatgccctcctggacctcaacgactttggagggtgggacaaacacaggtgcctcattcacatcctccacgtggaccactatggtggctgtggaggttgggagcttcagcacaaaaggggcctcgttggtcacttcaacgtacagggtgtgctggtttttggcctcaaaatccaaacc

SEQ ID NO: 15021 - DNA, 75 bp, Homo sapiens
  MAP TO AL135926.3; EXPRESSED IN BRAIN, SIGNAL = 1.1; EXPRESSED IN FETAL LIVER, SIGNAL = 0.99; EXPRESSED IN LUNG, SIGNAL = 0.97; EXPRESSED IN PLACENTA, SIGNAL = 1.1; EXPRESSED IN BONE MARROW, SIGNAL = 0.86
attaaactagccaaaaatgaggtggttgatctgacattagcaaaaattgatatccagcatggtctgagaatcata

SEQ ID NO: 15022 - DNA, 241 bp, Homo sapiens
  MAP TO CHR22_171.0; EXPRESSED IN BONE MARROW, SIGNAL = 1.8; EXPRESSED IN BRAIN, SIGNAL = 1.4; EXPRESSED IN HEART, SIGNAL = 1.9; EXPRESSED IN FETAL LIVER, SIGNAL = 1.8; EXPRESSED IN PLACENTA, SIGNAL = 2.5; EXPRESSED IN ADULT LIVER, SIGNAL = 2.4; EXPRESSED IN LUNG, SIGNAL =   2; NT HIT: gi14779725, EVALUE 0.00e+00; EST_HUMAN HIT: BG769032.1, EVALUE 0.00e+00
ggtaggcggcccaaagcagcaagtagatgacagggtggcgcagtgggctcagcagcagggctcccagggccactagtgcacccagcaggctcagcagctccaggccctgggccgtgtccagccccagtctcggcgcttcccacagcagcgtcggggtctcccacagctgctgccagcgccccttgccctgaggccgcagcgtcctccttgcaggtaggatgccctcggggccatacaggcc

SEQ ID NO: 15023 - DNA, 52 bp, Homo sapiens
  MAP TO CHR22_112.0; EXPRESSED IN PLACENTA, SIGNAL =   7; EXPRESSED IN FETAL LIVER, SIGNAL = 6.2; EXPRESSED IN ADULT LIVER, SIGNAL = 8.2; EXPRESSED IN BONE MARROW, SIGNAL =   7; EXPRESSED IN BRAIN, SIGNAL =   5; EXPRESSED IN HELA, SIGNAL = 1.9; EXPRESSED IN HEART, SIGNAL = 5.7; NT HIT: Y17293.1, EVALUE 4.00e-11; EST_HUMAN HIT: AA328533.1, EVALUE 1.00e-08
cagacactgaatctgtcggcaccttgatcttggatttcccagcttccagaag

SEQ ID NO: 15024 - DNA, 166 bp, Homo sapiens
  MAP TO AL133543.2; EXPRESSED IN BRAIN, SIGNAL = 0.77; EXPRESSED IN HELA, SIGNAL = 1.6; EXPRESSED IN PLACENTA, SIGNAL = 1.1; EXPRESSED IN ADULT LIVER, SIGNAL = 1.6; EXPRESSED IN FETAL LIVER, SIGNAL = 0.88; EXPRESSED IN LUNG, SIGNAL = 0.97; EXPRESSED IN BONE MARROW, SIGNAL = 0.82; NT HIT: gi13385873, EVALUE 3.00e-24; EST_HUMAN HIT: BF516050.1, EVALUE 9.00e-38
ggctgcagctatggagggcgagcctccacctgtggaggagcggcggcggctgcaggaggagctgaacgagttcgtggagagcggctgccggacgttggaggaggtgaccgcgtccctgggctgggacctagatagtctggatcccggggaagaggaggcggcggag

SEQ ID NO: 15025 - DNA, 210 bp, Homo sapiens
  MAP TO CHR22_37.0; EXPRESSED IN FETAL LIVER, SIGNAL = 3.1; EXPRESSED IN BRAIN, SIGNAL = 2.5; EXPRESSED IN ADULT LIVER, SIGNAL = 4.1; NT HIT: gi14778462, EVALUE 1.00e-115; SWISSPROT HIT: Q9Y3I1, EVALUE 1.00e-22; EST_HUMAN HIT: AA176601.1, EVALUE 1.00e-114
gaattatcgggggtgaatatgaccaaagaccaacacttccctatgttggagacccaatcagttcactcattcctggtcctggggagacgcccagccagtttcctccactgagaccacgctttgatccagttggcccacttccaggacctaaccccatcttgccagggcgaggcggccccaatgacagatttccctttagacccagcaggg

SEQ ID NO: 15026 - DNA, 103 bp, Homo sapiens
  MAP TO CHR22_229.0; EXPRESSED IN HEART, SIGNAL = 1.2; EXPRESSED IN HELA, SIGNAL = 3.7; EXPRESSED IN BRAIN, SIGNAL = 1.7; EXPRESSED IN LUNG, SIGNAL = 0.95; EXPRESSED IN ADULT LIVER, SIGNAL = 0.99; EXPRESSED IN FETAL LIVER, SIGNAL = 1.4; EXPRESSED IN BONE MARROW, SIGNAL = 1.8; NT HIT: AF325804.1, EVALUE 1.30e+00; SWISSPROT HIT: Q03518, EVALUE 4.70e+00
tgacccagctgctgtatgcgaccctgggggggaaagaactctgtgtctttggaggtaaccgaagacagaataaaggcttggaggtggtagtggatgctgccag

SEQ ID NO: 15027 - DNA, 170 bp, Homo sapiens
  MAP TO AL135909.3; EXPRESSED IN PLACENTA, SIGNAL = 0.73; EXPRESSED IN LUNG, SIGNAL = 0.7; EXPRESSED IN BONE MARROW, SIGNAL = 0.54; EXPRESSED IN BRAIN, SIGNAL = 0.45; EXPRESSED IN FETAL LIVER, SIGNAL = 0.61; SWISSPROT HIT: Q9QXS1, EVALUE 3.30e+00; EST_HUMAN HIT: AA593411.1, EVALUE 5.60e-02; NT HIT: AL163285.2, EVALUE 2.00e-03
tattttaaagatgtcactctattgtcttctggctcggaaatttctgataagaagtttcctttactttttatatttgttccactgtttgtaatatgtcttttaacctctgactaccctcagtattttccctttatctttggttttcacgcatttcactatgatgtgtctag

SEQ ID NO: 15028 - DNA, 132 bp, Homo sapiens
  MAP TO CHR22_149.0; EXPRESSED IN BONE MARROW, SIGNAL = 0.62; EXPRESSED IN BRAIN, SIGNAL = 0.43; EXPRESSED IN LUNG, SIGNAL = 0.52; EXPRESSED IN PLACENTA, SIGNAL = 0.53; EXPRESSED IN ADULT LIVER, SIGNAL = 0.57; EXPRESSED IN HELA, SIGNAL = 0.58; EXPRESSED IN FETAL LIVER, SIGNAL = 0.59; NT HIT: Y18678.1, EVALUE 4.40e-01; SWISSPROT HIT: P16144, EVALUE 1.20e+00; EST_HUMAN HIT: AW843795.1, EVALUE 5.00e-54
tcacttagcatcgagtgcacgccaggcagcactgcaggtatgggggatgcagaagtgaacaacaaagactcttttcttcacccagtctacatcctggtgctgacgatgagggtagacaatgtgcaagaagag

SEQ ID NO: 15029 - DNA, 240 bp, Homo sapiens
  MAP TO CHR22_152.0; EXPRESSED IN PLACENTA, SIGNAL = 1.2; EXPRESSED IN LUNG, SIGNAL = 1.2; EXPRESSED IN BRAIN, SIGNAL = 0.4; EXPRESSED IN ADULT LIVER, SIGNAL = 0.69; EXPRESSED IN HELA, SIGNAL = 1.2; EXPRESSED IN FETAL LIVER, SIGNAL = 0.48; NT HIT: gi14861872, EVALUE 2.00e-94; SWISSPROT HIT: P05805, EVALUE 1.20e-01; EST_HUMAN HIT: BG007849.1, EVALUE 3.00e-75
tggaagaggtccagtataatcaacctgccaccaggtagctggctgatcaccccgaggcatggtgccacatcgagggctcagtgttggtctctgctactggcgaattgggtactcagcagtggccatatccaggtcagccttggtgagtggaagtccatgttgctgagcccatgtgtaacctccatccctgccaccatggccactttgttcatgggtccattgggcaatgacaggggtggc

SEQ ID NO: 15030 - DNA, 191 bp, Homo sapiens
  MAP TO CHR22_41.0; EXPRESSED IN BONE MARROW, SIGNAL = 0.72; EXPRESSED IN LUNG, SIGNAL =   1; EXPRESSED IN ADULT LIVER, SIGNAL = 0.97; EXPRESSED IN HELA, SIGNAL = 0.87; EXPRESSED IN BRAIN, SIGNAL = 0.82; EXPRESSED IN FETAL LIVER, SIGNAL = 0.8; NT HIT: AF257772.1, EVALUE 6.70e-01; EST_HUMAN HIT: R41937.1, EVALUE 2.50e-01; SWISSPROT HIT: Q53317, EVALUE 1.50e+00
cttaagttggaaatttgtgtctggctggaacttgggagaagagctgtagatggagatccagatctgggagttgccgcagacactgttggtgtcctcacccatatccctgcagccttgccttcgtagggcttgctgggatgacttccaacagtctaagggctttgctgttgtctgtggcctattctgcttac

SEQ ID NO: 15031 - DNA, 186 bp, Homo sapiens
  MAP TO CHR22_233.0; EXPRESSED IN HELA, SIGNAL = 2.9; EXPRESSED IN BRAIN, SIGNAL = 1.9; EXPRESSED IN BONE MARROW, SIGNAL = 1.5; EXPRESSED IN LUNG, SIGNAL = 1.9; EXPRESSED IN ADULT LIVER, SIGNAL = 2.4; EST_HUMAN HIT: BE835556.1, EVALUE 1.60e-02; SWISSPROT HIT: P34682, EVALUE 6.50e-01
ctgctgccttccgagggccaggcttctgcaggctgtggacagccaccccagggctgtggccgggtgtgttgtgggtctccagcttctcccagacctcacgactctggaagctgaggtgagccctgaagaggcaacagcagaagcccacagcagaggagacggcagcttgggccaggacggtggccc

SEQ ID NO: 15032 - DNA, 226 bp, Homo sapiens
  MAP TO CHR22_183_2.0; EXPRESSED IN FETAL LIVER, SIGNAL = 0.82; EXPRESSED IN LUNG, SIGNAL = 0.84; EXPRESSED IN BONE MARROW, SIGNAL = 0.88; EXPRESSED IN PLACENTA, SIGNAL = 0.86; EXPRESSED IN HELA, SIGNAL = 0.7; EXPRESSED IN BRAIN, SIGNAL = 0.73; NT HIT: U63421.1, EVALUE 8.10e-01; EST_HUMAN HIT: BG661347.1, EVALUE 1.20e+00; SWISSPROT HIT: Q64176, EVALUE 1.90e-02
tcagtagacaacatggatctccttggccatcaacctcgctgggctgtcgtcctgaagcggggtgctcagagactcacctctatgatactgagctgtgatcagcttagggatcacaaagaacacatctccaagcaagtccagaagactgtctcggatttcagtcagggagtgcttgtcatggaagtattcaccagccacaaggtgcaaataattgggcaggatgtgc

SEQ ID NO: 15033 - DNA, 90 bp, Homo sapiens
  MAP TO AC020588.4; EXPRESSED IN BRAIN, SIGNAL = 0.91; EXPRESSED IN HELA, SIGNAL = 0.53; EXPRESSED IN PLACENTA, SIGNAL = 1.1; EXPRESSED IN FETAL LIVER, SIGNAL = 0.78; EXPRESSED IN LUNG, SIGNAL = 1.8; EXPRESSED IN ADULT LIVER, SIGNAL = 0.99; EXPRESSED IN BONE MARROW, SIGNAL = 0.8; SWISSPROT HIT: Q9RZA4, EVALUE 8.10e+00; EST_HUMAN HIT: BG258951.1, EVALUE 4.10e-01; NT HIT: gi14771835, EVALUE 4.40e+00
gcggagaagatgggcagcctgactcaccgcaatccggcagaaaaagaggctacaacgcggagcgtaccagcgctcaggtggtcaaaatag

SEQ ID NO: 15034 - DNA, 169 bp, Homo sapiens
  MAP TO CHR22_168.0; EXPRESSED IN PLACENTA, SIGNAL =   2; EXPRESSED IN ADULT LIVER, SIGNAL = 1.8; EXPRESSED IN BONE MARROW, SIGNAL = 1.6; EXPRESSED IN BRAIN, SIGNAL = 1.3; SWISSPROT HIT: Q03519, EVALUE 5.00e-01; NT HIT: gi14777617, EVALUE 2.00e-90
aagcgatgaaagtggaaaagagggtgagcaggtggcccacacatgtgcctccagtgctgcggcccctccggggaccatcagccaggccccggggagggagccagccacagtgtgtccggctcttctctgaagggaagagagccttgaatagactgaagcgaagacggtt

SEQ ID NO: 15035 - DNA, 116 bp, Homo sapiens
  MAP TO CHR22_170.0; EXPRESSED IN HELA, SIGNAL = 0.97; EXPRESSED IN BRAIN, SIGNAL = 1.1; EXPRESSED IN LUNG, SIGNAL = 0.93; EXPRESSED IN PLACENTA, SIGNAL =   1; EXPRESSED IN BONE MARROW, SIGNAL = 0.81; NT HIT: M12197.1, EVALUE 1.50e+00; EST_HUMAN HIT: BG911964.1, EVALUE 5.60e-01
tggctcctcgtcgtcttcggggcttcttcgtctgggtcacagcctctccaacactcacgttgccatcccagctccctcttgcttgcctttgtctggatggctttgccacatgttcc

SEQ ID NO: 15036 - DNA, 180 bp, Homo sapiens
  MAP TO CHR22_184_2.0; EXPRESSED IN BONE MARROW, SIGNAL = 2.2; EXPRESSED IN BRAIN, SIGNAL = 2.3; EXPRESSED IN PLACENTA, SIGNAL =   4; EXPRESSED IN ADULT LIVER, SIGNAL = 3.7; EXPRESSED IN FETAL LIVER, SIGNAL =   2; EXPRESSED IN LUNG, SIGNAL = 3.4; NT HIT: AL163252.2, EVALUE 5.00e-20; SWISSPROT HIT: P51852, EVALUE 1.10e+00; EST_HUMAN HIT: BI055376.1, EVALUE 2.00e-20
ctccttcaggatggtagatccactgacagcttgcaccatgcccctggaaaagtggcagacactcaatgccagcccatgaaagcagtcagggtgggcatcaggggtgtagatgaaccccgcaaagccacaggggtggagctgtccaaggctgtgggaacccacctcttgcatcagcatgac

SEQ ID NO: 15037 - DNA, 308 bp, Homo sapiens
  MAP TO AC012661.4; EXPRESSED IN BONE MARROW, SIGNAL = 0.62; EXPRESSED IN BRAIN, SIGNAL = 0.64; EXPRESSED IN LUNG, SIGNAL = 0.7; NT HIT: gi14724574, EVALUE 0.00e+00; EST_HUMAN HIT: BG435830.1, EVALUE 3.00e-14; SWISSPROT HIT: O43830, EVALUE 2.00e-56
ggtgaaacgttttcccacattcattgcattcatagggtttttcccctgtgtgagttctctgatgtaacctgaggtttgacttattgataaagggttttccacactcattacattcatacggtttttcccctgtgtgtgttctctgatggacagtaagccttgacttatggctaaatgcttcttcacaatggtcacatgcatagggcttttcccctgtgtgagttctatgatgtattgtgaggtatgacttctggctaaaggtttttccacattcactacactgatagggcttttcccctgagtgagtt

SEQ ID NO: 15038 - DNA, 171 bp, Homo sapiens
  MAP TO CHR22_140.0; EXPRESSED IN BONE MARROW, SIGNAL = 0.72; EXPRESSED IN HELA, SIGNAL = 6.5; EXPRESSED IN BRAIN, SIGNAL = 0.52; EXPRESSED IN LUNG, SIGNAL = 0.6; EXPRESSED IN FETAL LIVER, SIGNAL = 0.61; EXPRESSED IN PLACENTA, SIGNAL = 0.81; EXPRESSED IN ADULT LIVER, SIGNAL = 0.66; NT HIT: AJ133811.1, EVALUE 2.30e+00; EST_HUMAN HIT: BF874631.1, EVALUE 2.00e-60; SWISSPROT HIT: P18881, EVALUE 1.90e+00
ctctctggcttttcttgcaccacggcactccaaaacctcctccacccatgctggaggcctctctcctggctgcccatggtcactgcacagccctgtgcacagagcctgtctctggtgctgggctggagggagttgaagtttttgaagcttccagtactggaaatgttggtg

SEQ ID NO: 15039 - DNA, 302 bp, Homo sapiens
  MAP TO AC016692.4; EXPRESSED IN LUNG, SIGNAL = 8.5; EXPRESSED IN ADULT LIVER, SIGNAL = 8.2; EXPRESSED IN PLACENTA, SIGNAL = 9.4; EXPRESSED IN BRAIN, SIGNAL = 7.7; EXPRESSED IN HELA, SIGNAL = 4.6; EXPRESSED IN FETAL LIVER, SIGNAL = 6.6; EXPRESSED IN BONE MARROW, SIGNAL = 6.4; EXPRESSED IN HEART, SIGNAL = 7.1; NT HIT: gi16157429, EVALUE 7.00e-79; EST_HUMAN HIT: AW957185.1, EVALUE 3.00e-76; SWISSPROT HIT: Q12774, EVALUE 7.10e-01
ggctcctgtatcaggaataccgagataaatcgactctccaagaaatcgaaaccaggaggcaacaggatgcagaaatagaagacaataccaatgggtccccggccagtgaggacaccccggaggaggaagaagaagaggaggaggaggaggagccggccagcccaccagagaggaagactctgccccagatctgcctgctcagtaacccccactcaaggttcaacctctggcaggatcttcccgagatccggagcagcggggtgcttgagatcctacagcccgaggagattaagctgcaggag

SEQ ID NO: 15040 - DNA, 151 bp, Homo sapiens
  MAP TO CHR22_78.0; EXPRESSED IN FETAL LIVER, SIGNAL = 0.86; EXPRESSED IN BONE MARROW, SIGNAL = 0.83; EXPRESSED IN BRAIN, SIGNAL = 0.69; EXPRESSED IN HELA, SIGNAL = 2.7; EXPRESSED IN LUNG, SIGNAL = 0.78; EXPRESSED IN ADULT LIVER, SIGNAL = 0.86; NT HIT: gi6679129, EVALUE 1.30e-01; SWISSPROT HIT: P70459, EVALUE 5.90e-02
tagccttgccagcgccaaaggcctccgtgtgactgtcagcggctattacccttgtcacctcgaacgctgccggtccccagctctgcaaaggcccagcaaagctctcgcccccgtctccagccctctccaaatgctcctgagcagcggcatt

SEQ ID NO: 15041 - DNA, 129 bp, Homo sapiens
  MAP TO AC015819.4; EXPRESSED IN BRAIN, SIGNAL = 0.76; EXPRESSED IN PLACENTA, SIGNAL = 1.1; EXPRESSED IN LUNG, SIGNAL = 0.93; EXPRESSED IN ADULT LIVER, SIGNAL = 0.94; EXPRESSED IN HELA, SIGNAL = 0.52; EXPRESSED IN FETAL LIVER, SIGNAL = 0.67; SWISSPROT HIT: P74311, EVALUE 7.80e+00
ctcaggtgagtgctgcaaatgttcctgccgctgctcactgcaactgaagttaccagaggaaaaaaaaaagtcatcacatcttttttaaaagtacctgggccatccaaatcattcctgccaaaaactatt

SEQ ID NO: 15042 - DNA, 181 bp, Homo sapiens
  MAP TO AC015896.4; EXPRESSED IN HELA, SIGNAL = 0.76; EXPRESSED IN BRAIN, SIGNAL = 0.64; EXPRESSED IN LUNG, SIGNAL = 0.56; EXPRESSED IN FETAL LIVER, SIGNAL = 0.65; EXPRESSED IN BONE MARROW, SIGNAL = 0.59; SWISSPROT HIT: Q07864, EVALUE 1.10e+00
ccaaggagcagagtgaagtgagacccaaaccagaaagtaaacctgaaatgcaggcagagagggccaatccccacatgcacagagcagaagtgcagaaaaggggggcagaggacacaactcttgtgagcaccctggacagctgttttgcatttagccatcggcaacgccatgaggctgagat

SEQ ID NO: 15043 - DNA, 145 bp, Homo sapiens
  MAP TO AC016687.2; EXPRESSED IN HELA, SIGNAL = 0.91; EXPRESSED IN FETAL LIVER, SIGNAL = 1.6; EXPRESSED IN HEART, SIGNAL = 1.8; EXPRESSED IN PLACENTA, SIGNAL = 2.2; EXPRESSED IN BRAIN, SIGNAL = 1.9; EXPRESSED IN LUNG, SIGNAL =   2; EXPRESSED IN ADULT LIVER, SIGNAL = 1.9; NT HIT: AF003530.2, EVALUE 1.00e-20; EST_HUMAN HIT: BF732379.1, EVALUE 2.00e-26; SWISSPROT HIT: P44677, EVALUE 5.90e+00
accaaactggctggaatgacagacatagaactcagaatatggacaggaacaaagatcgtcgagattcaggaggatggcaaaaccctatccaaggagaataagaatcacaataaagtgacacaagagctggaggccaatatagcag

SEQ ID NO: 15044 - DNA, 138 bp, Homo sapiens
  MAP TO AL138842.2; EXPRESSED IN BONE MARROW, SIGNAL = 2.3; EXPRESSED IN BRAIN, SIGNAL = 2.1; EXPRESSED IN HELA, SIGNAL = 1.8; EXPRESSED IN HEART, SIGNAL = 1.6; EXPRESSED IN FETAL LIVER, SIGNAL = 4.2; EXPRESSED IN LUNG, SIGNAL = 2.9; NT HIT: M26850.1, EVALUE 7.00e-34; EST_HUMAN HIT: BG777785.1, EVALUE 8.00e-16
gcctactcagtctaaaaagctgaagagaaaaactgacactgcgttggccgggaatcgaacccgggtcaactgcttggaaggcagctatgctcaccactataccaccaacgcatctgaaatacacttgattcctttaga

SEQ ID NO: 15045 - DNA, 207 bp, Homo sapiens
  MAP TO AC016763.5; EXPRESSED IN LUNG, SIGNAL = 0.46; EXPRESSED IN BRAIN, SIGNAL = 0.37; NT HIT: AF286904.1, EVALUE 1.00e-113; EST_HUMAN HIT: AU128276.1, EVALUE 1.00e-107; SWISSPROT HIT: P43572, EVALUE 3.00e-04
cttgtaacacttcaagaagcaaaactgctgctaaacgaagatgattaccttattaaagctgtatatgactactgggtgagaaaacgtaaaaactgcagggggccatccctcattcctcagataaaacaagagaaaagagatggctctaccaacaatgacccttatgttgcctttcggagaagaacagagaaaatgcaaactcgaaag

SEQ ID NO: 15046 - DNA, 139 bp, Homo sapiens
  MAP TO AC021011.2; EXPRESSED IN FETAL LIVER, SIGNAL = 0.77; EXPRESSED IN PLACENTA, SIGNAL = 1.1; EXPRESSED IN ADULT LIVER, SIGNAL = 0.97; EXPRESSED IN BONE MARROW, SIGNAL = 0.85; EXPRESSED IN LUNG, SIGNAL = 0.99; EXPRESSED IN BRAIN, SIGNAL = 0.98; NT HIT: AB011118.1, EVALUE 1.90e+00
ctactctcatcttgtaaagaaagcgaaggctaacattgaatttccaaggttttggaatgacctgtgtcagaactcttctggcatgaaatattatgcattattcgtaatgcccaaaaccttcaaaattcaacaagcatga

SEQ ID NO: 15047 - DNA, 162 bp, Homo sapiens
  MAP TO AF235095.1; EXPRESSED IN HELA, SIGNAL = 0.78; EXPRESSED IN PLACENTA, SIGNAL = 0.8; EXPRESSED IN FETAL LIVER, SIGNAL =   1; EXPRESSED IN ADULT LIVER, SIGNAL = 0.93; EXPRESSED IN BONE MARROW, SIGNAL = 0.72; EXPRESSED IN BRAIN, SIGNAL = 0.56; NT HIT: AB029316.1, EVALUE 3.00e-86; EST_HUMAN HIT: BI869381.1, EVALUE 4.00e-86; SWISSPROT HIT: Q9NV58, EVALUE 9.00e-26
gtatcggtgttcctattatgttagcttatgtctatggcgtagttccaatttctctttgtcgaagcggaggttgtggagtctcagcaggcaatggaaaaggagttaggattgaatttgatgatgaaaatgatataaatgttggtggaactaacacagctgtag

SEQ ID NO: 15048 - DNA, 81 bp, Homo sapiens
  MAP TO AC013816.3; EXPRESSED IN FETAL LIVER, SIGNAL = 0.56; EXPRESSED IN PLACENTA, SIGNAL = 0.51; EXPRESSED IN BONE MARROW, SIGNAL = 0.43; EXPRESSED IN LUNG, SIGNAL = 0.46; EXPRESSED IN ADULT LIVER, SIGNAL = 0.36; EXPRESSED IN BRAIN, SIGNAL = 0.56; EST_HUMAN HIT: AA135509.1, EVALUE 1.40e+00
gggagagaagaaggagggggaaagcactgagaaacaaggaaaaggggatcattactcaaaatgtcaagaacccgaaaagag

SEQ ID NO: 15049 - DNA, 160 bp, Homo sapiens
  MAP TO AC016078.3; EXPRESSED IN BONE MARROW, SIGNAL = 0.57; EXPRESSED IN BRAIN, SIGNAL = 0.58; EXPRESSED IN FETAL LIVER, SIGNAL = 0.71; EXPRESSED IN PLACENTA, SIGNAL = 0.54; EXPRESSED IN ADULT LIVER, SIGNAL = 0.71; SWISSPROT HIT: Q9Y490, EVALUE 8.00e-14; NT HIT: gi14752597, EVALUE 1.00e-11; EST_HUMAN HIT: AA548965.1, EVALUE 4.00e-15
atgtccaatgaggtccaagttacagctgggcttgaaatccaccaaactcacaaattttctcaaaggctaaagggtgggagccattcagatgtcctccctgagcctgaatatacagcaaatgcagctgcacaaggtccctggaatctacaaagtgatcaga

SEQ ID NO: 15050 - DNA, 171 bp, Homo sapiens
  MAP TO CHR21_64.0; EXPRESSED IN LUNG, SIGNAL = 0.87; EXPRESSED IN PLACENTA, SIGNAL = 0.93; EXPRESSED IN FETAL LIVER, SIGNAL = 1.8; EXPRESSED IN BONE MARROW, SIGNAL = 1.9; EXPRESSED IN HELA, SIGNAL = 3.5; EXPRESSED IN BRAIN, SIGNAL = 1.7; EXPRESSED IN HEART, SIGNAL = 1.4; SWISSPROT HIT: O64235, EVALUE 6.60e-01
tgctgggaggcggccgggcagcgtcagaggcagggcctgccagcctgctgcaggccagccaggcctgccaagagtctgccccgggcaaccccgatgatgcatcctgcgagtctgtgcccatgccgggcagacgaaggaatgtggcccagatggctgccctgcctctgccag

SEQ ID NO: 15051 - DNA, 80 bp, Homo sapiens
  MAP TO AL138752.2; EXPRESSED IN BONE MARROW, SIGNAL = 3.9; EXPRESSED IN BRAIN, SIGNAL = 3.1; EXPRESSED IN PLACENTA, SIGNAL = 3.6; EXPRESSED IN LUNG, SIGNAL =   4; EXPRESSED IN ADULT LIVER, SIGNAL = 4.2; EXPRESSED IN FETAL LIVER, SIGNAL = 4.4; NT HIT: gi9635165, EVALUE 2.40e-01; EST_HUMAN HIT: BI051599.1, EVALUE 1.00e-37
gagcagctgcagaggacagtcttcattaagctcaagcatatgacaaaggggcagaacagaaaagaaaaacagcttattag

SEQ ID NO: 15052 - DNA, 97 bp, Homo sapiens
  MAP TO AC024195.2; EXPRESSED IN BONE MARROW, SIGNAL = 0.99; EXPRESSED IN PLACENTA, SIGNAL = 1.1; EXPRESSED IN BRAIN, SIGNAL = 2.6; EXPRESSED IN LUNG, SIGNAL = 1.1; EXPRESSED IN FETAL LIVER, SIGNAL = 1.1; EST_HUMAN HIT: AL538246.1, EVALUE 1.80e+00
ggggctgtaggaagggggcctcctcactgtcgagtgaggtggtcacagtttctttggcagctccaagctgggcactgggggtcctggaggtggctct

SEQ ID NO: 15053 - DNA, 379 bp, Homo sapiens
  MAP TO CHR22_117.0; EXPRESSED IN FETAL LIVER, SIGNAL = 0.93; EXPRESSED IN BRAIN, SIGNAL = 0.9; EST_HUMAN HIT: AA405128.1, EVALUE 0.00e+00; SWISSPROT HIT: P01708, EVALUE 7.00e-49; NT HIT: Z85181.1, EVALUE 0.00e+00
cagagcaaaagggagcctgagagcccagggtgggttttggtctcagttccccaggaacttggaccactgtggaaagtgtagctgcctgcatatgagcagcagtaataatcagcctcatcctcagcctggagcccagagatggtcagggaggccgtgttgccagacttggagccagagaagcgatcagggacccctgagggccgcttactgacatcataaatcatgagtttgggggctttgcctgggtgctgttggtaccaggagacatagttataaccaccaacatcactgctggttccagtgcaggagatggtgactgactgtccaggagacccggacactgagcgaggctgagtcagggcagactgagcccaggatc

SEQ ID NO: 15054 - DNA, 200 bp, Homo sapiens
  MAP TO AC016672.4; EXPRESSED IN PLACENTA, SIGNAL = 8.3; EXPRESSED IN FETAL LIVER, SIGNAL =   5; EXPRESSED IN LUNG, SIGNAL = 6.9; EXPRESSED IN ADULT LIVER, SIGNAL = 6.6; EXPRESSED IN BONE MARROW, SIGNAL = 5.6; EXPRESSED IN HELA, SIGNAL = 2.3; EXPRESSED IN BRAIN, SIGNAL = 6.6; EXPRESSED IN HEART, SIGNAL = 6.4; SWISSPROT HIT: P17473, EVALUE 1.10e+00; EST_HUMAN HIT: AW983841.1, EVALUE 1.00e+00
ctgtcgtggttcacgtgtccgctgtcaccacaacccttgccagcatctgccaaaccaagggcacgtgtgtcaggaggtctgctgccagcatgccagctgccaggtgctgcctagccttgaattacggcctggctcactccctaagggaaggcatcattggcagcctcttctgcagcagagaaaacggaagcataggaggg

SEQ ID NO: 15055 - DNA, 83 bp, Homo sapiens
  MAP TO AL121830.11; EXPRESSED IN PLACENTA, SIGNAL = 1.3; EXPRESSED IN FETAL LIVER, SIGNAL = 1.4; EXPRESSED IN ADULT LIVER, SIGNAL = 1.2; EXPRESSED IN BONE MARROW, SIGNAL =   1; EXPRESSED IN BRAIN, SIGNAL = 1.1; EXPRESSED IN HELA, SIGNAL = 1.2; NT HIT: AJ229043.1, EVALUE 2.50e-01; EST_HUMAN HIT: BF309170.1, EVALUE 3.70e-01
ctgtaactatttgcatgattttcacgggcctgcctggcccaggcactattcttttcccagtgactggaacattaatgggaaca

SEQ ID NO: 15056 - DNA, 82 bp, Homo sapiens
  MAP TO AC011977.3; EXPRESSED IN BRAIN, SIGNAL = 0.67; EXPRESSED IN PLACENTA, SIGNAL = 0.92; EXPRESSED IN LUNG, SIGNAL = 0.6; EXPRESSED IN FETAL LIVER, SIGNAL = 0.67; EXPRESSED IN BONE MARROW, SIGNAL = 0.44; NT HIT: AL163280.2, EVALUE 3.00e-10; EST_HUMAN HIT: AI936147.1, EVALUE 7.00e-12
atgccccttagccaaattctttccactgaggaggcaagaactgagtttgctgcagacctgttggattcactgctgctaacag

SEQ ID NO: 15057 - DNA, 323 bp, Homo sapiens
  MAP TO CHR22_182.0; EXPRESSED IN BRAIN, SIGNAL = 0.54; EXPRESSED IN BONE MARROW, SIGNAL = 0.55; EXPRESSED IN PLACENTA, SIGNAL = 0.39; EXPRESSED IN ADULT LIVER, SIGNAL = 0.53; NT HIT: gi14736676, EVALUE 2.00e-11; SWISSPROT HIT: Q12967, EVALUE 1.00e-03; EST_HUMAN HIT: BG216151.1, EVALUE 8.00e-09
atcctgctccacgtcctgggcaacacgcattaacaatgccggccctggagccagcaccaccactgctggcggacctggggcctgctctggagccagagtcacctgcagccctgggtccaccaggatatctacattcagcaccagggccagcaccagcaccaggggaagggccccctccagggacagtgctggagccacagtcagccccagagtcctcctgtccctgtcgtgggtctgtaaagaaccaacccagtgaggagctgcctgacatgacgaccttccctcccaggctgctggcagagcagctgaccctcatggatgcg

SEQ ID NO: 15058 - DNA, 259 bp, Homo sapiens
  MAP TO AC011980.3; EXPRESSED IN FETAL LIVER, SIGNAL = 2.1; EXPRESSED IN HELA, SIGNAL = 1.3; EXPRESSED IN LUNG, SIGNAL = 1.7; EXPRESSED IN BRAIN, SIGNAL = 1.8; EXPRESSED IN HEART, SIGNAL = 1.3; EXPRESSED IN PLACENTA, SIGNAL = 1.8; EXPRESSED IN ADULT LIVER, SIGNAL = 2.4; SWISSPROT HIT: P77268, EVALUE 1.50e-02; EST_HUMAN HIT: BG107572.1, EVALUE 8.80e-02; NT HIT: AF009227.1, EVALUE 0.00e+00
cagtctcagtgttttcatgctcggtgtcggtgagtgtgagattggaattggcccggctggacaggcaggagctgcgccctgaccgtgtgctccggcacccacagacgcacggggtgctcaggggacagcaccgtgtcagcctccatgtcggcatcagagccagcccccatggagtagccgcagtgggggaggccaatgtctgtccggtacagggtcccgtgagggggcgttacttcttccagccccagctcccgcaggg

SEQ ID NO: 15059 - DNA, 188 bp, Homo sapiens
  MAP TO AC023152.3; EXPRESSED IN LUNG, SIGNAL = 6.3; EXPRESSED IN BRAIN, SIGNAL = 7.1; EXPRESSED IN ADULT LIVER, SIGNAL = 6.6; EXPRESSED IN FETAL LIVER, SIGNAL = 6.2; EXPRESSED IN BONE MARROW, SIGNAL = 6.2; SWISSPROT HIT: P10162, EVALUE 4.30e+00; EST_HUMAN HIT: BG772465.1, EVALUE 1.00e-101; NT HIT: gi8922558, EVALUE 7.00e-75
cacctcggctgctgcccggcagcggcagcagctgcgtcggcggcccacacagcagcgagaggcgagaggaggctgcctcgaggatgaagtgcaaacccaaccagacacggacctacgaccccgaggggttcaagaagcgggcggcgtgcctgtgcttccggagcgagcgcgaggacgaggtcctgtta

SEQ ID NO: 15060 - DNA, 120 bp, Homo sapiens
  MAP TO AL137840.3; EXPRESSED IN FETAL LIVER, SIGNAL =   2; EXPRESSED IN ADULT LIVER, SIGNAL =   2; EXPRESSED IN BONE MARROW, SIGNAL =   2; EXPRESSED IN BRAIN, SIGNAL =   2; EXPRESSED IN HELA, SIGNAL = 1.1; EXPRESSED IN HEART, SIGNAL = 1.6; EXPRESSED IN LUNG, SIGNAL = 2.3; EXPRESSED IN PLACENTA, SIGNAL = 2.3; NT HIT: AF279613.1, EVALUE 6.20e+00; SWISSPROT HIT: Q9ZHG0, EVALUE 7.90e+00; EST_HUMAN HIT: AI077408.1, EVALUE 3.70e-02
attttgtaatggagattgtgtccagtgcaaaagaaaaacaaaaggcatttagtgtggaaggggagaagtaaaagtatcctttgtcaaagaccacatgagagcctgtgtagaaaagtcgat

SEQ ID NO: 15061 - DNA, 260 bp, Homo sapiens
  MAP TO CHR22_122.0; EXPRESSED IN BONE MARROW, SIGNAL = 0.41; EXPRESSED IN PLACENTA, SIGNAL = 0.52; EXPRESSED IN LUNG, SIGNAL = 0.45; EXPRESSED IN ADULT LIVER, SIGNAL = 0.53; EXPRESSED IN BRAIN, SIGNAL = 0.45; EXPRESSED IN FETAL LIVER, SIGNAL = 0.5; NT HIT: M17922.1, EVALUE 2.40e-01; SWISSPROT HIT: P17141, EVALUE 4.60e+00; EST_HUMAN HIT: AA777415.1, EVALUE 6.00e-03
catggggactcagtgggacgaaggatgtgaatgtgccccaagtgccttcaagggccatgccaacaggaggacgtttcatttgatgaagacacatcttgggagctgtcctggatcccggaggatgaattctgatttctccttcctttgcagaaacatcttccaagagcctgccatcagctctgccatcagccctgccatcagctctgccatcagctctgccagtactgacaaggactcccttggaggcacttccccttaga

SEQ ID NO: 15062 - DNA, 131 bp, Homo sapiens
  MAP TO CHR22_179.0; EXPRESSED IN FETAL LIVER, SIGNAL = 0.92; EXPRESSED IN BONE MARROW, SIGNAL = 0.82; EXPRESSED IN HELA, SIGNAL = 0.83; EXPRESSED IN BRAIN, SIGNAL =   1; EXPRESSED IN PLACENTA, SIGNAL = 0.92; EXPRESSED IN LUNG, SIGNAL = 0.79; EXPRESSED IN ADULT LIVER, SIGNAL = 0.92; NT HIT: gi11425252, EVALUE 1.10e-01; SWISSPROT HIT: P55620, EVALUE 1.50e+00; EST_HUMAN HIT: BI755477.1, EVALUE 9.00e-68
ccaggaagccggctcccacgacgaccacgttgcggcctcgggccagcctcaccacgcgattggcatcctctggcgtccggatagtgaacacgttctccacttctttgcctttgcagctcagagtcttgggg

SEQ ID NO: 15063 - DNA, 224 bp, Homo sapiens
  MAP TO AC012360.2; EXPRESSED IN BRAIN, SIGNAL = 0.41; EXPRESSED IN FETAL LIVER, SIGNAL = 0.41; EXPRESSED IN BONE MARROW, SIGNAL = 0.41; EXPRESSED IN ADULT LIVER, SIGNAL = 0.32; NT HIT: AL115046.1, EVALUE 8.00e-01; SWISSPROT HIT: Q11030, EVALUE 1.50e+00; EST_HUMAN HIT: BE782729.1, EVALUE 1.20e+00
agaaaaacactgaagaactgtgtgggctgcctttgaggatgaagcagatgtctgccaagatctgtttccattctgaggagcacaagctaaacatcagcctcttcactcctcatttacacccttaccctgagtcgatccatcaagaccctccactgagagggacaaattataatgatctttgtatgaggcagtttgaacttgccttcctgttgcttgtaaactaa

SEQ ID NO: 15064 - DNA, 78 bp, Homo sapiens
  MAP TO AL137796.1; EXPRESSED IN PLACENTA, SIGNAL =   3; EXPRESSED IN LUNG, SIGNAL = 2.7; EXPRESSED IN ADULT LIVER, SIGNAL = 2.7; EXPRESSED IN BONE MARROW, SIGNAL = 3.2; EXPRESSED IN BRAIN, SIGNAL = 2.8; EXPRESSED IN HELA, SIGNAL =   2; EXPRESSED IN FETAL LIVER, SIGNAL = 3.1; EXPRESSED IN HEART, SIGNAL = 2.2; NT HIT: AF375663.1, EVALUE 2.30e-01; SWISSPROT HIT: Q09725, EVALUE 4.80e+00
ctccacgctcttgctcctactgctgcttctgcctggaatgtgggcagtttgtgagcttggaggatccattgcatccat

SEQ ID NO: 15065 - DNA, 118 bp, Homo sapiens
  MAP TO AC016709.4; EXPRESSED IN BONE MARROW, SIGNAL = 0.72; EXPRESSED IN PLACENTA, SIGNAL = 0.94; EXPRESSED IN ADULT LIVER, SIGNAL = 0.79; EXPRESSED IN BRAIN, SIGNAL = 0.83; EXPRESSED IN LUNG, SIGNAL = 0.86; EXPRESSED IN FETAL LIVER, SIGNAL = 0.6; NT HIT: Z18756.1, EVALUE 3.90e-01; SWISSPROT HIT: P57842, EVALUE 1.60e+00; EST_HUMAN HIT: BF735090.1, EVALUE 2.30e+00
ctgaatgtcaaatacattcctccctacctcctcttgataatcaggttcagttctctctgacaagatgaagaattccctttttgcctgccggacccttggcactaagtccttgaaatac

SEQ ID NO: 15066 - DNA, 181 bp, Homo sapiens
  MAP TO AL137793.1; EXPRESSED IN BONE MARROW, SIGNAL = 2.9; EXPRESSED IN BRAIN, SIGNAL = 2.8; EXPRESSED IN HELA, SIGNAL = 1.9; EXPRESSED IN HEART, SIGNAL = 2.6; EXPRESSED IN FETAL LIVER, SIGNAL = 2.9; EXPRESSED IN LUNG, SIGNAL = 3.3; SWISSPROT HIT: Q07821, EVALUE 3.00e-14; EST_HUMAN HIT: AU132569.1, EVALUE 3.00e-90; NT HIT: gi14732603, EVALUE 1.00e-97
aatatacaaagacaaaaggagattctgatgaagaagttattcaagatggagtcagagtattcatcgaaaagaaagcccagctaacacttttaggaacagaaatggactatgttgaagacaaattatccagtgagtttttgttcaataacccaaacatcaaaggaacttgtggctgtcgaga

SEQ ID NO: 15067 - DNA, 103 bp, Homo sapiens
  MAP TO AC019196.4; EXPRESSED IN PLACENTA, SIGNAL = 0.78; EXPRESSED IN BRAIN, SIGNAL = 0.65; EXPRESSED IN ADULT LIVER, SIGNAL = 0.55; EXPRESSED IN FETAL LIVER, SIGNAL = 0.66; NT HIT: AF162137.2, EVALUE 5.10e+00; EST_HUMAN HIT: AV653978.1, EVALUE 4.80e-01
ctgaatccttaagggagtccacatctttcctattctgacctcccggatgtgggtcttcatcactagttgtgtgtgtgcgtgcacatgtgtgtgcacatgtgtc

SEQ ID NO: 15068 - DNA, 551 bp, Homo sapiens
  MAP TO AL138784.1; EXPRESSED IN ADULT LIVER, SIGNAL = 3.6; EXPRESSED IN FETAL LIVER, SIGNAL = 3.5; EXPRESSED IN PLACENTA, SIGNAL = 3.9; EXPRESSED IN LUNG, SIGNAL = 3.5; EXPRESSED IN BONE MARROW, SIGNAL = 3.5; EXPRESSED IN HELA, SIGNAL = 1.9; EXPRESSED IN BRAIN, SIGNAL = 3.7; EXPRESSED IN HEART, SIGNAL =   3; NT HIT: gi14733822, EVALUE 0.00e+00; SWISSPROT HIT: Q9Y5V3, EVALUE 1.20e-01; EST_HUMAN HIT: AL041979.1, EVALUE 0.00e+00
agggaccttggggacgtctgcctggggtgcatctgtcctggccacggtggaggagagtctggccagcttggcttccacctcggcaaacgggtcctgcaggcctagtaacccctgcaggggcacctcctgcggctcctcttgcgggaggtagttctgttcccccagcaggtgcccagcggcctcctgcccgaggcactcatccaggaagtatctgctcctggactcctcagtgggcatggagacctccacgttggagggctcctcaggcccagggaaagcctcggacacagaggtttcttcgagcgaggatgactcactggagcccagagaaatctcagatttggagggttccaccttgggcagctccgcaaacctggaggaaacctgagtcttggagacatcgtcactgggcagagtgtcagtcgtggagaagaccttgggtttcaccactgtctcatactgaaaagcaggcgggtactcagcgctgctggcaaactcagccctggacatgacctcagccttgtagaggactcccacctgcaggacagcct

SEQ ID NO: 15069 - DNA, 164 bp, Homo sapiens
  MAP TO AC015845.4; EXPRESSED IN LUNG, SIGNAL = 0.47; EXPRESSED IN BRAIN, SIGNAL = 0.38; EXPRESSED IN PLACENTA, SIGNAL = 0.52; EXPRESSED IN FETAL LIVER, SIGNAL = 0.51; EXPRESSED IN BONE MARROW, SIGNAL = 0.59; SWISSPROT HIT: P48933, EVALUE 9.90e+00; EST_HUMAN HIT: AA491841.1, EVALUE 5.40e-02
gattatcaatcttatctcacctggatttctacccttcacaaagagatggccttgattttagaggccagagtaagtgccttctttatcaaaaggctcactgtcaatgtccaagttgagcggccctgggtcagtcctcaggaacaaaatttcatcaactttttatg

SEQ ID NO: 15070 - DNA, 109 bp, Homo sapiens
  MAP TO AC019287.3; EXPRESSED IN FETAL LIVER, SIGNAL = 0.42; EXPRESSED IN PLACENTA, SIGNAL = 0.64; EXPRESSED IN LUNG, SIGNAL = 0.52; EXPRESSED IN BONE MARROW, SIGNAL = 0.45; EXPRESSED IN ADULT LIVER, SIGNAL = 0.6; EXPRESSED IN BRAIN, SIGNAL = 0.52; NT HIT: AF072101.1, EVALUE 3.50e-01; EST_HUMAN HIT: BG744172.1, EVALUE 5.20e-01
ctggggcaccaaccatcttcaagagcttcatctgtgcctgcataccaaagagatgcttacacaagagccttggcaatgagtcctgaagtgcttcgtgaatgtaaatgac

SEQ ID NO: 15071 - DNA, 257 bp, Homo sapiens
  MAP TO CHR22_128.0; EXPRESSED IN BRAIN, SIGNAL = 0.73; EXPRESSED IN FETAL LIVER, SIGNAL = 0.74; EXPRESSED IN PLACENTA, SIGNAL = 0.81; EXPRESSED IN LUNG, SIGNAL = 0.64; EXPRESSED IN BONE MARROW, SIGNAL = 0.79; SWISSPROT HIT: P31438, EVALUE 3.40e+00; EST_HUMAN HIT: BG332108.1, EVALUE 8.70e-02
atcagacccaggtgctctgggttcagatccagctcctaacctctctgctgcagctgcagcactttgacctgaccactgtcgggctctacgtccccttaacggctcactttcagctgctcagtgaagggcttcgtggtcaatgcatctataccgtccctgggttccatctgcttgtccctattcactggtttttattttgcattatctgtgtatctacaaaccactgcagagcccctccttgggacaaactggtaggg

SEQ ID NO: 15072 - DNA, 159 bp, Homo sapiens
  MAP TO AC020588.4; EXPRESSED IN BONE MARROW, SIGNAL = 0.43; EXPRESSED IN BRAIN, SIGNAL = 0.55; EXPRESSED IN FETAL LIVER, SIGNAL = 0.38; EXPRESSED IN PLACENTA, SIGNAL = 0.5; EXPRESSED IN LUNG, SIGNAL = 0.57; EXPRESSED IN ADULT LIVER, SIGNAL = 0.59; NT HIT: Z72846.1, EVALUE 2.20e+00; SWISSPROT HIT: Q10369, EVALUE 9.90e+00; EST_HUMAN HIT: AI569663.1, EVALUE 3.20e+00
cagcaaatggtgctttcgtgcagacgagaggaaggtgacccctctggccagaccaattagaagaaggcaccacttctgagctgtctcagtcttacggaaagcacatggtgcctttttctttgcacccctcctaggccgtggccttttctgccgggccat

SEQ ID NO: 15073 - DNA, 92 bp, Homo sapiens
  MAP TO AL133406.3; EXPRESSED IN BONE MARROW, SIGNAL = 1.3; EXPRESSED IN BRAIN, SIGNAL = 1.5; EXPRESSED IN HELA, SIGNAL = 0.91; EXPRESSED IN FETAL LIVER, SIGNAL = 1.3; EXPRESSED IN LUNG, SIGNAL = 1.5; EXPRESSED IN HEART, SIGNAL = 1.3; EXPRESSED IN PLACENTA, SIGNAL = 1.8; EXPRESSED IN ADULT LIVER, SIGNAL = 1.5; NT HIT: gi14763918, EVALUE 2.90e-01
ttggcattgaacgaaccctccttgcccgtgcctccccctgcctgcttctcagtgctgcggtcacgtggctgcaggaggccctgagctcctga

SEQ ID NO: 15074 - DNA, 201 bp, Homo sapiens
  MAP TO AL133330.5; EXPRESSED IN BRAIN, SIGNAL = 0.79; EXPRESSED IN PLACENTA, SIGNAL = 0.92; EXPRESSED IN LUNG, SIGNAL = 1.7; EXPRESSED IN FETAL LIVER, SIGNAL = 0.65; EXPRESSED IN ADULT LIVER, SIGNAL = 0.76; NT HIT: S66400.1, EVALUE 1.00e-109; SWISSPROT HIT: P16070, EVALUE 8.00e-33; EST_HUMAN HIT: AL047291.1, EVALUE 1.00e-109
accccaatcttcatgtccacattctgcaggttccttgtctcatcagctgtcataaactggtctggagtttctgacgactccttgttcaccaaatgcaccatttcctgagacttgctggcctctccgttgagtccacttggctttctgtcctccacagctccattgccactgttgatcactagctttttcttctgcccacac

SEQ ID NO: 15075 - DNA, 172 bp, Homo sapiens
  MAP TO AL136371.1; EXPRESSED IN FETAL LIVER, SIGNAL = 0.53; EXPRESSED IN BRAIN, SIGNAL = 0.53; EXPRESSED IN PLACENTA, SIGNAL = 0.54; EXPRESSED IN LUNG, SIGNAL = 0.47; EST_HUMAN HIT: BF974297.1, EVALUE 8.80e-01; NT HIT: AF082993.1, EVALUE 6.00e-01; SWISSPROT HIT: Q62774, EVALUE 4.40e+00
tcagaaaaagaacattatcacaaccaggacaaaactgtgacttatggcagggtaaagaatcaaacgtttaggaaaaagagcttatggaaagcttcaggctctcagaatttgcagcagcagttccaacttgcagatggcaataattttagtaactgctgccaccacttggccc

SEQ ID NO: 15076 - DNA, 468 bp, Homo sapiens
  MAP TO CHR22_24.0; EXPRESSED IN HELA, SIGNAL = 9.7; EXPRESSED IN BRAIN, SIGNAL = 3.4; EXPRESSED IN LUNG, SIGNAL = 5.7; EXPRESSED IN ADULT LIVER, SIGNAL = 9.2; EXPRESSED IN FETAL LIVER, SIGNAL = 5.5; EXPRESSED IN BONE MARROW, SIGNAL = 4.2; EXPRESSED IN HEART, SIGNAL = 3.2; SWISSPROT HIT: P05783, EVALUE 1.00e-61; EST_HUMAN HIT: BE621583.1, EVALUE 0.00e+00; NT HIT: gi4557887, EVALUE 0.00e+00
tcaattcctcagaactttggtgtcgttggtctcaaacaccactttgccgtccactatcctgcaggtggtggtcttttggatggtttgcatggagttgctgctgtctagggcctcaccaagattgaagtcctccccatcttccagcaggcggtggtaggtggtgatctcagcctccagattgacctggatgttccaggcctcgtactcctgggcctggcgctgtccctctgcccaggtctgtgccagctccgactccaggtacagtaggaccctgttgagctgctccatctgcgtggtatagcaggcctccacctcccttaggctgttctccaagctgatcttcagatttctcatcaagtccaggccaatctccaaggactggactggacatctcagctctgtgagtgttatctcagcagctctgatctcggtggactgcgtgatgaccactgtggtgctctcctcaat

SEQ ID NO: 15077 - DNA, 190 bp, Homo sapiens
  MAP TO AC018432.4; EXPRESSED IN FETAL LIVER, SIGNAL = 0.62; EXPRESSED IN PLACENTA, SIGNAL = 0.92; EXPRESSED IN LUNG, SIGNAL = 0.8; EXPRESSED IN ADULT LIVER, SIGNAL = 0.69; EXPRESSED IN BONE MARROW, SIGNAL = 0.66; EXPRESSED IN BRAIN, SIGNAL = 0.65; NT HIT: AL163283.2, EVALUE 2.60e+00; SWISSPROT HIT: P56559, EVALUE 5.60e+00
agaagaaaggaaacaggaggcattgttaaaagtaattccacagcacctgcaacatttcatgttccgttcaggtcaggggaaggatcttgactttcacaaattagaaaaccaaggaagtaggaaaattctgtttgttaccaaacaagatgtcccacagcaacttcagcctgcagagccaatacaaagagag

SEQ ID NO: 15078 - DNA, 224 bp, Homo sapiens
  MAP TO CHR21_70.0; EXPRESSED IN HEART, SIGNAL = 1.3; EXPRESSED IN BRAIN, SIGNAL = 1.4; EXPRESSED IN HELA, SIGNAL = 4.1; EXPRESSED IN FETAL LIVER, SIGNAL = 1.3; EXPRESSED IN BONE MARROW, SIGNAL = 1.5; NT HIT: AF279146.1, EVALUE 8.00e-01; SWISSPROT HIT: O35984, EVALUE 1.70e-01; EST_HUMAN HIT: AA228964.1, EVALUE 7.50e-02
ggtattatagcttcgatgtctttcgtcactggcacagaggttttctaacatccgtcttcgtggcctcctggtccggtggcaagcatcccaagctccgcttcacagatgaaaaagctgagaggttaattaaaccgtttgttgtcccacgcagagtcagctttggggctgggagccaccacaggacctggctccccacgacaccggctgagcccggaagcagctga

SEQ ID NO: 15079 - DNA, 120 bp, Homo sapiens
  MAP TO CHR22_40.0; EXPRESSED IN BRAIN, SIGNAL = 0.48; EXPRESSED IN PLACENTA, SIGNAL = 0.5; EXPRESSED IN BONE MARROW, SIGNAL = 0.45; SWISSPROT HIT: P22855, EVALUE 6.00e+00; EST_HUMAN HIT: BE696981.1, EVALUE 5.80e-01
cttggtggaactccaggacctgggcctcagtcttagggttgccacggtgcacagcctcttggtcagggtgctttgggtcgaaggtgccctcctgagggcaaagtaccttcctgcccagcc

SEQ ID NO: 15080 - DNA, 186 bp, Homo sapiens
  MAP TO AL133499.1; EXPRESSED IN HELA, SIGNAL = 0.86; EXPRESSED IN BRAIN, SIGNAL = 1.2; EXPRESSED IN FETAL LIVER, SIGNAL = 1.4; EXPRESSED IN LUNG, SIGNAL = 1.5; EXPRESSED IN BONE MARROW, SIGNAL = 1.3; EXPRESSED IN PLACENTA, SIGNAL = 1.6; EXPRESSED IN ADULT LIVER, SIGNAL = 1.6; NT HIT: AL163301.2, EVALUE 1.00e-100; SWISSPROT HIT: P07566, EVALUE 4.30e+00; EST_HUMAN HIT: AA062865.1, EVALUE 6.20e-02
ctttgcttctgggcctggattaccatgtctggagagtgatgctttggaggaagtatgggtcacttcgctcctgggccgtcggttcagaaggtgcagccttgcccggagctgaggtccagtgctagcagcacattccctttccttgccctgagcctgcatggcagccttcttcatcaactggaatct

SEQ ID NO: 15081 - DNA, 88 bp, Homo sapiens
  MAP TO AC018671.5; EXPRESSED IN BRAIN, SIGNAL = 2.2; EXPRESSED IN PLACENTA, SIGNAL = 2.8; EXPRESSED IN LUNG, SIGNAL = 2.2; EXPRESSED IN ADULT LIVER, SIGNAL = 2.5; EXPRESSED IN FETAL LIVER, SIGNAL = 1.8; EXPRESSED IN BONE MARROW, SIGNAL = 1.9; EXPRESSED IN HEART, SIGNAL = 2.1; NT HIT: X68359.1, EVALUE 5.00e-06; SWISSPROT HIT: P56477, EVALUE 4.70e+00; EST_HUMAN HIT: T39641.1, EVALUE 6.00e-03
ctcaggggtccccagtccccgcgctgcaaaccagtactggtccatggccagttaggaaccaggccatgcagcaggtggtgcggagcca

SEQ ID NO: 15082 - DNA, 115 bp, Homo sapiens
  MAP TO AL137019.1; EXPRESSED IN HEART, SIGNAL = 1.2; EXPRESSED IN FETAL LIVER, SIGNAL = 0.99; EXPRESSED IN BONE MARROW, SIGNAL = 1.1; EXPRESSED IN BRAIN, SIGNAL = 1.1; NT HIT: AE004316.1, EVALUE 3.80e-01
cccagccttggtgcttcatctgggcagcagcagctcttcctgtagcagtagctgaatgcgagtcagaattttccaacactggcagacccagctgcatggtgtccacctcagacat

SEQ ID NO: 15083 - DNA, 250 bp, Homo sapiens
  MAP TO AL136309.3; EXPRESSED IN BRAIN, SIGNAL = 0.59; EXPRESSED IN FETAL LIVER, SIGNAL = 0.57; NT HIT: gi13812105, EVALUE 5.80e-02; SWISSPROT HIT: P36102, EVALUE 8.30e-01; EST_HUMAN HIT: Z21378.1, EVALUE 1.00e-19
aatagtcatatgttgtaatcgttctagttccagtaaacgagttatcaagtgttcaacagaggtttctgcagggtccactgtcactttccaattgtcagatttggagagggctaaattgtgcaagtctagagcactgaaaggaggagggagaaaatcaggatatggaaatacttcatttggctcctcggtgaaaggttcctcaacattttttattgtttctggcttcaagttcaggtccacctttttaaaa

SEQ ID NO: 15084 - DNA, 181 bp, Homo sapiens
  MAP TO AL136317.2; EXPRESSED IN LUNG, SIGNAL = 3.7; EXPRESSED IN ADULT LIVER, SIGNAL = 4.1; EXPRESSED IN PLACENTA, SIGNAL = 3.9; EXPRESSED IN BONE MARROW, SIGNAL = 3.5; EXPRESSED IN BRAIN, SIGNAL = 3.3; EXPRESSED IN HELA, SIGNAL =   2; EXPRESSED IN FETAL LIVER, SIGNAL = 3.8; SWISSPROT HIT: O14520, EVALUE 2.00e-18; EST_HUMAN HIT: AW967265.1, EVALUE 1.00e-80; NT HIT: gi14736665, EVALUE 5.00e-85
atgctccagctgtgtctcttcgccatcgtggaccaggagaacaacccagcactgccaggaacacacgcactggtgataggcatcctcgtggtcatcatcagggtgtaccatggcatgaacacaggatatgccatcaatccgtcccgggacctgcccccccgcatcttcaccttcattgctg

SEQ ID NO: 15085 - DNA, 153 bp, Homo sapiens
  MAP TO CHR21_72.0; EXPRESSED IN LUNG, SIGNAL = 0.83; EXPRESSED IN BRAIN, SIGNAL = 1.2; EXPRESSED IN ADULT LIVER, SIGNAL = 0.74; EXPRESSED IN HELA, SIGNAL = 3.5; EXPRESSED IN FETAL LIVER, SIGNAL = 1.2; EXPRESSED IN BONE MARROW, SIGNAL = 1.5; SWISSPROT HIT: O00268, EVALUE 2.00e+00; EST_HUMAN HIT: BF247532.1, EVALUE 2.00e-01; NT HIT: gi7661861, EVALUE 5.20e-01
cgtctgctgacagtaacagtggagctttccccagcacccaagagcccggggctcaccgtggtcccctcctgtgcagccagcacacaaggccctcccgtgccaccacctcgcaggggccaggtctgctcggcccactacaccagagcccttggg

SEQ ID NO: 15086 - DNA, 191 bp, Homo sapiens
  MAP TO AC013689.4; EXPRESSED IN FETAL LIVER, SIGNAL = 1.3; EXPRESSED IN BONE MARROW, SIGNAL = 1.3; EXPRESSED IN HEART, SIGNAL = 1.2; EXPRESSED IN PLACENTA, SIGNAL = 1.5; EXPRESSED IN BRAIN, SIGNAL = 1.4; EXPRESSED IN LUNG, SIGNAL = 1.3; EXPRESSED IN ADULT LIVER, SIGNAL = 1.5; NT HIT: gi16158202, EVALUE 1.00e-103; SWISSPROT HIT: P15848, EVALUE 1.00e-32; EST_HUMAN HIT: BE786803.1, EVALUE 3.00e-99
cttctctggtggatggttagttatgagggctatagcccttttggtgaatatgtttgttgaatacatatttttatatcctgttgcaacttcttcgccatctcgaaaatcaagagcacatcgtgtgacattcagagcgtcaattaatgtacagcgttcatgggaataataatcttcactacccaggagatatc

SEQ ID NO: 15087 - DNA, 144 bp, Homo sapiens
  MAP TO AL133552.2; EXPRESSED IN FETAL LIVER, SIGNAL = 4.3; EXPRESSED IN HEART, SIGNAL =   4; EXPRESSED IN LUNG, SIGNAL = 5.7; EXPRESSED IN BONE MARROW, SIGNAL = 5.1; EXPRESSED IN PLACENTA, SIGNAL = 6.1; EXPRESSED IN ADULT LIVER, SIGNAL =   5; EXPRESSED IN HELA, SIGNAL = 4.4; EXPRESSED IN BRAIN, SIGNAL =   5; NT HIT: U77356.1, EVALUE 1.20e-01; SWISSPROT HIT: P50496, EVALUE 2.60e+00
agctgcagggccgcggagcgtggtgcaggggacggggttcatggagcttatgacggtttccccagtggcattcagagcgcagcctggggcctcagctccgtcttcccctccccagcctcgggcgtcaatgaaggcagcgctggc

SEQ ID NO: 15088 - DNA, 204 bp, Homo sapiens
  MAP TO AL160314.1; EXPRESSED IN FETAL LIVER, SIGNAL = 2.6; EXPRESSED IN BONE MARROW, SIGNAL = 1.8; EXPRESSED IN PLACENTA, SIGNAL =   2; EXPRESSED IN LUNG, SIGNAL = 2.6; EXPRESSED IN ADULT LIVER, SIGNAL = 3.8; EXPRESSED IN BRAIN, SIGNAL = 1.1; NT HIT: U84212.1, EVALUE 1.00e-111; EST_HUMAN HIT: BG164351.1, EVALUE 1.00e-111; SWISSPROT HIT: P46966, EVALUE 2.00e-24
gatgaaactccccacacaagagatgaagcccgagagaaaagagttgaaggggaaggtccccacgaggagacagtaaccgaactgcagcgccccggtcagcagtatatacagcaggtacgcgtccagcaacttcagacgctgcggagtggagctcaagtactcttctaagaaccgcgaaatgacagacactaccgacgccgacat

SEQ ID NO: 15089 - DNA, 126 bp, Homo sapiens
  MAP TO AC016672.4; EXPRESSED IN BRAIN, SIGNAL =   1; EXPRESSED IN HELA, SIGNAL = 0.58; EXPRESSED IN FETAL LIVER, SIGNAL = 0.81; EXPRESSED IN BONE MARROW, SIGNAL = 0.9; EXPRESSED IN PLACENTA, SIGNAL = 1.1; EXPRESSED IN LUNG, SIGNAL = 0.95; EXPRESSED IN ADULT LIVER, SIGNAL = 0.7; NT HIT: Z97336.1, EVALUE 4.20e-01; SWISSPROT HIT: P46062, EVALUE 2.70e+00; EST_HUMAN HIT: AI420975.1, EVALUE 1.00e-29
atgttggatattatgtcataagaactaattgttttttcttttaaattcttcttctttttgggtatagtctgcaggcccaggtggggcttcatgttcagctcactgttggacttcattgacatcacc

SEQ ID NO: 15090 - DNA, 103 bp, Homo sapiens
  MAP TO AL160237.1; EXPRESSED IN FETAL LIVER, SIGNAL = 0.81; EXPRESSED IN PLACENTA, SIGNAL = 0.89; EXPRESSED IN LUNG, SIGNAL = 0.92; EXPRESSED IN ADULT LIVER, SIGNAL = 1.1; EXPRESSED IN BONE MARROW, SIGNAL = 0.66; EXPRESSED IN BRAIN, SIGNAL = 0.62; EXPRESSED IN HELA, SIGNAL = 0.76; SWISSPROT HIT: P38971, EVALUE 8.00e+00; EST_HUMAN HIT: AW291086.1, EVALUE 4.80e-01
aataataatgttcctcactaaaggttgctcactacatgtgggtatattgaatggactctggctgctgtggtgtttcacactcagtctcccgctcatcagttgc

SEQ ID NO: 15091 - DNA, 146 bp, Homo sapiens
  MAP TO CHR21_74.0; EXPRESSED IN BRAIN, SIGNAL = 1.1; EXPRESSED IN ADULT LIVER, SIGNAL = 0.57; EXPRESSED IN HELA, SIGNAL = 2.6; EXPRESSED IN FETAL LIVER, SIGNAL = 0.94; EXPRESSED IN BONE MARROW, SIGNAL = 1.2; EST_HUMAN HIT: BG330062.1, EVALUE 4.70e-02; SWISSPROT HIT: O43918, EVALUE 2.00e-22; NT HIT: AB006684.1, EVALUE 8.00e-77
gcggctccaagaagtgcatccaggttggcggggagttctacactcccagcaagttcgaagactccggcagtgggaagaacaaggcccgcagcagcagtggcccgaagcctctggttcgagccaagggagcccagggcgctgccccc

SEQ ID NO: 15092 - DNA, 119 bp, Homo sapiens
  MAP TO AC012348.4; EXPRESSED IN BONE MARROW, SIGNAL = 0.58; EXPRESSED IN PLACENTA, SIGNAL = 0.63; EXPRESSED IN LUNG, SIGNAL = 0.64; EXPRESSED IN BRAIN, SIGNAL = 0.62; EXPRESSED IN FETAL LIVER, SIGNAL = 0.47; EST_HUMAN HIT: BE886059.1, EVALUE 5.80e-01; SWISSPROT HIT: P27814, EVALUE 7.90e+00
catgtactggtcacaccaggaattttgtaaattgatacatttagtacacatccatggatatacatccatgacacacttactaagcatgagtaaagatttacttcccaatcctggatccc

SEQ ID NO: 15093 - DNA, 237 bp, Homo sapiens
  MAP TO AL133515.2; EXPRESSED IN FETAL LIVER, SIGNAL = 0.52; EXPRESSED IN BRAIN, SIGNAL = 0.72; EXPRESSED IN PLACENTA, SIGNAL = 0.78; EXPRESSED IN LUNG, SIGNAL = 0.65; EXPRESSED IN ADULT LIVER, SIGNAL = 0.59; NT HIT: gi15296873, EVALUE 0.00e+00; EST_HUMAN HIT: AW081109.1, EVALUE 1.20e+00; SWISSPROT HIT: P34886, EVALUE 5.70e-01
ttgatactctctggaagaggtaatcatctttatcatagcctgttactttgagaaagaaagcttcatttggtggtacaaagtcagaaatattccatatgccataaggttttcgatgtgggtaatatttaacaggaatagtcttaagagaacttcctgagatactcaaaagttcaagaagatctattctagctggagtggaaattccagaagtattgagcagtacataggtaggtattc

SEQ ID NO: 15094 - DNA, 221 bp, Homo sapiens
  MAP TO AC025170.2; EXPRESSED IN BONE MARROW, SIGNAL = 0.57; EXPRESSED IN BRAIN, SIGNAL = 0.46; EXPRESSED IN PLACENTA, SIGNAL = 0.72; EXPRESSED IN LUNG, SIGNAL = 0.63; NT HIT: U82828.1, EVALUE 3.00e-03; EST_HUMAN HIT: AW814042.1, EVALUE 5.00e-06; SWISSPROT HIT: Q06841, EVALUE 1.80e+00
ttttttgaatatttttgatccacggttggctaaatctgctgatgtgggacctgaggatatagggggccaactgtatgttttggaggtataattggtgggacttgatgataggatttggactgtatctgaggtgaaggagagaaaagtgtgaaggactccaggtttcaggtttctcgcttgagcaactgagtggatgacagcatcagatattgaggagaaca

SEQ ID NO: 15095 - DNA, 142 bp, Homo sapiens
  MAP TO AL160231.1; EXPRESSED IN FETAL LIVER, SIGNAL = 0.59; EXPRESSED IN PLACENTA, SIGNAL = 0.64; EXPRESSED IN LUNG, SIGNAL = 0.61; EXPRESSED IN ADULT LIVER, SIGNAL = 0.74; EXPRESSED IN BONE MARROW, SIGNAL = 0.43; EXPRESSED IN BRAIN, SIGNAL = 0.42; NT HIT: AJ006345.1, EVALUE 9.00e-12; EST_HUMAN HIT: AL597842.1, EVALUE 3.00e-09; SWISSPROT HIT: P08547, EVALUE 7.00e-11
ttatttgattgttcttgctactacttccagtacaatgttgagtagaagtggtgagagtgggcattcttgccttgtactgaatcttagtgggaaagcattcagtttttcctcactgactataatgttagctgtgggtttttca

SEQ ID NO: 15096 - DNA, 153 bp, Homo sapiens
  MAP TO CHR22_174.0; EXPRESSED IN BRAIN, SIGNAL = 0.87; EXPRESSED IN LUNG, SIGNAL = 0.87; EXPRESSED IN ADULT LIVER, SIGNAL = 0.97; EXPRESSED IN PLACENTA, SIGNAL =   1; EXPRESSED IN FETAL LIVER, SIGNAL = 0.83; EXPRESSED IN BONE MARROW, SIGNAL = 0.67; NT HIT: AB051431.1, EVALUE 1.00e-10; EST_HUMAN HIT: BI668901.1, EVALUE 2.00e-10; SWISSPROT HIT: P98105, EVALUE 1.20e+00
tcatgtccagggagttggagcctggactttgggttcctgcacccctgaggtcaaacgaggggttggtctcctcctggccatgtggcgcctgggcaccccccttccccactgtgagctttttctgcagctttttctgcagggggttaatcatac

SEQ ID NO: 15097 - DNA, 146 bp, Homo sapiens
  MAP TO AL136140.2; EXPRESSED IN BONE MARROW, SIGNAL = 2.2; EXPRESSED IN HELA, SIGNAL = 1.2; EXPRESSED IN BRAIN, SIGNAL = 2.2; EXPRESSED IN HEART, SIGNAL = 2.1; EXPRESSED IN LUNG, SIGNAL = 2.5; EXPRESSED IN ADULT LIVER, SIGNAL = 2.5; EXPRESSED IN PLACENTA, SIGNAL = 2.7; EXPRESSED IN FETAL LIVER, SIGNAL = 2.3; NT HIT: AJ242551.1, EVALUE 5.00e-01; SWISSPROT HIT: P23785, EVALUE 7.70e+00; EST_HUMAN HIT: AA334955.1, EVALUE 2.90e+00
gttcatccgtgctgacatagtgaatggtgaaaacaccctaccacatgaaaacagcttgggaaagaggcttggtggtctagacaacaaggttctgctcctggctcttattagtgagcttgaactgtctgatgctccctaccaagcag

SEQ ID NO: 15098 - DNA, 221 bp, Homo sapiens
  MAP TO AL137918.1; EXPRESSED IN FETAL LIVER, SIGNAL = 0.53; EXPRESSED IN BRAIN, SIGNAL = 0.54; EXPRESSED IN LUNG, SIGNAL = 0.48; EXPRESSED IN ADULT LIVER, SIGNAL = 0.61; SWISSPROT HIT: Q9ZDZ8, EVALUE 3.60e-01; EST_HUMAN HIT: BE737080.1, EVALUE 1.20e+00; NT HIT: AJ131959.1, EVALUE 7.90e-01
ttattggttaatgacaggaaatgcataggattcggccaagtatccagtgtgagcagtatccaggagaaaagttcgggtcccagtcaaaggagtgattgggcgtttgtaggaatagactgaaaagcagggccaacttctctcaggaattactggcattccctcattattgataccctcgaaggacttgaggaaacccacaaagtcttcagcaggatgctgat

SEQ ID NO: 15099 - DNA, 146 bp, Homo sapiens
  MAP TO CHR22_176.0; EXPRESSED IN PLACENTA, SIGNAL = 0.84; EXPRESSED IN BRAIN, SIGNAL = 0.83; EXPRESSED IN FETAL LIVER, SIGNAL = 0.87; EXPRESSED IN BONE MARROW, SIGNAL = 0.88; SWISSPROT HIT: P53673, EVALUE 4.00e-26; EST_HUMAN HIT: AI741592.1, EVALUE 1.00e-76; NT HIT: gi4503058, EVALUE 8.00e-77
ctgggtttgctcccagtttccgggctaccgaggatttcagtatgtgctggaatgcgatcaccattccggtgactacaaacatttccgggagtggggctctcatgccccgaccttccaggtgcagagcatccgcaggatccagcagt

SEQ ID NO: 15100 - DNA, 174 bp, Homo sapiens
  MAP TO AL137800.2; EXPRESSED IN PLACENTA, SIGNAL = 0.79; EXPRESSED IN LUNG, SIGNAL = 0.79; EXPRESSED IN ADULT LIVER, SIGNAL = 0.63; EXPRESSED IN BONE MARROW, SIGNAL = 0.69; EXPRESSED IN BRAIN, SIGNAL = 0.62; EST_HUMAN HIT: BE552357.1, EVALUE 3.00e-93; SWISSPROT HIT: Q9VIM5, EVALUE 1.90e+00; NT HIT: AF011446.1, EVALUE 3.90e-02
tcatacttgatgacaagtatgatgatattttaaggacatgaacatgggtgaaatcaatgtgtagatggtacaaattaaccgaattctttttaaagcatttcctgtggatcccaggatcatgaggacataacagaagaataaggtctgaatcttgttcaccagtttgctctcagc

SEQ ID NO: 15101 - DNA, 98 bp, Homo sapiens
  MAP TO AL160168.1; EXPRESSED IN BONE MARROW, SIGNAL = 2.7; EXPRESSED IN BRAIN, SIGNAL = 2.4; EXPRESSED IN PLACENTA, SIGNAL = 3.2; EXPRESSED IN LUNG, SIGNAL = 3.2; EXPRESSED IN ADULT LIVER, SIGNAL = 3.4; EXPRESSED IN FETAL LIVER, SIGNAL = 2.5; NT HIT: AF296379.1, EVALUE 1.20e+00; EST_HUMAN HIT: BI050978.1, EVALUE 1.20e-01
cttttctgctgcctctccaacctcttcagctccagcacgtatctcctgctgtgactcactcaagataccagtatcccagccagaagctctggtttgat

SEQ ID NO: 15102 - DNA, 77 bp, Homo sapiens
  MAP TO AC025745.1; EXPRESSED IN PLACENTA, SIGNAL =  14; EXPRESSED IN BRAIN, SIGNAL = 0.42; EXPRESSED IN LUNG, SIGNAL = 0.46; NT HIT: U37067.1, EVALUE 6.00e-36; EST_HUMAN HIT: BG622512.1, EVALUE 3.00e-20
attccttactgccaaaggaaccctcatcactaacggcccccttatttaccaactccttcaggccgcacacctcccag

SEQ ID NO: 15103 - DNA, 93 bp, Homo sapiens
  MAP TO CHR22_26.0; EXPRESSED IN HEART, SIGNAL = 1.9; EXPRESSED IN PLACENTA, SIGNAL = 2.8; EXPRESSED IN FETAL LIVER, SIGNAL = 1.7; EXPRESSED IN LUNG, SIGNAL = 2.2; EXPRESSED IN BONE MARROW, SIGNAL = 1.9; EXPRESSED IN BRAIN, SIGNAL = 2.1; NT HIT: D14547.1, EVALUE 3.00e-13; EST_HUMAN HIT: AW178800.1, EVALUE 8.00e-15
ctcctcctcctcctcctcctcttcagcccactcaacacgaagacaatgaagatggagacctttatgatgatccacttccacttaatgaagagt

SEQ ID NO: 15104 - DNA, 94 bp, Homo sapiens
  MAP TO AL137802.2; EXPRESSED IN FETAL LIVER, SIGNAL = 0.69; EXPRESSED IN BONE MARROW, SIGNAL = 0.67; EXPRESSED IN LUNG, SIGNAL = 0.83; EXPRESSED IN PLACENTA, SIGNAL = 0.68; EXPRESSED IN BRAIN, SIGNAL = 0.62; EST_HUMAN HIT: AI630987.1, EVALUE 7.00e-34; NT HIT: AJ298878.1, EVALUE 4.60e+00
gtgatggtgatggaagaagaggcaaggcaggacaggaaggctcaggtaagaaagactatgcaggtgcaggggcaggaggagaaggagcagctgg

SEQ ID NO: 15105 - DNA, 116 bp, Homo sapiens
  MAP TO AL136103.2; EXPRESSED IN FETAL LIVER, SIGNAL = 0.54; EXPRESSED IN PLACENTA, SIGNAL = 0.67; EXPRESSED IN BONE MARROW, SIGNAL = 0.56; EXPRESSED IN LUNG, SIGNAL = 0.62; EXPRESSED IN ADULT LIVER, SIGNAL = 0.57; EXPRESSED IN BRAIN, SIGNAL = 0.6; EST_HUMAN HIT: BF695154.1, EVALUE 3.60e-02; NT HIT: U24489.1, EVALUE 9.60e-02
atgccagagagttatttgagatcagttaccctaatctttcacttgacagaagatgaagctgagacccagaaatgggaaaagactcataaacttcacacggtgccggagccagaacc

SEQ ID NO: 15106 - DNA, 138 bp, Homo sapiens
  MAP TO AL133402.2; EXPRESSED IN BONE MARROW, SIGNAL = 0.64; EXPRESSED IN PLACENTA, SIGNAL = 0.74; EXPRESSED IN LUNG, SIGNAL = 0.78; EXPRESSED IN ADULT LIVER, SIGNAL = 0.67; EXPRESSED IN BRAIN, SIGNAL = 0.76; NT HIT: AB012229.1, EVALUE 1.20e-01
atgaagaaactgagggtcacagggttagacaatttgtccagtttaagcttgctctttagggtgaagttgggaatcaaacccaagacactgactccaaccctgtgtctgccactgacttacagctgcatcctttaccag

SEQ ID NO: 15107 - DNA, 339 bp, Homo sapiens
  MAP TO AL137798.1; EXPRESSED IN BONE MARROW, SIGNAL = 0.88; EXPRESSED IN PLACENTA, SIGNAL = 1.1; EXPRESSED IN LUNG, SIGNAL = 0.97; EXPRESSED IN BRAIN, SIGNAL = 0.89; EST_HUMAN HIT: AL558014.1, EVALUE 2.00e-68; SWISSPROT HIT: P26927, EVALUE 6.00e-46; NT HIT: U28054.1, EVALUE 0.00e+00
gtacatgcccacgctccggaatggcctggaagagaacttctgccgtaaccctgatggcgaccccggaggtccttggtgccacacaacagaccctgccgtgcgcttccagagctgcggcatcaaatcctgccgggtgggtaagcggcgccgggtcaagctgggagagtggagggacaagcccacgcccatccacgaacccactggctctttgtctccagccgcgtgtgtctggtgcaatggcgaggaataccgcggcgcggtagaccgcaccgagtcagggcgcgagtgccagcgctgggatcttcagcacccgcaccagcaccccttcgagccgggcaa

SEQ ID NO: 15108 - DNA, 192 bp, Homo sapiens
  MAP TO AC020582.3; EXPRESSED IN BRAIN, SIGNAL = 0.33; EXPRESSED IN ADULT LIVER, SIGNAL = 0.49; EST_HUMAN HIT: BE000485.1, EVALUE 2.00e-85; SWISSPROT HIT: Q21313, EVALUE 1.70e-01; NT HIT: gi14769400, EVALUE 5.00e-88
ttgggattcttggcactggccacccttaccttttggtcttcaatgtattcaatgtcggctgtgttgtagccatcccgctggctctgatggagcaccctgaagcgcctcttgcctatgctgtcaaccactgagcggccatcagcaaagaattgaacatttctgatctctaggatgcagccatattctgcaaac

SEQ ID NO: 15109 - DNA, 49 bp, Homo sapiens
  MAP TO CHR22_97.0; EXPRESSED IN BRAIN, SIGNAL = 1.1; EXPRESSED IN HELA, SIGNAL =  12; EXPRESSED IN FETAL LIVER, SIGNAL = 0.86; EXPRESSED IN PLACENTA, SIGNAL =   1; NT HIT: Z35126.1, EVALUE 1.20e-01; EST_HUMAN HIT: AV720578.1, EVALUE 2.80e+00
ccacaaatagctgttttcagtaataaggaagctcagttctgtgactaag

SEQ ID NO: 15110 - DNA, 146 bp, Homo sapiens
  MAP TO AL133266.3; EXPRESSED IN BRAIN, SIGNAL = 0.86; EXPRESSED IN HELA, SIGNAL = 0.53; EXPRESSED IN FETAL LIVER, SIGNAL = 0.78; EXPRESSED IN PLACENTA, SIGNAL = 0.95; EXPRESSED IN LUNG, SIGNAL = 0.87; EXPRESSED IN ADULT LIVER, SIGNAL = 0.77; EXPRESSED IN BONE MARROW, SIGNAL = 0.76; NT HIT: gi14149790, EVALUE 8.00e-77; EST_HUMAN HIT: BF874415.1, EVALUE 7.00e-75; SWISSPROT HIT: Q57926, EVALUE 4.50e+00
ctgaatattctggcaatattggtacagacgtccttgtcacccttgtactgttccattgccgtgcagagctggggaagggcactgatgtttaggaacttacttcttactaatgatgaatcaaccaagtttctcaatgtagcagtcac

SEQ ID NO: 15111 - DNA, 149 bp, Homo sapiens
  MAP TO AC023123.3; EXPRESSED IN BONE MARROW, SIGNAL = 0.43; EXPRESSED IN PLACENTA, SIGNAL = 0.4; EXPRESSED IN BRAIN, SIGNAL = 0.4; EXPRESSED IN HELA, SIGNAL = 0.6; EXPRESSED IN ADULT LIVER, SIGNAL = 0.43; EXPRESSED IN FETAL LIVER, SIGNAL = 0.43; NT HIT: gi14770736, EVALUE 1.00e-78; EST_HUMAN HIT: BI604179.1, EVALUE 2.00e-78
ttaatcacttcttcatcagagataacagtttcaattttctgctgggggtctgcaagcaaggcctctaaaccacgaacagcaccttccttgaagagcaccaagggttctgtcccttgcactgaaagtatcctatatacttctgctgacaa

SEQ ID NO: 15112 - DNA, 164 bp, Homo sapiens
  MAP TO AL139152.1; EXPRESSED IN BRAIN, SIGNAL = 6.7; EXPRESSED IN FETAL LIVER, SIGNAL =  10; EXPRESSED IN LUNG, SIGNAL =  19; EXPRESSED IN ADULT LIVER, SIGNAL =  21; EXPRESSED IN BONE MARROW, SIGNAL = 9.2; SWISSPROT HIT: P12644, EVALUE 5.80e+00; EST_HUMAN HIT: AW170075.1, EVALUE 2.00e-87; NT HIT: gi16157256, EVALUE 2.00e-87
ggagctgctggctgagaaagagcctgaagtcttgcaggactcactggatagatggtattcgactccttcagtttatcttggactgactgacccatgccagccctacagaagtgccttttacgtattggagcaacagcgtgttggcttggctgttgacatggatg

SEQ ID NO: 15113 - DNA, 112 bp, Homo sapiens
  MAP TO AC019277.4; EXPRESSED IN BRAIN, SIGNAL = 0.39; EXPRESSED IN FETAL LIVER, SIGNAL = 0.45; NT HIT: gi9055381, EVALUE 3.60e-01
tcttcctccagggaacaaactcacgatgcaattgctagtcagcagccaacactttctcccagcagtagccctaagcaggctgcacatgctcaacctactccaggcccaacta

SEQ ID NO: 15114 - DNA, 196 bp, Homo sapiens
  MAP TO CHR22_115.0; EXPRESSED IN BONE MARROW, SIGNAL = 0.5; EXPRESSED IN PLACENTA, SIGNAL = 0.48; EXPRESSED IN LUNG, SIGNAL = 0.54; EXPRESSED IN BRAIN, SIGNAL = 0.54; NT HIT: gi15318159, EVALUE 1.00e-106; EST_HUMAN HIT: BG819730.1, EVALUE 1.00e-105; SWISSPROT HIT: Q63515, EVALUE 1.00e-03
cgtttgagaaaggccactgctatgagccctacatccagaatgggaacttcactacatccgacccgacctataacattgggactatagtggagttcacctgcgaccccggccactccctggagcagggcccggccatcatcgaatgcatcaatgtgcgggacccatactggaatgacacagagcccctgtgcagagg

SEQ ID NO: 15115 - DNA, 251 bp, Homo sapiens
  MAP TO CHR22_174.0; EXPRESSED IN HEART, SIGNAL = 1.3; EXPRESSED IN BRAIN, SIGNAL = 1.2; EXPRESSED IN HELA, SIGNAL = 1.1; EXPRESSED IN FETAL LIVER, SIGNAL = 1.5; EXPRESSED IN BONE MARROW, SIGNAL = 1.1; EXPRESSED IN ADULT LIVER, SIGNAL = 1.1; EXPRESSED IN LUNG, SIGNAL = 1.1; EXPRESSED IN PLACENTA, SIGNAL = 1.3; NT HIT: AL163203.2, EVALUE 6.00e-08; EST_HUMAN HIT: BF765460.1, EVALUE 6.00e-15; SWISSPROT HIT: Q92558, EVALUE 3.50e-01
gccccagacttgctactgctgccaccactagcaccgatgccaatacaaccaccactgctgccgccctcaatgaaccggcccaccctacagggctcccaccacctggccaccgctgcagcactgccctggccctggcagcagccagccgccctcctacctctctggcactctgcagtctccatcgctgccaccacgccaaccacagcgaggcaagccgtggtgtccctggctccagcctccagcatgtgcag

SEQ ID NO: 15116 - DNA, 107 bp, Homo sapiens
  MAP TO AC016714.2; EXPRESSED IN PLACENTA, SIGNAL = 0.61; EXPRESSED IN BONE MARROW, SIGNAL = 0.58; EXPRESSED IN LUNG, SIGNAL = 0.64; EXPRESSED IN ADULT LIVER, SIGNAL = 0.67; EXPRESSED IN BRAIN, SIGNAL = 0.65; EXPRESSED IN HELA, SIGNAL = 0.67; EXPRESSED IN FETAL LIVER, SIGNAL = 0.69; EST_HUMAN HIT: AI056807.1, EVALUE 2.00e+00; SWISSPROT HIT: P52289, EVALUE 6.10e+00
gatggcaaatacatatacttctttggattgcattaagtgtggtaacacaggatatgtgcgcatcacaattaatgacagtggcatagcaggtttgagatatcctgaat

SEQ ID NO: 15117 - DNA, 119 bp, Homo sapiens
  MAP TO AC015957.3; EXPRESSED IN PLACENTA, SIGNAL = 1.1; EXPRESSED IN HELA, SIGNAL = 0.78; EXPRESSED IN BRAIN, SIGNAL =   1; EXPRESSED IN LUNG, SIGNAL = 1.4; EXPRESSED IN ADULT LIVER, SIGNAL =   1; EXPRESSED IN FETAL LIVER, SIGNAL = 0.97; NT HIT: gi15305591, EVALUE 8.00e-61; EST_HUMAN HIT: AL589249.1, EVALUE 1.00e-60; SWISSPROT HIT: P28828, EVALUE 5.00e-18
ctcgtggaatcgactggctgccggtcattccagctcccactggccgtgcagtactccacctctcgggccacaatgggcccatccccattgatggagttggcgttgagctgtatccacag

SEQ ID NO: 15118 - DNA, 118 bp, Homo sapiens
  MAP TO AC024066.3; EXPRESSED IN BONE MARROW, SIGNAL = 0.45; EXPRESSED IN BRAIN, SIGNAL = 0.61; EXPRESSED IN FETAL LIVER, SIGNAL = 0.49; EXPRESSED IN LUNG, SIGNAL = 0.45; EXPRESSED IN ADULT LIVER, SIGNAL = 0.56; NT HIT: AL161564.2, EVALUE 6.00e-03; EST_HUMAN HIT: BG256642.1, EVALUE 3.70e-02
tgcatctttatcttcttctcttttttgcttaggatgcccagtggctgactatacttgccacaaacaactccaagatggttaatatgaacagatattccgaaaggagtttgccactttt

SEQ ID NO: 15119 - DNA, 115 bp, Homo sapiens
  MAP TO AB017653.1; EXPRESSED IN BONE MARROW, SIGNAL =   2; EXPRESSED IN LUNG, SIGNAL = 2.7; EXPRESSED IN HEART, SIGNAL =   2; EXPRESSED IN ADULT LIVER, SIGNAL = 3.1; EXPRESSED IN HELA, SIGNAL =   2; EXPRESSED IN BRAIN, SIGNAL = 2.1; EXPRESSED IN FETAL LIVER, SIGNAL = 2.1; EXPRESSED IN PLACENTA, SIGNAL = 2.9; EST_HUMAN HIT: AL043527.1, EVALUE 5.50e-01
tcaaaagagctgattgttgttgacattggcaccactgcaatagtcagagctgggcactggctggctgagccagatcaggaattcatgcacaagtggggtcagatggtcagcaaag

SEQ ID NO: 15120 - DNA, 245 bp, Homo sapiens
  MAP TO CHR22_176.0; EXPRESSED IN FETAL LIVER, SIGNAL = 1.9; EXPRESSED IN PLACENTA, SIGNAL = 1.7; EXPRESSED IN LUNG, SIGNAL =   2; EXPRESSED IN ADULT LIVER, SIGNAL =   2; EXPRESSED IN BONE MARROW, SIGNAL = 1.6; EXPRESSED IN BRAIN, SIGNAL =   2; SWISSPROT HIT: P87167, EVALUE 4.70e-01; EST_HUMAN HIT: AL040566.1, EVALUE 0.00e+00; NT HIT: gi14777960, EVALUE 0.00e+00
ccagcttgggcactatgtttttgaccatgaatgcttcccaggagccaggagtgaagacatccttccagggctggaggatgagcttggcagaggagtcgctggggtgccacttctgcagggcgctggacagcttactacggatgggggaatagagtggctccagccgtgcctgcataaggggcagccatgggtggatccaagagtggatgggaacagtgtctgtgagcgggttccagttttccacc

SEQ ID NO: 15121 - DNA, 196 bp, Homo sapiens
  MAP TO CHR22_123.0; EXPRESSED IN HELA, SIGNAL = 1.3; EXPRESSED IN LUNG, SIGNAL = 1.7; EXPRESSED IN ADULT LIVER, SIGNAL = 1.5; EXPRESSED IN BRAIN, SIGNAL = 1.4; EXPRESSED IN PLACENTA, SIGNAL = 1.5; EXPRESSED IN HEART, SIGNAL = 1.4; EXPRESSED IN FETAL LIVER, SIGNAL = 1.6; EXPRESSED IN BONE MARROW, SIGNAL = 1.6; EST_HUMAN HIT: BG759710.1, EVALUE 1.00e-31
cagcctcctgcttccacagaacaggattcactctggccagaggaggaaattctttgaacttctttgaagtccatgatggtgatgatgatgatgacggtgacggtgatggtgatgagaataatggtgatggtgatgatggagaggaggaggaatctctggctctcctgctgatgtctttctctgaccagtacagtct

SEQ ID NO: 15122 - DNA, 468 bp, Homo sapiens
  MAP TO AL136304.2; EXPRESSED IN FETAL LIVER, SIGNAL = 1.8; EXPRESSED IN PLACENTA, SIGNAL = 2.4; EXPRESSED IN LUNG, SIGNAL = 1.9; EXPRESSED IN ADULT LIVER, SIGNAL =   2; EXPRESSED IN BONE MARROW, SIGNAL = 1.6; EXPRESSED IN BRAIN, SIGNAL = 1.5; EXPRESSED IN HEART, SIGNAL = 1.6; EXPRESSED IN HELA, SIGNAL = 1.3; SWISSPROT HIT: Q14999, EVALUE 3.00e-67; EST_HUMAN HIT: AU134324.1, EVALUE 2.00e-84; NT HIT: gi14781548, EVALUE 0.00e+00
cggtatttgcatgtcacctcgctcctggatcagctgaacgacagtgctgcggagccaggagcccagaacacctctgctcctgaggagttgagtggggagaggggtcaactggagctggagttcagtatggccatgggcaccctgatctcggagctggtgcaagccatgcgctgggaccaggcctcagacagaccaaggagctcagcacggtcccccggttccatcttccagcctcagctggcagatgtgagcccagggctccccgctgcccaggctcagccctccttcaggaggtcaagacgttttcgccctcgttctgagttcgcaagtggcaatacctatgctttgtatgtgcgggacacactgcagccggggatgcgagtgcggatgctggatgattatgaggagatcagtgccggggatgagggcgagtttcggcagagcaacaacggtgtgcctcctgtgcag

SEQ ID NO: 15123 - DNA, 132 bp, Homo sapiens
  MAP TO AC011734.4; EXPRESSED IN FETAL LIVER, SIGNAL = 0.59; EXPRESSED IN LUNG, SIGNAL = 0.56; EXPRESSED IN ADULT LIVER, SIGNAL = 1.1; EXPRESSED IN BONE MARROW, SIGNAL = 0.52; EXPRESSED IN BRAIN, SIGNAL = 0.52; SWISSPROT HIT: P38835, EVALUE 2.00e+00; EST_HUMAN HIT: AA872060.1, EVALUE 8.00e-16; NT HIT: gi5730038, EVALUE 5.00e-16
cataaaagtctgtgccttggaattcaacgaactgttggaaagcattttgtgcatcttgctggttgtggaagtgttttccctgaaaaaaactggtgagatgctagaagtggtggttggtgggcgacaggtcag

SEQ ID NO: 15124 - DNA, 165 bp, Homo sapiens
  MAP TO AL136231.3; EXPRESSED IN FETAL LIVER, SIGNAL = 1.1; EXPRESSED IN LUNG, SIGNAL = 1.2; EXPRESSED IN ADULT LIVER, SIGNAL = 1.8; EXPRESSED IN BONE MARROW, SIGNAL = 0.99; EXPRESSED IN BRAIN, SIGNAL = 1.1; EXPRESSED IN PLACENTA, SIGNAL = 1.3; NT HIT: gi8923591, EVALUE 4.00e-88; SWISSPROT HIT: Q10592, EVALUE 4.40e+00; EST_HUMAN HIT: R53914.1, EVALUE 6.00e-88
ctgtggtaaggattctaataaacctatagatccaacaccagaatggggaacatgattctgaactgtcataggttgaaaactttgtgattgagaataaagtcttactcttgacttgaaagcttcaagttcatttttgaatgcttcaaaataaccttcttcctctgc

SEQ ID NO: 15125 - DNA, 131 bp, Homo sapiens
  MAP TO CHR22_177.0; EXPRESSED IN BONE MARROW, SIGNAL = 0.76; EXPRESSED IN BRAIN, SIGNAL = 0.69; EXPRESSED IN HELA, SIGNAL = 0.85; EXPRESSED IN PLACENTA, SIGNAL = 0.89; EXPRESSED IN LUNG, SIGNAL = 0.96; EXPRESSED IN ADULT LIVER, SIGNAL = 0.84; EXPRESSED IN FETAL LIVER, SIGNAL = 0.74; NT HIT: L27440.1, EVALUE 1.10e-01; SWISSPROT HIT: P95180, EVALUE 5.20e-01; EST_HUMAN HIT: BG749349.1, EVALUE 6.50e-01
agcagcatccctccagtgcacgcacagacgcccatgacccgcagccagcccggccaggcagccttgtctcccctcaacagcacagacttcgaagtcacggggaacggcgtgtgctttaaaccacagcgagg

SEQ ID NO: 15126 - DNA, 118 bp, Homo sapiens
  MAP TO AL137067.3; EXPRESSED IN BONE MARROW, SIGNAL =  18; EXPRESSED IN BRAIN, SIGNAL =  24; EXPRESSED IN HELA, SIGNAL = 1.8; EXPRESSED IN PLACENTA, SIGNAL =  32; EXPRESSED IN FETAL LIVER, SIGNAL =  21; EXPRESSED IN LUNG, SIGNAL =  35; EXPRESSED IN ADULT LIVER, SIGNAL =  38; EXPRESSED IN HEART, SIGNAL =  32; NT HIT: gi10946917, EVALUE 3.90e-01; SWISSPROT HIT: P40825, EVALUE 4.60e+00; EST_HUMAN HIT: AA935024.1, EVALUE 1.40e-01
agaggcgctcaggacctggagacctccaagctgctgctgacttttgagtttcacaacgttgagaaggtagggggtattattttcaatacatctcttctagagaaggatgaaataaaat

SEQ ID NO: 15127 - DNA, 276 bp, Homo sapiens
  MAP TO AL133476.4; EXPRESSED IN FETAL LIVER, SIGNAL = 1.5; EXPRESSED IN BONE MARROW, SIGNAL = 1.3; EXPRESSED IN BRAIN, SIGNAL = 0.75; EXPRESSED IN PLACENTA, SIGNAL = 1.5; EXPRESSED IN LUNG, SIGNAL = 2.1; NT HIT: gi14739639, EVALUE 7.00e-85; SWISSPROT HIT: O14647, EVALUE 6.70e+00; EST_HUMAN HIT: AL548270.1, EVALUE 2.00e-61
ctactggattttcttttctgattttctcagcggcatcagctttgtaattttaagagcaattgtgtagatctgagtaacagtgtacaccacagtaaacatttctacaccgcattcaaacctagtaagtcccactttcttcctgcacatgaaacagagattctttttttgttttggtttttcaagagacttgctttgctcttcagatggctgctgtgccatgtctgatactgaagcctgcagatcttctgtttcaggtactgcttgtccacagatgta

SEQ ID NO: 15128 - DNA, 256 bp, Homo sapiens
  MAP TO AC020550.2; EXPRESSED IN BONE MARROW, SIGNAL = 0.43; EXPRESSED IN BRAIN, SIGNAL = 0.52; EXPRESSED IN FETAL LIVER, SIGNAL = 0.41; EST_HUMAN HIT: R13320.1, EVALUE 6.00e-80; SWISSPROT HIT: P23723, EVALUE 8.50e-01
atgaaatttgttggattcatatcacagcattattctccatctaaattctgcaatggaaccaaccatgatggagatatagaatcgatgctacatgtgagacacggttcagatgaaaactgtagaagttggaatgaagggacgttaagtgggcagtcatctgaaagcggaattgaggaagaacttcatcatgaaagtggacagtatcaaatggaacaaaatggcagccctacttcctctaaatcaagaaagggagaag

SEQ ID NO: 15129 - DNA, 249 bp, Homo sapiens
  MAP TO AC017050.4; EXPRESSED IN BRAIN, SIGNAL = 5.9; EXPRESSED IN ADULT LIVER, SIGNAL =  16; EXPRESSED IN LUNG, SIGNAL =  18; EXPRESSED IN FETAL LIVER, SIGNAL =  17; EXPRESSED IN BONE MARROW, SIGNAL =  15; SWISSPROT HIT: P09651, EVALUE 6.00e-21; EST_HUMAN HIT: AL513688.1, EVALUE 1.00e-84; NT HIT: M84334.1, EVALUE 2.00e-82
ctacatgaccaaatttgtcattcccaccaaaaccacctccacaaccaccacaaaagtttccaaaacgactttgacctctttggctggtgaagcactagccatctcttgctttgacagggctttcctaactttacagctgtggccattcatagtatggtgtttttgaatgccaatcttatctacggactcatggttgtcaaaggttgcaaaggcaaaggcccttttcttgccactgcctcggtcagtcat

SEQ ID NO: 15130 - DNA, 77 bp, Homo sapiens
  MAP TO AL138893.2; EXPRESSED IN BRAIN, SIGNAL = 4.3; EXPRESSED IN FETAL LIVER, SIGNAL =   4; EXPRESSED IN BONE MARROW, SIGNAL = 3.9; EXPRESSED IN HEART, SIGNAL = 3.9; EXPRESSED IN PLACENTA, SIGNAL = 4.2; EXPRESSED IN LUNG, SIGNAL = 4.3; EXPRESSED IN ADULT LIVER, SIGNAL =   5; SWISSPROT HIT: P29089, EVALUE 2.10e+00; NT HIT: X83220.1, EVALUE 5.80e-02
gaagacaagaaaaggtacaacaaatcccagaaggttcctgaaaaggaagaggcttacaggagaagctgtctgggcaa

SEQ ID NO: 15131 - DNA, 101 bp, Homo sapiens
  MAP TO AL034373.13; EXPRESSED IN BONE MARROW, SIGNAL = 1.9; EXPRESSED IN PLACENTA, SIGNAL = 1.7; EXPRESSED IN BRAIN, SIGNAL = 1.9; EXPRESSED IN FETAL LIVER, SIGNAL = 1.6; EXPRESSED IN HEART, SIGNAL = 1.5; EST_HUMAN HIT: AA729888.1, EVALUE 1.00e-10; NT HIT: AJ271735.1, EVALUE 2.00e-05
ttacagactatcacagactagataatttattaaaaatagaggtatatttgcctcacaattctggaggctgggaatttcaagatggaggggctgcatctggt

SEQ ID NO: 15132 - DNA, 143 bp, Homo sapiens
  MAP TO AL121957.3; EXPRESSED IN BRAIN, SIGNAL = 0.52; EXPRESSED IN PLACENTA, SIGNAL = 0.58; EXPRESSED IN HELA, SIGNAL = 0.72; EXPRESSED IN FETAL LIVER, SIGNAL = 0.55; SWISSPROT HIT: Q03052, EVALUE 1.20e+00; EST_HUMAN HIT: BE818989.1, EVALUE 7.00e-75; NT HIT: gi16162600, EVALUE 5.00e-75
ctggctgtggtaagcagagggtgctgagtgcccaccagcttccgcacctgcatagcgatgttgctgagctcgtcgctcagcaggcagcgaaggctcatgaaggacgtggggtaccccacgatcttctccgcctctgacactac

SEQ ID NO: 15133 - DNA, 118 bp, Homo sapiens
  MAP TO AC011950.4; EXPRESSED IN BONE MARROW, SIGNAL = 1.4; EXPRESSED IN LUNG, SIGNAL = 1.8; EXPRESSED IN HELA, SIGNAL =   1; EXPRESSED IN FETAL LIVER, SIGNAL = 1.3; EXPRESSED IN PLACENTA, SIGNAL = 1.6; EXPRESSED IN ADULT LIVER, SIGNAL = 1.5; EXPRESSED IN BRAIN, SIGNAL = 1.7; EXPRESSED IN HEART, SIGNAL = 1.6; NT HIT: S80050.1, EVALUE 4.00e-04; EST_HUMAN HIT: BE169211.1, EVALUE 9.00e-03
atgaagactgaccaccaacacaagcacagctctcccaaagacaaacagaaatcatacgttctagaccagttgttctcaaaatgtggtccctggacagcagaaacagcatcatcactgg

SEQ ID NO: 15134 - DNA, 105 bp, Homo sapiens
  MAP TO AL121939.3; EXPRESSED IN PLACENTA, SIGNAL =   1; EXPRESSED IN HELA, SIGNAL = 1.2; EXPRESSED IN BRAIN, SIGNAL = 2.3; EXPRESSED IN FETAL LIVER, SIGNAL = 1.6; EXPRESSED IN BONE MARROW, SIGNAL = 1.8; EXPRESSED IN HEART, SIGNAL = 1.4; NT HIT: gi7662227, EVALUE 2.00e-52; SWISSPROT HIT: Q05140, EVALUE 1.00e-14; EST_HUMAN HIT: BG183504.1, EVALUE 2.00e-52
cctcctgctgggacaggcatgcccatgatgcctcagcagccggtcatgtttgcacagcccatgatgaggcccccctttggagctgccgctgtacctggcacgcag

SEQ ID NO: 15135 - DNA, 162 bp, Homo sapiens
  MAP TO AC020698.2; EXPRESSED IN FETAL LIVER, SIGNAL = 0.64; EXPRESSED IN BONE MARROW, SIGNAL = 0.66; EXPRESSED IN BRAIN, SIGNAL = 0.75; NT HIT: D26607.1, EVALUE 2.20e+00; SWISSPROT HIT: Q60519, EVALUE 3.40e+00; EST_HUMAN HIT: BG828432.1, EVALUE 2.10e-01
atcatcgttcagcttctctgagcacatagcaagaaaaaccacatcgttggcacagtgggaatgggggacaagctggggaaagttttccacttctggaaatgcatgcagaggagtccagagggaggggatgagaagcaccgcctgccctggctgcagcagcat

SEQ ID NO: 15136 - DNA, 183 bp, Homo sapiens
  MAP TO AL138895.4; EXPRESSED IN FETAL LIVER, SIGNAL = 2.1; EXPRESSED IN BONE MARROW, SIGNAL = 1.7; EXPRESSED IN BRAIN, SIGNAL = 1.9; EXPRESSED IN HEART, SIGNAL = 1.8; EXPRESSED IN PLACENTA, SIGNAL = 1.8; EXPRESSED IN LUNG, SIGNAL = 2.1; EXPRESSED IN ADULT LIVER, SIGNAL = 2.2; EST_HUMAN HIT: AI908402.1, EVALUE 1.00e-98; NT HIT: gi14735271, EVALUE 9.00e-99; SWISSPROT HIT: Q15700, EVALUE 2.20e-01
ctagagcatcacattgaactcagtgaccagaaagtcaatgtagtcacggtccttagtcttgaaggcctcggcgataatgcgggcggcctcccggtgctccttgccccgaagcgtcagcccattcacttccagaatcacgtggcccaccttgagctgcccacagttgtgagctgagccgcctct

SEQ ID NO: 15137 - DNA, 132 bp, Homo sapiens
  MAP TO AL121994.3; EXPRESSED IN BRAIN, SIGNAL = 0.8; EXPRESSED IN HELA, SIGNAL = 1.3; EXPRESSED IN BONE MARROW, SIGNAL = 0.86; SWISSPROT HIT: P12957, EVALUE 7.80e+00
ctggcagctgaatccatagtttactccttcccatcgggtcctctttcctccctatttccagcctcttgtctttggggactggacagatatctgttccaaacttgagggtcttatagcacccagagatgtgac

SEQ ID NO: 15138 - DNA, 202 bp, Homo sapiens
  MAP TO AL136303.3; EXPRESSED IN HEART, SIGNAL =   6; EXPRESSED IN PLACENTA, SIGNAL = 7.9; EXPRESSED IN LUNG, SIGNAL = 7.3; EXPRESSED IN ADULT LIVER, SIGNAL = 6.7; EXPRESSED IN FETAL LIVER, SIGNAL =   6; EXPRESSED IN BONE MARROW, SIGNAL = 6.9; EXPRESSED IN BRAIN, SIGNAL = 7.4; SWISSPROT HIT: O00716, EVALUE 5.00e-32; EST_HUMAN HIT: BF906041.1, EVALUE 2.00e-73; NT HIT: Y10479.1, EVALUE 1.00e-110
atccattggacgttgtttttagacttcttcttaatgaggtggatgccttccagaacgttggtgatatcataaatccttctcttttgcacttttagcacttctgctgccttgttcaaatccaataccccatcgggtgactggctcaggagctgaatgaacttcttggtgagcagaccaagagacgtatcataccgcgtttttt

SEQ ID NO: 15139 - DNA, 80 bp, Homo sapiens
  MAP TO AC025179.2; EXPRESSED IN ADULT LIVER, SIGNAL = 0.46; EXPRESSED IN BRAIN, SIGNAL = 0.41; EXPRESSED IN BONE MARROW, SIGNAL = 0.52; EST_HUMAN HIT: BI334348.1, EVALUE 8.90e-02; NT HIT: gi16190349, EVALUE 6.10e-02
gaacattactttttaagcaagttgaacacaaagaatggcaaaatccttcacaatgaacatcgcagtcaatgtgttagaag

SEQ ID NO: 15140 - DNA, 176 bp, Homo sapiens
  MAP TO AL096771.11; EXPRESSED IN FETAL LIVER, SIGNAL = 1.1; EXPRESSED IN PLACENTA, SIGNAL = 1.2; EXPRESSED IN LUNG, SIGNAL = 1.3; EXPRESSED IN BONE MARROW, SIGNAL = 1.1; EXPRESSED IN ADULT LIVER, SIGNAL = 1.4; EXPRESSED IN HELA, SIGNAL = 0.58; EXPRESSED IN BRAIN, SIGNAL = 1.1; NT HIT: Z97341.2, EVALUE 1.60e-01; SWISSPROT HIT: O99825, EVALUE 3.30e+00
ctcatgttttccccctgcaagaccaccaagaaattatcttaggaaaatcaatagaaggcctgacttttggtatagaagccagcaaaacctggagatgtagggaagaaaattatgtcggagaaacacaaaagagggattggtggaccaattctctaacttctgatgaatataactaa

SEQ ID NO: 15141 - DNA, 111 bp, Homo sapiens
  MAP TO AC012544.3; EXPRESSED IN BONE MARROW, SIGNAL = 5.9; EXPRESSED IN ADULT LIVER, SIGNAL =   7; EXPRESSED IN HELA, SIGNAL = 2.4; EXPRESSED IN BRAIN, SIGNAL = 6.5; EXPRESSED IN HEART, SIGNAL = 6.9; EXPRESSED IN FETAL LIVER, SIGNAL = 5.2; EXPRESSED IN LUNG, SIGNAL = 7.8; NT HIT: D87675.1, EVALUE 9.00e-05; EST_HUMAN HIT: AI904786.1, EVALUE 6.00e-41
gtgaggacacagcatccctccccactgtgggacgcagcaatgcgactgagagcagcgctatccaaacaaccaaatctgctgatgccttgatcttggacctctcagctccag

SEQ ID NO: 15142 - DNA, 84 bp, Homo sapiens
  MAP TO AL139150.1; EXPRESSED IN BONE MARROW, SIGNAL = 0.57; EXPRESSED IN BRAIN, SIGNAL = 0.48; EXPRESSED IN FETAL LIVER, SIGNAL = 0.51; EXPRESSED IN LUNG, SIGNAL = 0.58; EXPRESSED IN ADULT LIVER, SIGNAL = 0.8; NT HIT: gi6753243, EVALUE 1.00e+00; EST_HUMAN HIT: AI693256.1, EVALUE 9.50e-02
ctaataataatcacacatgatgtttctgcagtactgtgtctttttcagttttaatacactgttctctttggtctcatggaaatc

SEQ ID NO: 15143 - DNA, 79 bp, Homo sapiens
  MAP TO AC020721.4; EXPRESSED IN FETAL LIVER, SIGNAL = 0.39; EXPRESSED IN ADULT LIVER, SIGNAL = 0.49; EXPRESSED IN LUNG, SIGNAL = 0.47; EXPRESSED IN BONE MARROW, SIGNAL = 0.4; EXPRESSED IN BRAIN, SIGNAL = 0.43; EST_HUMAN HIT: AI636690.1, EVALUE 5.40e+00
ctgctatgtccattgtgacttttggcgccttcaaatgaggccttatttgcatacctgatgaactgaagaatttcaaaca

SEQ ID NO: 15144 - DNA, 131 bp, Homo sapiens
  MAP TO AC016714.2; EXPRESSED IN HELA, SIGNAL = 7.8; EXPRESSED IN FETAL LIVER, SIGNAL =  19; EXPRESSED IN HEART, SIGNAL =  17; EXPRESSED IN BONE MARROW, SIGNAL =  22; EXPRESSED IN PLACENTA, SIGNAL =  22; EXPRESSED IN BRAIN, SIGNAL =  16; EXPRESSED IN ADULT LIVER, SIGNAL =  26; EST_HUMAN HIT: AA491809.1, EVALUE 2.00e-04; NT HIT: AY046055.1, EVALUE 1.00e-04; SWISSPROT HIT: P39192, EVALUE 2.00e-02
gtgattctaccacctctgccttccaaaacactgaaattacaggcatgagccacagcacccagcctgatgcatttgtgaaagtcaccacaactggtgcaaaattatggcaaatggatgtggttaataagagg

SEQ ID NO: 15145 - DNA, 434 bp, Homo sapiens
  MAP TO AC012360.2; EXPRESSED IN BONE MARROW, SIGNAL =   3; EXPRESSED IN LUNG, SIGNAL = 3.3; EXPRESSED IN HELA, SIGNAL = 1.6; EXPRESSED IN PLACENTA, SIGNAL = 3.4; EXPRESSED IN ADULT LIVER, SIGNAL = 3.3; EXPRESSED IN BRAIN, SIGNAL =   3; EXPRESSED IN FETAL LIVER, SIGNAL = 2.9; EXPRESSED IN HEART, SIGNAL = 2.5; EST_HUMAN HIT: BG030857.1, EVALUE 0.00e+00; NT HIT: gi14743325, EVALUE 0.00e+00; SWISSPROT HIT: Q07468, EVALUE 1.70e-02
cttatcgtaggtgtagattaagttttcggacctggccaggccgagagccacctgcatggtcctcctggcatggatgctgtccctcatggcccccatcaggaatgggcagaggagctgcactgaccaggtgtcaggcagcatctgcagcacctgggctgcatcaaattcggtggcgtggcggttcagcaggtccacggcagccacggccagctcgtgggcagtggggccagcatgcaggtagatggccagcagcgtgtgaaagagttgctggcggtggggtgggtctcggccctcggagcaccacaggcagtagtcctcggccgctgcaaagtcctgcagctcgtgcaccaggatatgcagcgccttctcatgctcgcccagcttcccgtgcaggatggcgctctccatgggcaggccagctccctgcagcctct

SEQ ID NO: 15146 - DNA, 174 bp, Homo sapiens
  MAP TO AL139177.1; EXPRESSED IN BRAIN, SIGNAL = 0.43; EXPRESSED IN PLACENTA, SIGNAL = 0.53; EXPRESSED IN LUNG, SIGNAL = 0.46; EXPRESSED IN ADULT LIVER, SIGNAL = 0.44; EXPRESSED IN BONE MARROW, SIGNAL = 0.47; EST_HUMAN HIT: BF376527.1, EVALUE 7.00e-57; NT HIT: D89784.1, EVALUE 1.50e-01; SWISSPROT HIT: P46939, EVALUE 6.60e-01
cttgtgttttgaaatgagttcaccggggctctctctttgccccagtaactgctgagccctcatcatatatgattcaagttccttctgggattcttccatcttcagcctgatgtccaaatctggtgaaacgtcagttaagttcttcaacgctgcaatgagttttaccacattgat

SEQ ID NO: 15147 - DNA, 142 bp, Homo sapiens
  MAP TO CHR21_9.0; EXPRESSED IN HELA, SIGNAL = 0.66; EXPRESSED IN BRAIN, SIGNAL = 1.3; EXPRESSED IN BONE MARROW, SIGNAL = 0.99; EXPRESSED IN ADULT LIVER, SIGNAL = 1.4; SWISSPROT HIT: Q9PL67, EVALUE 1.50e+00; EST_HUMAN HIT: AA804987.1, EVALUE 2.00e-13
ggccatcaaactccaagctatcaaacaaccggagcctcagacaatggttcccttttgctggggacctctgggaggaatctgactgctgttctgcctaaaacaacaccccctgtcaccaaaaagcctgacaccatgacccaaa

SEQ ID NO: 15148 - DNA, 88 bp, Homo sapiens
  MAP TO AL135926.3; EXPRESSED IN FETAL LIVER, SIGNAL = 0.4; EXPRESSED IN BONE MARROW, SIGNAL = 0.45; EXPRESSED IN BRAIN, SIGNAL = 0.47; EXPRESSED IN PLACENTA, SIGNAL = 0.54; EXPRESSED IN LUNG, SIGNAL = 0.47; EXPRESSED IN ADULT LIVER, SIGNAL = 0.51; EST_HUMAN HIT: AL602114.1, EVALUE 6.20e+00; NT HIT: AF399825.1, EVALUE 2.70e-01
ctgagcagcagcacggggcaaagatggcatgtggaactttcttggaattgcaaatatttcagtctggctggggcatagaatatgaaga

SEQ ID NO: 15149 - DNA, 559 bp, Homo sapiens
  MAP TO AC022117.2; EXPRESSED IN BRAIN, SIGNAL = 0.49; EXPRESSED IN HELA, SIGNAL =  12; EXPRESSED IN FETAL LIVER, SIGNAL = 3.4; EXPRESSED IN BONE MARROW, SIGNAL = 0.7; EXPRESSED IN ADULT LIVER, SIGNAL =  11; SWISSPROT HIT: P05783, EVALUE 8.00e-84; EST_HUMAN HIT: BG248547.1, EVALUE 0.00e+00; NT HIT: gi4557887, EVALUE 0.00e+00
atgccattacttccagaccatccagaacctgaggattcagatcttcgcaaatactgtggacaatgcctgcatagttctgcagattgacaatgcccgtcttgccgctgatgactttagagtcaagtatgagacagagctggccatgcgccagtctgtggagaacgacatccacgggctccgcaatgtcattgatgacactgtcactcggctgcagctggagacagagatcgaggctgtcaaggaggagctgctcttcatgaagaagaaccacaaagaggaagcaaaaagcctacaagcccagattgccagctctgggttgatggtggaggtagatgcccccaaatctcaggacctcgccaaggtcatggcagacatccgggcccaatatgacgagctggctcagaagaacggagaggagctggacaagcattggcctcagcagattgaagagagcaccacagtggtcaccactcagtccgccgaggttggagctgctgagacgacgctcacggagctgagacgtacagtgcagttcttggagatgacctggactccatga

SEQ ID NO: 15150 - DNA, 373 bp, Homo sapiens
  MAP TO AC008432.2; EXPRESSED IN HELA, SIGNAL = 1.2; EXPRESSED IN FETAL LIVER, SIGNAL = 2.5; EXPRESSED IN HEART, SIGNAL = 1.5; EXPRESSED IN LUNG, SIGNAL = 1.7; EXPRESSED IN ADULT LIVER, SIGNAL =   2; EXPRESSED IN BONE MARROW, SIGNAL = 2.8; EXPRESSED IN BRAIN, SIGNAL = 2.1; NT HIT: AL163201.2, EVALUE 3.00e-57; SWISSPROT HIT: Q92351, EVALUE 6.80e-02; EST_HUMAN HIT: AW995263.1, EVALUE 2.00e-65
acaccaaacaatatctactagcatcaaaaccatccaggaaaatactacctcatcaaatgaactaaataaggcaccagggaccaatcctggagaaacagagaaatacaaccttttagaaatggctgtgttgaggaaactcaaagaaattcaagataacacagagaaggaattcagaattctatcagataaatttaacaaagacatgaaagtaattttaaataatcaagcagaaattctggagctgaaaactgctattgtcctactaaagaatgcatcagagtgttttaatagcagaatggatcaagcagaagaaagaatcagtgagcttgaagacaggctatttgaaaatacagtgagaggagacaaaaaagaa

SEQ ID NO: 15151 - DNA, 283 bp, Homo sapiens
  MAP TO AC023120.3; EXPRESSED IN FETAL LIVER, SIGNAL = 0.45; EXPRESSED IN BRAIN, SIGNAL = 0.48; EXPRESSED IN PLACENTA, SIGNAL = 0.5; EXPRESSED IN LUNG, SIGNAL = 0.45; NT HIT: gi15300386, EVALUE 0.00e+00; SWISSPROT HIT: P46821, EVALUE 1.10e-02; EST_HUMAN HIT: AW578808.1, EVALUE 1.00e-75
atttaaagctttaaaagaacaaaggctaagagaaacaaagccagaagttggattggtgaatattaagggatatggatctctggaaattcagggttcagacccttcaggatgggaggattgttcttttgacaacagaataaaagccatagaggaatgtaaatctgtaatagagagtaatcgaattagccgtgaaagttcagtggactgcttgaaggagtcaccaaacaagcagcaggagagagcccaaagccagagtggtgtggacttgcaggaagatgtgctt

SEQ ID NO: 15152 - DNA, 118 bp, Homo sapiens
  MAP TO AL138889.2; EXPRESSED IN BRAIN, SIGNAL = 0.54; EXPRESSED IN PLACENTA, SIGNAL = 0.62; EXPRESSED IN ADULT LIVER, SIGNAL = 0.66; EXPRESSED IN FETAL LIVER, SIGNAL = 0.54; EXPRESSED IN BONE MARROW, SIGNAL = 0.5; SWISSPROT HIT: P45479, EVALUE 1.60e+00; NT HIT: AF190403.1, EVALUE 1.50e+00
ctctctcttgagcctgaagaatatgtgtcacctgcctaatgaggcacagcaggtggaatggggttacgaggtgtcaatgaagccattccccaccatgcacagcaaccatatgtggcag

SEQ ID NO: 15153 - DNA, 162 bp, Homo sapiens
  MAP TO AL138740.2; EXPRESSED IN BRAIN, SIGNAL = 0.61; EXPRESSED IN FETAL LIVER, SIGNAL = 0.47; EXPRESSED IN BONE MARROW, SIGNAL = 0.54; EXPRESSED IN PLACENTA, SIGNAL = 0.5; EXPRESSED IN ADULT LIVER, SIGNAL = 0.66; EST_HUMAN HIT: AA453226.1, EVALUE 3.30e+00; NT HIT: AF201894.1, EVALUE 2.20e+00; SWISSPROT HIT: P11369, EVALUE 2.00e-02
gaattatcttggatttttccatatctgaatgactgtattggtttttttcctccaacctattgatggaatgaattgtatcagcatttttgctgatacagaacaatactgccactcctggaataaaccccaaccaagtcattttatcagtcaggatgctttcac

SEQ ID NO: 15154 - DNA, 135 bp, Homo sapiens
  MAP TO AL122013.3; EXPRESSED IN BONE MARROW, SIGNAL =  15; EXPRESSED IN BRAIN, SIGNAL =   2; EXPRESSED IN HELA, SIGNAL =  49; EXPRESSED IN LUNG, SIGNAL =  18; EXPRESSED IN ADULT LIVER, SIGNAL =  18; EST_HUMAN HIT: BI603232.1, EVALUE 8.00e-56; NT HIT: gi13654754, EVALUE 1.00e-53; SWISSPROT HIT: P12970, EVALUE 9.00e-16
aaatggccccactatatcaggttgcagcggcagagagccatcctctgtaagtggatgtaagtgcctcctgccattaaccagttcacccaggccctggaccaccaaacagctactcagctgcttaagctggcccac

SEQ ID NO: 15155 - DNA, 96 bp, Homo sapiens
  MAP TO AL139014.1; EXPRESSED IN BONE MARROW, SIGNAL = 0.74; EXPRESSED IN PLACENTA, SIGNAL = 0.9; EXPRESSED IN ADULT LIVER, SIGNAL = 0.83; EXPRESSED IN HELA, SIGNAL = 0.52; EXPRESSED IN BRAIN, SIGNAL = 0.75; EXPRESSED IN FETAL LIVER, SIGNAL = 0.76; EST_HUMAN HIT: AW754432.1, EVALUE 4.40e-01
cgtttcgtctccagccccatcttcaccaccagaattcaggtccttatcctctttctcttgatccttatcttctttcacaacaaactcctggtcagt

SEQ ID NO: 15156 - DNA, 79 bp, Homo sapiens
  MAP TO AL136113.1; EXPRESSED IN BONE MARROW, SIGNAL = 0.51; EXPRESSED IN BRAIN, SIGNAL = 0.53; EXPRESSED IN FETAL LIVER, SIGNAL = 0.51; EXPRESSED IN PLACENTA, SIGNAL = 0.59; SWISSPROT HIT: P25689, EVALUE 3.00e-10; NT HIT: S94095.1, EVALUE 6.00e-36; EST_HUMAN HIT: AL543669.1, EVALUE 1.40e+00
cacttctcagctgttcaacttcacagaagtgtgttccagtgggagtgtgaataaatgcatggacatgcttaactccatt

SEQ ID NO: 15157 - DNA, 174 bp, Homo sapiens
  MAP TO AJ239319.2; EXPRESSED IN FETAL LIVER, SIGNAL = 0.69; EXPRESSED IN LUNG, SIGNAL = 0.73; EXPRESSED IN ADULT LIVER, SIGNAL = 0.6; EXPRESSED IN BONE MARROW, SIGNAL = 0.67; EXPRESSED IN BRAIN, SIGNAL = 0.5; EST_HUMAN HIT: BG980422.1, EVALUE 3.00e-93; SWISSPROT HIT: P21675, EVALUE 1.00e-28; NT HIT: X07024.1, EVALUE 2.00e-93
atgagagaacaagagaggcaagcttcaggtggtggagagatgttttttatgcgcacacctcaggacctcacaggcaaagatggtgatcttattcttgcagaatatagtgaggaaaatggacccttaatgatgcaggttggcatggcaaccaagataaagaactattataaacgg

SEQ ID NO: 15158 - DNA, 96 bp, Homo sapiens
  MAP TO AL136478.2; EXPRESSED IN BONE MARROW, SIGNAL = 2.3; EXPRESSED IN HELA, SIGNAL = 1.5; EXPRESSED IN BRAIN, SIGNAL = 2.5; EXPRESSED IN HEART, SIGNAL = 2.4; EXPRESSED IN FETAL LIVER, SIGNAL = 2.1; EXPRESSED IN PLACENTA, SIGNAL = 2.9; EXPRESSED IN LUNG, SIGNAL = 3.1; EXPRESSED IN ADULT LIVER, SIGNAL = 2.7; EST_HUMAN HIT: BE879483.1, EVALUE 6.90e+00; NT HIT: Z21513.1, EVALUE 3.00e-01
ttgtttaagatgatgcagctggtggtagagtgggcttgaattcgagtctcactgacaccaaggcccatgctcttgttctgggattctgacctaatt

SEQ ID NO: 15159 - DNA, 82 bp, Homo sapiens
  MAP TO AC011585.3; EXPRESSED IN PLACENTA, SIGNAL = 0.71; EXPRESSED IN BONE MARROW, SIGNAL = 0.72; EXPRESSED IN LUNG, SIGNAL = 0.76; EXPRESSED IN ADULT LIVER, SIGNAL = 0.64; EXPRESSED IN HELA, SIGNAL = 0.55; EXPRESSED IN BRAIN, SIGNAL = 0.64; EXPRESSED IN FETAL LIVER, SIGNAL = 0.58; EST_HUMAN HIT: BG169793.1, EVALUE 1.40e+00; NT HIT: gi13642400, EVALUE 3.90e+00
ctgtcagataaggtgacaatgtcttttcgcaaagcatgtattggcatctttctgcacaagtggtcttaatttgggtcttcat

SEQ ID NO: 15160 - DNA, 188 bp, Homo sapiens
  MAP TO AC021635.3; EXPRESSED IN FETAL LIVER, SIGNAL = 2.1; EXPRESSED IN HEART, SIGNAL = 1.8; EXPRESSED IN PLACENTA, SIGNAL = 2.8; EXPRESSED IN LUNG, SIGNAL = 2.6; EXPRESSED IN BONE MARROW, SIGNAL = 1.9; EXPRESSED IN ADULT LIVER, SIGNAL = 2.9; EXPRESSED IN HELA, SIGNAL = 0.76; EXPRESSED IN BRAIN, SIGNAL = 1.6; NT HIT: AL161583.2, EVALUE 6.60e-01; SWISSPROT HIT: Q09255, EVALUE 1.10e+00
tttaaggacagtaatttttgtatttatttcagccttaccaatatagaaagtcatgtacaccattgaaaagcagagaatgatattagtcagcatattgctaaaaacgtcagccaatatacactgaatgatttttgcacaccaatatccaaatattatgcttcccaaaatgtcatagctgagttcaatgc

SEQ ID NO: 15161 - DNA, 426 bp, Homo sapiens
  MAP TO U82695.2; EXPRESSED IN BONE MARROW, SIGNAL = 3.1; EXPRESSED IN HELA, SIGNAL = 2.5; EXPRESSED IN BRAIN, SIGNAL =   3; EXPRESSED IN FETAL LIVER, SIGNAL = 4.1; EXPRESSED IN PLACENTA, SIGNAL = 4.8; EXPRESSED IN HEART, SIGNAL = 3.1; EXPRESSED IN ADULT LIVER, SIGNAL = 5.5; SWISSPROT HIT: Q24432, EVALUE 6.00e-04; NT HIT: U82695.2, EVALUE 0.00e+00
gtcagctgcagcccatccctggcatcggccacccagacaagcctgaggctgggaagctggaccagttgcgggatcagcccaccccgaagcagggagctcaaggaacccccacccagtccccctccactggctggaaagcgcttcccaggccagggctggccctgaggaaggagtcacccccagtgaccttggagcaggagcagggtcacaacaagggcctggtcgctgagtgggctcagccccaggccacagctgccatgagggctggggcagggaagcccgaggccttgaagctgaggccctggcaggccggcagggaccctcaagctcaagagggggcagcagtcaccgaggaggaccagggccagaggacaggaggccgggaagacaagggaaggggcctgaaacccaggaggccccccaaag

SEQ ID NO: 15162 - DNA, 134 bp, Homo sapiens
  MAP TO AC011225.5; EXPRESSED IN BONE MARROW, SIGNAL = 2.8; EXPRESSED IN BRAIN, SIGNAL = 2.5; EXPRESSED IN HELA, SIGNAL = 1.4; EXPRESSED IN HEART, SIGNAL = 2.4; EXPRESSED IN FETAL LIVER, SIGNAL = 2.8; EXPRESSED IN PLACENTA, SIGNAL = 3.6; EXPRESSED IN ADULT LIVER, SIGNAL = 3.2; EST_HUMAN HIT: AI432374.1, EVALUE 6.60e-01
tattatctcatttccttacaccagtcaaactcagaagaagtggtttttcattctccctacagcctcttcaactaccagatccttcagagcagccagcacaactatcgcttcagcttagttccttatcctgtccc

SEQ ID NO: 15163 - DNA, 104 bp, Homo sapiens
  MAP TO AL137025.2; EXPRESSED IN HEART, SIGNAL = 3.3; EXPRESSED IN PLACENTA, SIGNAL = 4.2; EXPRESSED IN LUNG, SIGNAL = 4.1; EXPRESSED IN FETAL LIVER, SIGNAL = 3.5; EXPRESSED IN ADULT LIVER, SIGNAL = 3.6; EXPRESSED IN BONE MARROW, SIGNAL = 3.7; EXPRESSED IN BRAIN, SIGNAL = 3.7; NT HIT: gi14747760, EVALUE 6.00e-52; EST_HUMAN HIT: AA467897.1, EVALUE 9.00e-52
gttgttggagaccttatgcttcgaatccagcgtattcaagactttactcccaagcttctgttagtcagaaagcggttacttggtttggaacctgaaggccctat

SEQ ID NO: 15164 - DNA, 109 bp, Homo sapiens
  MAP TO AL138974.1; EXPRESSED IN BRAIN, SIGNAL = 0.62; EXPRESSED IN PLACENTA, SIGNAL = 0.58; EXPRESSED IN FETAL LIVER, SIGNAL = 0.58; EXPRESSED IN BONE MARROW, SIGNAL = 0.62; EST_HUMAN HIT: AA824302.1, EVALUE 9.00e-09; SWISSPROT HIT: P31291, EVALUE 8.00e+00; NT HIT: AL116033.1, EVALUE 1.40e+00
catgatgttctcttgtttttgtgggttcactctttacttctaatgtgctttcctcacaattccatttgtcaaatttgatgtagcctttaaagcccagcttaaatttcat

SEQ ID NO: 15165 - DNA, 125 bp, Homo sapiens
  MAP TO AC018692.5; EXPRESSED IN LUNG, SIGNAL = 8.1; EXPRESSED IN BONE MARROW, SIGNAL = 5.8; EXPRESSED IN ADULT LIVER, SIGNAL = 7.7; EXPRESSED IN BRAIN, SIGNAL = 2.7; EXPRESSED IN HELA, SIGNAL = 3.1; EXPRESSED IN FETAL LIVER, SIGNAL = 4.8; EST_HUMAN HIT: BG743171.1, EVALUE 4.00e-36; SWISSPROT HIT: Q05600, EVALUE 4.60e+00; NT HIT: gi14750330, EVALUE 6.00e-31
gagtgaagctgcagaccttcacggtgagtgttacagctcttaaggtggtgcgtctgcagttgctcattcctcctggtgggttcttgatctcactggcctcaggagagaagctggagaccttcgca

SEQ ID NO: 15166 - DNA, 81 bp, Homo sapiens
  MAP TO AC011636.3; EXPRESSED IN BRAIN, SIGNAL = 3.4; EXPRESSED IN HEART, SIGNAL = 3.3; EXPRESSED IN FETAL LIVER, SIGNAL = 3.2; EXPRESSED IN LUNG, SIGNAL = 3.8; EXPRESSED IN BONE MARROW, SIGNAL = 3.7; EXPRESSED IN HELA, SIGNAL = 2.1; EXPRESSED IN ADULT LIVER, SIGNAL = 3.6; EXPRESSED IN PLACENTA, SIGNAL = 3.8; EST_HUMAN HIT: BE567116.1, EVALUE 2.30e-02; SWISSPROT HIT: P35440, EVALUE 6.20e+00; NT HIT: AE004050.1, EVALUE 3.80e+00
atgggaaggtaggagattgccacagctggaccaaggccatgcccggctccatcgtccttgtctcctttgtgtcctcccaca

SEQ ID NO: 15167 - DNA, 186 bp, Homo sapiens
  MAP TO AC020582.3; EXPRESSED IN PLACENTA, SIGNAL = 0.85; EXPRESSED IN LUNG, SIGNAL = 0.89; EXPRESSED IN ADULT LIVER, SIGNAL = 0.93; EXPRESSED IN FETAL LIVER, SIGNAL = 0.83; EXPRESSED IN HELA, SIGNAL = 0.75; EXPRESSED IN BRAIN, SIGNAL = 0.78; EST_HUMAN HIT: BF688900.1, EVALUE 6.20e-02; SWISSPROT HIT: P23206, EVALUE 5.00e-01; NT HIT: gi10092585, EVALUE 4.20e-02
atgcgcttgccggctcagccctgggagggagatgccccgctaactcccctctttacctctctacccccaacgccagaactagcgctggggcaggcggtaggcgcccagctggagacacaccaggccggcccctggagccactggccggatgggcgcggcagggatgtacccggcctgctggggtcg

SEQ ID NO: 15168 - DNA, 76 bp, Homo sapiens
  MAP TO AC016169.3; EXPRESSED IN BONE MARROW, SIGNAL = 0.98; EXPRESSED IN BRAIN, SIGNAL = 0.95; EXPRESSED IN LUNG, SIGNAL = 1.2; EXPRESSED IN PLACENTA, SIGNAL = 1.1; EXPRESSED IN ADULT LIVER, SIGNAL = 1.2; EXPRESSED IN FETAL LIVER, SIGNAL = 1.1; NT HIT: M57386.1, EVALUE 1.50e-02
ctatcagttgtgatgttctagctgctaccacctcagcttcatgggtagtttggtgaccttcctcttcttcacccct

SEQ ID NO: 15169 - DNA, 176 bp, Homo sapiens
  MAP TO AL137071.3; EXPRESSED IN HEART, SIGNAL = 2.5; EXPRESSED IN PLACENTA, SIGNAL = 1.7; EXPRESSED IN HELA, SIGNAL = 3.8; EXPRESSED IN BRAIN, SIGNAL = 2.2; EXPRESSED IN ADULT LIVER, SIGNAL = 1.9; EXPRESSED IN LUNG, SIGNAL = 1.5; EXPRESSED IN FETAL LIVER, SIGNAL = 1.9; EXPRESSED IN BONE MARROW, SIGNAL =   2; NT HIT: gi9910339, EVALUE 6.10e-01; EST_HUMAN HIT: BE221185.1, EVALUE 2.00e-94; SWISSPROT HIT: P26436, EVALUE 6.60e-01
gtttgcaccttctgctccatctcctcaccacatcagcccccggagagttccagctccttcttcaatactgcaaagaacacagcctccctatacccagcagccatcaggttcacacctgaagtcctatcagccagaaacaaactcttcttttcaaccaaatggtatccatgtccatg

SEQ ID NO: 15170 - DNA, 185 bp, Homo sapiens
  MAP TO AC013341.3; EXPRESSED IN LUNG, SIGNAL = 0.49; EXPRESSED IN ADULT LIVER, SIGNAL = 0.5; EXPRESSED IN BRAIN, SIGNAL = 0.5; NT HIT: AF020503.1, EVALUE 1.00e-33; EST_HUMAN HIT: AI276522.1, EVALUE 3.00e-25; SWISSPROT HIT: Q9XTA2, EVALUE 1.90e+00
agttgactataaaacagcctcaggcaagtccttcaggagatattcaagaagacaacattgttctcacaggagctgaccactccatgcctgttactgcccctaaagacctttcagtggaacaacatgtggaggtggaagacagtgagattgatgatcctgaccttgcctactattctacaggctaa

SEQ ID NO: 15171 - DNA, 129 bp, Homo sapiens
  MAP TO AC018671.5; EXPRESSED IN BONE MARROW, SIGNAL = 0.67; EXPRESSED IN BRAIN, SIGNAL = 0.66; EXPRESSED IN HELA, SIGNAL = 0.6; EXPRESSED IN LUNG, SIGNAL = 0.73; EXPRESSED IN FETAL LIVER, SIGNAL = 0.65; EXPRESSED IN ADULT LIVER, SIGNAL = 0.73; NT HIT: gi9506684, EVALUE 1.00e-66; EST_HUMAN HIT: AW630487.1, EVALUE 1.00e-66
ctgcggtagtgttgccgcgagtactgggtctgcagtggcgacagccagcaagagcaacgtcaccagtttccagaggaggggtcctagagccagcgtgaccaacgacagcggccctcgactggtgtccat

SEQ ID NO: 15172 - DNA, 84 bp, Homo sapiens
  MAP TO AL078623.28; EXPRESSED IN HELA, SIGNAL = 0.54; EXPRESSED IN FETAL LIVER, SIGNAL = 0.87; EXPRESSED IN PLACENTA, SIGNAL = 1.2; EXPRESSED IN BRAIN, SIGNAL = 0.95; EXPRESSED IN ADULT LIVER, SIGNAL = 1.1; EST_HUMAN HIT: AA776252.1, EVALUE 6.00e-03; NT HIT: AB067505.1, EVALUE 1.00e+00
cattaccctcatttctcaaaggggattaacctgacctccccgttgattgttatttcaagaaaccaggctctaagaggtaaatca

SEQ ID NO: 15173 - DNA, 175 bp, Homo sapiens
  MAP TO AL137068.1; EXPRESSED IN HELA, SIGNAL =   6; EXPRESSED IN BRAIN, SIGNAL = 2.4; EXPRESSED IN FETAL LIVER, SIGNAL = 2.4; EXPRESSED IN BONE MARROW, SIGNAL = 2.4; EXPRESSED IN PLACENTA, SIGNAL = 2.5; EXPRESSED IN ADULT LIVER, SIGNAL = 3.2; EXPRESSED IN LUNG, SIGNAL = 2.5; SWISSPROT HIT: O60610, EVALUE 1.90e+00; EST_HUMAN HIT: AW592497.1, EVALUE 4.00e-06; NT HIT: AL163213.2, EVALUE 4.00e-05
aggagaaaggcactggaggcttcggtgccagcagtttaaagactgactggagagagggcggaggtggagcaagatggctgaatagaaccccccccgagatagttctccacacaggaacaccaaatagaacaactatccacgcaagacagcaccttcataaaagccataaaatcag

SEQ ID NO: 15174 - DNA, 188 bp, Homo sapiens
  MAP TO AL136105.2; EXPRESSED IN FETAL LIVER, SIGNAL = 0.74; EXPRESSED IN BONE MARROW, SIGNAL = 0.77; EXPRESSED IN ADULT LIVER, SIGNAL = 1.3; EXPRESSED IN LUNG, SIGNAL = 1.1; EXPRESSED IN HELA, SIGNAL =   1; EXPRESSED IN BRAIN, SIGNAL = 0.9; SWISSPROT HIT: Q04832, EVALUE 2.20e-01; EST_HUMAN HIT: BG826844.1, EVALUE 7.00e-88; NT HIT: gi14741621, EVALUE 1.00e-102
tcagtcctcgttcacttcccggctcgcgcgcctcactgctgtggtctccccaccctccccgcgccccgccttctgtgtctggggcgtccctggcggctctgctgggttttggacagggacccgccgctgatcgccacccagctcggcctcctgcacagcctctggagccttggaccgcgactggcttg

SEQ ID NO: 15175 - DNA, 132 bp, Homo sapiens
  MAP TO AC012348.4; EXPRESSED IN LUNG, SIGNAL = 0.58; EXPRESSED IN BONE MARROW, SIGNAL = 0.55; EXPRESSED IN BRAIN, SIGNAL = 0.47; EXPRESSED IN ADULT LIVER, SIGNAL = 0.45; EXPRESSED IN FETAL LIVER, SIGNAL = 0.58; SWISSPROT HIT: P54076, EVALUE 5.90e+00; EST_HUMAN HIT: BF698053.1, EVALUE 2.60e+00; NT HIT: AL163213.2, EVALUE 1.10e-01
caaggctgatatagctatggctacctctgaatacccaaccttccagcaacagagaccagtgataaatttccaacatgacacgttcctcatggaatactcctggaaggtccagaggttcacagggatggatac

SEQ ID NO: 15176 - DNA, 85 bp, Homo sapiens
  MAP TO AC016683.4; EXPRESSED IN PLACENTA, SIGNAL = 2.5; EXPRESSED IN ADULT LIVER, SIGNAL = 2.5; EXPRESSED IN HELA, SIGNAL =   1; EXPRESSED IN FETAL LIVER, SIGNAL =   2; EXPRESSED IN LUNG, SIGNAL = 2.3; EXPRESSED IN BONE MARROW, SIGNAL =   2; EXPRESSED IN BRAIN, SIGNAL = 1.5; EXPRESSED IN HEART, SIGNAL = 2.6; NT HIT: AY051430.1, EVALUE 2.60e-01; SWISSPROT HIT: P51294, EVALUE 6.20e+00; EST_HUMAN HIT: BF740353.1, EVALUE 2.00e-40
atctggctggtcccctccttcccatcttgatagccccctgcacccagggtggaccagcccagctcctcaaccacaggttggagga

SEQ ID NO: 15177 - DNA, 103 bp, Homo sapiens
  MAP TO AL137019.1; EXPRESSED IN BRAIN, SIGNAL = 0.95; EXPRESSED IN PLACENTA, SIGNAL = 1.1; EXPRESSED IN BONE MARROW, SIGNAL = 0.87; EXPRESSED IN LUNG, SIGNAL = 1.1; EXPRESSED IN ADULT LIVER, SIGNAL =   1; NT HIT: X13452.1, EVALUE 5.10e+00; EST_HUMAN HIT: BI011980.1, EVALUE 1.20e-01
gtttcaggacttgaaagaattccagctgactgaccgaatgtttaatcttcatgaaaccaacaagatggtggcttttggagtcaggcctgggagaaaattctag

SEQ ID NO: 15178 - DNA, 124 bp, Homo sapiens
  MAP TO AL121836.9; EXPRESSED IN BONE MARROW, SIGNAL = 7.3; EXPRESSED IN HELA, SIGNAL = 4.6; EXPRESSED IN BRAIN, SIGNAL = 6.6; EXPRESSED IN HEART, SIGNAL = 5.9; EXPRESSED IN PLACENTA, SIGNAL = 8.8; EXPRESSED IN ADULT LIVER, SIGNAL = 6.7; EXPRESSED IN FETAL LIVER, SIGNAL = 6.5; EXPRESSED IN LUNG, SIGNAL = 8.2; SWISSPROT HIT: P48377, EVALUE 1.00e-07; EST_HUMAN HIT: BI464579.1, EVALUE 1.00e-63
ctttccaaaggtggccgcacaggctggctctaatttctctttcctacagaaatctaagtagtgtgcataaagaatgcaccgtggtaagcaaactccttcacatacaatgtaattctcttcaagc

SEQ ID NO: 15179 - DNA, 83 bp, Homo sapiens
  MAP TO AL136975.1; EXPRESSED IN HEART, SIGNAL = 1.8; EXPRESSED IN PLACENTA, SIGNAL = 2.1; EXPRESSED IN ADULT LIVER, SIGNAL = 2.1; EXPRESSED IN FETAL LIVER, SIGNAL = 1.6; EXPRESSED IN LUNG, SIGNAL = 2.2; EXPRESSED IN BONE MARROW, SIGNAL = 1.8; EXPRESSED IN HELA, SIGNAL = 1.4; EXPRESSED IN BRAIN, SIGNAL = 1.8; NT HIT: U67922.1, EVALUE 1.00e+00
cactcttcaagggcttcctattgtgttcattataaggataaaaccccatatcaagcttcttcaaagtctcatatattttggac

SEQ ID NO: 15180 - DNA, 319 bp, Homo sapiens
  MAP TO CHR22_166.0; EXPRESSED IN FETAL LIVER, SIGNAL = 0.63; EXPRESSED IN BONE MARROW, SIGNAL = 0.72; EXPRESSED IN ADULT LIVER, SIGNAL = 0.63; EXPRESSED IN BRAIN, SIGNAL = 0.7; EST_HUMAN HIT: BF987799.1, EVALUE 7.00e-37; SWISSPROT HIT: P32927, EVALUE 2.00e-27; NT HIT: gi11418060, EVALUE 3.00e-84
ctctgctgtgctcctcagggaggaagagtgctccccagtgctgagggaggggctcggcagcctccacaccaggcaccactgccagattcccgtgcccgaccccgcgacccacggccaatacatcgtctctgttcagccaaggagggcagagaaacacataaagagctcagtgaacagtgagtttgctcctagcccgctgtggggatggtctgggaccagcacaccctcattgtgtaacccgaatcagttcagggttcctcctggccccgtcttcatgtttgtcactttcaaagagatgcagtccagtgaccaaaagtga

SEQ ID NO: 15181 - DNA, 301 bp, Homo sapiens
  MAP TO CHR22_166.0; EXPRESSED IN BRAIN, SIGNAL = 0.54; EST_HUMAN HIT: BI829995.1, EVALUE 0.00e+00; SWISSPROT HIT: P35253, EVALUE 6.20e-02
ctgctcctcggagaccagctggtccaccacattgctcccaaacttgtggcgaatgttgttaggaatgatgctgcccttctggttcgtgggcgtgctcctctggtcctgagcccccaagctgggaccgtcatccgtcccctggcatggctgagccccctctcccgaggtggccctgttctctctcgaggaggatcgagagcccgcattcttcagggacctggactgtgggtccatgcccagagaatccctgctggcagcagtcgggggtggagggggaatctccttcaagtggcactgccct

SEQ ID NO: 15182 - DNA, 116 bp, Homo sapiens
  MAP TO AL138886.1; EXPRESSED IN BONE MARROW, SIGNAL = 0.68; EXPRESSED IN BRAIN, SIGNAL = 0.67; EXPRESSED IN LUNG, SIGNAL = 0.73; EXPRESSED IN FETAL LIVER, SIGNAL = 0.99; EXPRESSED IN ADULT LIVER, SIGNAL = 0.92; EST_HUMAN HIT: BI964041.1, EVALUE 7.00e-59; SWISSPROT HIT: P33908, EVALUE 4.00e-16; NT HIT: gi5174520, EVALUE 5.00e-59
gtaacatcaaaggagcaactatagtagatgccctggatacactttttattatggaaatgaaacatgaatttgaagaagcaaaatcatgggttgaagaaaatttagattttaatgtg

SEQ ID NO: 15183 - DNA, 254 bp, Homo sapiens
  MAP TO CHR22_172.0; EXPRESSED IN BRAIN, SIGNAL = 0.38; SWISSPROT HIT: P16258, EVALUE 5.00e-22; NT HIT: gi14778268, EVALUE 0.00e+00; EST_HUMAN HIT: AI419969.1, EVALUE 0.00e+00
atgactctggggacgacgacgaggctaccaccccagccgacaagagcgagctgcaccacaccctgaagaatctttccctgaagttagatgacctcagcacgtgcaatgacctcatcgccaagcacggcgctgcactccagcgctccctgacagagctggacggcctcaagatcccatctgagagtggggagaagctgaaggtggtgaatgagcgggccaccctcttccgcatcacatccaatgctatgatcaac

SEQ ID NO: 15184 - DNA, 305 bp, Homo sapiens
  MAP TO AL138837.1; EXPRESSED IN LUNG, SIGNAL = 8.3; EXPRESSED IN ADULT LIVER, SIGNAL =   9; EXPRESSED IN HEART, SIGNAL = 5.8; EXPRESSED IN BONE MARROW, SIGNAL = 6.7; EXPRESSED IN PLACENTA, SIGNAL = 8.4; EXPRESSED IN BRAIN, SIGNAL = 5.3; EXPRESSED IN HELA, SIGNAL = 4.5; EXPRESSED IN FETAL LIVER, SIGNAL = 6.6; EST_HUMAN HIT: BE780719.1, EVALUE 0.00e+00; SWISSPROT HIT: O14771, EVALUE 1.00e-29; NT HIT: gi15296967, EVALUE 0.00e+00
atggccctggaattgcaagcccaggcatctccgcagccagagcctgaagaactcctgattgtgaaactggaagaggactcttggggatcagaatccaaactctgggagaaggaccgtggctctgtctctggcccagaggcctcccgccagcgcttcaggcaattccaatacagggatgcagctggaccccacgaggccttcagccagctctgggctctctgctgtcgttggctgaggccggagatccgtctcaaagagcagatcctggagctgctcgtgctggagcagttcctgactatcttgcc

SEQ ID NO: 15185 - DNA, 142 bp, Homo sapiens
  MAP TO CHR22_173.0; EXPRESSED IN PLACENTA, SIGNAL = 0.55; EXPRESSED IN ADULT LIVER, SIGNAL = 0.79; EXPRESSED IN BRAIN, SIGNAL = 0.43; EXPRESSED IN FETAL LIVER, SIGNAL = 0.58; EST_HUMAN HIT: BI824885.1, EVALUE 3.00e-74; SWISSPROT HIT: P04922, EVALUE 2.70e-02; NT HIT: AF237772.1, EVALUE 2.00e-74
agaggctggcggcgctcaagctggaagcagaggacatcgccctgacagccacaagccagaagcacaagctcacagtggtgctggaggccgtgaaccggagtctgcagctggaggagtggcaggccaagtggagcgtggagag

SEQ ID NO: 15186 - DNA, 107 bp, Homo sapiens
  MAP TO AL137795.2; EXPRESSED IN PLACENTA, SIGNAL =  18; EXPRESSED IN BONE MARROW, SIGNAL =  16; EXPRESSED IN LUNG, SIGNAL =  20; EXPRESSED IN ADULT LIVER, SIGNAL =  20; EXPRESSED IN HELA, SIGNAL = 7.2; EXPRESSED IN BRAIN, SIGNAL =  14; EXPRESSED IN HEART, SIGNAL =  14; EXPRESSED IN FETAL LIVER, SIGNAL =  15; EST_HUMAN HIT: R62899.1, EVALUE 5.10e-01; NT HIT: gi9630386, EVALUE 8.70e-02
tgcaaggaactgaactgtgtccacaatgacatggacttggaagaggatcccaggatccagaaaggaatgcagcacaaccaacacctcaactgcagccctgtgaggcc

SEQ ID NO: 15187 - DNA, 179 bp, Homo sapiens
  MAP TO AL138784.1; EXPRESSED IN FETAL LIVER, SIGNAL = 3.9; EXPRESSED IN PLACENTA, SIGNAL = 5.3; EXPRESSED IN ADULT LIVER, SIGNAL = 5.3; EXPRESSED IN BONE MARROW, SIGNAL = 3.9; EXPRESSED IN HEART, SIGNAL = 4.6; EXPRESSED IN BRAIN, SIGNAL = 3.7; NT HIT: D89060.1, EVALUE 2.00e-96; EST_HUMAN HIT: BI199784.1, EVALUE 1.00e-43; SWISSPROT HIT: P39656, EVALUE 7.00e-11
ccagtgaatgctaatttggcagcttctgtttgtaatgctctccaactccctggagaagtggaaagcaccagaacctcccaggtcggactcaccaatgtcggagctggcagctaccagcacactgcctccaccgtcaataaaggcactgatggtctccacgttgatgttgcctccaaaat

SEQ ID NO: 15188 - DNA, 242 bp, Homo sapiens
  MAP TO AL137790.1; EXPRESSED IN BONE MARROW, SIGNAL = 0.88; EXPRESSED IN BRAIN, SIGNAL = 1.2; EXPRESSED IN HELA, SIGNAL = 0.77; EXPRESSED IN FETAL LIVER, SIGNAL = 0.72; EXPRESSED IN PLACENTA, SIGNAL = 0.91; EXPRESSED IN LUNG, SIGNAL = 0.87; EXPRESSED IN ADULT LIVER, SIGNAL = 0.93; EST_HUMAN HIT: AU123498.1, EVALUE 5.00e-28; SWISSPROT HIT: P31662, EVALUE 8.00e-31; NT HIT: S68944.1, EVALUE 2.00e-88
ctggacaagatgctggacccccaggtgtggcgggaggcagctacccaggtcttctttgccttgggcctgggctttggtggtgtcattgccttctccagctacaataagcaggacaacaactgccacttcgatgccgccctggtgtccttcatcaacttcttcacgtcagtgttggccaccctcgtggtgtttgctgtgctgggcttcaaggccaacatcatgaatgagaagtgtgtggtcga

SEQ ID NO: 15189 - DNA, 151 bp, Homo sapiens
  MAP TO CHR22_119.0; EXPRESSED IN PLACENTA, SIGNAL = 0.6; EXPRESSED IN LUNG, SIGNAL = 0.47; EXPRESSED IN BRAIN, SIGNAL = 0.34; EST_HUMAN HIT: BE273626.1, EVALUE 4.90e-02
ttgcagcatcatagagtccttgggaagcgcacgcatctggtatctgtccctgttcaccctgcaagccctccccacccttgaccaccgacttcctgggagctgctgaaggcgtcgggggaggtggggtgaggaggcaggtcaggatggccat

SEQ ID NO: 15190 - DNA, 78 bp, Homo sapiens
  MAP TO AL138995.1; EXPRESSED IN PLACENTA, SIGNAL = 2.5; EXPRESSED IN FETAL LIVER, SIGNAL = 2.1; EXPRESSED IN LUNG, SIGNAL = 2.8; EXPRESSED IN ADULT LIVER, SIGNAL = 2.8; EXPRESSED IN HEART, SIGNAL = 1.8; EXPRESSED IN BONE MARROW, SIGNAL = 2.1; EXPRESSED IN HELA, SIGNAL = 1.1; EXPRESSED IN BRAIN, SIGNAL = 1.8; EST_HUMAN HIT: BE327773.1, EVALUE 3.40e-01; SWISSPROT HIT: O52236, EVALUE 8.20e+00; NT HIT: AF111170.3, EVALUE 2.30e-01
aagcatggtggcctcagggctccaaatgcatgtgttctggtagaccagatagaagctgaatgttgtgttgtaactcat

SEQ ID NO: 15191 - DNA, 185 bp, Homo sapiens
  MAP TO AL138843.2; EXPRESSED IN FETAL LIVER, SIGNAL = 0.44; EXPRESSED IN BONE MARROW, SIGNAL = 0.65; EXPRESSED IN BRAIN, SIGNAL = 0.53; EXPRESSED IN PLACENTA, SIGNAL = 0.72; EXPRESSED IN LUNG, SIGNAL = 0.65; EXPRESSED IN ADULT LIVER, SIGNAL = 0.65; EST_HUMAN HIT: BE883091.1, EVALUE 8.00e-94; SWISSPROT HIT: Q9UL18, EVALUE 1.00e-30; NT HIT: gi14733037, EVALUE 1.00e-100
catacactggtgtcttccccggcaggatgacgataataagctgtaggccagaatatgtgttcttgagatgccggaacatgggctctacgctgtctgccccctgtgcatatttgcagaagcatggctggccctggatgggcatccctgcatccttagaaatcttacgcagctggtctgtgaaaccc

SEQ ID NO: 15192 - DNA, 169 bp, Homo sapiens
  MAP TO CHR22_74.0; EXPRESSED IN LUNG, SIGNAL = 0.45; EXPRESSED IN ADULT LIVER, SIGNAL = 0.66; EXPRESSED IN HELA, SIGNAL =   1; EXPRESSED IN BRAIN, SIGNAL = 0.39; EST_HUMAN HIT: BG000295.1, EVALUE 2.00e-14; SWISSPROT HIT: P34956, EVALUE 1.90e+00; NT HIT: AL163210.2, EVALUE 3.00e-15
taacaagtttcaaacattccttcgtcttcctgtcttcttctgagccctccaaattcttccaattgctgctcattacccagttccaaagccacttccacatcttcaggtatctttataacaaaactgcactccttcataccaattttctgttttaggccatttgtacgac

SEQ ID NO: 15193 - DNA, 391 bp, Homo sapiens
  MAP TO CHR22_121.0; EXPRESSED IN FETAL LIVER, SIGNAL = 0.77; EXPRESSED IN BONE MARROW, SIGNAL = 0.84; EXPRESSED IN HELA, SIGNAL = 1.2; EXPRESSED IN BRAIN, SIGNAL = 0.53; EXPRESSED IN LUNG, SIGNAL =   1; EXPRESSED IN ADULT LIVER, SIGNAL = 0.78; EST_HUMAN HIT: AW501067.1, EVALUE 0.00e+00; SWISSPROT HIT: Q00955, EVALUE 3.20e+00; NT HIT: gi14779313, EVALUE 0.00e+00
ctggatggttttggtgagcttcagagcaggggtcactgtcccaatgggtgggtttatgaaggcagcaggggaactcctcttcaagctgatcttctcccgggcatcagcaacctggcggggcttctggggcaccgtggtctgctgcttgcgagagttcaacatctctctggcatcctgcactttccctttgattcgaaatcgggcatctttctgcaaaagcttctcccgggcatccttgactcccagtttgagccgggcatctgagaggccaatcttctgccgggcatcaaatctctgctggaaggtggctgtgcgtgttgactggctgagaaggccttgctggatcccaactcgagatcggacacctccaactcccggtctggcattaagc

SEQ ID NO: 15194 - DNA, 157 bp, Homo sapiens
  MAP TO AL136382.1; EXPRESSED IN FETAL LIVER, SIGNAL =   1; EXPRESSED IN LUNG, SIGNAL = 0.63; EXPRESSED IN ADULT LIVER, SIGNAL = 0.71; EXPRESSED IN BONE MARROW, SIGNAL = 0.8; EXPRESSED IN BRAIN, SIGNAL = 0.88; EST_HUMAN HIT: BF824909.1, EVALUE 6.00e-11; SWISSPROT HIT: O08696, EVALUE 1.00e+01; NT HIT: AY049244.1, EVALUE 2.10e+00
tctgaatgaccacagccaacaggactggcaatttcaagtcctgcatttgaaaccaatcgagtctttccacctggaacaaaacagacttgagatttgtgagcctagctttgtcccattggtctaaaggagactgaaactcaacatcaagatgagaaaa

SEQ ID NO: 15195 - DNA, 248 bp, Homo sapiens
  MAP TO CHR22_177.0; EXPRESSED IN PLACENTA, SIGNAL =   2; EXPRESSED IN HELA, SIGNAL = 0.8; EXPRESSED IN BRAIN, SIGNAL = 1.2; EXPRESSED IN ADULT LIVER, SIGNAL = 1.9; EXPRESSED IN LUNG, SIGNAL = 1.6; EXPRESSED IN BONE MARROW, SIGNAL =   1; SWISSPROT HIT: Q16983, EVALUE 3.00e-09; NT HIT: gi11418322, EVALUE 5.00e-95; EST_HUMAN HIT: AW369712.1, EVALUE 1.00e-77
ttatgcagggccactctgtgcatcctcacctgtgacaatggccgggatgccccagcccacgacgtagtagaaccgcatgggccccgtgtcgatgttgcgcacctcggtcagcatgcggtagacatgcaggctctccacgagggtccaggcaaaggtgctcatgtagatgtagtggaggaggatggcaaccactgtgcacagaaactgcgcagggaggggccgctcagcaagggcccctgcatcccagg

SEQ ID NO: 15196 - DNA, 81 bp, Homo sapiens
  MAP TO AC015819.4; EXPRESSED IN BONE MARROW, SIGNAL = 0.59; EXPRESSED IN BRAIN, SIGNAL = 0.7; EXPRESSED IN LUNG, SIGNAL = 0.63; EXPRESSED IN FETAL LIVER, SIGNAL = 0.59; EST_HUMAN HIT: AA487098.1, EVALUE 3.60e-01; NT HIT: Z74817.1, EVALUE 6.20e-02; SWISSPROT HIT: Q90421, EVALUE 8.20e+00
atggggtggtccatagattggctggagcaactgcagcctgagaacacaaaggtggtcatcatcctgccttcccatgagaag

SEQ ID NO: 15197 - DNA, 244 bp, Homo sapiens
  MAP TO AC020588.4; EXPRESSED IN FETAL LIVER, SIGNAL = 0.56; EXPRESSED IN BONE MARROW, SIGNAL = 0.74; EXPRESSED IN BRAIN, SIGNAL = 0.45; EXPRESSED IN LUNG, SIGNAL = 0.99; EST_HUMAN HIT: AA663213.1, EVALUE 1.00e-96; NT HIT: AJ278581.1, EVALUE 4.00e-92; SWISSPROT HIT: P29783, EVALUE 2.30e+00
cttgctgaccagtagggaatttgtccctttcttcggctgtcattctatcatttacttgactaagataccaggtatctccaaactctcgggctgcagctaaagccacattcttttcataaaaggccagggtttgatctaacagtagcatgacatctctccaagcgaggtcaaaggtttgccctagaccctgtaggacatctatgtgcctatcaggatcatctgaaaacttccccaggtctgcctt

SEQ ID NO: 15198 - DNA, 263 bp, Homo sapiens
  MAP TO CHR22_137.0; EXPRESSED IN HELA, SIGNAL = 1.7; EXPRESSED IN BRAIN, SIGNAL = 0.73; EXPRESSED IN FETAL LIVER, SIGNAL = 0.6; EXPRESSED IN BONE MARROW, SIGNAL = 0.68; EXPRESSED IN LUNG, SIGNAL = 0.59; EST_HUMAN HIT: AI291129.1, EVALUE 0.00e+00; NT HIT: AJ297258.1, EVALUE 0.00e+00; SWISSPROT HIT: Q51130, EVALUE 7.10e-01
cattcttccgctcactaagtggaggcaaattgggattcctgccagggtggaggcctagggtcagctcgggctgcaaggagagctcctgcagttcattggcaacagcttcactctggggactgggtgccgcagataaggacacgagcactggttcatcatcattttcgccggcccctcctccgtccagcccattcacagcaatgacggaagggggcaggcacaccacactggagaaatccactttggctttcgtgatggcaatc

SEQ ID NO: 15199 - DNA, 124 bp, Homo sapiens
  MAP TO AC018415.3; EXPRESSED IN BRAIN, SIGNAL = 1.1; EXPRESSED IN LUNG, SIGNAL = 0.99; EXPRESSED IN ADULT LIVER, SIGNAL = 1.1; EXPRESSED IN HELA, SIGNAL = 0.58; EXPRESSED IN FETAL LIVER, SIGNAL =   1; EXPRESSED IN BONE MARROW, SIGNAL = 0.93; EST_HUMAN HIT: BE177916.1, EVALUE 1.00e-14; NT HIT: AF283321.1, EVALUE 5.00e-13; SWISSPROT HIT: P08547, EVALUE 3.00e-06
atttgttggcagatacttgaccaaaatagcctctaatgatactttgtatttctgtagtatcagttgtaatgtctcctttattatttctgtttttgtaaatttgggtcttctctccttttctttt

SEQ ID NO: 15200 - DNA, 180 bp, Homo sapiens
  MAP TO AC013816.3; EXPRESSED IN BRAIN, SIGNAL = 0.57; EXPRESSED IN FETAL LIVER, SIGNAL = 0.54; EXPRESSED IN LUNG, SIGNAL = 0.56; EXPRESSED IN ADULT LIVER, SIGNAL = 0.52; NT HIT: AF389851.1, EVALUE 3.00e-06; SWISSPROT HIT: P04046, EVALUE 2.50e+00; EST_HUMAN HIT: BF981685.1, EVALUE 3.00e-07
atgaaggatgagaagaagctggccatgcaaaaaggcatgctgtcacaggagaggaagaatgttttagatacccaatacagtagtggccccttatccatgaggtacatgttctcagactccctgtggatgcatgaaaacatggatagtaccaaaccctgtatatactatgttttttccatc

SEQ ID NO: 15201 - DNA, 145 bp, Homo sapiens
  MAP TO CHR21_15.0; EXPRESSED IN BRAIN, SIGNAL = 1.7; EXPRESSED IN LUNG, SIGNAL = 1.1; EXPRESSED IN ADULT LIVER, SIGNAL = 1.2; EXPRESSED IN HELA, SIGNAL = 3.2; EXPRESSED IN PLACENTA, SIGNAL = 0.99; EXPRESSED IN FETAL LIVER, SIGNAL = 1.6; EXPRESSED IN BONE MARROW, SIGNAL = 1.7; SWISSPROT HIT: P36917, EVALUE 1.30e-01; NT HIT: L44140.1, EVALUE 5.00e-44; EST_HUMAN HIT: AI174899.1, EVALUE 2.00e-41
ggcacaatgcactgcggaaagccgcagggacctctggcctagaaagccaggtattgtccaaggtttctccccatgtgatagcctgcgatatggcctggtgggatgggaaagacctgaccatctcccagcccgacatctgtgaagg

SEQ ID NO: 15202 - DNA, 203 bp, Homo sapiens
  MAP TO CHR22_80.0; EXPRESSED IN HELA, SIGNAL = 2.9; EXPRESSED IN BRAIN, SIGNAL = 0.82; EXPRESSED IN LUNG, SIGNAL = 0.77; EXPRESSED IN FETAL LIVER, SIGNAL = 0.79; EXPRESSED IN PLACENTA, SIGNAL = 0.79; EXPRESSED IN BONE MARROW, SIGNAL = 0.61; SWISSPROT HIT: Q14166, EVALUE 1.00e-34; NT HIT: D63487.1, EVALUE 1.00e-109; EST_HUMAN HIT: BE730974.1, EVALUE 1.00e-108
caccccatgggccagctggtaggtctggttgaacttccacatctcctccagcaccagggccacagcctctgtactgggcagctcaccgtggaactcaatgcccatcaggttggccatgcggtgcagcagcccgggcacctgctgcagctgctggcgcgcgtgctccacacggcacgtccaggcgtggtcgatgaggaagatgc

SEQ ID NO: 15203 - DNA, 193 bp, Homo sapiens
  MAP TO AL160192.1; EXPRESSED IN BRAIN, SIGNAL = 0.64; EXPRESSED IN PLACENTA, SIGNAL = 0.71; EXPRESSED IN LUNG, SIGNAL = 0.62; EXPRESSED IN ADULT LIVER, SIGNAL = 0.64; EXPRESSED IN FETAL LIVER, SIGNAL = 0.64; EXPRESSED IN BONE MARROW, SIGNAL = 0.56; NT HIT: X68741.1, EVALUE 2.70e+00; EST_HUMAN HIT: BG477725.1, EVALUE 2.50e-01
tcagccagttccaagacccatgtcataagaaagattgagtatcttagtcccagcagacatagatgtgtgttcagagtctgaccagacagcttgggtcagttgcccacctctgaggcaaactacagcctcatgcactggatcagatgtggggatggagcccaccccgactgtgttggctgaggatagggcagag

SEQ ID NO: 15204 - DNA, 283 bp, Homo sapiens
  MAP TO AC008424.3; EXPRESSED IN LUNG, SIGNAL = 0.59; EXPRESSED IN BRAIN, SIGNAL = 0.64; EXPRESSED IN PLACENTA, SIGNAL = 0.57; EXPRESSED IN ADULT LIVER, SIGNAL = 0.62; EST_HUMAN HIT: BF057630.1, EVALUE 4.00e-04; NT HIT: gi15296457, EVALUE 0.00e+00; SWISSPROT HIT: Q92187, EVALUE 1.00e-53
ttattgctttacacactttcctgttgtcagttttagagctcctctattatgtagcacatttaatgttttgaattctaatggcattctgtgagggcttgcattggaaaagtacctatattttaagtcatcataataatgatatttgaccgcttttccatttaaatccttagggaagggccagaatccatacaggtgaatttcatcacagaatcttgtggcaagtgtatacatgagaagacctgtgctgggtcttttgataggaactttgttggtcagccagtaa

SEQ ID NO: 15205 - DNA, 81 bp, Homo sapiens
  MAP TO AL138996.1; EXPRESSED IN BRAIN, SIGNAL = 0.64; EXPRESSED IN FETAL LIVER, SIGNAL = 0.44; NT HIT: AJ235270.1, EVALUE 3.80e+00
ctgagggtggttgttagaattaaatttgtgatgtggaggtgcatgtaaagcctttagcccagagcctggtatgtagtacat

SEQ ID NO: 15206 - DNA, 208 bp, Homo sapiens
  MAP TO CHR22_82.0; EXPRESSED IN LUNG, SIGNAL = 0.62; EXPRESSED IN HELA, SIGNAL = 1.8; EXPRESSED IN BRAIN, SIGNAL = 0.4; EXPRESSED IN FETAL LIVER, SIGNAL = 0.44; EXPRESSED IN BONE MARROW, SIGNAL = 0.48; SWISSPROT HIT: P36042, EVALUE 1.90e+00; EST_HUMAN HIT: AA148098.1, EVALUE 6.90e-02; NT HIT: AF364606.1, EVALUE 1.90e-01
tccaggcaccttctctcccactccaccctccaattcctccaggctgatctttccaaagcaaaaatccaggtgagtcacttctgataatggctctccactcccttctggagaaagtccaactcctctgctctgggtacaaagagctccatgttcttgcttcatccttgtctctgacctcacctgctgggcacccgtctctccccaaacc

SEQ ID NO: 15207 - DNA, 275 bp, Homo sapiens
  MAP TO CHR22_179.0; EXPRESSED IN BONE MARROW, SIGNAL = 0.67; EXPRESSED IN BRAIN, SIGNAL = 0.62; SWISSPROT HIT: P05546, EVALUE 9.00e-49; EST_HUMAN HIT: AV655617.1, EVALUE 1.00e-121; NT HIT: gi16167410, EVALUE 0.00e+00
ctgtttgtcatgcttttttgccatctctccaccacccggggtgtcagttgcgcttcgagggtcttcatcccagacatcttgtgtgggaccacaattagcatgctgatgccccccacgtattccagctggaggatgtcgcagtccagctcctggtcatttgctgcgaggaagttccccttggtctgcatcatggaaaccttaactacctctctctcattcagccggaagttgtggttgtgtgtcatttccactgggaatttattcacccaggatcc

SEQ ID NO: 15208 - DNA, 178 bp, Homo sapiens
  MAP TO CHR22_135.0; EXPRESSED IN LUNG, SIGNAL = 0.5; EXPRESSED IN BRAIN, SIGNAL = 0.45; EXPRESSED IN PLACENTA, SIGNAL = 0.65; EXPRESSED IN ADULT LIVER, SIGNAL = 0.56; EXPRESSED IN BONE MARROW, SIGNAL = 0.59; SWISSPROT HIT: Q00827, EVALUE 1.50e+00; NT HIT: AF157501.1, EVALUE 1.60e-01
tggaaattgataataacgatgctggtgacaccatcagtgctgatgtcttccacttctgcttcgcactgggccctggcctgggtgctttctatcctttcatgaatgcttgcaatggccttgaatgagagggtccctggtttacagcagaggagaccagtgtcctttgggatgaagtgac

SEQ ID NO: 15209 - DNA, 197 bp, Homo sapiens
  MAP TO CHR22_103.0; EXPRESSED IN ADULT LIVER, SIGNAL = 0.54; EXPRESSED IN HELA, SIGNAL = 5.1; EXPRESSED IN BRAIN, SIGNAL = 0.45; SWISSPROT HIT: P55881, EVALUE 1.90e+00; EST_HUMAN HIT: BI519931.1, EVALUE 4.10e+00
cgaggccccggccagccacacactccccggtgctaagccaacagccaggctcccgggagatgcagagacccagacccagaccccaggaagcttccatgacttctatttcggagcaaaagtactgctcgcggtcaccaggacggttactaacttgctggggattgtctccaacatcgtaactccactcatttttatct

SEQ ID NO: 15210 - DNA, 223 bp, Homo sapiens
  MAP TO CHR21_61.0; EXPRESSED IN LUNG, SIGNAL = 1.2; EXPRESSED IN FETAL LIVER, SIGNAL = 1.2; EXPRESSED IN ADULT LIVER, SIGNAL = 0.76; EXPRESSED IN HELA, SIGNAL = 3.5; EXPRESSED IN BRAIN, SIGNAL = 1.3; NT HIT: AF270487.1, EVALUE 1.00e-122; SWISSPROT HIT: O15393, EVALUE 6.00e-42; EST_HUMAN HIT: BI761763.1, EVALUE 1.00e-122
ttgaggtgcacactgtcccggatggggatttgggctgcgtgcagacgacggggttggaagcctgcgtcaggaccctcggggcgtactggggcacgggggacgggtagtactgagccggatgcacctcgtagacagtggggaccacagtgggctgtgcgggataggggttttccggttggtatccatggttttcatagtaaggtccaatagctggtggtgaccc

SEQ ID NO: 15211 - DNA, 153 bp, Homo sapiens
  MAP TO CHR21_2.0; EXPRESSED IN BONE MARROW, SIGNAL = 3.3; EXPRESSED IN HELA, SIGNAL = 3.4; EXPRESSED IN LUNG, SIGNAL = 3.4; EXPRESSED IN BRAIN, SIGNAL = 2.9; NT HIT: gi14756516, EVALUE 6.00e-81; SWISSPROT HIT: P55200, EVALUE 2.00e-04; EST_HUMAN HIT: AI138404.1, EVALUE 5.00e-76
agcttggtcaatgtgttctggacaaagcaggaagatgtgactgaaatcctgaaaggtgtcggctcctgcagcacaaggataatgatacatctgggtacatttctcttcacagcatttgatagtggctccaaagtgcttacaaaatgcacatcg

SEQ ID NO: 15212 - DNA, 282 bp, Homo sapiens
  MAP TO AL136109.1; EXPRESSED IN ADULT LIVER, SIGNAL = 0.58; EXPRESSED IN PLACENTA, SIGNAL = 0.59; EXPRESSED IN LUNG, SIGNAL = 0.58; EXPRESSED IN BONE MARROW, SIGNAL = 0.53; EXPRESSED IN BRAIN, SIGNAL = 0.48; EST_HUMAN HIT: T76931.1, EVALUE 3.80e-01; NT HIT: AL163281.2, EVALUE 1.00e+00; SWISSPROT HIT: P06442, EVALUE 5.40e+00
tgtaggcagcaggaagctgcagctctacaaggttgaagtactagtgaaggttagaagctctgtagaacagctggaaattagtaaaattccgagaagcaagaaaaccacagggcaaaattggactacaatctccacaaatctctgggtaacaaccaacttactcagacactgggagacccccaacaagccaagccaaaaaagcagcaatggaaagctagaagaaaacagagatggccgtggctgcatacatcaggggagaccaagtttgcagtctgggcccag

SEQ ID NO: 15213 - DNA, 221 bp, Homo sapiens
  MAP TO CHR22_206.0; EXPRESSED IN HELA, SIGNAL = 1.2; EXPRESSED IN LUNG, SIGNAL = 1.3; EXPRESSED IN ADULT LIVER, SIGNAL = 1.2; EXPRESSED IN BRAIN, SIGNAL = 1.2; EXPRESSED IN PLACENTA, SIGNAL = 1.4; EXPRESSED IN FETAL LIVER, SIGNAL = 1.3; EXPRESSED IN BONE MARROW, SIGNAL = 1.3; SWISSPROT HIT: P24672, EVALUE 8.20e-01; NT HIT: gi13648116, EVALUE 1.00e-121; EST_HUMAN HIT: BE269427.1, EVALUE 1.00e-105
cttaattgagtccctgaagttctggaggacccgcttcctgctgctgccagcctgtgtcaccgccaccaagcgcatcacggagggggaggcccactgcgacatctatggggacaggccccgtgcagacgaggacgagtggcaactcctggatggttttgtccgctttgtggagggcttgaatcgcattcgcaggcggcatcgctcggatcgcatgatgcggg

SEQ ID NO: 15214 - DNA, 185 bp, Homo sapiens
  MAP TO CHR22_138.0; EXPRESSED IN HELA, SIGNAL = 3.3; EXPRESSED IN BRAIN, SIGNAL = 0.29; EXPRESSED IN PLACENTA, SIGNAL = 0.36; SWISSPROT HIT: Q15906, EVALUE 3.80e-01
cacccaggagtgggcccagcttccagtggggagggtgctggccaacgtgctgaccgaggtggcggacacaggaaaccagcccatcccccagcgctccctctgcaggcctcagccctgctcccatgcagagacctgtggggaggtggaggcccaggtcccagcgcagagcaaccgggaacagccag

SEQ ID NO: 15215 - DNA, 75 bp, Homo sapiens
  MAP TO AL096764.11; EXPRESSED IN BONE MARROW, SIGNAL = 0.64; EXPRESSED IN BRAIN, SIGNAL = 0.54; EXPRESSED IN FETAL LIVER, SIGNAL = 0.64; EXPRESSED IN PLACENTA, SIGNAL = 0.8; EXPRESSED IN ADULT LIVER, SIGNAL = 0.53; SWISSPROT HIT: P10383, EVALUE 2.80e-02; NT HIT: gi6679165, EVALUE 2.20e-01; EST_HUMAN HIT: BE250305.1, EVALUE 2.00e-30
ttaggcagcttagggctgtttcgaaagctgactgccaaggatgcctcttgcctctttcgggccatttcggagcag

SEQ ID NO: 15216 - DNA, 294 bp, Homo sapiens
  MAP TO AL160191.1; EXPRESSED IN BRAIN, SIGNAL = 0.47; EXPRESSED IN FETAL LIVER, SIGNAL = 0.71; EXPRESSED IN PLACENTA, SIGNAL = 0.58; EXPRESSED IN LUNG, SIGNAL = 0.76; EXPRESSED IN BONE MARROW, SIGNAL = 0.56; EXPRESSED IN ADULT LIVER, SIGNAL = 0.78; SWISSPROT HIT: Q9UKF2, EVALUE 1.00e-30; EST_HUMAN HIT: AA187886.1, EVALUE 1.00e-01
ttatacaaacagatactgctgaacatggggttccatcctggatgtagatgtcatttggacactcttcctttttcccatcacagtattttggtagatcacatataccacccaagtctctgcaaaccactccaggggcagcatatttacacttatggcagcaaagtcctgtattgcaaacactgccaagagaaagggtacaagaggtctcacaacatctatcactggcacaatctttaagggagccacagtcacattcttccctctgatttttgatattgtctccacaacgaggag

SEQ ID NO: 15217 - DNA, 229 bp, Homo sapiens
  MAP TO AF168787.1; EXPRESSED IN PLACENTA, SIGNAL = 0.85; EXPRESSED IN FETAL LIVER, SIGNAL = 0.81; EXPRESSED IN LUNG, SIGNAL = 0.97; EXPRESSED IN ADULT LIVER, SIGNAL = 0.73; EXPRESSED IN BONE MARROW, SIGNAL = 0.78; EXPRESSED IN BRAIN, SIGNAL = 0.89; EST_HUMAN HIT: BI911331.1, EVALUE 1.00e-111; SWISSPROT HIT: P08399, EVALUE 4.00e-04
ctgactgcccgtggtctgagcgctgccacagcctgcctgtgtgccacagccagttctgaaaacactgagtccctgggggcaggtgactttgcagggccaccctcgcccgctgccacggcctgcctgtgtgccacagccagttctgaaaacactgagtccctgggggcaggtgactttgcagggccaccctcgcccgctgccacggcctgcctgtgtgccacagccagtt

SEQ ID NO: 15218 - DNA, 202 bp, Homo sapiens
  MAP TO AL138743.1; EXPRESSED IN BRAIN, SIGNAL = 0.43; EXPRESSED IN HELA, SIGNAL = 1.7; NT HIT: gi14757722, EVALUE 1.00e-73; EST_HUMAN HIT: BI462070.1, EVALUE 9.00e-97; SWISSPROT HIT: O35777, EVALUE 1.00e-07
attagagtgattagacccccaaattatgctggtccccttatgttgggattgcttttggctgttattggtggacttgtgtatcttcgaagaagtaatatggaatttctctttaataaaactggatgggcttttgcagctttggtgagtgaatttcagaagacaaaaaattatttgaataaaattcctaatagtgtatttttag

SEQ ID NO: 15219 - DNA, 94 bp, Homo sapiens
  MAP TO AC021685.3; EXPRESSED IN LUNG, SIGNAL = 1.3; EXPRESSED IN PLACENTA, SIGNAL = 1.3; EXPRESSED IN HELA, SIGNAL = 0.97; EXPRESSED IN BRAIN, SIGNAL = 1.4; EXPRESSED IN FETAL LIVER, SIGNAL = 1.6; SWISSPROT HIT: Q10475, EVALUE 3.60e+00; NT HIT: D64132.1, EVALUE 2.90e-01
atgcaagtagtattctgtttagctctcattcatcatggctactccaatgtggagggtagccatgttggaaacttggatgggagcaaaaggccag

SEQ ID NO: 15220 - DNA, 223 bp, Homo sapiens
  MAP TO AL137068.1; EXPRESSED IN BRAIN, SIGNAL = 0.4; EXPRESSED IN HELA, SIGNAL = 0.52; EXPRESSED IN FETAL LIVER, SIGNAL = 0.43; SWISSPROT HIT: P28286, EVALUE 4.80e-01; NT HIT: AF056116.1, EVALUE 3.10e+00; EST_HUMAN HIT: AA287320.1, EVALUE 1.00e-109
tatgctgaaattgataaagccccagatgaaagcccttacattggcaaatccagatacaagagaaatatgtttgccacagagagttatattattgacagtgctcaggcagtacagatcaagaagatggagccagatgaacaacttagaaatgatcacatgaacttgagaggccacacaccactggacacgcaactggaagacaaagaaaaaaaaataagtgcag

SEQ ID NO: 15221 - DNA, 202 bp, Homo sapiens
  MAP TO CHR22_134.0; EXPRESSED IN LUNG, SIGNAL = 0.98; EXPRESSED IN FETAL LIVER, SIGNAL = 0.97; EXPRESSED IN BONE MARROW, SIGNAL = 0.89; EXPRESSED IN BRAIN, SIGNAL = 1.1; EXPRESSED IN HELA, SIGNAL = 1.2; SWISSPROT HIT: P40441, EVALUE 7.30e+00; EST_HUMAN HIT: BI093996.1, EVALUE 1.00e+00
gagacaggaagacttggtgttttccatgcttgggccagagggaggtgaggaggagacttactactactgcgggccagggcagccagaagcagcagacgggcacccagcccctcaggtgcgccagttaggagggcttcccagtcagctgcagacgctctgtgacctcccaacagcggctgcctccctctgcaggcccctgtga

SEQ ID NO: 15222 - DNA, 142 bp, Homo sapiens
  MAP TO CHR22_173.0; EXPRESSED IN BRAIN, SIGNAL = 0.7; EXPRESSED IN LUNG, SIGNAL = 0.89; EXPRESSED IN FETAL LIVER, SIGNAL = 0.78; EXPRESSED IN PLACENTA, SIGNAL = 0.78; SWISSPROT HIT: Q02839, EVALUE 3.40e+00; NT HIT: gi15319070, EVALUE 8.00e-74; EST_HUMAN HIT: BI762557.1, EVALUE 1.00e-73
aaaaactggcagggtgcaagctgaatgtggctgaggtgacacagtccgaaatagggcagaaacagaagctgcagacggtgctggaagcagtacatgacctgctgcggccccgaggctgggcgctccggtggagcgtggactg

SEQ ID NO: 15223 - DNA, 251 bp, Homo sapiens
  MAP TO AL035367.1; EXPRESSED IN BONE MARROW, SIGNAL = 3.3; EXPRESSED IN BRAIN, SIGNAL = 3.1; EXPRESSED IN HELA, SIGNAL = 2.3; EXPRESSED IN FETAL LIVER, SIGNAL = 3.1; EXPRESSED IN HEART, SIGNAL = 2.7; EXPRESSED IN PLACENTA, SIGNAL = 3.8; EXPRESSED IN LUNG, SIGNAL = 3.9; EXPRESSED IN ADULT LIVER, SIGNAL = 3.3; SWISSPROT HIT: Q9P286, EVALUE 3.20e+00; NT HIT: gi14761652, EVALUE 9.10e-01
ggaagctcatctggcggctggctaccagctcctctgtctccttgtcgtgggtaggcaggtgcaggtggtggcagaaggtgtagaggaaggccttggagcagagctgggtgagcatgctctggacatgcaggtagtaggtgctgccccgcttgatctgtgtgcggtggtctgccaggcggggcaccagggtgcctctgtaaagggggcagcgcagggttttgttgtcaaggtccaggatgctcgtgtagcgg

SEQ ID NO: 15224 - DNA, 278 bp, Homo sapiens
  MAP TO CHR22_117.0; EXPRESSED IN FETAL LIVER, SIGNAL = 1.3; EXPRESSED IN BRAIN, SIGNAL = 1.6; EXPRESSED IN PLACENTA, SIGNAL = 1.6; EXPRESSED IN LUNG, SIGNAL = 3.9; EXPRESSED IN ADULT LIVER, SIGNAL = 2.4; SWISSPROT HIT: P01709, EVALUE 1.00e-30; NT HIT: X57825.1, EVALUE 0.00e+00; EST_HUMAN HIT: BG759257.1, EVALUE 5.00e-99
ctaataatcagcctcgtcctcagcctggagtccagagatggtcatggaggccgtattgccagacttggagccagagaaacgatcagggacccctgagggctgagtattgacattgtagatcatgggtttggggactgtgcctgggtgctgttggtaccaggagacatagtcataactcccaacatcactgctggttccagtgcaggagatggtgactgactgtccaggagacccggacacggagggaggctgaatcagggcagactgggcccaagagc

SEQ ID NO: 15225 - DNA, 216 bp, Homo sapiens
  MAP TO AL136317.2; EXPRESSED IN BONE MARROW, SIGNAL = 3.8; EXPRESSED IN HEART, SIGNAL = 2.4; EXPRESSED IN BRAIN, SIGNAL = 2.8; EXPRESSED IN HELA, SIGNAL = 2.6; EXPRESSED IN PLACENTA, SIGNAL = 4.7; EXPRESSED IN LUNG, SIGNAL = 5.9; EXPRESSED IN FETAL LIVER, SIGNAL = 3.6; SWISSPROT HIT: P09564, EVALUE 8.60e+00; NT HIT: L78810.1, EVALUE 3.00e-37; EST_HUMAN HIT: BI013264.1, EVALUE 1.00e-62
atgaactgggactattctattaacgtgtccagaattggtgggttcttggtctcactgacttcaagaatgaagctgcagaccctagtggtgagtgttacagttcttaaagatggtgtgtccggaatttgttctgacgttcagacgtgttcggagtttcttccttctggtgggtttgtggtcttgctggcttcaggagtgaagctgcagaccttcgcg

SEQ ID NO: 15226 - DNA, 141 bp, Homo sapiens
  MAP TO AC022525.3; EXPRESSED IN FETAL LIVER, SIGNAL = 0.68; EXPRESSED IN BONE MARROW, SIGNAL = 0.76; EXPRESSED IN BRAIN, SIGNAL = 0.97; EXPRESSED IN PLACENTA, SIGNAL = 0.93; EXPRESSED IN LUNG, SIGNAL = 1.1; EST_HUMAN HIT: BI602083.1, EVALUE 6.00e-20; SWISSPROT HIT: Q9UPE1, EVALUE 4.00e-05; NT HIT: gi4507220, EVALUE 4.00e-20
tcactggatgatagccacctttgcagtagtccgcagggtcctcttgctcatcatctgatccaggatctcctcctttggctctggtggtgtggggtctgccaaaggtggcggtggtggtggtggaggtggaggagaaagaac

SEQ ID NO: 15227 - DNA, 171 bp, Homo sapiens
  MAP TO CHR22_98.0; EXPRESSED IN LUNG, SIGNAL = 1.1; EXPRESSED IN ADULT LIVER, SIGNAL = 1.2; EXPRESSED IN HELA, SIGNAL = 3.4; EXPRESSED IN BRAIN, SIGNAL =   1; EXPRESSED IN FETAL LIVER, SIGNAL =   1; EXPRESSED IN BONE MARROW, SIGNAL = 1.2; SWISSPROT HIT: O15230, EVALUE 3.30e+00; NT HIT: AF034077.2, EVALUE 1.50e-01; EST_HUMAN HIT: BG977376.1, EVALUE 7.00e-57
ctactcctgctttgacttcatctgcaagagagctgagaactgagtgaggcatttctgcttcttgagacttctcttggtgtggcagggcttcctgtccaggaggggctccattgcctcatgccctgggtataaacagtcccagagggctttggaatcagcctgggtcaattc

SEQ ID NO: 15228 - DNA, 180 bp, Homo sapiens
  MAP TO AL133499.1; EXPRESSED IN BRAIN, SIGNAL = 1.5; EXPRESSED IN PLACENTA, SIGNAL = 1.8; EXPRESSED IN LUNG, SIGNAL = 2.2; EXPRESSED IN HELA, SIGNAL = 1.2; EXPRESSED IN FETAL LIVER, SIGNAL = 1.7; EXPRESSED IN BONE MARROW, SIGNAL = 1.6; EXPRESSED IN HEART, SIGNAL = 1.5; SWISSPROT HIT: P80150, EVALUE 7.40e+00; NT HIT: AL163301.2, EVALUE 5.00e-97
agtaatccagagggaggagtttgctagagctagtccagagttcagccatcttagggctctgggtgagtatcgctgcagtacagcagcagcagctttagacaccacttctgtgtttaaggcaggaacaactgagaaggagcaggccgtggagctcttgtctattccttttgtcagagacat

SEQ ID NO: 15229 - DNA, 171 bp, Homo sapiens
  MAP TO AL138499.1; EXPRESSED IN BRAIN, SIGNAL = 0.64; EXPRESSED IN FETAL LIVER, SIGNAL = 0.85; EXPRESSED IN BONE MARROW, SIGNAL = 0.75; EXPRESSED IN PLACENTA, SIGNAL = 1.1; EXPRESSED IN LUNG, SIGNAL = 1.3; EST_HUMAN HIT: BE698736.1, EVALUE 2.00e-91; SWISSPROT HIT: P35503, EVALUE 2.90e-01; NT HIT: L25616.1, EVALUE 1.00e-91
tcttcgtagatgaaccccttattcatgcaactacttatattcctttgatggataatgctgactcaagtcctgtggtagataagagagaggttattgatttgcttaaacctgaccaagtagaagggatccagaaatctgggactaaaaaactgaagaccgaaactgacaaag

SEQ ID NO: 15230 - DNA, 132 bp, Homo sapiens
  MAP TO AC019196.4; EXPRESSED IN BRAIN, SIGNAL = 0.32; EXPRESSED IN PLACENTA, SIGNAL = 0.37; EXPRESSED IN LUNG, SIGNAL = 0.5; SWISSPROT HIT: P57350, EVALUE 9.00e-01
ctggctcttttaaagtggaaaatgacaaccacaagaaaattatccttaatttgcttatgagaagacatgaaattgcagattgaaaatggtgcttttgaatttggtgaggttacaaggaacgtcaggatgatg

SEQ ID NO: 15231 - DNA, 349 bp, Homo sapiens
  MAP TO CHR22_70.0; EXPRESSED IN PLACENTA, SIGNAL = 0.35; EXPRESSED IN BRAIN, SIGNAL = 0.38; EST_HUMAN HIT: BG330617.1, EVALUE 7.50e+00; SWISSPROT HIT: P24258, EVALUE 5.20e-01
aagatggggtctgtccttcttgcacacactccggatcctggggtgttgtccacatgtagactctcccactcctgcttgatcaaacaccagcaccccgtcgttgggggctggacattgaggggaaatggccttaggttctcgcacagatccgtccactgtcctaggagctgtggagtctttgcgagggtacgggagctccccgtcaagcagacgttgttgtggactcactggagactcggggcctcccagggcctgaggctgcggctccccaaggccgtcctcagcttcccatcgatcccattcgtggagcacagtgggtgtttgatgacaaatcacaacttctgcaccc

SEQ ID NO: 15232 - DNA, 125 bp, Homo sapiens
  MAP TO AL136162.4; EXPRESSED IN LUNG, SIGNAL = 7.4; EXPRESSED IN ADULT LIVER, SIGNAL = 6.6; EXPRESSED IN HELA, SIGNAL = 3.6; EXPRESSED IN PLACENTA, SIGNAL = 7.4; EXPRESSED IN BONE MARROW, SIGNAL = 7.2; EXPRESSED IN BRAIN, SIGNAL = 6.7; EXPRESSED IN FETAL LIVER, SIGNAL = 6.7; EXPRESSED IN HEART, SIGNAL = 5.4; NT HIT: V00436.1, EVALUE 6.50e+00; SWISSPROT HIT: P08921, EVALUE 6.00e+00
atgttagagaggaaattatacccactcaagcaccacccactgaataaaaataacagaattagtaaacatctccctctttcatctactttccaaaaacgcttcaagggtccaccactaccacgaaa

SEQ ID NO: 15233 - DNA, 212 bp, Homo sapiens
  MAP TO AL136140.2; EXPRESSED IN BONE MARROW, SIGNAL = 1.3; EXPRESSED IN BRAIN, SIGNAL = 1.2; EXPRESSED IN HELA, SIGNAL = 0.97; EXPRESSED IN HEART, SIGNAL = 1.2; EXPRESSED IN FETAL LIVER, SIGNAL = 1.3; EXPRESSED IN PLACENTA, SIGNAL = 1.6; EXPRESSED IN LUNG, SIGNAL = 1.3; SWISSPROT HIT: P77790, EVALUE 4.80e+00
ctgcacgtgcctcctccacagcccagacgcttatctaaaatatcttttaggacaagaaccaaacccctaagcctggtgagccgaggacctggcggtgtctggctggccggggtgggggctatgtaggcagaagcagatgctggtggaagttcacccaggccccctttgccaggtggccagggacagcatcggccacttccacagggggccat

SEQ ID NO: 15234 - DNA, 123 bp, Homo sapiens
  MAP TO AL121836.9; EXPRESSED IN BRAIN, SIGNAL = 0.5; EXPRESSED IN PLACENTA, SIGNAL = 0.37; SWISSPROT HIT: Q09796, EVALUE 1.60e+00; EST_HUMAN HIT: AA398241.1, EVALUE 3.80e-02; NT HIT: gi13386193, EVALUE 1.60e+00
atgatgaacaaaacagacattgaaaatctgatcaggaatatccatatttccaaattcctccatagtctatggccttctgatgcctgctgtcatggaaaagtgactacactgaccagcactgag

SEQ ID NO: 15235 - DNA, 142 bp, Homo sapiens
  MAP TO AC018464.4; EXPRESSED IN HELA, SIGNAL = 0.65; EXPRESSED IN BRAIN, SIGNAL = 0.63; EXPRESSED IN PLACENTA, SIGNAL = 0.53; EXPRESSED IN LUNG, SIGNAL = 0.49; EXPRESSED IN FETAL LIVER, SIGNAL = 0.55; SWISSPROT HIT: P04937, EVALUE 2.60e+00; EST_HUMAN HIT: AI752674.1, EVALUE 3.00e-74; NT HIT: AF188678.1, EVALUE 1.90e+00
tgggagattttgataagatctggcgagaacactgtgaggatgaagaaactctttgtgaatatgccgttgcaatgaaaaatttggcagataatcattgggcaaaaacttgtgagggcgaaggtcgtattgaatggtgttgtag

SEQ ID NO: 15236 - DNA, 106 bp, Homo sapiens
  MAP TO CHR22_102.0; EXPRESSED IN BRAIN, SIGNAL = 0.89; EXPRESSED IN FETAL LIVER, SIGNAL = 0.94; EXPRESSED IN BONE MARROW, SIGNAL = 0.77; EXPRESSED IN LUNG, SIGNAL = 0.81; EXPRESSED IN PLACENTA, SIGNAL =   1; NT HIT: M18242.1, EVALUE 1.30e+00; SWISSPROT HIT: Q03376, EVALUE 4.70e+00; EST_HUMAN HIT: BG715987.1, EVALUE 2.00e+00
ctggacaaatggccttgcgcatgccgtcttgccagcgttggggacccagtggtggttgtgatgaagactgggtagtgagggtctgtattaacgaattcatgcatag

SEQ ID NO: 15237 - DNA, 85 bp, Homo sapiens
  MAP TO AL136381.1; EXPRESSED IN BONE MARROW, SIGNAL = 1.5; EXPRESSED IN PLACENTA, SIGNAL = 0.95; EXPRESSED IN HELA, SIGNAL = 2.8; EXPRESSED IN BRAIN, SIGNAL = 1.4; EXPRESSED IN FETAL LIVER, SIGNAL = 1.7; EXPRESSED IN HEART, SIGNAL = 1.3; EST_HUMAN HIT: BG537992.1, EVALUE 6.00e-34; NT HIT: Z72807.1, EVALUE 2.60e-01; SWISSPROT HIT: Q13576, EVALUE 8.20e+00
catgaaaatgaaggatatgattcaccagcatgaggaggtaaagcaagaagatggagtgatccaagactcaagtgatccaatgtag

SEQ ID NO: 15238 - DNA, 185 bp, Homo sapiens
  MAP TO CHR22_4.0; EXPRESSED IN BONE MARROW, SIGNAL = 0.87; EXPRESSED IN LUNG, SIGNAL = 0.99; EXPRESSED IN PLACENTA, SIGNAL = 1.2; EXPRESSED IN BRAIN, SIGNAL = 1.1; EXPRESSED IN HELA, SIGNAL = 0.56; EXPRESSED IN FETAL LIVER, SIGNAL = 1.5; NT HIT: AY008200.1, EVALUE 6.50e-01; SWISSPROT HIT: Q37704, EVALUE 3.30e+00
gttaaagccaattcacaaggagactggtcaagagaaataagagaattacccttacttaatgcaatgccactacatagttggctcatactctatagcaggagcagtcacagagaagccatgtccttaaagggtcatctacagagtgtcacagcccccatgggcataactatgaaaccagcagaaat

SEQ ID NO: 15239 - DNA, 132 bp, Homo sapiens
  MAP TO CHR22_163.0; EXPRESSED IN HELA, SIGNAL = 0.5; EXPRESSED IN FETAL LIVER, SIGNAL = 1.1; EXPRESSED IN PLACENTA, SIGNAL = 1.2; EXPRESSED IN ADULT LIVER, SIGNAL = 1.3; EXPRESSED IN LUNG, SIGNAL = 1.1; EXPRESSED IN BONE MARROW, SIGNAL = 0.97; EXPRESSED IN BRAIN, SIGNAL = 1.1; EST_HUMAN HIT: BG573529.1, EVALUE 1.60e-01; NT HIT: L00069.1, EVALUE 1.10e-01; SWISSPROT HIT: O95613, EVALUE 3.50e+00
gactctggaggagggatgtgcacctagccagggctcagagatttcctgggaggaggaggaattggctgtggagaaagagagacagcagaaggattcttttactgatgtgctggcaagagggcttgtggccag

SEQ ID NO: 15240 - DNA, 132 bp, Homo sapiens
  MAP TO AL132875.5; EXPRESSED IN HELA, SIGNAL = 2.3; EXPRESSED IN HEART, SIGNAL = 2.3; EXPRESSED IN FETAL LIVER, SIGNAL = 1.6; EXPRESSED IN PLACENTA, SIGNAL = 1.1; EXPRESSED IN BONE MARROW, SIGNAL = 1.9; EXPRESSED IN BRAIN, SIGNAL = 2.1; EST_HUMAN HIT: BG681489.1, EVALUE 2.60e+00; NT HIT: AJ400878.1, EVALUE 4.40e-01
tgtatgaccttggcaaatgaattaatctcactgcctctgcctccagaacccaatacatgtagcaataatgatggtattgacaatattaacctccacaacaaccttaatgacaacatgaaggcagagatctga

SEQ ID NO: 15241 - DNA, 182 bp, Homo sapiens
  MAP TO CHR22_163.0; EXPRESSED IN PLACENTA, SIGNAL = 0.48; EXPRESSED IN BRAIN, SIGNAL = 0.37; EST_HUMAN HIT: BG567877.1, EVALUE 1.00e-09; SWISSPROT HIT: P47533, EVALUE 2.50e+00; NT HIT: AL163284.2, EVALUE 3.00e-09
atgcacaaattccttagaattttctacacacaagattgtatcgtctgtgtacaaagacagttttacttcttccttttcaatcttgatgccttttatttctttttctttctcgattggactgtccagaactctagcacagtgttgactagaagcagtgagagctgacattctcgtgctgtccc

SEQ ID NO: 15242 - DNA, 161 bp, Homo sapiens
  MAP TO CHR22_182.0; EXPRESSED IN BONE MARROW, SIGNAL =  50; EXPRESSED IN BRAIN, SIGNAL = 0.63; EXPRESSED IN HELA, SIGNAL = 0.62; EXPRESSED IN FETAL LIVER, SIGNAL = 0.82; EXPRESSED IN PLACENTA, SIGNAL = 0.77; EST_HUMAN HIT: AA969353.1, EVALUE 1.00e-85; SWISSPROT HIT: P15814, EVALUE 7.00e-22; NT HIT: gi14777720, EVALUE 1.00e-85
ttctccacggtgctcccttcttgcataacctggcagctgtagcttctgcgggacctccactgctcgggcgtcaggctcaggtagctgctggccacgtacttgttgttgctctgtttggagggcgtggtcttctccacgctctgggtgatgagggtaccatc

SEQ ID NO: 15243 - DNA, 144 bp, Homo sapiens
  MAP TO AC017044.2; EXPRESSED IN BRAIN, SIGNAL = 0.48; EXPRESSED IN LUNG, SIGNAL = 0.75; EXPRESSED IN ADULT LIVER, SIGNAL = 0.62; EXPRESSED IN FETAL LIVER, SIGNAL = 0.58; EXPRESSED IN BONE MARROW, SIGNAL = 0.52; SWISSPROT HIT: Q08790, EVALUE 5.90e+00; NT HIT: AB001523.1, EVALUE 1.90e+00
gaatatgaggagatttttgagatggaaagtctttctgtggtcacaggagtaaacacaaaagagggacagacaccaactgatgaaacagggtgcaatgacaaacagatcgaggactgctataagaaaggattcctcactcagtag

SEQ ID NO: 15244 - DNA, 141 bp, Homo sapiens
  MAP TO AL137846.1; EXPRESSED IN BRAIN, SIGNAL = 0.95; EXPRESSED IN LUNG, SIGNAL = 1.5; EXPRESSED IN ADULT LIVER, SIGNAL = 2.8; EXPRESSED IN FETAL LIVER, SIGNAL = 1.5; EXPRESSED IN BONE MARROW, SIGNAL = 1.2; EXPRESSED IN PLACENTA, SIGNAL = 1.4; EST_HUMAN HIT: BI857706.1, EVALUE 1.00e-73; SWISSPROT HIT: P40306, EVALUE 4.00e-06; NT HIT: gi14744287, EVALUE 7.00e-74
ctgaaaagcatctgcttcagcatccgattggctgtcacaactctgggaagacggccagtggagagggagtggagctccaggttggaagaaatgagctgggttgtcatgtctgtgtctgcagctgtcccagcaccacaacaa

SEQ ID NO: 15245 - DNA, 114 bp, Homo sapiens
  MAP TO AL160313.1; EXPRESSED IN PLACENTA, SIGNAL = 0.99; EXPRESSED IN LUNG, SIGNAL = 0.83; EXPRESSED IN HELA, SIGNAL = 0.67; EXPRESSED IN BRAIN, SIGNAL =   1; EXPRESSED IN ADULT LIVER, SIGNAL = 0.7; EST_HUMAN HIT: BF830307.1, EVALUE 5.50e-01; SWISSPROT HIT: Q04205, EVALUE 1.60e+00
ctttaaggcccacttgtcccatcccatgaggctctgagggcccacgccatcctccctgttgagaccaggagttggcttggggcagttctcagcagctgggctgtcacctctcac

SEQ ID NO: 15246 - DNA, 163 bp, Homo sapiens
  MAP TO CHR22_165.0; EXPRESSED IN FETAL LIVER, SIGNAL = 0.59; EXPRESSED IN BONE MARROW, SIGNAL = 0.56; EXPRESSED IN BRAIN, SIGNAL = 0.59; EXPRESSED IN PLACENTA, SIGNAL = 0.58; EXPRESSED IN ADULT LIVER, SIGNAL = 0.6; SWISSPROT HIT: Q06577, EVALUE 4.00e-12; NT HIT: gi9630747, EVALUE 5.60e-01
ggctcatgaagaacagtacccaagtcctcgagaaggaagccaacgccgaggacaattataggcatgtgtttggaactgtcgtcttgcagctgatgatgggagatagggtctggctaaaatcaaagctagaagcaaaagagaatgagaaagggttgattcaaag

SEQ ID NO: 15247 - DNA, 96 bp, Homo sapiens
  MAP TO AL133553.2; EXPRESSED IN BONE MARROW, SIGNAL = 3.6; EXPRESSED IN HEART, SIGNAL = 2.5; EXPRESSED IN BRAIN, SIGNAL = 3.2; EXPRESSED IN PLACENTA, SIGNAL = 2.6; EXPRESSED IN HELA, SIGNAL = 2.7; EST_HUMAN HIT: AI375687.1, EVALUE 2.80e-02; NT HIT: AF294352.1, EVALUE 7.60e-02
ctagaaacagaaaagaacatggaagatatcatggaagcttttctggccagtgctggaagtggcatatatcacttcttcccttattcaattggctag

SEQ ID NO: 15248 - DNA, 279 bp, Homo sapiens
  MAP TO AL133543.2; EXPRESSED IN PLACENTA, SIGNAL = 0.91; EXPRESSED IN BRAIN, SIGNAL = 0.79; EXPRESSED IN HELA, SIGNAL = 0.78; EXPRESSED IN FETAL LIVER, SIGNAL = 0.86; EST_HUMAN HIT: AI951766.1, EVALUE 0.00e+00; SWISSPROT HIT: P15924, EVALUE 1.00e-29; NT HIT: gi15300248, EVALUE 0.00e+00
cagtctctcacagagaacctgaccaaggagcacttgatgttagaagaagaactgcggaacctgaggctggagtacgatgacctgaggagaggacgaagcgaagcggacagtgataaaaatgcaaccatcttggaactaaggagccagctgcagatcagcaacaaccggaccctggaactgcaggggctgattaatgatttacagagagagagggaaaatttgagacaggaaattgagaaattccaaaagcaggctttagaggtattcacaaatacttga

SEQ ID NO: 15249 - DNA, 123 bp, Homo sapiens
  MAP TO AC013614.4; EXPRESSED IN BONE MARROW, SIGNAL = 1.1; EXPRESSED IN PLACENTA, SIGNAL = 1.7; EXPRESSED IN BRAIN, SIGNAL = 1.5; EXPRESSED IN LUNG, SIGNAL = 1.5; EXPRESSED IN ADULT LIVER, SIGNAL = 1.5; EXPRESSED IN FETAL LIVER, SIGNAL = 1.3; NT HIT: gi15208634, EVALUE 1.60e+00
cacagccctggaattctcttttcttcagctcctggatttgggcatcaattttttttttcttggctttgaacaaagcctctaatttcccgacaaccaaaatgctgtctccagggtatgtgcacc

SEQ ID NO: 15250 - DNA, 239 bp, Homo sapiens
  MAP TO AL138842.2; EXPRESSED IN PLACENTA, SIGNAL = 7.5; EXPRESSED IN BONE MARROW, SIGNAL = 5.9; EXPRESSED IN BRAIN, SIGNAL = 5.2; EXPRESSED IN LUNG, SIGNAL = 6.9; EXPRESSED IN ADULT LIVER, SIGNAL = 7.2; EXPRESSED IN HEART, SIGNAL = 5.9; EXPRESSED IN FETAL LIVER, SIGNAL =   6; EST_HUMAN HIT: BI762786.1, EVALUE 1.00e-93; SWISSPROT HIT: P14501, EVALUE 1.00e+00; NT HIT: J00318.1, EVALUE 2.00e-91
agggagaggcagacgtcacttccccttgccggctccggcagcgggttggtcggctgagcggcagaaaggcagacggggactgggaaaggcactgtcggtgacatcacggatagggcgacttctatgtagatgagccagcgcaggggctgctgcttcgccacatgctgcttcgccacgaaggagttcccgtgccgtgggagcgggttcaggaccgctggtcggacctgagagtcccagct

SEQ ID NO: 15251 - DNA, 166 bp, Homo sapiens
  MAP TO AC019325.3; EXPRESSED IN HELA, SIGNAL = 0.75; EXPRESSED IN FETAL LIVER, SIGNAL = 1.5; EXPRESSED IN BONE MARROW, SIGNAL = 1.3; EXPRESSED IN PLACENTA, SIGNAL = 1.6; EXPRESSED IN BRAIN, SIGNAL = 1.2; EXPRESSED IN LUNG, SIGNAL = 1.5; EXPRESSED IN ADULT LIVER, SIGNAL = 1.3; NT HIT: gi4557468, EVALUE 1.00e-88; EST_HUMAN HIT: BF792705.1, EVALUE 2.00e-88; SWISSPROT HIT: P21851, EVALUE 2.00e-26
gtatgaaagtatcatcgccactctgtgtgagaacttagactcgctggatgagccagatgctcgagcagctatgatttggattgtgggagaatatgctgaaagaattgacaatgcagatgagttactagaaagcttcctggagggttttcacgatgaaagcacccag

SEQ ID NO: 15252 - DNA, 336 bp, Homo sapiens
  MAP TO AL137843.1; EXPRESSED IN BRAIN, SIGNAL = 2.6; EXPRESSED IN FETAL LIVER, SIGNAL = 4.3; EXPRESSED IN PLACENTA, SIGNAL = 5.6; EXPRESSED IN BONE MARROW, SIGNAL = 3.7; EXPRESSED IN LUNG, SIGNAL = 6.3; EXPRESSED IN ADULT LIVER, SIGNAL = 6.4; SWISSPROT HIT: P12956, EVALUE 5.00e-48; NT HIT: S38729.1, EVALUE 1.00e-127; EST_HUMAN HIT: BG120206.1, EVALUE 1.00e-127
gacaagttccttaaactcattcaccatggagcccagtcttttattcatttcttcaaccttgggtaatataaggtccactgcttgttcctccatcaaatacaagatcaagggctccaggttcccgaagtgctgctgcagcacggggttctcaaagctgtcacttctgtatgtgaagcagagcttctgaatgatagccttcatgttgtccacctgctctggagttgccatgactttttcagtaaagggcaccttccttttatcatcagcaaagggtaaaaagaccagctggaaacctggagtagtcacctgaattttctggtcatccaactcctcttc

SEQ ID NO: 15253 - DNA, 110 bp, Homo sapiens
  MAP TO CHR22_184_1.0; EXPRESSED IN HELA, SIGNAL = 0.64; EXPRESSED IN FETAL LIVER, SIGNAL = 0.97; EXPRESSED IN LUNG, SIGNAL = 0.98; EXPRESSED IN PLACENTA, SIGNAL =   1; EXPRESSED IN BONE MARROW, SIGNAL = 1.1; EXPRESSED IN BRAIN, SIGNAL = 0.95; EST_HUMAN HIT: BF830375.1, EVALUE 1.30e-01; SWISSPROT HIT: P54817, EVALUE 9.20e-01
ggggggcatgcagaagccttgatctccgagtggtctgtggccgtgaggtggagagatacaactgctttgtcgaggacccaagggaaaaccgagccgtggctgtctgagtc

SEQ ID NO: 15254 - DNA, 241 bp, Homo sapiens
  MAP TO AL137799.2; EXPRESSED IN FETAL LIVER, SIGNAL = 3.5; EXPRESSED IN PLACENTA, SIGNAL = 3.9; EXPRESSED IN LUNG, SIGNAL = 4.3; EXPRESSED IN BONE MARROW, SIGNAL = 3.9; EXPRESSED IN HEART, SIGNAL = 2.9; EXPRESSED IN ADULT LIVER, SIGNAL = 4.3; EXPRESSED IN BRAIN, SIGNAL = 4.3; EST_HUMAN HIT: BI547824.1, EVALUE 0.00e+00; SWISSPROT HIT: O88799, EVALUE 2.80e+00; NT HIT: gi14727336, EVALUE 0.00e+00
gctgccacagagcccaaattccctgctgttcgactggctttgcagaattttgacatgacttacagtgtgcagtttggagatctttggccatcaatccgtgtcagtctcctctcagagcagaagtatggtgcactggtcaataactttgctgcctgggatcatgtaagtgctaagctggagcagctgagtgccaaggattttgtgaatgaagccatctcccactgggaactgcagtctgagg

SEQ ID NO: 15255 - DNA, 102 bp, Homo sapiens
  MAP TO AL133408.3; EXPRESSED IN HELA, SIGNAL = 1.1; EXPRESSED IN BRAIN, SIGNAL = 0.82; EXPRESSED IN FETAL LIVER, SIGNAL = 0.94; EXPRESSED IN PLACENTA, SIGNAL = 0.48; EST_HUMAN HIT: BE961672.1, EVALUE 1.20e-01; NT HIT: AL161515.2, EVALUE 5.10e+00
tcaatgtcaaggagatgagaatttatgaatatgatgattcagatgatttcagatttgagactaattcccacataaatcattctcccctctcatcttttgtag

SEQ ID NO: 15256 - DNA, 185 bp, Homo sapiens
  MAP TO AL138783.2; EXPRESSED IN BRAIN, SIGNAL = 0.62; EXPRESSED IN PLACENTA, SIGNAL = 0.81; EXPRESSED IN LUNG, SIGNAL = 0.61; EXPRESSED IN FETAL LIVER, SIGNAL = 0.71; EXPRESSED IN BONE MARROW, SIGNAL = 0.67; NT HIT: X95654.1, EVALUE 1.00e-100; EST_HUMAN HIT: BF802633.1, EVALUE 3.80e+00; SWISSPROT HIT: Q15431, EVALUE 2.00e-28
agtactcaaaaggctttagaggaagatttacagatagcaacaaaaacaatttgtcagctaactgaagaaaaagaaactcaaatggaagaatctaataaagctagagctgctcattcgtttgtggttactgaatttgaaactactgtctgcagcttggaagaattattgagaacagaacagcaaag

SEQ ID NO: 15257 - DNA, 179 bp, Homo sapiens
  MAP TO CHR22_161.0; EXPRESSED IN BONE MARROW, SIGNAL = 0.5; EXPRESSED IN BRAIN, SIGNAL = 0.46; EXPRESSED IN LUNG, SIGNAL = 0.51; EXPRESSED IN ADULT LIVER, SIGNAL = 0.45; EXPRESSED IN FETAL LIVER, SIGNAL = 0.45; EXPRESSED IN PLACENTA, SIGNAL = 0.55; NT HIT: AE007794.1, EVALUE 6.30e-01; EST_HUMAN HIT: AI805328.1, EVALUE 1.00e-03; SWISSPROT HIT: P42695, EVALUE 8.60e-01
aatgacaggaaaattggcagaggaagacatttcaccattattaaatgaatcagaagatgaatgcagacagattgagagcagctctctagatgctaatgatgatggtgaaattgatcatatcagcgaattcgcagactgtgcaccttcagtggaagatagcttagatgaattttcttaaa

SEQ ID NO: 15258 - DNA, 146 bp, Homo sapiens
  MAP TO AL137797.1; EXPRESSED IN BONE MARROW, SIGNAL = 1.1; EXPRESSED IN BRAIN, SIGNAL = 1.7; EXPRESSED IN PLACENTA, SIGNAL =   2; EXPRESSED IN LUNG, SIGNAL = 2.2; EXPRESSED IN ADULT LIVER, SIGNAL = 2.1; NT HIT: AB027132.1, EVALUE 1.00e-04; EST_HUMAN HIT: BI756183.1, EVALUE 1.00e-76; SWISSPROT HIT: O00519, EVALUE 2.00e-09
aaagtcagtcttatgtgaccctgtacaacctcctggactttcccgcgggcgtggtgcctgtcactatcgtgacactacaggacgaggaggaactggccttctacaaggggtgctacggagatagttctgacaaaaatttctcagag

SEQ ID NO: 15259 - DNA, 242 bp, Homo sapiens
  MAP TO AC018586.3; EXPRESSED IN BRAIN, SIGNAL = 1.7; EXPRESSED IN PLACENTA, SIGNAL = 4.3; EXPRESSED IN ADULT LIVER, SIGNAL = 3.5; EXPRESSED IN LUNG, SIGNAL = 3.9; EXPRESSED IN FETAL LIVER, SIGNAL = 2.2; EXPRESSED IN BONE MARROW, SIGNAL = 2.2; SWISSPROT HIT: P77898, EVALUE 1.00e+00; NT HIT: AL163249.2, EVALUE 1.00e-67; EST_HUMAN HIT: BG723268.1, EVALUE 2.00e-64
acagcgtgctggcagccctcgcagccttcgctcgctctcagtgcctcctctgcctgggctcccactatggcagcacttaaggagcccttcagcccaccactgcactgtgggagccccttcttgggctggccgaggccggagccggctccctcagcttgtggggaggtgtagacagagaggcgcaggtgggaaccggggctgcacacggtgcttgcaggccagcacaagttccaggtggacat

SEQ ID NO: 15260 - DNA, 155 bp, Homo sapiens
  MAP TO AL138788.1; EXPRESSED IN BRAIN, SIGNAL = 0.93; EXPRESSED IN PLACENTA, SIGNAL = 1.2; EXPRESSED IN HELA, SIGNAL = 0.68; EXPRESSED IN LUNG, SIGNAL = 1.2; EXPRESSED IN FETAL LIVER, SIGNAL = 0.84; EXPRESSED IN BONE MARROW, SIGNAL = 0.91; SWISSPROT HIT: P09665, EVALUE 2.60e+00; EST_HUMAN HIT: AW103198.1, EVALUE 1.00e-79
ctcttctgttgttcttcttgatattgttgctttactttagcttcattttgtgttgcttcttttatcttttcctctagctgctgcttctctgaaatacaagtgtctgtgagacagactttatgagcatgttctaatttccgctgcaggtccaaaat

SEQ ID NO: 15261 - DNA, 91 bp, Homo sapiens
  MAP TO AL137793.1; EXPRESSED IN BRAIN, SIGNAL = 0.67; EXPRESSED IN LUNG, SIGNAL = 0.69; EXPRESSED IN FETAL LIVER, SIGNAL = 0.76; NT HIT: L47221.1, EVALUE 1.10e+00; EST_HUMAN HIT: AL596837.1, EVALUE 1.10e-01
cctgaggctcctcataggaaacagaagggggagatcaacatcagacacaaatgctgcatcagcccagagaatgatgagcttagtgtcaagc

SEQ ID NO: 15262 - DNA, 117 bp, Homo sapiens
  MAP TO AC009472.2; EXPRESSED IN FETAL LIVER, SIGNAL = 0.65; EXPRESSED IN PLACENTA, SIGNAL = 1.1; EXPRESSED IN BRAIN, SIGNAL = 0.57; EXPRESSED IN ADULT LIVER, SIGNAL = 0.91; EXPRESSED IN LUNG, SIGNAL = 0.64; EST_HUMAN HIT: BI545354.1, EVALUE 5.70e-01; NT HIT: AE001667.1, EVALUE 9.70e-02
atgctaacgcctggtctcaggtgggcaaggaggctgaagcccacattacagctcaggcaacgtgtcaatttcccattggctctgcaagacaaactagcatcctttcagggcccccag

SEQ ID NO: 15263 - DNA, 216 bp, Homo sapiens
  MAP TO AC016683.4; EXPRESSED IN BRAIN, SIGNAL = 4.9; EXPRESSED IN FETAL LIVER, SIGNAL =   4; EXPRESSED IN HEART, SIGNAL = 4.3; EXPRESSED IN PLACENTA, SIGNAL = 5.2; EXPRESSED IN BONE MARROW, SIGNAL = 4.3; EXPRESSED IN HELA, SIGNAL = 3.9; EXPRESSED IN ADULT LIVER, SIGNAL = 4.5; EXPRESSED IN LUNG, SIGNAL = 4.7; EST_HUMAN HIT: AA770578.1, EVALUE 1.80e-02; SWISSPROT HIT: Q9Z1L0, EVALUE 9.90e-01; NT HIT: AE001862.1, EVALUE 1.90e-01
atggatagcactgaatatgtgtttccaatgagaagtaacacctgcaaactcattaggatgattaagatggctcagatcaccaaccttgagcaggatccagtaaaattaaaaaaatccgtcagcaccactaccccgtttcagagcaggaggttgccaggcagaagggaagtgccagcagccagggtcctctggcccaggtgcaactggagcttccag

SEQ ID NO: 15264 - DNA, 154 bp, Homo sapiens
  MAP TO AC013632.3; EXPRESSED IN PLACENTA, SIGNAL = 1.2; EXPRESSED IN BONE MARROW, SIGNAL =   1; EXPRESSED IN LUNG, SIGNAL = 1.5; EXPRESSED IN ADULT LIVER, SIGNAL = 2.2; EXPRESSED IN HELA, SIGNAL = 0.72; EXPRESSED IN BRAIN, SIGNAL = 1.6; EXPRESSED IN FETAL LIVER, SIGNAL = 1.2; EXPRESSED IN HEART, SIGNAL = 2.9; EST_HUMAN HIT: AL598878.1, EVALUE 4.00e-30; SWISSPROT HIT: O03201, EVALUE 2.00e-21; NT HIT: AF347009.1, EVALUE 1.00e-26
aatctatggctcaacattcttcatagccacaggctttcatggacttcacgttattattggatcaacatttctcactgtctgccacctccgccaactaaaattccattttacatccaaccaccactttggctttgaagccacctcccgatattga

SEQ ID NO: 15265 - DNA, 204 bp, Homo sapiens
  MAP TO AL137790.1; EXPRESSED IN PLACENTA, SIGNAL =   4; EXPRESSED IN BONE MARROW, SIGNAL = 2.3; EXPRESSED IN LUNG, SIGNAL =   3; EXPRESSED IN ADULT LIVER, SIGNAL = 3.4; EXPRESSED IN BRAIN, SIGNAL = 2.3; EXPRESSED IN FETAL LIVER, SIGNAL = 2.4; NT HIT: X62841.1, EVALUE 8.00e-47; EST_HUMAN HIT: AA397616.1, EVALUE 1.00e-101; SWISSPROT HIT: Q63734, EVALUE 9.00e-24
ctttccggacactaccatcggcgcaggcatagtccccagtgctgagcaggaagcaggcagctgccttcttgtttctgtctcgagtggtggagcgtcgcagggcccggcgctcctcgggggtcggggaggaggccaggggttgggtgaggccagctccctcctcatcagacagcactgcgttggcatcgccattctgcttagagt

SEQ ID NO: 15266 - DNA, 75 bp, Homo sapiens
  MAP TO AL136377.1; EXPRESSED IN BRAIN, SIGNAL = 0.84; EXPRESSED IN PLACENTA, SIGNAL = 0.88; EXPRESSED IN BONE MARROW, SIGNAL = 0.78; EXPRESSED IN ADULT LIVER, SIGNAL = 0.73; NT HIT: gi14744418, EVALUE 9.00e-07; EST_HUMAN HIT: BG685491.1, EVALUE 1.00e-34; SWISSPROT HIT: P48566, EVALUE 3.70e-02
gcctactctgtgtatgatgaagacattgggtactgtcaagggcagtcttttcttgctgctgtattactgctgcat

SEQ ID NO: 15267 - DNA, 267 bp, Homo sapiens
  MAP TO AL137068.1; EXPRESSED IN BRAIN, SIGNAL = 0.72; EXPRESSED IN HELA, SIGNAL = 0.52; EXPRESSED IN ADULT LIVER, SIGNAL = 0.48; EXPRESSED IN FETAL LIVER, SIGNAL = 0.62; EXPRESSED IN BONE MARROW, SIGNAL = 0.64; SWISSPROT HIT: Q88434, EVALUE 4.00e+00; NT HIT: gi5901923, EVALUE 0.00e+00; EST_HUMAN HIT: AI628430.1, EVALUE 0.00e+00
atggcaaaccaaaaagatttggagagaagacaaatggaaatcagtgatgcaatgaggacacttaaatctgaggtgaaggatgaaatcagaaccagcttgaagaatcttaatcagtttcttccagaactaccagcagatctagaagctattttggaaagaaacgaaaacctagaaggagaattggaaagcttgaaagagaaccttccatttaccatgaatgagggaccttttgaagaaaaactgaacttttcccaagttcacataatg

SEQ ID NO: 15268 - DNA, 162 bp, Homo sapiens
  MAP TO AC021252.3; EXPRESSED IN BONE MARROW, SIGNAL = 1.4; EXPRESSED IN BRAIN, SIGNAL = 1.6; EXPRESSED IN HEART, SIGNAL = 1.9; EXPRESSED IN PLACENTA, SIGNAL = 1.9; EXPRESSED IN ADULT LIVER, SIGNAL = 1.6; EXPRESSED IN FETAL LIVER, SIGNAL = 1.3; EST_HUMAN HIT: BF669718.1, EVALUE 2.10e-01; SWISSPROT HIT: Q9PR67, EVALUE 2.60e+00; NT HIT: S38903.1, EVALUE 5.60e-01
gtctttgaaattgtgcattctgctacatctactatgaaagtaggtcatgttttcatcatctctcttctgaactttttcaacagcctaattcacaaccttgtctccatttgggcccttctaaatgcaaacacaaagatgatacttccgtggaacactatagac

SEQ ID NO: 15269 - DNA, 313 bp, Homo sapiens
  MAP TO AL137918.1; EXPRESSED IN FETAL LIVER, SIGNAL = 1.6; EXPRESSED IN PLACENTA, SIGNAL = 1.9; EXPRESSED IN ADULT LIVER, SIGNAL =   2; EXPRESSED IN BONE MARROW, SIGNAL = 1.9; EXPRESSED IN HEART, SIGNAL = 1.8; EXPRESSED IN LUNG, SIGNAL =   2; EXPRESSED IN HELA, SIGNAL = 1.1; EXPRESSED IN BRAIN, SIGNAL = 1.5; NT HIT: U82668.1, EVALUE 2.90e-01; SWISSPROT HIT: P53037, EVALUE 8.40e+00
atggtggagacagcaattggctccagcaacagtgctggtcactttcagtgtcaccagcaatttaggaggtcaccatgggggaaccagagagagcaagagagcaaatgctgtgaacaaaaggcttggtccacagagtacaagagagaggtctcctggagacctctagaactacttggcaggcattatatggaggttgaagttttcaaagaggagattaaaaaaaaaaatttggaccatttctcttgctttgaccagcataatcacagatactacagtttatgttcagattttctttgcaatcaacaaaaaggag

SEQ ID NO: 15270 - DNA, 106 bp, Homo sapiens
  MAP TO AC018678.5; EXPRESSED IN ADULT LIVER, SIGNAL = 0.44; EXPRESSED IN BONE MARROW, SIGNAL = 0.42; EXPRESSED IN BRAIN, SIGNAL = 0.5; NT HIT: AE001153.1, EVALUE 8.60e-02; EST_HUMAN HIT: AW517885.1, EVALUE 3.20e-02
ttgaagatacttggatgtttgcttgttgcatttggaagaaaagtttctgaatcctttcaatttggttatacggtaatataaagaagtgcttgtgattcattttcat

SEQ ID NO: 15271 - DNA, 166 bp, Homo sapiens
  MAP TO AC021609.3; EXPRESSED IN PLACENTA, SIGNAL = 1.2; EXPRESSED IN ADULT LIVER, SIGNAL = 0.87; EXPRESSED IN LUNG, SIGNAL = 0.94; EXPRESSED IN BONE MARROW, SIGNAL = 0.96; EXPRESSED IN BRAIN, SIGNAL = 1.3; EXPRESSED IN FETAL LIVER, SIGNAL = 1.3; SWISSPROT HIT: Q9Z265, EVALUE 4.40e+00; NT HIT: AE005328.1, EVALUE 2.30e+00; EST_HUMAN HIT: BF038938.1, EVALUE 8.50e-01
gaaattgccccaggaactggtgggggcaaggctcttattcagtgatcctgtcccctcggattccccaaagcagctgatcttaacaaggcaatcctgtgtcttccatgagtcactcaaagtaaagatgatgataacacccatcttggagaattctcacgaagattaa

SEQ ID NO: 15272 - DNA, 235 bp, Homo sapiens
  MAP TO AC015855.4; EXPRESSED IN BONE MARROW, SIGNAL = 2.4; EXPRESSED IN BRAIN, SIGNAL = 2.9; EXPRESSED IN HELA, SIGNAL = 3.6; EXPRESSED IN ADULT LIVER, SIGNAL = 1.9; EXPRESSED IN FETAL LIVER, SIGNAL = 2.5; EXPRESSED IN LUNG, SIGNAL = 1.7; SWISSPROT HIT: O42280, EVALUE 8.00e-13; NT HIT: AB063483.1, EVALUE 8.00e-72; EST_HUMAN HIT: BI860477.1, EVALUE 1.20e+00
aggcctggcagtggggcgtgtgcggtgacaacctcaagtacagcaccaagtttctgagcaacttcctggggtccaagagaggaaacaaggacctgcgggcacgggcagacgcccacaatacccacgtgggcatcaaggtgagcatgtccctggctgcccgcagtgccttcccaccagggtacacagctggggagcatggcttgaaggaggccagcaccccactccccaaaataca

SEQ ID NO: 15273 - DNA, 158 bp, Homo sapiens
  MAP TO AC018586.3; EXPRESSED IN BRAIN, SIGNAL = 0.4; EXPRESSED IN PLACENTA, SIGNAL = 0.36; EST_HUMAN HIT: BG192399.1, EVALUE 8.00e-01; SWISSPROT HIT: Q9Z0W0, EVALUE 7.60e+00; NT HIT: AJ271364.1, EVALUE 1.40e-01
gctactcaacaaggcagacaaccttcagaaggaagatactcgctgtcaggttcatccagctataattggagtatatattgactttggtcagtttggcaaagagaatatcaacttacaaagtgctagctacgatggagatgcgataactggagatcatt

SEQ ID NO: 15274 - DNA, 194 bp, Homo sapiens
  MAP TO AC020698.2; EXPRESSED IN FETAL LIVER, SIGNAL = 3.9; EXPRESSED IN BONE MARROW, SIGNAL = 4.9; EXPRESSED IN BRAIN, SIGNAL = 4.2; EXPRESSED IN HEART, SIGNAL = 3.7; EXPRESSED IN HELA, SIGNAL = 3.4; EXPRESSED IN ADULT LIVER, SIGNAL = 5.1; EST_HUMAN HIT: BE868560.1, EVALUE 2.60e-01
gctggccctcactggtgtgggtgggctgtggctcgccctcactggtgtgggtgggctgtggctgaccctcggtggtgtgggtgggctgtggctgaccctcggtggtgtgggtgagctgtggctgaccctcactggtgtgggtgggctgtggctgaccctcggtggtgtagctgggctgtggctgaccctcactg

SEQ ID NO: 15275 - DNA, 140 bp, Homo sapiens
  MAP TO AL138843.2; EXPRESSED IN BRAIN, SIGNAL = 0.72; EXPRESSED IN ADULT LIVER, SIGNAL = 1.1; EXPRESSED IN BONE MARROW, SIGNAL = 0.77; SWISSPROT HIT: Q09874, EVALUE 2.60e+00; EST_HUMAN HIT: AI770084.1, EVALUE 1.80e-01; NT HIT: gi11447898, EVALUE 1.20e-01
cttcactataacatcaactttattatgctttctagtcattttttcagtcatttctttgggcccctgagcagttgaagttaagatcgagtccatgctcttcgggcagcagttgaatccttgttctgtacatcttgtatttt

SEQ ID NO: 15276 - DNA, 110 bp, Homo sapiens
  MAP TO CHR22_82.0; EXPRESSED IN BRAIN, SIGNAL = 0.28; EXPRESSED IN HELA, SIGNAL = 0.56; EXPRESSED IN ADULT LIVER, SIGNAL = 0.43; NT HIT: U07000.1, EVALUE 3.60e-01; EST_HUMAN HIT: AV687467.1, EVALUE 1.30e-01
gggccccagccaggaagggctggactcgccatcctccccaactggtgttatgaagtatgaagatcgttatcgttctgagcacctactacgtgcccggccctttaacgata

SEQ ID NO: 15277 - DNA, 194 bp, Homo sapiens
  MAP TO AL132656.3; EXPRESSED IN FETAL LIVER, SIGNAL = 1.1; EXPRESSED IN BONE MARROW, SIGNAL = 1.1; EXPRESSED IN BRAIN, SIGNAL = 0.92; EXPRESSED IN HELA, SIGNAL = 1.1; EXPRESSED IN PLACENTA, SIGNAL = 1.4; EXPRESSED IN ADULT LIVER, SIGNAL = 1.5; SWISSPROT HIT: Q01955, EVALUE 4.90e-01; EST_HUMAN HIT: AW802316.1, EVALUE 3.00e-47; NT HIT: gi14739129, EVALUE 9.00e-56
agaccagcagagaccaaggtccctgaggagatccccccagaagtggtgcaggagtatgtggacatcatggaggagctgctggggccttccctcggggccacgggggagcccgagaaacaacgggaagagggcaaagtgaagcagccacaggaagaggactggacgcccccagacccgggcctcctgagctacat

SEQ ID NO: 15278 - DNA, 141 bp, Homo sapiens
  MAP TO AL136084.2; EXPRESSED IN PLACENTA, SIGNAL = 2.2; EXPRESSED IN HELA, SIGNAL =   1; EXPRESSED IN BRAIN, SIGNAL = 1.8; EXPRESSED IN ADULT LIVER, SIGNAL = 2.4; EXPRESSED IN HEART, SIGNAL = 1.6; EXPRESSED IN FETAL LIVER, SIGNAL = 1.8; EXPRESSED IN BONE MARROW, SIGNAL =   2; NT HIT: gi14738925, EVALUE 7.00e-74; SWISSPROT HIT: O08912, EVALUE 1.20e-02; EST_HUMAN HIT: BF222363.1, EVALUE 1.00e-73
gatggatctttatttcacgaacagtccaagaaatgtgtccaggctgcgaggaaggagtcgagtgacagtttcgttccactcttacgagactgcaccaactcggatcatcagaaatggttcttcaaagagcgcatgttatga

SEQ ID NO: 15279 - DNA, 213 bp, Homo sapiens
  MAP TO AL035367.1; EXPRESSED IN FETAL LIVER, SIGNAL = 2.2; EXPRESSED IN PLACENTA, SIGNAL = 1.7; EXPRESSED IN BRAIN, SIGNAL = 1.3; EXPRESSED IN HEART, SIGNAL = 1.2; NT HIT: gi16165564, EVALUE 1.00e-116; SWISSPROT HIT: P34896, EVALUE 8.00e-30; EST_HUMAN HIT: BE395814.1, EVALUE 1.00e-116
gaaccagctgctactcccgaaacctggaatatgcccggctacggaagattgcagatgagaacggggcgtatctcatggcggacatggctcacatcagcgggctggtggcggctggcgtggtgccctccccatttgaacactgccatgtggtgaccaccaccactcacaagaccctgcgaggctgccgagctggcatgatcttctacaggaaag

SEQ ID NO: 15280 - DNA, 117 bp, Homo sapiens
  MAP TO AL136366.3; EXPRESSED IN HELA, SIGNAL = 0.67; EXPRESSED IN BRAIN, SIGNAL = 0.87; EXPRESSED IN FETAL LIVER, SIGNAL = 0.76; EXPRESSED IN BONE MARROW, SIGNAL = 0.97; EXPRESSED IN PLACENTA, SIGNAL = 1.2; EXPRESSED IN ADULT LIVER, SIGNAL = 1.2; NT HIT: X04500.1, EVALUE 3.80e-01; SWISSPROT HIT: P38502, EVALUE 7.90e+00
ggatcttatcccacagggcagggaaaacttttgtactaccatctttcttctacaaatcaacaggaacacagacagaatagccatggtctggccacacttggtggtgagtggagtctc

SEQ ID NO: 15281 - DNA, 168 bp, Homo sapiens
  MAP TO AL136362.1; EXPRESSED IN FETAL LIVER, SIGNAL = 2.8; EXPRESSED IN PLACENTA, SIGNAL =   5; EXPRESSED IN LUNG, SIGNAL = 4.5; EXPRESSED IN ADULT LIVER, SIGNAL = 5.4; EXPRESSED IN BONE MARROW, SIGNAL = 2.7; EXPRESSED IN BRAIN, SIGNAL = 2.7; NT HIT: AL163284.2, EVALUE 6.00e-78; SWISSPROT HIT: P13564, EVALUE 4.40e+00; EST_HUMAN HIT: AA948008.1, EVALUE 9.00e-78
atggaacactgggaagttatttccttgaggatagatttccatgatggaaaggaaatgagaggttctgagaggcgggctagtggcttgtactatagcatagcctgcctttgctggtatgtggcgattaggcctggtggaactgccatcaataaatcaagtgtgatcagg

SEQ ID NO: 15282 - DNA, 248 bp, Homo sapiens
  MAP TO CHR22_145.0; EXPRESSED IN FETAL LIVER, SIGNAL = 0.47; EXPRESSED IN PLACENTA, SIGNAL = 0.61; EXPRESSED IN BONE MARROW, SIGNAL = 0.44; EXPRESSED IN BRAIN, SIGNAL = 0.5; EXPRESSED IN HELA, SIGNAL = 1.6; EST_HUMAN HIT: AA297086.1, EVALUE 1.00e-90; NT HIT: gi14778392, EVALUE 2.00e-79; SWISSPROT HIT: P27465, EVALUE 1.00e-25
ctatatgaagcccacagaggcagctccccccacgctggccccgggctgacctgggaagtggcgccggtgggacacagtccagtcggtgggggagtggaagcagtggtagtccccaggggccaggtagatgacacagtgatagagctcattcccttcccgggtgaccagctggttcttgaaggagtcacacgacgcggctgtggagtaggagcagacgtgggggccaccaacacagtgagcacccagca

SEQ ID NO: 15283 - DNA, 173 bp, Homo sapiens
  MAP TO AC023112.3; EXPRESSED IN LUNG, SIGNAL = 5.3; EXPRESSED IN ADULT LIVER, SIGNAL = 6.3; EXPRESSED IN BRAIN, SIGNAL = 3.9; SWISSPROT HIT: Q05021, EVALUE 1.50e+00; EST_HUMAN HIT: AW303317.1, EVALUE 2.00e-41; NT HIT: AL163248.2, EVALUE 5.00e-20
acgatcacaagttcccagaataggctgtctgcaagcttgaggagccaggagagccaggtccgagtctcaaaactgaagaacttggagtcctggagtccaatgtttgagggcaggaagcgtccagcatgggagaaagatgtaggctgggaggctaggctagtctcttgcttcat

SEQ ID NO: 15284 - DNA, 100 bp, Homo sapiens
  MAP TO AC020721.4; EXPRESSED IN BONE MARROW, SIGNAL = 0.46; EXPRESSED IN BRAIN, SIGNAL = 0.55; EXPRESSED IN FETAL LIVER, SIGNAL = 0.51; EXPRESSED IN PLACENTA, SIGNAL = 0.46; EXPRESSED IN LUNG, SIGNAL = 0.52; EXPRESSED IN ADULT LIVER, SIGNAL = 0.54; NT HIT: AF063435.1, EVALUE 8.00e-02; SWISSPROT HIT: Q93074, EVALUE 9.30e-01; EST_HUMAN HIT: BF877542.1, EVALUE 4.70e-01
ccagtagataaatcaatgcattctctggttcctgcagcttcccaagcctctcatccactgccaactgccctctccaaacccagtgcaaaggcttcagcac

SEQ ID NO: 15285 - DNA, 164 bp, Homo sapiens
  MAP TO CHR22_88.0; EXPRESSED IN BRAIN, SIGNAL = 0.3; EXPRESSED IN HELA, SIGNAL = 0.52; NT HIT: X69117.1, EVALUE 7.00e-87; SWISSPROT HIT: P35626, EVALUE 3.00e-26; EST_HUMAN HIT: BF513491.1, EVALUE 1.00e-86
ctacttgattgcgaccaagaactctacaagaacttccctttggtcatctctgaacgctggcagcaagaagtaacggaaacagtttatgaagcagtaaatgcagacacagataaaatcgaggccaggaagagagctaaaaataagcaacttggccacgaagaagg

SEQ ID NO: 15286 - DNA, 204 bp, Homo sapiens
  MAP TO AC011881.5; EXPRESSED IN BRAIN, SIGNAL = 0.51; EXPRESSED IN ADULT LIVER, SIGNAL = 0.49; EST_HUMAN HIT: BF028113.1, EVALUE 2.00e-85; SWISSPROT HIT: Q9Y5X1, EVALUE 1.90e-02; NT HIT: AL163204.2, EVALUE 2.00e-62
gccatcagcctctgcacctctgtcttcccatctgccacatgttgcctgttctccgtgactttggtaatagcttccttgtgtatgaggatgatgtccaggatgttggtctggtatccctgagacagcactaacaggtccatggctgggtctaggtccttcctggactgattggcaaagagctcactgatgttcttgaaggcatct

SEQ ID NO: 15287 - DNA, 216 bp, Homo sapiens
  MAP TO CHR22_96.0; EXPRESSED IN PLACENTA, SIGNAL = 0.82; EXPRESSED IN LUNG, SIGNAL = 1.2; EXPRESSED IN BONE MARROW, SIGNAL = 0.61; EXPRESSED IN HELA, SIGNAL = 0.57; EXPRESSED IN BRAIN, SIGNAL = 0.86; NT HIT: L47982.1, EVALUE 1.90e-01; EST_HUMAN HIT: BF992810.1, EVALUE 4.50e+00
tatggcagtggtgatgacataggtgttaataataaagatgatatgatgataatgatgatgataatgataactataacaataatggtggtggtgatcatggtggtgatggtagaaatgatggtaatggtgatgataatgatgattgtggtgatgattacagtgataataatgatgggggtgatggtgatgacaatggtgatgatgatgatggtcatg

SEQ ID NO: 15288 - DNA, 209 bp, Homo sapiens
  MAP TO AC017050.4; EXPRESSED IN LUNG, SIGNAL = 0.5; EXPRESSED IN ADULT LIVER, SIGNAL = 0.45; EXPRESSED IN BRAIN, SIGNAL = 0.46; SWISSPROT HIT: P19518, EVALUE 4.20e+00; NT HIT: AL163247.2, EVALUE 2.00e-16; EST_HUMAN HIT: BG741873.1, EVALUE 5.00e-15
ttgacatataggatccttcaaaatcaccaccttgttcatcattatcactgaacatagctgcaggccagaggttgtgccaggtatgcacaactgtgtcttcagttagaactatgttccaacagttggcaatagcatacatggcatccttcatgctaaactccttttgaaaaccttccacattcatgcctctgttcactgctgctagcatg

SEQ ID NO: 15289 - DNA, 122 bp, Homo sapiens
  MAP TO AC021685.3; EXPRESSED IN FETAL LIVER, SIGNAL = 0.8; EXPRESSED IN BONE MARROW, SIGNAL = 0.72; EXPRESSED IN PLACENTA, SIGNAL = 0.94; EXPRESSED IN BRAIN, SIGNAL = 0.95; EXPRESSED IN ADULT LIVER, SIGNAL = 0.88; NT HIT: gi5836058, EVALUE 1.00e-01; EST_HUMAN HIT: AI249134.1, EVALUE 2.30e+00
aatgtagtggtggtagtttccgcagagctgtgaagtttggtggtgtcaagttatgcgctagtaacaagctaaatatcgatagaatagaagagactccagtaacagtggttaactatcaccag

SEQ ID NO: 15290 - DNA, 418 bp, Homo sapiens
  MAP TO CHR22_180.0; EXPRESSED IN BONE MARROW, SIGNAL = 0.81; EXPRESSED IN BRAIN, SIGNAL = 0.55; EXPRESSED IN LUNG, SIGNAL = 5.6; EXPRESSED IN ADULT LIVER, SIGNAL = 7.8; SWISSPROT HIT: P05783, EVALUE 5.00e-59; NT HIT: X12881.1, EVALUE 0.00e+00; EST_HUMAN HIT: BG749157.1, EVALUE 0.00e+00
agtgaggcacctggagaccaagaaccggaagctggagagcaaaatctgggagcacctggagaagaagggaccccaggtcagagactggagccattacttcaagaccatcaggaaccagagggctcagagcttggcaattactgtagacaatgcctgcattgttctgcagatcaacaacacccatcttgctgctgatgactttagagtcaagtatgagacagagctggccatgtgccagtctgtggagagcaacatccatggactctgtaaggtcaatgatgacaccaacgtcactcggctgcagctggagacagagatcaaggctctcaaggaggagctgctcttcatgaagaagaaccacgaagaggaagtaaaaggcctacaagcccagattgctagctctgggttgaccatggag

SEQ ID NO: 15291 - DNA, 274 bp, Homo sapiens
  MAP TO AL138832.2; EXPRESSED IN LUNG, SIGNAL = 1.8; EXPRESSED IN HEART, SIGNAL = 1.5; EXPRESSED IN PLACENTA, SIGNAL = 1.7; EXPRESSED IN ADULT LIVER, SIGNAL = 1.9; EXPRESSED IN BRAIN, SIGNAL = 1.8; EXPRESSED IN FETAL LIVER, SIGNAL = 1.5; EXPRESSED IN BONE MARROW, SIGNAL = 1.4; EST_HUMAN HIT: BF446167.1, EVALUE 1.50e+00; SWISSPROT HIT: P33441, EVALUE 6.20e-02; NT HIT: M19147.1, EVALUE 2.50e-01
atgtttcctcaggagctggcgcagaaaattaagggctaccaggagcagatcgcttctttgaattccaagtgcaagatgctgacgatgaaagccaagcacgccaccatgctgctgacggtgaccgaggtcgaggggctggcggaagggacagaggacctggatggggagctcctccccacgccttcggcccacccctctgtggtcatggtaaggatccagtgggtccccgcggctttgctctttgactggagcctggcgagtggctccatgttcc

SEQ ID NO: 15292 - DNA, 149 bp, Homo sapiens
  MAP TO AL138839.1; EXPRESSED IN BONE MARROW, SIGNAL = 1.2; EXPRESSED IN BRAIN, SIGNAL =   1; EXPRESSED IN FETAL LIVER, SIGNAL =   1; EXPRESSED IN ADULT LIVER, SIGNAL = 1.2; NT HIT: U53930.1, EVALUE 3.30e-02; EST_HUMAN HIT: BF312175.1, EVALUE 3.00e+00; SWISSPROT HIT: P40598, EVALUE 3.40e+00
cagaacttcatgcctcttatgcattgccagtccggatttggtgatcttgagatctgtggtggacacaatgatgcaccatccagattctcctttgaagacgacatattgccccagttcctgggagtgtactcggcagacagccttcagct

SEQ ID NO: 15293 - DNA, 196 bp, Homo sapiens
  MAP TO AC023108.2; EXPRESSED IN BRAIN, SIGNAL = 0.34; EXPRESSED IN FETAL LIVER, SIGNAL = 0.39; EXPRESSED IN PLACENTA, SIGNAL = 0.32; EXPRESSED IN ADULT LIVER, SIGNAL = 0.31; NT HIT: AL163209.2, EVALUE 7.00e-04; EST_HUMAN HIT: AW901796.1, EVALUE 2.00e-14; SWISSPROT HIT: P08548, EVALUE 9.00e-11
ttacttttcctgtcttattgcattaacttggaattccattatgatgaaaaggaatggtgagaggggacatcctagtcttgttcctgatcttagtaggaaaagttcaagtttatcgccattaagtatgatattaactgtaggtttgttgttgatattctttatcaagctgatgaggttatcttctagttttagtttt

SEQ ID NO: 15294 - DNA, 249 bp, Homo sapiens
  MAP TO AC018709.5; EXPRESSED IN BRAIN, SIGNAL = 0.39; EXPRESSED IN PLACENTA, SIGNAL = 0.41; EXPRESSED IN ADULT LIVER, SIGNAL = 0.45; NT HIT: AL163282.2, EVALUE 2.00e-05; EST_HUMAN HIT: BE892266.1, EVALUE 2.10e-02; SWISSPROT HIT: Q98987, EVALUE 5.50e+00
atgggaaaacacgatatccaaaaaactgcaggcaatacagtccactgtgcagtattggctgttaccccgatggtcatggggctgcctggaagctgcggctcgctgcccctgcccagcagcaggagggagtattggacagcacgtccccagccccggaaaagatcaaaagtcaaaagtggaagtatggtttctactgaatgtgtatcactttggcagcaccgtaaagtcaaaaaattaagtcaaaccacg

SEQ ID NO: 15295 - DNA, 1 bp, Homo sapiens
  MAP TO CHR22_0.0; EXPRESSED IN FETAL LIVER, SIGNAL = 0.85; EXPRESSED IN BONE MARROW, SIGNAL = 0.91; EXPRESSED IN BRAIN, SIGNAL = 0.88; EXPRESSED IN ADULT LIVER, SIGNAL = 0.98; EXPRESSED IN PLACENTA, SIGNAL =   1
c

SEQ ID NO: 15296 - DNA, 174 bp, Homo sapiens
  MAP TO AL121993.2; EXPRESSED IN FETAL LIVER, SIGNAL = 0.78; EXPRESSED IN BRAIN, SIGNAL = 0.68; SWISSPROT HIT: Q9Y2P7, EVALUE 1.90e+00; NT HIT: gi16161328, EVALUE 2.00e-74; EST_HUMAN HIT: BI259600.1, EVALUE 4.00e-74
gctctcttatatttcattcatgtaatggatcacattgctgtgaaggagtatgtattagtgtattttcacaccctgaccagcgaatacaatcacctggactccgacttcctgaagaaactctacgatgttgttgatgtcaagttagttatttttgcaaattatgaaggggaaata

SEQ ID NO: 15297 - DNA, 214 bp, Homo sapiens
  MAP TO CHR22_24.0; EXPRESSED IN BRAIN, SIGNAL = 5.1; EXPRESSED IN FETAL LIVER, SIGNAL =   5; EXPRESSED IN LUNG, SIGNAL = 4.8; EXPRESSED IN HEART, SIGNAL = 4.6; EXPRESSED IN BONE MARROW, SIGNAL = 5.5; EXPRESSED IN PLACENTA, SIGNAL = 4.6; EXPRESSED IN HELA, SIGNAL = 4.4; SWISSPROT HIT: P53675, EVALUE 1.00e-33; NT HIT: gi4502902, EVALUE 1.00e-109; EST_HUMAN HIT: BF882652.1, EVALUE 4.00e-74
ggaatcctgcgtaccagagagacggtccagaaattccagagtatacccgctcagtctggccaggcttctccattgctgcagtacttcggaatcctgctcgaccagggtcagctcaataaacttgaatccttagaactttgccatctggttcttcagcaggggcgtaagcaactcctagagaagtggctgaaagaagataaggtagaaacacttg

SEQ ID NO: 15298 - DNA, 224 bp, Homo sapiens
  MAP TO AC016692.4; EXPRESSED IN BRAIN, SIGNAL = 1.5; EXPRESSED IN PLACENTA, SIGNAL =   2; EXPRESSED IN ADULT LIVER, SIGNAL = 1.9; EXPRESSED IN BONE MARROW, SIGNAL = 1.8; EST_HUMAN HIT: BF802480.1, EVALUE 1.00e-74; SWISSPROT HIT: Q09237, EVALUE 6.50e-01; NT HIT: gi16157415, EVALUE 8.00e-75
ttcccacatttgtttctttcctgaaagaagtagaatctccttatgaggtccatgattatatcagggcctatttaggagatacttctgaggccaaggagtttgccaagcagttccttgagcgccgtgccaaacagaaagccaaccagcagcgtcacgagcagcagctgccacagcagcagcagcagcagccgccacagcagccgccacagcagccacaacagcag

SEQ ID NO: 15299 - DNA, 139 bp, Homo sapiens
  MAP TO AL136377.1; EXPRESSED IN BRAIN, SIGNAL = 0.53; EXPRESSED IN FETAL LIVER, SIGNAL = 0.41; EST_HUMAN HIT: BG685491.1, EVALUE 2.00e-72; SWISSPROT HIT: Q10496, EVALUE 2.00e-06; NT HIT: AB019489.1, EVALUE 1.00e-72
gaacagctaccggacctgcatagccatttttctgatctgaacctggaagctcatatgtatgcatcccagtggtttctcactctttttactgccaagttcccactctgcatggtgttccacatcattgacttactgcttt

SEQ ID NO: 15300 - DNA, 135 bp, Homo sapiens
  MAP TO CHR22_217.0; EXPRESSED IN BONE MARROW, SIGNAL = 1.9; EXPRESSED IN HELA, SIGNAL = 4.8; EXPRESSED IN BRAIN, SIGNAL = 1.9; EXPRESSED IN LUNG, SIGNAL =   1; EXPRESSED IN FETAL LIVER, SIGNAL = 1.9; EXPRESSED IN HEART, SIGNAL = 1.3; EXPRESSED IN PLACENTA, SIGNAL = 1.1; EST_HUMAN HIT: BF808893.1, EVALUE 1.70e-01; SWISSPROT HIT: P50053, EVALUE 3.50e+00; NT HIT: AJ010707.1, EVALUE 4.50e-01
gagggtaagggacagactaagcttctgccttcaggtgaaaagatgcaggagctgaccctcctgggcacctcgtccgcgctggtgccaggcacagcgcctgacatgtcgccttctgaaatctccccacagacctaa

SEQ ID NO: 15301 - DNA, 215 bp, Homo sapiens
  MAP TO CHR22_8.0; EXPRESSED IN LUNG, SIGNAL = 0.46; EXPRESSED IN ADULT LIVER, SIGNAL = 0.49; EXPRESSED IN BRAIN, SIGNAL = 0.58; NT HIT: AF069317.1, EVALUE 1.90e-01; EST_HUMAN HIT: AW449116.1, EVALUE 1.10e+00; SWISSPROT HIT: P81236, EVALUE 9.90e-01
taagtggccacagtattcagcaagtcttgcggaaggttcaggctctggaggccatagcagaagagaagaccagagcgggtcctgcccttgtgtcctttacctcccgcaccatcagcaccactcctctgtgcctggatgcctcttccgtgcttgtaagctttgcgaattcctgcagatgcttaagtgccatctcaaatactctctacctagagagt

SEQ ID NO: 15302 - DNA, 295 bp, Homo sapiens
  MAP TO CHR22_52.0; EXPRESSED IN FETAL LIVER, SIGNAL = 4.9; EXPRESSED IN BONE MARROW, SIGNAL = 5.2; EXPRESSED IN PLACENTA, SIGNAL = 4.4; EXPRESSED IN LUNG, SIGNAL = 4.5; EXPRESSED IN ADULT LIVER, SIGNAL = 4.9; EXPRESSED IN BRAIN, SIGNAL = 4.5; EXPRESSED IN HELA, SIGNAL = 3.5; NT HIT: U07000.1, EVALUE 0.00e+00; EST_HUMAN HIT: AL119920.1, EVALUE 4.00e-01; SWISSPROT HIT: Q06561, EVALUE 8.80e-01
tcactactgggcctcctgggaggtggcccattgctacctgctgagcctgggcaagtctggcatcgaggagaggcccaggtatgagccctctgcagggtcagccaccccagccccagacccccactgtggctcctataatctcattgcccttttcagccacatcccatggctccagggctgtgctctttggggaacagtgactttgggctgcattccaggtagctccctgatgctgaacggtggccggcaggtgctccagcttcctggcatcctggcccaagcacacctgggggcc

SEQ ID NO: 15303 - DNA, 263 bp, Homo sapiens
  MAP TO CHR22_11.0; EXPRESSED IN FETAL LIVER, SIGNAL = 0.92; EXPRESSED IN BONE MARROW, SIGNAL = 0.81; EXPRESSED IN LUNG, SIGNAL = 0.86; EXPRESSED IN BRAIN, SIGNAL = 0.81; SWISSPROT HIT: Q13516, EVALUE 1.40e-01; NT HIT: gi14779022, EVALUE 0.00e+00; EST_HUMAN HIT: BF311649.1, EVALUE 0.00e+00
atacattctgcccgccccggcccaagccagtggccaggaagggccaggtagacttgaagaagtcacgactccgcatgtccctgcaggagaaacttcttacttactaccggaaccgggcagccatccctgctggagagcaggctcgggccaagcaagctgctgtggacatatgtgccgagctccggagcttcctgcgggccaagttgcctgacatgccgcttcgggacatgtacttgagtggcagcctctacgatgacctgcag

SEQ ID NO: 15304 - DNA, 196 bp, Homo sapiens
  MAP TO CHR22_12.0; EXPRESSED IN BONE MARROW, SIGNAL = 1.7; EXPRESSED IN BRAIN, SIGNAL = 1.8; EXPRESSED IN LUNG, SIGNAL = 1.8; EXPRESSED IN FETAL LIVER, SIGNAL = 1.9; EXPRESSED IN PLACENTA, SIGNAL = 2.1; EXPRESSED IN ADULT LIVER, SIGNAL = 1.8; SWISSPROT HIT: P42935, EVALUE 8.40e-01; EST_HUMAN HIT: AA291881.1, EVALUE 2.60e-01; NT HIT: AJ310932.1, EVALUE 1.00e-106
cctcccctgggaagagactttggtcactacccatgtccaagcaaagatagaagaatccatgggattggattttgtgcaccggccagccttcggggagctgatagtagaagatgcttttcctggcaaagctccctgtgtgcccacctggattgcaccagcagcatgcatctcagctgcacctgcaaatatcccccct

SEQ ID NO: 15305 - DNA, 208 bp, Homo sapiens
  MAP TO CHR22_54.0; EXPRESSED IN LUNG, SIGNAL = 0.97; EXPRESSED IN BONE MARROW, SIGNAL = 0.96; EXPRESSED IN PLACENTA, SIGNAL =   1; EXPRESSED IN BRAIN, SIGNAL = 0.88; EXPRESSED IN HELA, SIGNAL = 1.2; EXPRESSED IN FETAL LIVER, SIGNAL =   1; NT HIT: L27656.1, EVALUE 4.70e-02; EST_HUMAN HIT: BI519931.1, EVALUE 1.80e-02; SWISSPROT HIT: Q00104, EVALUE 8.30e-01
agtcactgcctatccatggactaattcaaccagtaaaacatttaatgaccatctacttaaggcagatgcttgcacaaagatcaatcagacccagacccagacccaaacccagagctccatgcctggagccatcggaacctgcacaaagacggtgcggcttttggagggaatctcttctaatccccaaattgatgacctctggaagaat

SEQ ID NO: 15306 - DNA, 132 bp, Homo sapiens
  MAP TO CHR22_171.0; EXPRESSED IN PLACENTA, SIGNAL = 2.2; EXPRESSED IN LUNG, SIGNAL = 2.1; EXPRESSED IN HELA, SIGNAL = 2.3; EXPRESSED IN BRAIN, SIGNAL =   2; EXPRESSED IN FETAL LIVER, SIGNAL = 2.1; EXPRESSED IN BONE MARROW, SIGNAL = 2.2; EXPRESSED IN HEART, SIGNAL = 1.9; NT HIT: gi14779734, EVALUE 2.00e-68; EST_HUMAN HIT: AI347059.1, EVALUE 2.00e-68; SWISSPROT HIT: P55456, EVALUE 5.90e+00
gcccctctccagaaggcccgatgcccctgggtgggggcgaggacgaggatgcagaggaggcagtagagcttcctgaggcctcggcccccaaggccgctctggagcccaaggagtccaggagcccgcagcagg

SEQ ID NO: 15307 - DNA, 128 bp, Homo sapiens
  MAP TO CHR22_113.0; EXPRESSED IN HEART, SIGNAL = 1.7; EXPRESSED IN HELA, SIGNAL = 1.5; EXPRESSED IN ADULT LIVER, SIGNAL =   1; EXPRESSED IN LUNG, SIGNAL = 0.97; EXPRESSED IN PLACENTA, SIGNAL = 1.2; EXPRESSED IN BONE MARROW, SIGNAL =   1; EXPRESSED IN BRAIN, SIGNAL = 0.98; EXPRESSED IN FETAL LIVER, SIGNAL = 1.1; NT HIT: Y07661.1, EVALUE 1.70e+00; SWISSPROT HIT: O60259, EVALUE 9.00e-01; EST_HUMAN HIT: AA805719.1, EVALUE 3.00e-03
tcctttaggtctctgcttcaatgtcacctttgccacaaggactttctgaccaccctgttgcaaactgaagccctccccgggcgcccatctctcctccctgtttcctctttgttctttgcgctcatcgc

SEQ ID NO: 15308 - DNA, 75 bp, Homo sapiens
  MAP TO AL138752.2; EXPRESSED IN LUNG, SIGNAL = 0.62; EXPRESSED IN BONE MARROW, SIGNAL = 0.65; EXPRESSED IN HELA, SIGNAL = 0.6; EXPRESSED IN BRAIN, SIGNAL = 0.73; NT HIT: AF016297.1, EVALUE 5.60e-02; EST_HUMAN HIT: BF329859.1, EVALUE 5.00e+00
gacctggattatgaacactcagatgacaagaacttcctgtttaaaaccgaaagccaacttaatgataatccctag

SEQ ID NO: 15309 - DNA, 197 bp, Homo sapiens
  MAP TO CHR22_164.0; EXPRESSED IN FETAL LIVER, SIGNAL = 0.81; EXPRESSED IN PLACENTA, SIGNAL =   1; EXPRESSED IN LUNG, SIGNAL = 1.4; EXPRESSED IN BONE MARROW, SIGNAL = 0.79; EXPRESSED IN BRAIN, SIGNAL = 0.66; EST_HUMAN HIT: BG762578.1, EVALUE 1.00e-107; NT HIT: AF139493.1, EVALUE 3.00e-40; SWISSPROT HIT: P09324, EVALUE 1.70e-01
cagccttgaagctcagctcatcatgctcctgcccctcatagtcatacagggcccggactcgcacttccgtccccgaggtggcgtcgtcgtcgaatggattcgagtccccattggcatccgtggaggagaaggggttgttagactcatcgtctgaccagtcggtgggatagctctgggtcttctcgtagctgctcaca

SEQ ID NO: 15310 - DNA, 182 bp, Homo sapiens
  MAP TO CHR22_182.0; EXPRESSED IN BONE MARROW, SIGNAL = 0.69; EXPRESSED IN BRAIN, SIGNAL = 0.47; EXPRESSED IN FETAL LIVER, SIGNAL = 0.5; EXPRESSED IN PLACENTA, SIGNAL = 0.55; EXPRESSED IN LUNG, SIGNAL = 0.62; EXPRESSED IN ADULT LIVER, SIGNAL = 0.55; SWISSPROT HIT: O33277, EVALUE 1.50e+00; EST_HUMAN HIT: AA827701.1, EVALUE 7.00e-54
cgaccattgctctcctggctgaggatggcaacctagtgagcctggaggaggacctgaaggaaggggcttcccgggcccagaccatgggcaactccctactgaaggagcgagccatatatgtcctcgttcggatcatcagtaaggtggcccaaggttctctcccctgcagctatggtagaatg

SEQ ID NO: 15311 - DNA, 117 bp, Homo sapiens
  MAP TO AL135909.3; EXPRESSED IN HELA, SIGNAL = 1.6; EXPRESSED IN BONE MARROW, SIGNAL = 1.5; EXPRESSED IN BRAIN, SIGNAL = 1.8; EXPRESSED IN HEART, SIGNAL = 1.7; SWISSPROT HIT: P11369, EVALUE 3.50e+00; EST_HUMAN HIT: BG564746.1, EVALUE 1.40e-01; NT HIT: Z79071.1, EVALUE 2.00e-03
atgtaccctcttaatgttgtaatagaagtcctagcctatgaaatagggcaagaaaatgaaataaagaatataatgtttgttgatgtagaaaattctaaggaacgtataagcaaccac

SEQ ID NO: 15312 - DNA, 153 bp, Homo sapiens
  MAP TO CHR22_167.0; EXPRESSED IN FETAL LIVER, SIGNAL = 1.5; EXPRESSED IN BONE MARROW, SIGNAL = 1.5; EXPRESSED IN BRAIN, SIGNAL = 1.3; EXPRESSED IN PLACENTA, SIGNAL = 1.3; EXPRESSED IN LUNG, SIGNAL = 1.4; NT HIT: gi14779414, EVALUE 6.00e-81; SWISSPROT HIT: Q14166, EVALUE 2.00e-26; EST_HUMAN HIT: BF970051.1, EVALUE 8.00e-81
ctagacaaggcaggtaacgtggcagccaccgggctggtccagaaacaaggtgctgaagacgtcgttgaagaaggtggggtggtacctgcaggctcgctcacagtcggggttgaagttcacctccaggatctgcggctgcatcacccgccttcc

SEQ ID NO: 15313 - DNA, 152 bp, Homo sapiens
  MAP TO AC021260.4; EXPRESSED IN BRAIN, SIGNAL = 2.1; EXPRESSED IN HEART, SIGNAL = 2.2; EXPRESSED IN FETAL LIVER, SIGNAL = 1.8; EXPRESSED IN PLACENTA, SIGNAL =   3; EXPRESSED IN LUNG, SIGNAL = 2.2; EXPRESSED IN BONE MARROW, SIGNAL = 1.8; NT HIT: L47993.1, EVALUE 2.10e+00; SWISSPROT HIT: Q13439, EVALUE 2.30e-01; EST_HUMAN HIT: AL599865.1, EVALUE 3.00e-80
ctctacttgtgatgccaaatgtgctttctccttgtcttttctctccatgcaccgtttcacttcctctaactcagatgccattgcgctgaagttcagctgcactctcaaatctgacatttgcttctccaggtcctgtttttcccgctcaaccc

SEQ ID NO: 15314 - DNA, 172 bp, Homo sapiens
  MAP TO AL133515.2; EXPRESSED IN FETAL LIVER, SIGNAL = 0.93; EXPRESSED IN PLACENTA, SIGNAL = 0.34; EXPRESSED IN HELA, SIGNAL = 1.1; EXPRESSED IN BRAIN, SIGNAL = 1.2; NT HIT: gi15296873, EVALUE 3.00e-92; SWISSPROT HIT: P52545, EVALUE 4.40e+00; EST_HUMAN HIT: BG254828.1, EVALUE 2.20e-01
ctaaaggattgcgaatttcaatcattggagaaggcccactcaaagacacagtgacctctttcaggctgggatcaaaaggaattctccaagtatttacagcctgttccaaatgatctgtggataaaaggtgaactttggaggcctgtactgcttcttctacccattttaatac

SEQ ID NO: 15315 - DNA, 200 bp, Homo sapiens
  MAP TO CHR22_184_2.0; EXPRESSED IN BRAIN, SIGNAL = 1.1; EXPRESSED IN HELA, SIGNAL = 0.61; EXPRESSED IN FETAL LIVER, SIGNAL = 1.1; EXPRESSED IN PLACENTA, SIGNAL = 1.2; EXPRESSED IN LUNG, SIGNAL = 0.95; EXPRESSED IN ADULT LIVER, SIGNAL = 0.98; EXPRESSED IN BONE MARROW, SIGNAL = 1.1; NT HIT: AL163213.2, EVALUE 3.00e-03; SWISSPROT HIT: P13463, EVALUE 2.50e+00; EST_HUMAN HIT: BF335817.1, EVALUE 4.00e-03
tggccaagatactcttctcagggcaagagaagccccaagacagctctaccgccaaagcacatttcaagccttttcttacatcatctactaacttcccattgcccaaagcaaatcacaaggccaagcccctcagtaatggggtcagggagtatgccacattcagggaggatgactcagcccagggtgttcttgtgggaatg

SEQ ID NO: 15316 - DNA, 167 bp, Homo sapiens
  MAP TO AC011731.4; EXPRESSED IN BONE MARROW, SIGNAL = 1.1; EXPRESSED IN BRAIN, SIGNAL = 1.2; EXPRESSED IN HELA, SIGNAL =   1; EXPRESSED IN PLACENTA, SIGNAL = 1.3; EXPRESSED IN LUNG, SIGNAL = 1.3; EXPRESSED IN ADULT LIVER, SIGNAL = 1.2; NT HIT: M81593.1, EVALUE 9.00e+00; SWISSPROT HIT: O32321, EVALUE 1.50e+00; EST_HUMAN HIT: AW844871.1, EVALUE 6.00e-08
tgagttgactatattctccatggggctgagtatggacaaggcgtatttcccggacgccatgggcagggggtctccatcaatgacgtggatattcaacactacagggcctggctccctgcttgcggaggactcatgggtcaccctgaatggcccaaactctctgatac

SEQ ID NO: 15317 - DNA, 478 bp, Homo sapiens
  MAP TO CHR22_235.0; EXPRESSED IN BRAIN, SIGNAL = 1.3; EXPRESSED IN HELA, SIGNAL = 3.6; EXPRESSED IN FETAL LIVER, SIGNAL = 1.3; EXPRESSED IN BONE MARROW, SIGNAL = 1.5; EXPRESSED IN LUNG, SIGNAL = 1.1; EXPRESSED IN ADULT LIVER, SIGNAL =   1; EST_HUMAN HIT: W27511.1, EVALUE 1.70e-01; NT HIT: AJ277151.1, EVALUE 1.80e+00; SWISSPROT HIT: O88799, EVALUE 2.50e+00
tctccaaggaggtctttctgtttgggagacttgacaagtttccaaggaagaaagaagttcggcccgtggtgaggtgcacaggcttgggagcaagctttccagagccttgctgcttcatccacaaaccgggacaggaagctgacgtctcccccaagggctggcatgaggacccattgattgtgttcacgcagactgcttgtaacagtgtctgctgtacaggagacatgatcgtgattattgttaccatgattaatgtcgtgcgcaggcctctcctgggtgccggggattcagctgcgatgaacaggacaaagtccagatctcatgggaccggcatgggggtgatctcagggaggacaacagagaaaatggaagccaagaaccgggaacagggattccgacagatctgggtttctgatcttgtggtttgggagccttcacatggatactcgcaggagtgggaaggccggggctgggacag

SEQ ID NO: 15318 - DNA, 151 bp, Homo sapiens
  MAP TO CHR22_48.0; EXPRESSED IN PLACENTA, SIGNAL = 0.92; EXPRESSED IN BONE MARROW, SIGNAL = 0.96; EXPRESSED IN LUNG, SIGNAL = 1.1; EXPRESSED IN ADULT LIVER, SIGNAL = 1.1; EXPRESSED IN HELA, SIGNAL = 0.56; EXPRESSED IN BRAIN, SIGNAL = 1.2; EXPRESSED IN FETAL LIVER, SIGNAL = 0.9
tcatcttcaccatcaccatcatcatcattgccatcatcaccatcattacgtcatcaccagcatcatcatcaccatcaccatcattctgtcatcaccatcatcattactatcaccatcatttcatcaccgtcatcattaccatcatcaccat

SEQ ID NO: 15319 - DNA, 152 bp, Homo sapiens
  MAP TO CHR21_13.0; EXPRESSED IN HELA, SIGNAL = 3.2; EXPRESSED IN FETAL LIVER, SIGNAL = 1.1; EXPRESSED IN PLACENTA, SIGNAL = 0.66; EXPRESSED IN LUNG, SIGNAL = 0.72; EXPRESSED IN BONE MARROW, SIGNAL = 1.2; EXPRESSED IN ADULT LIVER, SIGNAL = 0.77; EXPRESSED IN BRAIN, SIGNAL = 1.2; NT HIT: gi14780054, EVALUE 2.00e-80; SWISSPROT HIT: P98073, EVALUE 5.00e-22; EST_HUMAN HIT: BF219079.1, EVALUE 3.00e-71
ctaggatatcaacgctgttcaaatcaatatggaaagtgaccagttggctggatttatttgcttcaaggccttgaatcagttcttcttttacattttcatctgacacccactgggcaaagaaaaggtcaaatacgactataatgctgccattt

SEQ ID NO: 15320 - DNA, 334 bp, Homo sapiens
  MAP TO CHR22_139.0; EXPRESSED IN BRAIN, SIGNAL = 0.91; EXPRESSED IN HELA, SIGNAL = 1.7; EXPRESSED IN FETAL LIVER, SIGNAL = 0.88; EXPRESSED IN BONE MARROW, SIGNAL = 1.2; EXPRESSED IN PLACENTA, SIGNAL = 0.94; EXPRESSED IN LUNG, SIGNAL = 1.1; EXPRESSED IN ADULT LIVER, SIGNAL = 0.9; SWISSPROT HIT: P54258, EVALUE 3.00e-04; EST_HUMAN HIT: BF913045.1, EVALUE 2.00e-18
gcttacatgggccaggaggttccaaagcgagtagcctgggcccagactcacacacaggtgcctctcctttaccatcaggaagcgtgcctcttctttaccatcactcacacacaggtgcctctcctttaccatcaggaagcgtgcctcttctttaccatcactcacacacaggtgcctctcctttaccatcaggaagcgtgcctcttctttaccatcactcacacacaggtgcctctcctttaccatcaggaagcgtgcctcttctttaccatcactcacacacaggtgcctctcctttaccatcaggaagcgtgcctcttctttaccatccatc

SEQ ID NO: 15321 - DNA, 132 bp, Homo sapiens
  MAP TO AC022247.2; EXPRESSED IN PLACENTA, SIGNAL = 0.59; EXPRESSED IN LUNG, SIGNAL = 0.54; EXPRESSED IN ADULT LIVER, SIGNAL = 0.49; EXPRESSED IN BONE MARROW, SIGNAL = 0.5; EXPRESSED IN BRAIN, SIGNAL = 0.66; NT HIT: AE006860.1, EVALUE 2.80e-02; SWISSPROT HIT: P39968, EVALUE 6.00e-02; EST_HUMAN HIT: BI767641.1, EVALUE 2.00e-68
ctgcaccaagttgtaaatgcattccatagagttcttctttacatccgggtcagggctactcagtagtctgatgagtggctctaatcccccatgttcaaatatttgcactttactggtgtactctgcagacat

SEQ ID NO: 15322 - DNA, 144 bp, Homo sapiens
  MAP TO AL135783.6; EXPRESSED IN FETAL LIVER, SIGNAL = 0.7; EXPRESSED IN PLACENTA, SIGNAL =   1; EXPRESSED IN LUNG, SIGNAL = 1.1; EXPRESSED IN BRAIN, SIGNAL = 0.7; NT HIT: AF344853.1, EVALUE 1.00e-75; SWISSPROT HIT: P29965, EVALUE 7.00e-22
ttggtaaccctggaaaatgggaaacagctgaccgttaaaagacaaggactctattatatctatgcccaagtcaccttctgttccaatcgggaagcttcgagtcaagctccatttatagccagcctctgcctaaagtcccccggt

SEQ ID NO: 15323 - DNA, 169 bp, Homo sapiens
  MAP TO AL133499.1; EXPRESSED IN BONE MARROW, SIGNAL = 0.44; EXPRESSED IN BRAIN, SIGNAL = 0.46; EXPRESSED IN FETAL LIVER, SIGNAL = 0.42; EXPRESSED IN LUNG, SIGNAL = 0.77; NT HIT: gi7669476, EVALUE 2.00e-90; SWISSPROT HIT: P78563, EVALUE 7.00e-26; EST_HUMAN HIT: N88044.1, EVALUE 3.00e-90
gcacagatgttaaagatgccaaggtgataagtgtttctacaggaacaaaatgtattaatggtgaatacatgagtgatcgtggccttgcattaaatgactgccatgcagaaataatatctcggagatccttgctcagatttctttatacacaacttgagctttacttaaa

SEQ ID NO: 15324 - DNA, 131 bp, Homo sapiens
  MAP TO AL136311.2; EXPRESSED IN FETAL LIVER, SIGNAL = 0.78; EXPRESSED IN LUNG, SIGNAL = 0.67; EXPRESSED IN BONE MARROW, SIGNAL = 0.74; EXPRESSED IN BRAIN, SIGNAL = 0.4; EXPRESSED IN PLACENTA, SIGNAL = 0.63; EST_HUMAN HIT: AA954425.1, EVALUE 1.00e-66; NT HIT: AB011148.1, EVALUE 6.00e-68
gaggaaacaccaattggaagcctccgctcaactgtaagatttataactacctgaacaggattggatgcttcttccttcatcctcgctgtagtaaaagaaaagatgctgctgattttgccatatgtatgcat

SEQ ID NO: 15325 - DNA, 126 bp, Homo sapiens
  MAP TO CHR21_21.0; EXPRESSED IN BONE MARROW, SIGNAL = 1.7; EXPRESSED IN BRAIN, SIGNAL = 1.3; EXPRESSED IN PLACENTA, SIGNAL = 0.86; EXPRESSED IN HELA, SIGNAL = 3.9; EXPRESSED IN LUNG, SIGNAL =   1; EXPRESSED IN FETAL LIVER, SIGNAL = 1.3; EXPRESSED IN ADULT LIVER, SIGNAL = 0.8; SWISSPROT HIT: P17777, EVALUE 3.50e+00; NT HIT: AE007490.1, EVALUE 7.00e-03
ctcagtgcttgacttcttgtgcagttagtcatgttcatagtaaagctccaccattgtttgataattgctttaatctgctgcttatttcgttggaaaggtttcccagttacgtttgttccttgtatg

SEQ ID NO: 15326 - DNA, 120 bp, Homo sapiens
  MAP TO CHR22_193.0; EXPRESSED IN BRAIN, SIGNAL = 0.7; EXPRESSED IN LUNG, SIGNAL = 0.75; EXPRESSED IN ADULT LIVER, SIGNAL = 0.61; EXPRESSED IN HELA, SIGNAL = 0.63; EXPRESSED IN FETAL LIVER, SIGNAL = 0.67; EXPRESSED IN BONE MARROW, SIGNAL = 0.77; NT HIT: AF220365.2, EVALUE 3.90e-01; EST_HUMAN HIT: BE696981.1, EVALUE 5.80e-01
gccgggcaggaaggtactttgccctcaggagggcaccttcgacccaaagcaccctgaccaagaggctgtgcaccgtggcaaccctaagactgaggcccaggtcctggagttccaccaagg

SEQ ID NO: 15327 - DNA, 87 bp, Homo sapiens
  MAP TO AL133492.1; EXPRESSED IN BRAIN, SIGNAL = 0.9; EXPRESSED IN HEART, SIGNAL = 1.1; EXPRESSED IN PLACENTA, SIGNAL = 1.3; EXPRESSED IN FETAL LIVER, SIGNAL = 0.85; EXPRESSED IN LUNG, SIGNAL = 1.2; EXPRESSED IN ADULT LIVER, SIGNAL = 1.2; EXPRESSED IN BONE MARROW, SIGNAL = 1.1; NT HIT: AL163303.2, EVALUE 7.00e-42; EST_HUMAN HIT: AV731133.1, EVALUE 6.10e+00
gttcctcttctaaagacaccatcaccgtgacctctgcaatgtcagtgtctgaagataggcgacgacttttcagaatttggcactgcc

SEQ ID NO: 15328 - DNA, 111 bp, Homo sapiens
  MAP TO AL136180.1; EXPRESSED IN FETAL LIVER, SIGNAL = 4.9; EXPRESSED IN BONE MARROW, SIGNAL = 5.5; EXPRESSED IN BRAIN, SIGNAL =   4; EXPRESSED IN PLACENTA, SIGNAL = 7.3; EXPRESSED IN LUNG, SIGNAL = 7.9; EXPRESSED IN ADULT LIVER, SIGNAL = 7.8; SWISSPROT HIT: P54813, EVALUE 3.50e+00; NT HIT: AF029308.1, EVALUE 2.00e-27; EST_HUMAN HIT: AW250164.1, EVALUE 1.00e-41
tgggttcgtggtctcgctggcttcaggagtgaagttacagaccttcgcagtgagtgttatagctcataaaggtggtgtggacccaaagagtgagcagcagcaagatttatt

SEQ ID NO: 15329 - DNA, 195 bp, Homo sapiens
  MAP TO AL137178.3; EXPRESSED IN PLACENTA, SIGNAL = 0.57; EXPRESSED IN BONE MARROW, SIGNAL = 0.46; EXPRESSED IN ADULT LIVER, SIGNAL = 0.63; EXPRESSED IN LUNG, SIGNAL = 0.55; EXPRESSED IN BRAIN, SIGNAL = 0.44; EXPRESSED IN FETAL LIVER, SIGNAL = 0.48; SWISSPROT HIT: P22003, EVALUE 4.00e-14; NT HIT: gi10835090, EVALUE 1.00e-106; EST_HUMAN HIT: AL569760.1, EVALUE 1.00e-105
ctccaacactggacattctggaggagtcctgatgagagctggatttattgcggttttgattttttcgtttgttggctgctctcacggatcgaagaagtacctcactcgccttgaagaaggccaccatgaatggttgttttgactgaggtccctgtcttcccacaagaccagcagattttacgttgatactgcgtc

SEQ ID NO: 15330 - DNA, 195 bp, Homo sapiens
  MAP TO AL138478.1; EXPRESSED IN BRAIN, SIGNAL = 1.7; EXPRESSED IN PLACENTA, SIGNAL = 2.1; EXPRESSED IN LUNG, SIGNAL = 2.1; EXPRESSED IN ADULT LIVER, SIGNAL = 2.3; EXPRESSED IN FETAL LIVER, SIGNAL = 1.7; EXPRESSED IN BONE MARROW, SIGNAL = 1.8; SWISSPROT HIT: Q01698, EVALUE 3.30e+00; NT HIT: Z73115.1, EVALUE 1.70e-01; EST_HUMAN HIT: BG326626.1, EVALUE 2.60e-01
aaccattctgattctcttcactgccactatccccattccagtcacagtcacagtcacctctccaggacaatgcactggcctcctaacatccctccctgcttcttacctccaccttccacccatcactccaccctctcgtctggagcccactctccaaatagcaggcagcagcgtggccttcctgaacacaagtga

SEQ ID NO: 15331 - DNA, 409 bp, Homo sapiens
  MAP TO CHR22_198.0; EXPRESSED IN BRAIN, SIGNAL = 0.46; EXPRESSED IN BONE MARROW, SIGNAL = 0.44; EXPRESSED IN PLACENTA, SIGNAL = 0.54; EXPRESSED IN LUNG, SIGNAL = 0.52; SWISSPROT HIT: P53218, EVALUE 2.00e+00; NT HIT: AF224669.1, EVALUE 2.00e-06; EST_HUMAN HIT: AW833902.1, EVALUE 5.00e-26
taggattcaaatgctttcccaatgtgtctctttttgtcatcggccttttgttttttccccctttgaattgtcctgcttttccggattgaatcaatacataccttacgtgcattgattgatgttttatgtctccttaaaacatatacaaccaagctgtgatgcagccacgttgggcacatgttgtcaggaccccctggggctgtgtcatgggtcatggtcctcacattaggctcaggataagtctcttcaaatattttacagagtttggcttttttgtcaacagttcttaccagtggtccccattgttttgcatgtgttttcttgcaacttaaagtgagggtgttttcatctttatcattgtgctgcttgtgttctatcttgtgcttctttcttcccttcactcttctca

SEQ ID NO: 15332 - DNA, 210 bp, Homo sapiens
  MAP TO AL133269.6; EXPRESSED IN BONE MARROW, SIGNAL = 4.6; EXPRESSED IN HELA, SIGNAL = 4.8; EXPRESSED IN BRAIN, SIGNAL = 3.6; EXPRESSED IN FETAL LIVER, SIGNAL = 3.4; EXPRESSED IN PLACENTA, SIGNAL = 4.5; EXPRESSED IN LUNG, SIGNAL = 4.2; EXPRESSED IN ADULT LIVER, SIGNAL = 3.9; EST_HUMAN HIT: AA327056.1, EVALUE 5.00e-06; SWISSPROT HIT: P40535, EVALUE 2.80e-01; NT HIT: L10357.1, EVALUE 4.80e-02
tcaacaccggcctgcgctgatcagctttttcttcagctcggttcggcgccagttgatttttccccccgggatcccccacagttgctcggcgacgccaatatgcggtccgtacttccgcctggggtttgttgtattggtgtggttttcacttcccgaggacatggttgtggggcttgctgttgtggtgcagtcgctgaatcccaaagacat

SEQ ID NO: 15333 - DNA, 179 bp, Homo sapiens
  MAP TO CHR22_86.0; EXPRESSED IN BRAIN, SIGNAL = 0.4; EXPRESSED IN HELA, SIGNAL = 0.88; EXPRESSED IN ADULT LIVER, SIGNAL = 0.45; EXPRESSED IN PLACENTA, SIGNAL = 0.36; NT HIT: gi11427757, EVALUE 2.00e-53; EST_HUMAN HIT: AU125898.1, EVALUE 3.00e-53; SWISSPROT HIT: P34245, EVALUE 8.60e-01
agtccttgatggctgtgtccaggtccttgtcactgtccagggaactgcttttgtcttcggagctcttcttcttgtctaggtgccttgcctcgtctgtcttaccctggccctgtgacgtgcgagtgtcaccgggcaccctagcggcgccctctcctcccggggcctcgctggctgtgccc

SEQ ID NO: 15334 - DNA, 55 bp, Homo sapiens
  MAP TO CHR21_34.0; EXPRESSED IN BONE MARROW, SIGNAL = 1.4; EXPRESSED IN BRAIN, SIGNAL = 1.4; EXPRESSED IN HELA, SIGNAL = 2.9; EXPRESSED IN FETAL LIVER, SIGNAL = 1.4; EXPRESSED IN PLACENTA, SIGNAL = 0.77; EXPRESSED IN LUNG, SIGNAL = 0.86; EXPRESSED IN ADULT LIVER, SIGNAL = 0.9; EST_HUMAN HIT: BF793466.1, EVALUE 3.30e+00
tcaccaatgacgaggacttttattccgcaattcaactccagttcaaggagaatat

SEQ ID NO: 15335 - DNA, 88 bp, Homo sapiens
  MAP TO AL136113.1; EXPRESSED IN PLACENTA, SIGNAL = 3.4; EXPRESSED IN BONE MARROW, SIGNAL = 2.5; EXPRESSED IN LUNG, SIGNAL = 2.7; EXPRESSED IN ADULT LIVER, SIGNAL = 3.9; EXPRESSED IN BRAIN, SIGNAL = 2.6; EXPRESSED IN HELA, SIGNAL = 1.5; EXPRESSED IN FETAL LIVER, SIGNAL = 2.4; NT HIT: AL163248.2, EVALUE 6.90e-02; EST_HUMAN HIT: BE501049.1, EVALUE 2.50e-02; SWISSPROT HIT: P24092, EVALUE 4.70e+00
attctttggtgtatttcctaaaactgtattcattgggaggattttccttcaccactgtcataagaaccaccttctccttaatggccat

SEQ ID NO: 15336 - DNA, 233 bp, Homo sapiens
  MAP TO AL137784.2; EXPRESSED IN ADULT LIVER, SIGNAL = 2.4; EXPRESSED IN LUNG, SIGNAL = 1.8; EXPRESSED IN HELA, SIGNAL = 1.2; EXPRESSED IN BRAIN, SIGNAL = 1.3; EXPRESSED IN FETAL LIVER, SIGNAL = 1.2; SWISSPROT HIT: P12569, EVALUE 2.80e+00; NT HIT: AF182696.1, EVALUE 5.40e-02; EST_HUMAN HIT: AI784529.1, EVALUE 5.00e-03
atgaggaaactggagaatagaaaggttacccttgctcaagttcatgtgtctaagtgtcagaagaaggatttgaatctaggcactctgactgcagagcccactctctcaactactatgatgtcccgtggtaacttaatcatttgcatagagaagaacagatatgtgacatcaattaagccccttaatgcagtgaggtcaagtgtaaatggcctggactttaagcccagaattat

SEQ ID NO: 15337 - DNA, 16 bp, Homo sapiens
  MAP TO CHR21_57.0; EXPRESSED IN BRAIN, SIGNAL = 0.29
taccgtcgccttcggg

SEQ ID NO: 15338 - DNA, 107 bp, Homo sapiens
  MAP TO AC018608.4; EXPRESSED IN PLACENTA, SIGNAL = 0.59; EXPRESSED IN BONE MARROW, SIGNAL = 0.45; EXPRESSED IN BRAIN, SIGNAL = 0.43; EXPRESSED IN FETAL LIVER, SIGNAL = 0.44; NT HIT: U63372.1, EVALUE 3.40e-01; EST_HUMAN HIT: BG618745.1, EVALUE 2.00e+00
ctatgggtacacagataaaagaggaactttctccacgtagagtatgtgcatgtcaatttcatggagaacatgatatttgcattgagtttcaaataatgtatagacat

SEQ ID NO: 15339 - DNA, 171 bp, Homo sapiens
  MAP TO AL035367.1; EXPRESSED IN PLACENTA, SIGNAL = 3.4; EXPRESSED IN LUNG, SIGNAL = 3.1; EXPRESSED IN BONE MARROW, SIGNAL = 2.5; EXPRESSED IN BRAIN, SIGNAL = 2.6; EXPRESSED IN HEART, SIGNAL = 2.6; SWISSPROT HIT: P08111, EVALUE 9.00e-03; NT HIT: gi14775759, EVALUE 7.00e-87; EST_HUMAN HIT: AL521136.1, EVALUE 6.00e-85
ctacatacctggttccccaggaagatgtggtccacacactgcgaggcctggttccagatgaccagcaggccccggctgtagccaatgagaatctttgtggggtcccgcaggtgtccctggagtgactccacggggcccagtgccttcccacagcggtagtcgtctggcacg

SEQ ID NO: 15340 - DNA, 147 bp, Homo sapiens
  MAP TO AL136081.1; EXPRESSED IN BONE MARROW, SIGNAL = 1.8; EXPRESSED IN BRAIN, SIGNAL = 1.2; EXPRESSED IN HELA, SIGNAL = 1.1; EXPRESSED IN FETAL LIVER, SIGNAL = 1.4; EXPRESSED IN LUNG, SIGNAL = 1.7; SWISSPROT HIT: Q9ZJS0, EVALUE 5.90e+00; NT HIT: X53560.1, EVALUE 2.00e+00; EST_HUMAN HIT: AA693642.1, EVALUE 1.00e-08
ctgtgtctgagtactcatttcgtccatcagccagggtctgcaggacagacccggcaaaaaagaacaaaatcggggtatgtacatttcctgatttccaaatttctgcaaagccattacaatcattacagtcattacaatcatgtggta

SEQ ID NO: 15341 - DNA, 155 bp, Homo sapiens
  MAP TO CHR22_79.0; EXPRESSED IN ADULT LIVER, SIGNAL = 0.34; EXPRESSED IN BRAIN, SIGNAL = 0.32; EST_HUMAN HIT: AW770337.1, EVALUE 7.80e-01; SWISSPROT HIT: P46692, EVALUE 1.50e+00; NT HIT: U43368.1, EVALUE 5.30e-01
tcactggctagatgtaaactgcacctgtgacaagaggtcacataatgggaacatggaacatggtgtcatgagcagaaacctgacatagctgggggtcaaggaatgcctccctgaggccatcatcactgaaatggatggtctctgcaacagatacc

SEQ ID NO: 15342 - DNA, 396 bp, Homo sapiens
  MAP TO AL035367.1; EXPRESSED IN FETAL LIVER, SIGNAL =  16; EXPRESSED IN ADULT LIVER, SIGNAL =  22; EXPRESSED IN BONE MARROW, SIGNAL =  20; EXPRESSED IN HEART, SIGNAL =  16; EXPRESSED IN HELA, SIGNAL = 8.2; EXPRESSED IN BRAIN, SIGNAL =  14; EXPRESSED IN PLACENTA, SIGNAL =  23; EXPRESSED IN LUNG, SIGNAL =  21; EST_HUMAN HIT: AU125151.1, EVALUE 0.00e+00; SWISSPROT HIT: Q13472, EVALUE 5.00e-67; NT HIT: gi11427857, EVALUE 0.00e+00
gttaaagttaaagtttaagcgcggtagccttcccccgaccatgcctctggagtttgtttgctgcatcggcggatgcgacgacaccctgagggagatcctggacctgagattttcagggggcccccccagggctagccagccctctggccgcctgcaggctaaccagtccctgaacaggatggacaacagccagcacccccagcctgctgacagcagacagactgggtcctcaaaggctctggcccagaccctcccaccacccacggctgctggtgaaagcaattctgtgacctgcaactgtggccaggaggctgtgctgctcactgtccgtaaggagggccccaaccggggccggcagttctttaagtgcaacggaggtagctgcaacttcttcct

SEQ ID NO: 15343 - DNA, 88 bp, Homo sapiens
  MAP TO AC016665.2; EXPRESSED IN BRAIN, SIGNAL = 0.5; EXPRESSED IN PLACENTA, SIGNAL = 0.73; EXPRESSED IN ADULT LIVER, SIGNAL = 0.66; EXPRESSED IN FETAL LIVER, SIGNAL = 0.51; NT HIT: AF191547.1, EVALUE 2.70e-01; EST_HUMAN HIT: AI951937.1, EVALUE 1.60e+00
aaagaagaaaaatgccctgaacaagagggataatggccttaaccatactctcttctggtccgaccacgcttgggaaattatgtcccat

SEQ ID NO: 15344 - DNA, 229 bp, Homo sapiens
  MAP TO AL136099.2; EXPRESSED IN HEART, SIGNAL = 2.1; EXPRESSED IN PLACENTA, SIGNAL = 2.6; EXPRESSED IN FETAL LIVER, SIGNAL = 1.8; EXPRESSED IN LUNG, SIGNAL = 2.7; EXPRESSED IN ADULT LIVER, SIGNAL = 2.6; EXPRESSED IN BRAIN, SIGNAL = 2.2; NT HIT: gi14732697, EVALUE 5.30e-02; EST_HUMAN HIT: BG008522.1, EVALUE 7.70e-02
atgattgatgatgaggatgatggtgaggagagggaggatgaggataatgatggtgatgaagatcatgaggaggaaagtgatgaagacgatgaggatgatggtgaggaggaagagggtgatggtaatgaagatgatgaagatgatggggagaaggaggatgatggtattggagataatgagaataatggggaggaggaggatgatggtgatgaagatgatgatgaggatg

SEQ ID NO: 15345 - DNA, 307 bp, Homo sapiens
  MAP TO CHR22_75.0; EXPRESSED IN FETAL LIVER, SIGNAL = 0.5; EXPRESSED IN PLACENTA, SIGNAL = 0.53; EXPRESSED IN ADULT LIVER, SIGNAL = 0.51; EXPRESSED IN BONE MARROW, SIGNAL = 0.67; EXPRESSED IN BRAIN, SIGNAL = 0.4; EXPRESSED IN HELA, SIGNAL = 0.77; SWISSPROT HIT: Q28343, EVALUE 1.00e-04; EST_HUMAN HIT: BE677025.1, EVALUE 5.00e-07; NT HIT: AJ229042.1, EVALUE 7.00e-05
tgtgaggacacagcaagtgggccctcaccagacaccagatgctggtgccttgatccgtgtgaggacacagcaagagggccctcaccagacaccagatgctggcgccttgatccgtgtgagggcacagcaagagggccctcaccagacaccagattctggtgccttgatccatgtgagggcgcagcaagagggccctcaccagacaccagatgctggcgccttgatccgtgtgagggcgcagcaagaaggccctcaccagacaccagatgctagtgccttgatcctggactttccagcatccagactg

SEQ ID NO: 15346 - DNA, 205 bp, Homo sapiens
  MAP TO AL139253.1; EXPRESSED IN PLACENTA, SIGNAL = 2.9; EXPRESSED IN LUNG, SIGNAL =   3; EXPRESSED IN ADULT LIVER, SIGNAL = 2.8; EXPRESSED IN FETAL LIVER, SIGNAL = 2.4; EXPRESSED IN BONE MARROW, SIGNAL = 2.7; EXPRESSED IN HELA, SIGNAL = 2.2; EXPRESSED IN BRAIN, SIGNAL = 2.8; EXPRESSED IN HEART, SIGNAL = 2.5; SWISSPROT HIT: P21436, EVALUE 7.40e-02; EST_HUMAN HIT: AW884473.1, EVALUE 1.10e+00; NT HIT: Y17188.1, EVALUE 7.30e-01
tctcctgtctgtaacttccacgaggactataactccacgaaggaaggcggtgccaatgtgggtcccatttgtccccacacctccagcccctggaacagtacaggttataggtgctcagggaatactgttgaatggatgaagccaagcccgcttggcaatcgttcagtccagcaaccgccccttccccactattacgaagatgggg

SEQ ID NO: 15347 - DNA, 311 bp, Homo sapiens
  MAP TO CHR21_50.0; EXPRESSED IN BRAIN, SIGNAL = 0.4; EST_HUMAN HIT: AI288919.1, EVALUE 1.70e+00; NT HIT: D86420.1, EVALUE 2.00e-48
tgtgtggcagctactacagaaactacaatggtggccatggctatgggtgctgtggctacggaggcctgggctgtggttatggcggctgtggctatgggtgctgtggctacggaggcctgggctttggctatggaggcctggactgtggctatggaggcctgggctgtggctatggctccttctgtggctgtggctacagaggcctggactgtggctatggctgtggctatggctatgtctcccactccttctgtggctgtggctataggtgcggctctggctatggctccagctttggctactactattga

SEQ ID NO: 15348 - DNA, 123 bp, Homo sapiens
  MAP TO AL137145.3; EXPRESSED IN FETAL LIVER, SIGNAL = 0.58; EXPRESSED IN BONE MARROW, SIGNAL = 0.52; EXPRESSED IN PLACENTA, SIGNAL = 0.61; EXPRESSED IN LUNG, SIGNAL = 0.6; EXPRESSED IN ADULT LIVER, SIGNAL = 0.69; EXPRESSED IN BRAIN, SIGNAL = 0.62; SWISSPROT HIT: P55704, EVALUE 6.10e-02; EST_HUMAN HIT: AA714625.1, EVALUE 1.50e-01; NT HIT: AB037673.1, EVALUE 2.60e-02
gtgatgacttggctacccagagaagtgtcacattcacctgaggtcccagagctggcccctggcaaacgggaaatttacatcccagtcccagttcccaagcattcacttcgcatcaccaccctt

SEQ ID NO: 15349 - DNA, 213 bp, Homo sapiens
  MAP TO AL136140.2; EXPRESSED IN BONE MARROW, SIGNAL = 1.1; EXPRESSED IN PLACENTA, SIGNAL = 1.4; EXPRESSED IN BRAIN, SIGNAL = 0.98; EXPRESSED IN FETAL LIVER, SIGNAL = 1.2; NT HIT: gi14758623, EVALUE 1.00e-116; SWISSPROT HIT: Q9PWD5, EVALUE 9.50e-01; EST_HUMAN HIT: BF035463.1, EVALUE 1.00e-116
ctctagcctccggggaatagcagaatcttcatgtttcttgagttcttcaaaagtgcgtaactccaagtgagcctgttcaatttggtcccataagtcattcaactgtttcatgagccccatagcacgagactggtaacccccaagcaaaattttcatcttcttttccatctttgcagccctcttggcttctgtcgtcatgtgacccctgtttat

SEQ ID NO: 15350 - DNA, 189 bp, Homo sapiens
  MAP TO AL137008.1; EXPRESSED IN PLACENTA, SIGNAL = 1.1; EXPRESSED IN BONE MARROW, SIGNAL = 0.81; EXPRESSED IN BRAIN, SIGNAL = 1.3; EST_HUMAN HIT: BE887789.1, EVALUE 1.00e-102; NT HIT: gi14759704, EVALUE 1.00e-102; SWISSPROT HIT: O94833, EVALUE 1.00e-16
gtgctggcctgggcaaagcaacatcagcagagattagcaagtgctctggctgggcttattgccaaacaggaattgttggaagctttgctggcttggttgcaatgggctgaaactacacttactgataaggataaagaagtcatcccccaggagatcgaagaggtgaaagcactcattgcagaacaccag

SEQ ID NO: 15351 - DNA, 167 bp, Homo sapiens
  MAP TO CHR22_151.0; EXPRESSED IN HELA, SIGNAL = 0.92; EXPRESSED IN BRAIN, SIGNAL = 0.38; SWISSPROT HIT: Q10172, EVALUE 2.60e+00; EST_HUMAN HIT: BI460234.1, EVALUE 1.00e-86; NT HIT: AJ276161.1, EVALUE 5.80e-01
cccactttgctctgcttagcctgagacacgcaactttctccagcctttactcttcgctgaattctcacggcgggcttgcgggtacgttcaggagcgaggttgggggcccggcccgctgggcgctgttcacaggtagcttggaccagagcaggggcttcatcattacc

SEQ ID NO: 15352 - DNA, 91 bp, Homo sapiens
  MAP TO AC020699.2; EXPRESSED IN BRAIN, SIGNAL = 0.65; EXPRESSED IN PLACENTA, SIGNAL = 0.72; EXPRESSED IN LUNG, SIGNAL = 0.51; EXPRESSED IN ADULT LIVER, SIGNAL = 0.63; EST_HUMAN HIT: AI702977.1, EVALUE 1.60e+00; NT HIT: gi13491169, EVALUE 1.10e+00
ggtcatgaactggcagtttgagtgcattaacaatgtgatggctaatatttgtggcctaatctctttaaccagcactgtgaacaaagaatga

SEQ ID NO: 15353 - DNA, 360 bp, Homo sapiens
  MAP TO AC013614.4; EXPRESSED IN BRAIN, SIGNAL = 1.7; EXPRESSED IN ADULT LIVER, SIGNAL = 5.9; EXPRESSED IN BONE MARROW, SIGNAL = 1.8; SWISSPROT HIT: P05783, EVALUE 1.00e-20; EST_HUMAN HIT: AI288272.1, EVALUE 5.00e-75; NT HIT: gi4557887, EVALUE 1.00e-74
atgagaaatctgaaggccagcctggagaacagcctgaggtgggtggaggcccgctatgccatgcaaatggagcagctcagtggggctgtgctgcacctagattcagagctggcacaggcccaggcagaagggcagcaccaggcccagaagtatgaggccctgctgaacatcaaggtcaagcgggaggctgagattgccgctactactactactgccgcctgctggaagatggggaggacttcaattgtggcgatgccctggacaacagcaactctatgcaaaccatccaaaagactgtccaggatagcggatgacaaagtggtgtctgagatcaacaacaccaaagttctgaggcgctga

SEQ ID NO: 15354 - DNA, 126 bp, Homo sapiens
  MAP TO CHR22_85.0; EXPRESSED IN BRAIN, SIGNAL = 0.32; EXPRESSED IN ADULT LIVER, SIGNAL = 0.32; EST_HUMAN HIT: BE311881.1, EVALUE 1.60e-01; NT HIT: AY011294.1, EVALUE 4.20e-01
tggggctctcctacgtgaccatgcacctaaagggctccaatccctctgccaatcaccctaagaagtttccaacctgctccatttggctgagaatcctttactggctccccatcaccagtgtgaatt

SEQ ID NO: 15355 - DNA, 200 bp, Homo sapiens
  MAP TO CHR22_183_2.0; EXPRESSED IN BONE MARROW, SIGNAL = 0.61; EXPRESSED IN HELA, SIGNAL = 0.77; EXPRESSED IN BRAIN, SIGNAL = 0.57; EXPRESSED IN PLACENTA, SIGNAL = 0.72; EXPRESSED IN FETAL LIVER, SIGNAL = 0.61; NT HIT: U07000.1, EVALUE 1.00e-109; SWISSPROT HIT: P52725, EVALUE 2.50e+00
gcccaaccctgtgaggtaccaggcaggggtgacttacctagacatgcccattcagcagccccttgagcaagaaggaccgacccttgcctttcagatgcagaccaagatgcagaaaggcacccttctcaggccgcaggtgtccaggcaggtgtcagaggtgcagcccgtgcacaccggggaccctatccatcctgtctagt

SEQ ID NO: 15356 - DNA, 168 bp, Homo sapiens
  MAP TO CHR22_199.0; EXPRESSED IN HELA, SIGNAL = 1.1; EXPRESSED IN BRAIN, SIGNAL = 1.6; NT HIT: X89631.1, EVALUE 7.00e-16; SWISSPROT HIT: P06724, EVALUE 1.90e+00; EST_HUMAN HIT: BG987997.1, EVALUE 5.00e-70
tgggctcgtggtctcagtggcttcaggagtgaagccgcagaccttcgtggcgagtgttacagctcatgaaggtagtgccaacccccaggtgtgcagcagcagaattttctgtgaggagccaaggaacaaagcttccacaccgtcggaggggacccaagctggttgccg

SEQ ID NO: 15357 - DNA, 126 bp, Homo sapiens
  MAP TO AC011803.4; EXPRESSED IN BONE MARROW, SIGNAL = 0.46; EXPRESSED IN BRAIN, SIGNAL = 0.51; EXPRESSED IN PLACENTA, SIGNAL = 0.56; EXPRESSED IN ADULT LIVER, SIGNAL = 0.37; SWISSPROT HIT: Q07266, EVALUE 4.60e+00; EST_HUMAN HIT: BE313939.1, EVALUE 1.60e-01
atggaatttcttattgagtctatgattgtcacctggcctgggaggaaaaagaatgcagcaacccctcagggagaagacactttagtagtcgtgaaggccaagaatgaaaaagaaatgtctaaagtg

SEQ ID NO: 15358 - DNA, 120 bp, Homo sapiens
  MAP TO AC025758.1; EXPRESSED IN BONE MARROW, SIGNAL = 0.5; EXPRESSED IN PLACENTA, SIGNAL = 0.63; EXPRESSED IN BRAIN, SIGNAL = 0.48; EXPRESSED IN FETAL LIVER, SIGNAL = 0.57; SWISSPROT HIT: Q9W5G6, EVALUE 3.50e+00; EST_HUMAN HIT: BG476299.1, EVALUE 3.70e-02; NT HIT: AF030554.1, EVALUE 1.00e-01
atgcagaaaacaataaatccaacacaagagaaggagaaaaggcatatccaggatggtgttgaaggaaaaattttgggtgataactgtgagacgggagtgggaggcaaacaattgaagcag

SEQ ID NO: 15359 - DNA, 111 bp, Homo sapiens
  MAP TO CHR22_162.0; EXPRESSED IN BONE MARROW, SIGNAL = 0.97; EXPRESSED IN BRAIN, SIGNAL = 0.94; EXPRESSED IN PLACENTA, SIGNAL = 1.3; EXPRESSED IN FETAL LIVER, SIGNAL = 0.96; EXPRESSED IN LUNG, SIGNAL =   1; SWISSPROT HIT: P11365, EVALUE 1.20e+00; EST_HUMAN HIT: AL568984.1, EVALUE 4.00e-11; NT HIT: U65487.1, EVALUE 2.00e-09
atggctcctctgctggccagctgtgtggccttggacaagttactcaacctctctgagccttggtttcctcatgtgtctaacagtaatgacagtggtgcctaccccactggg

SEQ ID NO: 15360 - DNA, 159 bp, Homo sapiens
  MAP TO AC013624.4; EXPRESSED IN HELA, SIGNAL = 0.59; EXPRESSED IN BRAIN, SIGNAL = 0.88; EXPRESSED IN PLACENTA, SIGNAL = 0.81; EXPRESSED IN ADULT LIVER, SIGNAL = 0.79; NT HIT: AF270495.1, EVALUE 5.50e-01; SWISSPROT HIT: P35515, EVALUE 2.60e+00
atgggagtgaaaactaaagaggacttccatcttcccctgaccctgctggccttcgcagctggaatgtgctgggaatcacttctggcactgaaaaggttaattgtctcctgctgcgaagtagaaactgagaaaagggtcctgggcaggggaggaattatg

SEQ ID NO: 15361 - DNA, 256 bp, Homo sapiens
  MAP TO CHR22_164.0; EXPRESSED IN BRAIN, SIGNAL = 0.55; EXPRESSED IN PLACENTA, SIGNAL = 0.84; EXPRESSED IN LUNG, SIGNAL = 0.67; EXPRESSED IN FETAL LIVER, SIGNAL = 0.59; EXPRESSED IN BONE MARROW, SIGNAL = 0.61; NT HIT: gi8922676, EVALUE 1.00e-43; SWISSPROT HIT: P06436, EVALUE 1.50e+00; EST_HUMAN HIT: BG167039.1, EVALUE 1.00e-43
atggagatggccctctgacttggatccagagctaggaatcttcaacttggcatcagcaatgtccacaaagttgtgcttggtgagtttgagacagtgaatgttgagaagagggcccagagctccctgtgccttgggatggctatgcacctgctccaatgccaactggtaatacaaagccctggaaaaagtcttttgtatgcggtaatacacaagggccaagcccccagtaccgaacacattgccgaaaaggaccatt

SEQ ID NO: 15362 - DNA, 177 bp, Homo sapiens
  MAP TO AC022091.2; EXPRESSED IN BRAIN, SIGNAL = 0.51; EXPRESSED IN FETAL LIVER, SIGNAL = 0.51; EXPRESSED IN PLACENTA, SIGNAL = 0.62; EXPRESSED IN ADULT LIVER, SIGNAL = 0.61; NT HIT: Y11107.3, EVALUE 1.00e-05; SWISSPROT HIT: Q9UBS0, EVALUE 2.50e+00; EST_HUMAN HIT: AL137953.1, EVALUE 2.00e-04
ggagggctgtctgtgggaggagcgggcaggctgaatggattcgggagtgaggggccggctggaaacccacaatccactcactggccaaataaccttgacaaatcacaaaacctttctttttgaggctcagtttcctcatctgtaaaatgggaataatggtactccctaactcacagc

SEQ ID NO: 15363 - DNA, 168 bp, Homo sapiens
  MAP TO AC021635.3; EXPRESSED IN BONE MARROW, SIGNAL = 0.41; EXPRESSED IN BRAIN, SIGNAL = 0.49; EXPRESSED IN LUNG, SIGNAL = 0.52; EXPRESSED IN ADULT LIVER, SIGNAL = 0.51; SWISSPROT HIT: P53356, EVALUE 1.70e-01; EST_HUMAN HIT: BI829303.1, EVALUE 1.00e-89; NT HIT: gi14768502, EVALUE 2.30e+00
ctgcccagtccaggaattcaacacactcagtctgagaatatctagcagcaacatctcgagccctttcttcccggaagttcaaagcttctatatcaacatccagttctaccagtgctttcaaagtttccaaacgaccccaggctgcagcacaatgtaagagtgtgtacc

SEQ ID NO: 15364 - DNA, 256 bp, Homo sapiens
  MAP TO CHR22_180.0; EXPRESSED IN HELA, SIGNAL = 0.59; EXPRESSED IN LUNG, SIGNAL = 0.78; EXPRESSED IN FETAL LIVER, SIGNAL = 0.72; EXPRESSED IN BONE MARROW, SIGNAL = 0.74; EXPRESSED IN BRAIN, SIGNAL = 0.65; NT HIT: gi8922317, EVALUE 2.00e-41; SWISSPROT HIT: P17600, EVALUE 1.70e-01; EST_HUMAN HIT: BI550393.1, EVALUE 1.00e-43
cattcacacccgcactcatcatgggcagggagaagaccagaaaggcttttctgagctacagctgctcctgatcccagttgacccccgggaccctctgttaccggtggagggtgtccaggttcttggcgctttgaacaaagaattgaacaaaacacacaaacaaagcaaggaaagaattaaggaacaaaagcagagatttattgaaaacgaaagcacactccccagggtgggagcaggcaagcagctcaagggccag

SEQ ID NO: 15365 - DNA, 72 bp, Homo sapiens
  MAP TO CHR22_135.0; EXPRESSED IN BRAIN, SIGNAL = 0.6; EXPRESSED IN LUNG, SIGNAL = 0.55; EXPRESSED IN ADULT LIVER, SIGNAL = 0.49; EXPRESSED IN BONE MARROW, SIGNAL = 0.59; NT HIT: V01236.1, EVALUE 2.10e-01; EST_HUMAN HIT: BF513155.1, EVALUE 7.00e-33
gatgagacacttcgggccaacttcaatgttctaattccgagtttggaaatcaacttttggactgaaagctga

SEQ ID NO: 15366 - DNA, 195 bp, Homo sapiens
  MAP TO AC012360.2; EXPRESSED IN PLACENTA, SIGNAL = 0.46; EXPRESSED IN LUNG, SIGNAL = 0.48; EXPRESSED IN ADULT LIVER, SIGNAL = 0.51; EXPRESSED IN BRAIN, SIGNAL = 0.5; NT HIT: gi14743325, EVALUE 1.00e-106; SWISSPROT HIT: P51862, EVALUE 3.30e+00; EST_HUMAN HIT: BG828430.1, EVALUE 1.00e-105
cttcaaagtcctgtaggatatggccctccttaaagggcagcgtctgcttctgttgctgatccaacatgctgtggactgtgatgaattcgtcatcgagcgctatgacgtatggaaaggacacagccgccccaatcacattctccgaccagtgcacgggggcgcgctgggatatccctgcgactgtggcaaacatgc

SEQ ID NO: 15367 - DNA, 447 bp, Homo sapiens
  MAP TO CHR22_128.0; EXPRESSED IN FETAL LIVER, SIGNAL = 0.62; EXPRESSED IN PLACENTA, SIGNAL = 0.76; EXPRESSED IN ADULT LIVER, SIGNAL = 0.96; EXPRESSED IN BRAIN, SIGNAL = 0.56; EXPRESSED IN LUNG, SIGNAL = 0.72; NT HIT: AF003528.1, EVALUE 1.00e-62; SWISSPROT HIT: P08547, EVALUE 3.00e-41; EST_HUMAN HIT: AW875415.1, EVALUE 2.00e-28
tggaaaaaatactaaaaatcacaattcaagaaattaaagaggaagtcctagccagaggaatcaggcaagagaaagaaagaaaaggcatccacatacgaaatgaagaagtcaaactatctctctttgctgacaatatgattctatacctagaaaaccctacagactctgccaaaaggctactagaactgataaatcatttaaacaaggtttcagtacacaaaatcaatgtacaaaaatcagtggcatttctatacatcaataatgtccaggctgagagtcaaatcaagaatacaatcccacgtgcaatagccacaaagaaaataaaatacctgagaatacagctaaccaaggaggtgaaagatctctacaagaagaagcacaaaacagtgctgaaagaaactagagatgacacaaataagtggaaaaaatattctatgcttacggatt

SEQ ID NO: 15368 - DNA, 168 bp, Homo sapiens
  MAP TO AC021722.4; EXPRESSED IN ADULT LIVER, SIGNAL = 0.38; EXPRESSED IN BRAIN, SIGNAL = 0.3; NT HIT: AF143923.1, EVALUE 2.30e+00; EST_HUMAN HIT: AA010824.1, EVALUE 2.20e-01; SWISSPROT HIT: P25650, EVALUE 9.80e+00
aagttaggaaatttatacctactatcacaattaaactacagcaggaagtcattcttgatgcaagaataagaagcccacatactattcgagaatcagtggttactattttcatgaagaaaagtagatgtattataaaatacagtaggaggagaatcagactacccaaag

SEQ ID NO: 15369 - DNA, 166 bp, Homo sapiens
  MAP TO AL136379.2; EXPRESSED IN BONE MARROW, SIGNAL = 7.3; EXPRESSED IN LUNG, SIGNAL = 7.7; EXPRESSED IN ADULT LIVER, SIGNAL = 5.3; EXPRESSED IN PLACENTA, SIGNAL = 4.5; EXPRESSED IN HELA, SIGNAL = 3.5; EXPRESSED IN BRAIN, SIGNAL = 3.2; EXPRESSED IN FETAL LIVER, SIGNAL = 3.6; NT HIT: gi14745563, EVALUE 7.00e-19; SWISSPROT HIT: O15027, EVALUE 4.40e+00; EST_HUMAN HIT: BG978458.1, EVALUE 1.00e-24
ccccaagaggcagatatggaccagggcatacctctcaggagatgtgggagaggaggtggcctcagctggccgcctgtgctctttgtctttcttcttcttctctttcttgtgtttcctctttttctttttcttcttctccttcttgcttttcctgtggctctcacaa

SEQ ID NO: 15370 - DNA, 91 bp, Homo sapiens
  MAP TO AL137003.1; EXPRESSED IN BRAIN, SIGNAL = 1.9; EXPRESSED IN HELA, SIGNAL = 1.9; EXPRESSED IN FETAL LIVER, SIGNAL = 1.9; EXPRESSED IN BONE MARROW, SIGNAL = 1.8; EXPRESSED IN LUNG, SIGNAL = 2.5; EXPRESSED IN ADULT LIVER, SIGNAL = 2.6; NT HIT: AL163208.2, EVALUE 1.10e+00; EST_HUMAN HIT: BG327333.1, EVALUE 4.20e-01
agcagagctacctgcggaaaacgtcactgccaggttagtggagggtgcttagtccttcccaagagctacctgcagaaaacgtcactgacag

SEQ ID NO: 15371 - DNA, 282 bp, Homo sapiens
  MAP TO AL136231.3; EXPRESSED IN BONE MARROW, SIGNAL = 1.8; EXPRESSED IN BRAIN, SIGNAL = 2.2; EXPRESSED IN HELA, SIGNAL =   2; EXPRESSED IN LUNG, SIGNAL = 2.3; EXPRESSED IN ADULT LIVER, SIGNAL = 3.2; EXPRESSED IN PLACENTA, SIGNAL = 2.5; EST_HUMAN HIT: BI668423.1, EVALUE 0.00e+00; SWISSPROT HIT: P06494, EVALUE 1.80e+00; NT HIT: gi16180592, EVALUE 0.00e+00
cttattaaaaacatccttgctaatggcatccgtgctccacagacacatcttctctctttgtactagagcttcttctttctgtcgccactcttcttcccgttgcctcagttctgatactgctgtttgtgctttggcatgctcctgatccaaggactcagaattatgcagtgctaagctaccaagtttctgttgagcttcagcaagattccatttgcacgccacagagctcttcacaaactctttctgcttttggcaagccaattcaattccatggctatacat

SEQ ID NO: 15372 - DNA, 140 bp, Homo sapiens
  MAP TO AL133547.3; EXPRESSED IN HELA, SIGNAL = 0.86; EXPRESSED IN BRAIN, SIGNAL = 0.99; EXPRESSED IN PLACENTA, SIGNAL = 1.2; EXPRESSED IN ADULT LIVER, SIGNAL = 0.83; EXPRESSED IN FETAL LIVER, SIGNAL = 1.1; EXPRESSED IN BONE MARROW, SIGNAL =   1; NT HIT: gi14775034, EVALUE 1.20e-01; EST_HUMAN HIT: H02449.1, EVALUE 8.00e-13
aggagaagctgcaggaaaaacagaagaacagcctcaccttggaggctcttggtgcctttcccacctggcagccagagatacagggtggagaaaacagggaatcctcagagaaggtgactattctcaaacaccagcaggag

SEQ ID NO: 15373 - DNA, 163 bp, Homo sapiens
  MAP TO AC009802.13; EXPRESSED IN BRAIN, SIGNAL = 0.65; EXPRESSED IN PLACENTA, SIGNAL = 0.7; EXPRESSED IN LUNG, SIGNAL = 0.72; EXPRESSED IN ADULT LIVER, SIGNAL = 0.65; NT HIT: gi11425214, EVALUE 1.00e-82; EST_HUMAN HIT: BE148535.1, EVALUE 5.00e-39; SWISSPROT HIT: P48595, EVALUE 3.00e-24
tatttacctgttccagcccattaatgtcttctggcagtagtataagcaggctgaggtcacggcttttgtagtagagttgaaggcccactgcttttggcttttctatgtgaaaaatgtgaagctttttcttcataaacatcatttgcactggtttgcttgtagt

SEQ ID NO: 15374 - DNA, 158 bp, Homo sapiens
  MAP TO CHR21_9.0; EXPRESSED IN HELA, SIGNAL = 0.64; EXPRESSED IN BRAIN, SIGNAL = 0.32; SWISSPROT HIT: P43021, EVALUE 3.40e+00; NT HIT: AF349659.1, EVALUE 5.40e-01; EST_HUMAN HIT: BF306456.1, EVALUE 3.20e+00
ctggacaacggtcctgcataagctatgtccagcatcctgtaggtaacttttgaccacactttgtctcaggtctgtgttgtgtgcctcctccctccttactctggacttttccaggtaggatcccactgggatctgcttgatgtccatattttcacaac

SEQ ID NO: 15375 - DNA, 103 bp, Homo sapiens
  MAP TO AL133396.1; EXPRESSED IN BONE MARROW, SIGNAL = 0.85; EXPRESSED IN PLACENTA, SIGNAL = 1.2; EXPRESSED IN ADULT LIVER, SIGNAL = 1.2; EXPRESSED IN HELA, SIGNAL = 0.95; EXPRESSED IN BRAIN, SIGNAL =   1; EXPRESSED IN FETAL LIVER, SIGNAL = 0.94; EST_HUMAN HIT: BI461341.1, EVALUE 1.00e-38
cactttcaatagaaatcaacaactgttttgggaccatcactaggcaaggcactgtgttaaatgatgtagcacaaaaaaagaccatctgtgccattcaggagag

SEQ ID NO: 15376 - DNA, 134 bp, Homo sapiens
  MAP TO AL139158.1; EXPRESSED IN BRAIN, SIGNAL = 0.55; EXPRESSED IN FETAL LIVER, SIGNAL = 0.5; EXPRESSED IN BONE MARROW, SIGNAL = 0.52; EXPRESSED IN PLACENTA, SIGNAL = 0.65; SWISSPROT HIT: Q04833, EVALUE 2.00e+00; NT HIT: L05367.1, EVALUE 1.80e+00; EST_HUMAN HIT: BI023997.1, EVALUE 1.70e-01
ctagtgggggtaaccatgtggcacagcacctggcacctggcacacatgcctgtgcacaatgcccagtaaggggcagctgtgcttatcagagcctgggctccatcttccagcacattttgatgagtgcctttcat

SEQ ID NO: 15377 - DNA, 119 bp, Homo sapiens
  MAP TO AL035697.19; EXPRESSED IN BONE MARROW, SIGNAL =   1; EXPRESSED IN HELA, SIGNAL = 0.59; EXPRESSED IN BRAIN, SIGNAL = 0.96; EXPRESSED IN FETAL LIVER, SIGNAL =   1; EXPRESSED IN PLACENTA, SIGNAL = 1.1; EXPRESSED IN LUNG, SIGNAL = 1.1; EXPRESSED IN ADULT LIVER, SIGNAL =   1; SWISSPROT HIT: P36565, EVALUE 1.20e+00; NT HIT: AF135446.1, EVALUE 5.00e-16; EST_HUMAN HIT: AA608733.1, EVALUE 1.00e-14
aaacatcaccgttgtcttagaaattgccacagccacgtcaagcttcagcagccgcaaccctgatcagtcagcagccatcaacatgaaggtaagaccctctcccagcaaaaagataagga

SEQ ID NO: 15378 - DNA, 208 bp, Homo sapiens
  MAP TO AL139144.1; EXPRESSED IN FETAL LIVER, SIGNAL = 0.97; EXPRESSED IN PLACENTA, SIGNAL = 1.1; EXPRESSED IN ADULT LIVER, SIGNAL = 0.87; EXPRESSED IN HELA, SIGNAL = 0.75; EXPRESSED IN BRAIN, SIGNAL =   1; SWISSPROT HIT: Q15113, EVALUE 1.00e-08; NT HIT: AY017475.1, EVALUE 2.00e-23; EST_HUMAN HIT: AI806600.1, EVALUE 4.00e-03
ctgatgatgcctgtggtgggaccctgcggggccagagtggcatcatctccagcccccacttcccctcggagtaccataacaatgccgactgcacatggaccatcctggctgagctgggggacaccatcgccctggtgtttattgacttccagctggaggatggttacgactttctggaagtcactgggacagaaggctcctccctctg

SEQ ID NO: 15379 - DNA, 93 bp, Homo sapiens
  MAP TO AL133285.3; EXPRESSED IN BRAIN, SIGNAL = 0.36; EST_HUMAN HIT: AW854886.1, EVALUE 5.00e-10; NT HIT: AL163201.2, EVALUE 1.00e-06
gtgaacattcagataagaaaaatccagagaacgcctatgagatactatataaaatgaaaatcaccaaagcatatagtcatcatactatccaag

SEQ ID NO: 15380 - DNA, 173 bp, Homo sapiens
  MAP TO CHR21_16.0; EXPRESSED IN BRAIN, SIGNAL = 1.4; EXPRESSED IN HELA, SIGNAL = 3.3; EXPRESSED IN FETAL LIVER, SIGNAL = 1.2; EXPRESSED IN BONE MARROW, SIGNAL = 1.4; EXPRESSED IN PLACENTA, SIGNAL = 0.76; EXPRESSED IN LUNG, SIGNAL = 0.81; EXPRESSED IN ADULT LIVER, SIGNAL = 0.8; EST_HUMAN HIT: AW389482.1, EVALUE 1.00e-36; SWISSPROT HIT: P31641, EVALUE 9.00e-22; NT HIT: gi4507044, EVALUE 4.00e-51
tgggagaagatctggcacttgttctctggcatcggctctgcctccatcgtaattgtgcccttcccgaacgtccactacatcgtcatcgtggcctgggctacagactacctgttccagtccttccagaaggagctgcccagggcacactgcaaccacagctggaacacgccccc

SEQ ID NO: 15381 - DNA, 142 bp, Homo sapiens
  MAP TO CHR22_78.0; EXPRESSED IN PLACENTA, SIGNAL = 0.43; EXPRESSED IN ADULT LIVER, SIGNAL = 0.35; EXPRESSED IN HELA, SIGNAL = 0.56; EXPRESSED IN BRAIN, SIGNAL = 0.34; EST_HUMAN HIT: BG010068.1, EVALUE 2.80e+00; SWISSPROT HIT: P38092, EVALUE 6.80e-01
ctgtccattgctccgcctgcaatggtagatgattctgctgcccagcttgtcatcctggtcttgggggggctccgaggagtcctctctgagcacgagctttgggagttggaccctctccactctgtccctaagcaggaccata

SEQ ID NO: 15382 - DNA, 50 bp, Homo sapiens
  MAP TO CHR21_20.0; EXPRESSED IN HELA, SIGNAL = 2.8; EXPRESSED IN FETAL LIVER, SIGNAL =   1; EXPRESSED IN PLACENTA, SIGNAL = 0.5; EXPRESSED IN LUNG, SIGNAL = 0.66; EXPRESSED IN ADULT LIVER, SIGNAL = 0.7; EXPRESSED IN BONE MARROW, SIGNAL = 1.1; EXPRESSED IN BRAIN, SIGNAL = 1.1; EST_HUMAN HIT: BE698666.1, EVALUE 1.20e-02; NT HIT: X91889.1, EVALUE 1.30e-01
tggagtcaaaaaatgccagcaaaatgataaatgaagagaaatacaagaag

SEQ ID NO: 15383 - DNA, 162 bp, Homo sapiens
  MAP TO CHR22_191.0; EXPRESSED IN BONE MARROW, SIGNAL = 0.72; EXPRESSED IN HELA, SIGNAL = 0.56; EXPRESSED IN BRAIN, SIGNAL = 0.77; EXPRESSED IN FETAL LIVER, SIGNAL = 0.67; EXPRESSED IN PLACENTA, SIGNAL = 0.93; EXPRESSED IN LUNG, SIGNAL = 1.4; EXPRESSED IN ADULT LIVER, SIGNAL = 0.73; NT HIT: M60676.1, EVALUE 3.00e-86; EST_HUMAN HIT: AW963013.1, EVALUE 2.00e-81; SWISSPROT HIT: P04275, EVALUE 8.00e-29
gtggaccccgagccatacctggatgtctgcatttacgacacctgctcctgtgagtccattggggactgcgcctgcttctgcgacaccattgctgcctatgcccacgtgtgtgcccagcatggcaaggtggtgacctggaggacggccacattgtgccatgag

SEQ ID NO: 15384 - DNA, 112 bp, Homo sapiens
  MAP TO CHR22_85.0; EXPRESSED IN BRAIN, SIGNAL = 0.34; EXPRESSED IN HELA, SIGNAL = 5.3; EXPRESSED IN PLACENTA, SIGNAL = 0.44; NT HIT: AF142399.1, EVALUE 5.70e+00; SWISSPROT HIT: P32870, EVALUE 1.20e+00
gccacattcgcgtcgtcgtcattctcctcaccacggtggcctccaccgatgcagggcctgtgaatgtcacctccaccccagccgaacatccctgcaatggcttcatccatcc

SEQ ID NO: 15385 - DNA, 108 bp, Homo sapiens
  MAP TO CHR22_203.0; EXPRESSED IN BRAIN, SIGNAL = 1.3; EXPRESSED IN HELA, SIGNAL = 0.88; EXPRESSED IN FETAL LIVER, SIGNAL = 0.97; EXPRESSED IN PLACENTA, SIGNAL = 1.1; EXPRESSED IN BONE MARROW, SIGNAL = 1.1; EXPRESSED IN LUNG, SIGNAL =   1; SWISSPROT HIT: P28018, EVALUE 2.70e+00; NT HIT: AB051438.1, EVALUE 4.00e-47; EST_HUMAN HIT: AA287871.1, EVALUE 4.00e-54
gcatccttttcctgttccagtaaaatctttttcttgttcacagtaaaatctttcacgttttccacactcagtatgatcttagctgtagatttgtcctttatgtccttc

SEQ ID NO: 15386 - DNA, 150 bp, Homo sapiens
  MAP TO AL136231.3; EXPRESSED IN HELA, SIGNAL = 2.4; EXPRESSED IN BRAIN, SIGNAL = 2.8; EXPRESSED IN LUNG, SIGNAL = 2.2; EXPRESSED IN ADULT LIVER, SIGNAL = 2.1; EXPRESSED IN FETAL LIVER, SIGNAL = 2.2; EXPRESSED IN BONE MARROW, SIGNAL = 2.4; EXPRESSED IN HEART, SIGNAL = 2.5; SWISSPROT HIT: Q9UIJ7, EVALUE 9.00e-24; NT HIT: gi14741869, EVALUE 3.00e-79; EST_HUMAN HIT: BF513711.1, EVALUE 5.00e-79
cacagttttgggagggttgaattcaatgttatagactcggccactggcgggatgaatccagcgagcagtaaggcgttgtttaatgacctcaaagggcacattcaggttaatcactgtgtcgatctgataagctctatctagggcttctgc

SEQ ID NO: 15387 - DNA, 210 bp, Homo sapiens
  MAP TO CHR21_7.0; EXPRESSED IN BONE MARROW, SIGNAL = 1.6; EXPRESSED IN BRAIN, SIGNAL = 1.6; EXPRESSED IN HELA, SIGNAL = 3.4; EXPRESSED IN PLACENTA, SIGNAL = 0.86; EXPRESSED IN FETAL LIVER, SIGNAL = 1.3; EXPRESSED IN LUNG, SIGNAL = 0.91; EXPRESSED IN ADULT LIVER, SIGNAL = 0.92; SWISSPROT HIT: P51609, EVALUE 1.40e+00; NT HIT: AJ271370.1, EVALUE 7.50e-01
gcgtcatgcaaatgctgcagtccagcaggtctgggagagggtggatgctagactgtgagttaatgttaatgatgagcgcagtgaaaataccagccgctgccaccccctgctcacagaagcgctctgagtcagcatcagatgctttgcctcgcctctcgctgtgtatctgtatgcctgtgtgcgcgcgcgtgctcgctcgggcatccgtgt

SEQ ID NO: 15388 - DNA, 120 bp, Homo sapiens
  MAP TO CHR21_55.0; EXPRESSED IN BRAIN, SIGNAL = 0.33; EST_HUMAN HIT: W00406.1, EVALUE 1.50e-01; SWISSPROT HIT: Q04857, EVALUE 3.10e-01; NT HIT: L07951.1, EVALUE 3.90e-01
tgactggcaaggaggcccaggatccccctgctgtgattcatcccctggggctagagaagaccctcccctgggcttgcccaacactgaaacagaatggagattctattggccaggaagaag

SEQ ID NO: 15389 - DNA, 249 bp, Homo sapiens
  MAP TO AL138726.2; EXPRESSED IN BONE MARROW, SIGNAL = 0.55; EXPRESSED IN BRAIN, SIGNAL = 0.6; EXPRESSED IN PLACENTA, SIGNAL = 0.7; EXPRESSED IN FETAL LIVER, SIGNAL = 0.57; EXPRESSED IN LUNG, SIGNAL = 0.69; EXPRESSED IN ADULT LIVER, SIGNAL = 0.8; EST_HUMAN HIT: N73241.1, EVALUE 8.00e-76; SWISSPROT HIT: Q14916, EVALUE 2.00e-26; NT HIT: AF362492.1, EVALUE 0.00e+00
gagcttctttgtggaggtgttgggcaaaccatgtggatctgtgctattcaccatgactaccattgtgaggttcaggcacgcacgctgtgctgttattataacattacaacagtgcacaaggaaagacaatccatagcgaaaggaacagaaacctggaactacaaagtaaaacagaaagtcgcaattgctgacagagctgagataaaaacatactttaactataggagggacattcagaaatttggagcc

SEQ ID NO: 15390 - DNA, 219 bp, Homo sapiens
  MAP TO CHR21_66.0; EXPRESSED IN PLACENTA, SIGNAL = 0.75; EXPRESSED IN BONE MARROW, SIGNAL = 1.4; EXPRESSED IN LUNG, SIGNAL = 0.87; EXPRESSED IN ADULT LIVER, SIGNAL = 0.96; EXPRESSED IN BRAIN, SIGNAL = 1.5; EXPRESSED IN HELA, SIGNAL = 3.8; EXPRESSED IN FETAL LIVER, SIGNAL = 1.4; EST_HUMAN HIT: BF897642.1, EVALUE 1.10e+00; SWISSPROT HIT: P28799, EVALUE 7.90e-01
ctctgtgcaaaaagcctggtgttcagcgtcacgggtcccagtgacttctgtaactgggcagcagccttgtctgcagagggggagaccgaggcaggggcagcaagtaacatgctcacacagccagtcaccaaactccagggcgatggctttcccctcctcccacctcccagacaagtgtctccaaccctggccctgcttgctggttctgtggacagtttg

SEQ ID NO: 15391 - DNA, 167 bp, Homo sapiens
  MAP TO AC020588.4; EXPRESSED IN BRAIN, SIGNAL = 0.37; EXPRESSED IN FETAL LIVER, SIGNAL = 0.44; EST_HUMAN HIT: BG674453.1, EVALUE 4.00e-89; SWISSPROT HIT: P18200, EVALUE 2.60e+00
tttctactgaatgcatatgacttctccaccaccgtaaagtcaaaccctggtaaattggggaccatctgtatgttccgctttctccaagtgtctctacatgtcccttggcagggctataccatgtccatcatatacatcctacctatttctgttaaggtctatcatag

SEQ ID NO: 15392 - DNA, 118 bp, Homo sapiens
  MAP TO AL137118.3; EXPRESSED IN PLACENTA, SIGNAL = 0.61; EXPRESSED IN BRAIN, SIGNAL = 0.61; EXPRESSED IN ADULT LIVER, SIGNAL = 0.6; EXPRESSED IN FETAL LIVER, SIGNAL = 0.53; EXPRESSED IN BONE MARROW, SIGNAL = 0.5; SWISSPROT HIT: P03952, EVALUE 7.90e+00; NT HIT: X98748.1, EVALUE 9.80e-02; EST_HUMAN HIT: BG010001.1, EVALUE 2.30e+00
ctacatgggaatgggaaatgggagtgatagatggttgtcaagcagccacagttgtagggagagtataatcacagaagccagaggcattgatactgagagcatcttattccccagaaag

SEQ ID NO: 15393 - DNA, 188 bp, Homo sapiens
  MAP TO CHR21_71.0; EXPRESSED IN PLACENTA, SIGNAL = 0.86; EXPRESSED IN BRAIN, SIGNAL =   2; EXPRESSED IN LUNG, SIGNAL = 0.91; EXPRESSED IN ADULT LIVER, SIGNAL = 0.94; EXPRESSED IN HELA, SIGNAL = 5.5; EXPRESSED IN FETAL LIVER, SIGNAL = 1.3; EXPRESSED IN BONE MARROW, SIGNAL = 1.6; SWISSPROT HIT: P14172, EVALUE 4.90e-01; NT HIT: gi14780641, EVALUE 1.00e-102; EST_HUMAN HIT: AW262867.1, EVALUE 3.00e-90
gcttttgtggaaattgtcagcctctacgggcagagtccggcatcccctccccagactgcctgctgtcaaaccacggagcagctggagcctgccctgtccacggcccgtttccacccgggcatgttcgtctctcctgacttcggcagaggcccctggtggccttcagtttcagtttctcatccaggaag

SEQ ID NO: 15394 - DNA, 110 bp, Homo sapiens
  MAP TO AL136099.2; EXPRESSED IN BRAIN, SIGNAL = 0.58; EXPRESSED IN FETAL LIVER, SIGNAL = 0.49; EXPRESSED IN BONE MARROW, SIGNAL = 0.48; EXPRESSED IN PLACENTA, SIGNAL = 0.59; EXPRESSED IN ADULT LIVER, SIGNAL = 0.52; EXPRESSED IN LUNG, SIGNAL = 0.58; SWISSPROT HIT: P41512, EVALUE 3.50e+00; NT HIT: S81868.1, EVALUE 3.60e-01; EST_HUMAN HIT: BG485410.1, EVALUE 8.20e+00
agcttctccttgttcctctgcttctccccactcctgagcctctccccatttctccgcctctcccctgttccatctggcagcaccatgacatggtggaaataatgctggga

SEQ ID NO: 15395 - DNA, 163 bp, Homo sapiens
  MAP TO CHR21_73.0; EXPRESSED IN BRAIN, SIGNAL = 1.3; EXPRESSED IN HELA, SIGNAL = 3.4; EXPRESSED IN FETAL LIVER, SIGNAL = 0.99; EXPRESSED IN PLACENTA, SIGNAL = 0.59; EXPRESSED IN BONE MARROW, SIGNAL = 1.3; EXPRESSED IN LUNG, SIGNAL = 0.8; EXPRESSED IN ADULT LIVER, SIGNAL = 0.71; SWISSPROT HIT: Q9JL04, EVALUE 1.30e-01
aggttccagtacctgcgctccaggggcagggcctcccttaacctgccccccatggcccaggcacagaggttccagtacctgggctccaggcagagtgtatctagcaccccagagaccgaggcgggctgtaccgttggctgctgggagcgagagccctggctgg

SEQ ID NO: 15396 - DNA, 80 bp, Homo sapiens
  MAP TO CHR22_185_2.0; EXPRESSED IN PLACENTA, SIGNAL = 0.61; EXPRESSED IN BRAIN, SIGNAL = 0.46; EXPRESSED IN LUNG, SIGNAL = 0.59; EXPRESSED IN BONE MARROW, SIGNAL = 0.53; NT HIT: L13975.1, EVALUE 9.60e-01
catgagcagaacagccatctggtggtaactggggttttggtctatggaattggagtggatccctctttccaaggcttcag

SEQ ID NO: 15397 - DNA, 171 bp, Homo sapiens
  MAP TO AL138967.2; EXPRESSED IN HELA, SIGNAL =   3; EXPRESSED IN FETAL LIVER, SIGNAL = 2.4; EXPRESSED IN ADULT LIVER, SIGNAL = 3.7; EXPRESSED IN LUNG, SIGNAL = 2.6; EXPRESSED IN BONE MARROW, SIGNAL = 2.4; EXPRESSED IN BRAIN, SIGNAL =   3; NT HIT: X89211.1, EVALUE 2.00e-37; SWISSPROT HIT: P31822, EVALUE 1.50e+00; EST_HUMAN HIT: BF944542.1, EVALUE 9.00e-41
atagttcaggttgatcaccccagccaatactgtaactctcttcttagcctgttggcttagaggtaggaggagcccaaagtggccagtgacaatattaacttccagtttaatggaatcattgttgtttctcctggtagcagtgttcctccctctggaactaagacctctagg

SEQ ID NO: 15398 - DNA, 256 bp, Homo sapiens
  MAP TO AL050339.4; EXPRESSED IN BONE MARROW, SIGNAL = 1.5; EXPRESSED IN HELA, SIGNAL = 1.2; EXPRESSED IN BRAIN, SIGNAL = 1.4; EXPRESSED IN HEART, SIGNAL = 1.6; EXPRESSED IN FETAL LIVER, SIGNAL = 1.6; EXPRESSED IN PLACENTA, SIGNAL = 1.7; EXPRESSED IN ADULT LIVER, SIGNAL = 1.6; EXPRESSED IN LUNG, SIGNAL = 1.6; EST_HUMAN HIT: BG705297.1, EVALUE 1.40e+00; SWISSPROT HIT: Q9GZK3, EVALUE 1.00e-18
agtgcccaggatgagggtgagtggcatcaggagaagcaaagcgcctagtacattgagctccatttcattcacacgaatatcaatacaggctagtttcaaaagggctggaacttcacagaagaaatggtccaacaccctctgtccacatcttggggccaccactgtgagagtggactggacaagggagttagcaaagccactgatccaagtgccagcagccatgtggatacagcgtctatggttcatgatgactggg

SEQ ID NO: 15399 - DNA, 265 bp, Homo sapiens
  MAP TO AL138781.2; EXPRESSED IN PLACENTA, SIGNAL = 1.2; EXPRESSED IN ADULT LIVER, SIGNAL = 1.1; EXPRESSED IN FETAL LIVER, SIGNAL = 0.93; EXPRESSED IN LUNG, SIGNAL = 1.2; EXPRESSED IN BONE MARROW, SIGNAL =   1; EXPRESSED IN BRAIN, SIGNAL =   1; EXPRESSED IN HELA, SIGNAL = 0.69; EST_HUMAN HIT: BG198754.1, EVALUE 3.60e-01; NT HIT: U07224.1, EVALUE 3.80e+00; SWISSPROT HIT: P03104, EVALUE 2.10e+00
atgggcctcctgcatgggcctccagggaaggctctaagactgtggaattcagagcaattgctgtctccaaggaagcctgtaaaactctggaattcagagcaattcctcctgacagccaggtgggccaagaacctggaggactccaggggcgaactgacagctgcatttcctgctctccaaagggaagcattttgtcctcagagggatgtctctaagtgtccaccaggtgcacctgtgcccggctgcagagtagcacctgctccag

SEQ ID NO: 15400 - DNA, 373 bp, Homo sapiens
  MAP TO AL136109.1; EXPRESSED IN FETAL LIVER, SIGNAL = 0.65; EXPRESSED IN BONE MARROW, SIGNAL = 0.67; EXPRESSED IN PLACENTA, SIGNAL = 0.72; EXPRESSED IN LUNG, SIGNAL = 0.78; EXPRESSED IN ADULT LIVER, SIGNAL = 0.69; EXPRESSED IN HELA, SIGNAL = 0.78; EXPRESSED IN BRAIN, SIGNAL = 0.62; EST_HUMAN HIT: AA132883.1, EVALUE 0.00e+00; NT HIT: gi14149870, EVALUE 0.00e+00; SWISSPROT HIT: P51501, EVALUE 1.00e-01
atggatgtaagcaagataactcgttataccgaggattgctttagtgattctaattgtgtacccaataaatcaaaaatgcaagaagtagactttctagaacaaaatgaagagctacaagcagtagactcacagaaatatgcattatcaaaagtgaagcctgaatcaactgatgaagacttagaatctgtggatgccttccaacatctaatttataacccagataagtgtggagaagagagttcacctgttcatactagcacttttctttcaaataccttaaaaaagaaatgtgaagagagtgattctgagtcacctgctactttcagtaccgaagagccatcattctacccctgtacaaagtgcaatgtgaatt

SEQ ID NO: 15401 - DNA, 95 bp, Homo sapiens
  MAP TO AC022215.2; EXPRESSED IN PLACENTA, SIGNAL = 1.4; EXPRESSED IN LUNG, SIGNAL = 1.4; EXPRESSED IN ADULT LIVER, SIGNAL = 1.4; EXPRESSED IN BONE MARROW, SIGNAL = 1.2; EXPRESSED IN BRAIN, SIGNAL = 1.4; EXPRESSED IN FETAL LIVER, SIGNAL = 1.1; EST_HUMAN HIT: AA828627.1, EVALUE 3.00e-42; SWISSPROT HIT: Q9WVS8, EVALUE 8.10e+00
atgcctgtgggcacactcccttggagtctgggccagggacagaagcagctaaggagacaggataatatgagtgacacagaaatggaggggcacag

SEQ ID NO: 15402 - DNA, 193 bp, Homo sapiens
  MAP TO AL138722.2; EXPRESSED IN PLACENTA, SIGNAL = 0.47; EXPRESSED IN BRAIN, SIGNAL = 0.51; SWISSPROT HIT: P47050, EVALUE 2.90e-01; EST_HUMAN HIT: F07044.1, EVALUE 1.00e-104; NT HIT: gi8922435, EVALUE 1.00e-104
gtccttcgattctatgcaatctgggatgatacagacagcatgtatggtgaatgtcggacctacatcattcattactatcttatggatgatacggtggaaattcgagaggtccacgaacggaatgatgggagagatcctttcccactcctaatgaaccgccagcgtgtgcccaaagttttggtggaaaatgcaa

SEQ ID NO: 15403 - DNA, 117 bp, Homo sapiens
  MAP TO AC011799.5; EXPRESSED IN PLACENTA, SIGNAL = 0.49; EXPRESSED IN BRAIN, SIGNAL = 0.58; SWISSPROT HIT: P12430, EVALUE 7.90e+00; EST_HUMAN HIT: BG029245.1, EVALUE 5.70e-01; NT HIT: AL163246.2, EVALUE 6.00e+00
acagctatgcacattctggagcaacagaaaaagcagcaaaaattgtcctcatattgtgattacaaccatacgtacaaatatgcctcggggaaaaaatactcaaaagaagtgcagtaa

SEQ ID NO: 15404 - DNA, 155 bp, Homo sapiens
  MAP TO AL138996.1; EXPRESSED IN PLACENTA, SIGNAL = 1.3; EXPRESSED IN LUNG, SIGNAL = 1.5; EXPRESSED IN ADULT LIVER, SIGNAL = 1.9; EXPRESSED IN BRAIN, SIGNAL = 1.2; EXPRESSED IN FETAL LIVER, SIGNAL = 1.2; EXPRESSED IN HEART, SIGNAL = 1.2; EST_HUMAN HIT: BE551912.1, EVALUE 1.00e-79; NT HIT: gi14752820, EVALUE 4.00e-82; SWISSPROT HIT: P24723, EVALUE 7.00e-24
gatcgtctgttttttgtgatggagtttgtgaatgggggtgacttgatgttccacattcagaagtctcgtcgttttgatgaagcacgagctcgcttctatgctgcagaaatcatttcggctctcatgttcctccatgataaaggaatcatctatag

SEQ ID NO: 15405 - DNA, 266 bp, Homo sapiens
  MAP TO CHR22_129.0; EXPRESSED IN HELA, SIGNAL = 2.3; EXPRESSED IN BRAIN, SIGNAL = 1.8; EXPRESSED IN FETAL LIVER, SIGNAL = 1.6; EXPRESSED IN BONE MARROW, SIGNAL = 1.6; EXPRESSED IN HEART, SIGNAL = 2.2; EXPRESSED IN ADULT LIVER, SIGNAL = 1.9; NT HIT: gi14779091, EVALUE 1.00e-107; EST_HUMAN HIT: BG747124.1, EVALUE 1.00e-107; SWISSPROT HIT: Q09830, EVALUE 3.00e-07
ggtaggggcaccttttctaatctgcacaaagacctgggtagaaggcccttgtccctgtgccctggccaggtggccgcctgcctcctgctgttcctggaggaggaggacgccttctggatgatgtctgccatcatcgaggacctgctccccgcctcctacttcagcaccaccctgctgggtgtccagactgaccagcgggtcctgcgccacctcattgtccagtacctgcctcgcctggacaagctgctccaggagcatgacattgg

SEQ ID NO: 15406 - DNA, 321 bp, Homo sapiens
  MAP TO CHR22_114.0; EXPRESSED IN FETAL LIVER, SIGNAL = 1.3; EXPRESSED IN PLACENTA, SIGNAL = 1.7; EXPRESSED IN BONE MARROW, SIGNAL = 0.99; EXPRESSED IN BRAIN, SIGNAL = 0.93; SWISSPROT HIT: P53814, EVALUE 2.00e-13; NT HIT: gi14778290, EVALUE 0.00e+00; EST_HUMAN HIT: BI032187.1, EVALUE 0.00e+00
gtgccagagcgagaggaacaggaacagcaggcagaggtttcaaagccaacccccacccctgaaggcaccagccaggatgtgaccacagtgacactcctgctgcgagccccacctgggagcacatccagctcacctgcctcacccagcagttcacccacccctgcctctcctgagcctccattggagcctgccgaggcccagtgccttacagctgaggttccaggcagcccagagccaccccccagcccacccaagaccaccagccctgagcctcaggagtctccaacgctccccagcactgagggccaggtggtcaacaag

SEQ ID NO: 15407 - DNA, 498 bp, Homo sapiens
  MAP TO AL139253.1; EXPRESSED IN BONE MARROW, SIGNAL = 1.3; EXPRESSED IN BRAIN, SIGNAL = 1.6; EXPRESSED IN ADULT LIVER, SIGNAL = 1.7; EXPRESSED IN HELA, SIGNAL =   1; SWISSPROT HIT: P48608, EVALUE 2.70e-02; EST_HUMAN HIT: BI964027.1, EVALUE 1.00e-97
gaagtcccctcctgctgagagggttgtcaagcggggatgtggctgcacctgagcccatcatgggggagcccggccaagccagtgaggagttccagccattggcgaggccctggcgggccacactggctgcagaggagctggtttctcaccgttctcccggagagccccaggaaacgtgctctggaacggaggtggagaggccacgccagacagggcctggtctccccagggagggggccagggggcacatggacctttcatcctcagaaccaagccaggacatagaggggccgggactctccatcctgccagcgagggatgccacattctccaccccaagtgtgaggcagccagaccccagtgcctggctgagttcaggacctgaactcaccgggatgcccagggtgaggctggcagtgcccctggcagttcttcctatggaacctctgccaccagaacctgttcgcccagcagctcttctgacacccgaagcctcat

SEQ ID NO: 15408 - DNA, 191 bp, Homo sapiens
  MAP TO AL137016.5; EXPRESSED IN BONE MARROW, SIGNAL = 0.41; EXPRESSED IN PLACENTA, SIGNAL = 0.44; EXPRESSED IN BRAIN, SIGNAL = 0.46; NT HIT: AY028079.1, EVALUE 1.10e-02; SWISSPROT HIT: P11369, EVALUE 2.00e-09; EST_HUMAN HIT: AA465419.1, EVALUE 3.90e+00
tcaatatcaagaatgaaatgaaaaatgttactacagatcatgcagccatggaaaaaataataagggactactataaacaactttacactcataaatttaacgacttggaagagatgcatcaactcctccaaaaccacaaactaccagaattcagccaagatgaaatagaccatatgatattgatattagga

SEQ ID NO: 15409 - DNA, 108 bp, Homo sapiens
  MAP TO AC016687.2; EXPRESSED IN BRAIN, SIGNAL = 0.46; EST_HUMAN HIT: BF962444.1, EVALUE 9.00e-12; NT HIT: AL163301.2, EVALUE 2.00e-09; SWISSPROT HIT: P08547, EVALUE 1.10e-01
agaaatcaactcaaaataaaagacctaaatgtaacatgcaaacctatgaaactcttagaagataatgtaaaagaaaatctagatgaccttgtgtttggcaatgacttc

SEQ ID NO: 15410 - DNA, 87 bp, Homo sapiens
  MAP TO AC016729.5; EXPRESSED IN BRAIN, SIGNAL = 0.44; EXPRESSED IN PLACENTA, SIGNAL = 0.51; EXPRESSED IN FETAL LIVER, SIGNAL = 0.52; EXPRESSED IN ADULT LIVER, SIGNAL = 0.69; EXPRESSED IN BONE MARROW, SIGNAL = 0.58; EST_HUMAN HIT: BE001084.1, EVALUE 2.00e-09; NT HIT: AL163210.2, EVALUE 1.00e-09; SWISSPROT HIT: O18400, EVALUE 3.60e+00
attcaagaggtccatgttgaggttggttacatggatatattgtatgatgctgaggtgtggggtatgaatgatgccctcactcagaca

SEQ ID NO: 15411 - DNA, 123 bp, Homo sapiens
  MAP TO AC021011.2; EXPRESSED IN BONE MARROW, SIGNAL = 0.53; EXPRESSED IN BRAIN, SIGNAL = 0.46; EXPRESSED IN PLACENTA, SIGNAL = 0.44; EXPRESSED IN FETAL LIVER, SIGNAL = 0.57; NT HIT: AE001917.1, EVALUE 4.10e-01; EST_HUMAN HIT: BE266118.1, EVALUE 3.80e-02
ctcagcactcagggactgcgccagggtaccggagcggcccccgtgtctcatgttatcagttgacatgacagagagaaaactgagagttctacaaggtttaccaccaacaactggagacatgac

SEQ ID NO: 15412 - DNA, 173 bp, Homo sapiens
  MAP TO AC012580.3; EXPRESSED IN PLACENTA, SIGNAL = 0.54; EXPRESSED IN BRAIN, SIGNAL = 0.31; EXPRESSED IN FETAL LIVER, SIGNAL = 0.42; SWISSPROT HIT: P42662, EVALUE 5.70e+00; NT HIT: AF111167.2, EVALUE 6.00e-04; EST_HUMAN HIT: H82033.1, EVALUE 1.40e-02
aggttgtagaggttgggaagtgtgaggtgaaggtgccagcatactcgatgtctggtatggggctgctttctggttcatggaatggtgccttcgcaccgttccctcacacagtggaaggagcaaggaagtacactaatcccattcatgagggcagagccatcatgacccaatga

SEQ ID NO: 15413 - DNA, 91 bp, Homo sapiens
  MAP TO CHR22_10.0; EXPRESSED IN PLACENTA, SIGNAL = 1.3; EXPRESSED IN LUNG, SIGNAL = 1.3; EXPRESSED IN ADULT LIVER, SIGNAL = 1.4; EXPRESSED IN HELA, SIGNAL = 0.77; EXPRESSED IN BRAIN, SIGNAL = 0.95; NT HIT: AB009268.1, EVALUE 1.80e-02; EST_HUMAN HIT: BE063467.1, EVALUE 1.60e+00
ttactccacaaatgcattggaaggcctgccctgggccagacgctgctgcaggtgctgagacacagacgagggcagcacagacattgatttt

SEQ ID NO: 15414 - DNA, 475 bp, Homo sapiens
  MAP TO AL137067.3; EXPRESSED IN FETAL LIVER, SIGNAL = 0.72; EXPRESSED IN PLACENTA, SIGNAL = 0.72; EXPRESSED IN ADULT LIVER, SIGNAL = 1.4; EXPRESSED IN BONE MARROW, SIGNAL = 0.66; EXPRESSED IN LUNG, SIGNAL = 1.1; EXPRESSED IN BRAIN, SIGNAL = 0.77; EST_HUMAN HIT: BI520003.1, EVALUE 0.00e+00; NT HIT: gi14783139, EVALUE 0.00e+00; SWISSPROT HIT: P43636, EVALUE 5.00e-22
actgggcactgcatgtacatggcttccagagggacaatgccaaagtgctcattgcttggtgtgtaaagcacacacgtgcagctgtggaggagggagattttctgtttgtctgagaaagacctcaagaaggtcacatactggccaaggtcggactgttggaccattttcttcaattcctgataatgttccacattctccaggactctctcgtcataaccacctgccacgatcagatgaaccctctcccaatcttgggatgtcaatcttccacgcagctgtactagggcttccagtgccaaagtcagatttttcttcctttcgtatctgttgatggagagcagcaggaattttttccccttggggactaggtcatccagcttttcaggaacaactgagtcaaagctggtgacatttagagatggatagaggacatcagggtctatgtgagacagggacttgaatgtttccttaaaaa

SEQ ID NO: 15415 - DNA, 124 bp, Homo sapiens
  MAP TO CHR21_57.0; EXPRESSED IN FETAL LIVER, SIGNAL = 0.5; EXPRESSED IN HELA, SIGNAL = 1.2; EXPRESSED IN BRAIN, SIGNAL = 0.54; EST_HUMAN HIT: BF798706.1, EVALUE 1.00e-63; NT HIT: AB063285.1, EVALUE 9.00e-64; SWISSPROT HIT: P16541, EVALUE 4.60e+00
atgggcggcccaaggcgagttccggaaggaatgcctgcatcccagcgaggccgccttgggtctggggagggtggtcatgatttgtgtgctgacggtgacatctggttagggaccagttggggtc

SEQ ID NO: 15416 - DNA, 180 bp, Homo sapiens
  MAP TO AJ132411.1; EXPRESSED IN FETAL LIVER, SIGNAL = 1.7; EXPRESSED IN PLACENTA, SIGNAL = 1.5; EXPRESSED IN LUNG, SIGNAL = 1.8; EXPRESSED IN BONE MARROW, SIGNAL = 1.2; EXPRESSED IN BRAIN, SIGNAL = 1.4; EST_HUMAN HIT: BG166925.1, EVALUE 8.00e-97; NT HIT: gi14736491, EVALUE 5.00e-97; SWISSPROT HIT: Q15031, EVALUE 7.00e-28
atcaacaataaagcttgtggcaaaattcctgtgccccaacaagttgcccgggaccaggacaaagtccacgaatttgttcttcaaagcgagctgggtgtcaggcttttgcaaggacgaagcatcaagaagtccttcctttccccgagaactgccctcatcaacttcctggtgcaagattga

SEQ ID NO: 15417 - DNA, 118 bp, Homo sapiens
  MAP TO AL133378.4; EXPRESSED IN BRAIN, SIGNAL = 0.63; EXPRESSED IN ADULT LIVER, SIGNAL = 0.77; EXPRESSED IN FETAL LIVER, SIGNAL = 0.64; EXPRESSED IN PLACENTA, SIGNAL = 0.8; EXPRESSED IN LUNG, SIGNAL = 0.77; EXPRESSED IN BONE MARROW, SIGNAL = 0.66; NT HIT: gi4758701, EVALUE 3.90e-01; SWISSPROT HIT: P32547, EVALUE 4.60e+00
gatttggaaactgacactaagtctaatcacaaccaaagactggccaactggcccaataatgagacctctgtccacttctatttctccacctccggtcctaatcctactgatgtggcca

SEQ ID NO: 15418 - DNA, 113 bp, Homo sapiens
  MAP TO AL139152.1; EXPRESSED IN ADULT LIVER, SIGNAL = 0.8; EXPRESSED IN BRAIN, SIGNAL = 0.61; EXPRESSED IN PLACENTA, SIGNAL = 0.83; EST_HUMAN HIT: AL570625.1, EVALUE 4.00e-57; NT HIT: gi16159759, EVALUE 3.00e-57
ctctctggatgggcatggaacttcaccagactgctatagagctgtctctctgcttgtaaggcctcattgagccgactccgttcatctactagtccttctagcatcagcagcaa

SEQ ID NO: 15419 - DNA, 81 bp, Homo sapiens
  MAP TO AL139149.1; EXPRESSED IN BRAIN, SIGNAL = 0.7; EXPRESSED IN FETAL LIVER, SIGNAL = 0.59; EXPRESSED IN BONE MARROW, SIGNAL = 0.68; EXPRESSED IN PLACENTA, SIGNAL = 0.78; EXPRESSED IN ADULT LIVER, SIGNAL = 0.61; EXPRESSED IN LUNG, SIGNAL = 0.62; EST_HUMAN HIT: BG571230.1, EVALUE 9.00e-02; NT HIT: AF051143.1, EVALUE 9.70e-01
gtactaatttatgattggcgttctgatggagagctgtcggatggccttctttctcccctcctcttctacattgatttattg

SEQ ID NO: 15420 - DNA, 123 bp, Homo sapiens
  MAP TO AL138995.1; EXPRESSED IN BONE MARROW, SIGNAL = 2.2; EXPRESSED IN HELA, SIGNAL = 2.9; EXPRESSED IN BRAIN, SIGNAL = 2.2; EXPRESSED IN FETAL LIVER, SIGNAL = 2.4; EXPRESSED IN PLACENTA, SIGNAL = 1.5; EXPRESSED IN ADULT LIVER, SIGNAL = 1.5; SWISSPROT HIT: P40164, EVALUE 3.50e+00
atgaaggaagaggcagacttggtgatggattgcatatacatgattagcgatggggaatggaaagagctaactccaggcttctgtcctgaagttgatgaagagagactgtttctgcccacagat

SEQ ID NO: 15421 - DNA, 328 bp, Homo sapiens
  MAP TO AL138901.1; EXPRESSED IN HELA, SIGNAL =   4; EXPRESSED IN BRAIN, SIGNAL = 3.2; EXPRESSED IN PLACENTA, SIGNAL = 2.4; EXPRESSED IN FETAL LIVER, SIGNAL = 2.7; EXPRESSED IN BONE MARROW, SIGNAL = 3.2; SWISSPROT HIT: P31577, EVALUE 7.30e-01; EST_HUMAN HIT: BI755628.1, EVALUE 3.00e-45; NT HIT: gi14767134, EVALUE 2.00e-45
ctcccaggaaagcccaggccaccccgcagctccagctgcagtctgcctccctgctcagggaccctgggattggaagctggtacctccactgaggctcctgtgggatgggctcctctttctgcacagcctccttctgcagccctggggaccgagcctccacagctttcacaggctctgtcacagggaaagaggggccatcagccaggggctggcaagagaggtgaggatggaggaggaggaggatggcaaagggaagggaggcgagaggaatgggggctttacctgggctggaaccgttggcgttggcctccttgctgtcctgcttctg

SEQ ID NO: 15422 - DNA, 122 bp, Homo sapiens
  MAP TO CHR21_53.0; EXPRESSED IN HELA, SIGNAL = 0.94; EXPRESSED IN BRAIN, SIGNAL = 0.61; EXPRESSED IN BONE MARROW, SIGNAL = 0.44; NT HIT: AJ001901.1, EVALUE 4.00e-01; SWISSPROT HIT: P52911, EVALUE 6.00e+00
tactggccagccagtttgggtttctggatagtgaaactgtcctggaagtgtttgctgagcttttcttgctggagaagattcttggcaaagcctggatggaggatggagatgagaaaggtagt

SEQ ID NO: 15423 - DNA, 93 bp, Homo sapiens
  MAP TO AL137798.1; EXPRESSED IN BRAIN, SIGNAL = 1.1; EXPRESSED IN FETAL LIVER, SIGNAL = 0.99; EXPRESSED IN PLACENTA, SIGNAL = 1.1; EXPRESSED IN LUNG, SIGNAL = 0.96; EST_HUMAN HIT: AI630987.1, EVALUE 1.00e-35; NT HIT: AJ298878.1, EVALUE 4.50e+00
atggtgatggaagaagaggcaaggcaggacaggaaggctcaggtaagaaagactatgcaggtgcaggggcaggaggagaaggagcagttggag

SEQ ID NO: 15424 - DNA, 118 bp, Homo sapiens
  MAP TO AL138783.2; EXPRESSED IN PLACENTA, SIGNAL = 1.4; EXPRESSED IN FETAL LIVER, SIGNAL = 1.2; EXPRESSED IN BONE MARROW, SIGNAL =   1; EXPRESSED IN HELA, SIGNAL = 1.5; EXPRESSED IN BRAIN, SIGNAL = 1.2; SWISSPROT HIT: Q15431, EVALUE 2.00e-16; NT HIT: gi15294355, EVALUE 3.00e-60
gcttaagaatactgaattaacttcacactgcaacaagctttcactagaaaacaaagagctcacacaggaaacaagtgatatgaccctagaactcaagaatcagcaagaagatattaat

SEQ ID NO: 15425 - DNA, 109 bp, Homo sapiens
  MAP TO AL138801.1; EXPRESSED IN FETAL LIVER, SIGNAL =   1; EXPRESSED IN BONE MARROW, SIGNAL = 0.75; EXPRESSED IN BRAIN, SIGNAL = 0.92; EXPRESSED IN PLACENTA, SIGNAL = 0.91; EXPRESSED IN LUNG, SIGNAL = 0.5; EXPRESSED IN ADULT LIVER, SIGNAL = 0.63; SWISSPROT HIT: Q62685, EVALUE 4.60e+00; NT HIT: X96738.1, EVALUE 5.50e+00
gctttcgggctggtgctcagagatgaagtggggctgagatatatttgtgaagcattcaaaggctgtaaaagagacagtagcatgagaggcaaatgcagaggagaagaaa

SEQ ID NO: 15426 - DNA, 108 bp, Homo sapiens
  MAP TO AC013697.3; EXPRESSED IN BONE MARROW, SIGNAL = 0.43; EXPRESSED IN BRAIN, SIGNAL = 0.42; EXPRESSED IN PLACENTA, SIGNAL = 0.49; EXPRESSED IN ADULT LIVER, SIGNAL = 0.5; EST_HUMAN HIT: BG495810.1, EVALUE 3.30e-02
ctaattgatgttttcaccttctacttctctttccaattcttcttccactaagtcaaggttaacccctgaaatgcgcatgtggtcatgtaacctttcctgctcaaagac

SEQ ID NO: 15427 - DNA, 164 bp, Homo sapiens
  MAP TO AL135783.6; EXPRESSED IN PLACENTA, SIGNAL = 0.49; EXPRESSED IN BRAIN, SIGNAL = 0.52; EXPRESSED IN LUNG, SIGNAL = 0.48; EST_HUMAN HIT: BF107209.1, EVALUE 9.00e-07; NT HIT: AF418272.1, EVALUE 2.00e-03; SWISSPROT HIT: P56691, EVALUE 4.40e+00
agaaacaacagaaattgtcagtaagaggcaaaatgtcagacttaataaagtcttcaaagtagccattataaatatgtgcaaagaacaaaaggaaaccatgcttaaagaagtaaaggaagctatgatgacaatgtctcaccacatagagaacatccataaagatg

SEQ ID NO: 15428 - DNA, 314 bp, Homo sapiens
  MAP TO AL136113.1; EXPRESSED IN BONE MARROW, SIGNAL = 3.1; EXPRESSED IN HELA, SIGNAL = 2.1; EXPRESSED IN BRAIN, SIGNAL = 3.4; EXPRESSED IN HEART, SIGNAL =   3; EXPRESSED IN LUNG, SIGNAL = 2.7; EXPRESSED IN FETAL LIVER, SIGNAL =   3; EXPRESSED IN ADULT LIVER, SIGNAL = 2.6; EST_HUMAN HIT: AW880701.1, EVALUE 6.00e-28; NT HIT: AB058702.1, EVALUE 1.00e-15
tcagactgcgtctaatattgatttgtgttcttgcaccacctcttctatgtcttcttgctcatcatctggctctggttccattgagttatgttctgttaatttctctagtgtggtgtctattagcttttgaatttctccaggaatcatatcttgaaatccatcacccccaacctttctccccatatccacaatctctttcatgactttctcgattgactctgtcataaatcctgtgaagtcatgctcaacatctgaacacagatttttccagcaggaatgtattgttttgggcttgatggctttcatggcttttc

SEQ ID NO: 15429 - DNA, 339 bp, Homo sapiens
  MAP TO AL139022.1; EXPRESSED IN FETAL LIVER, SIGNAL = 1.1; EXPRESSED IN PLACENTA, SIGNAL = 1.1; EXPRESSED IN LUNG, SIGNAL = 1.1; EXPRESSED IN BRAIN, SIGNAL = 0.95; SWISSPROT HIT: P18283, EVALUE 2.00e-65; NT HIT: gi13650457, EVALUE 0.00e+00; EST_HUMAN HIT: BG679064.1, EVALUE 0.00e+00
gagaactgtcagaatgaggagatcctgaacagtctcaagtatgtccgtcctgggggtggataccagcccaccttcacccttgtccaaaaatgtgaggtgaatgggcagaacgagcatcctgtcttcgcctacctgaaggacaagctcccctacccttatgatgacccattttccctcatgaccgatcccaagctcatcatttggagccctgtgcgccgctcagatgtggcctggaactttgagaagttcctcatagggccggagggagagcccttccgacgctacagccgcaccttcccaaccatcaacattgagcctgacatcaagcgcctccttaaa

SEQ ID NO: 15430 - DNA, 291 bp, Homo sapiens
  MAP TO CHR21_41.0; EXPRESSED IN HELA, SIGNAL = 0.59; EXPRESSED IN BRAIN, SIGNAL = 0.34; EST_HUMAN HIT: AI884892.1, EVALUE 6.20e+00; SWISSPROT HIT: P19235, EVALUE 2.50e+00; NT HIT: AJ009608.1, EVALUE 2.70e-01
ctggaagggcaatgggccacaataggagagtctgagtctttgtggagcggatgatggaaggccaggaagtggtgcaaggaggaagggaaagcagacacttgtagcagatgccagcaaggcttccaggccagcaggggagaggctgtgtctaagtactggaggctgctattagagaggcccagtggcttaggacagtacttatcaggagctgaacaagaactttcctctttttctctctccccaacaacagctctcacactggtgggcctgcactgggggtggggaggactt

SEQ ID NO: 15431 - DNA, 104 bp, Homo sapiens
  MAP TO AL138735.2; EXPRESSED IN LUNG, SIGNAL = 0.68; EXPRESSED IN ADULT LIVER, SIGNAL = 0.71; EXPRESSED IN BONE MARROW, SIGNAL = 0.55; EXPRESSED IN BRAIN, SIGNAL = 0.73; EST_HUMAN HIT: AA493592.1, EVALUE 4.90e-01; NT HIT: AF246631.1, EVALUE 3.30e-01
atgtccttgagaggcaagtccatgggagctgcagagaaagtctgtcaggaggacctggttccaaacttgttccaaatcacagcatgccacgatgaagaaaaaca

SEQ ID NO: 15432 - DNA, 173 bp, Homo sapiens
  MAP TO AC013613.3; EXPRESSED IN PLACENTA, SIGNAL = 0.34; EXPRESSED IN ADULT LIVER, SIGNAL = 0.49; EXPRESSED IN BRAIN, SIGNAL = 0.3; EXPRESSED IN FETAL LIVER, SIGNAL = 0.38; NT HIT: U22322.1, EVALUE 2.00e-84; EST_HUMAN HIT: BG403053.1, EVALUE 3.00e-84; SWISSPROT HIT: P42685, EVALUE 5.00e-25
gttcaatggatccaaatgacttcctgagggaggcacagataatgaagaacctaagacatccaaagcttatccagctttatgctgtttgcactttagaagatccaatttatattattacagagttgatgagacatggaagtctgcaagaatatctccaaagtaagctaaagact

SEQ ID NO: 15433 - DNA, 211 bp, Homo sapiens
  MAP TO CHR22_80.0; EXPRESSED IN BRAIN, SIGNAL = 0.29; EXPRESSED IN ADULT LIVER, SIGNAL = 0.48; SWISSPROT HIT: O95967, EVALUE 3.00e-06; NT HIT: gi12738839, EVALUE 5.00e-36; EST_HUMAN HIT: AW368236.1, EVALUE 1.10e+00
gggcagggttgggatgcggggtgcagtgtaggtggccgtgcggccaggcgcgtgcctcgggggggaggtggccctggcgggcaggctgcagacctccgcagtgggttgtcccgtagaggatgtagccgcggtgacacaggcactggaagctgcccggggagttgatgcagatgtggtcacaggtccgctcgaaggagcactcgtcgatgtc

SEQ ID NO: 15434 - DNA, 132 bp, Homo sapiens
  MAP TO AL160314.1; EXPRESSED IN PLACENTA, SIGNAL = 0.54; EXPRESSED IN LUNG, SIGNAL = 0.56; EXPRESSED IN HELA, SIGNAL = 0.72; EXPRESSED IN BRAIN, SIGNAL = 0.69; EXPRESSED IN FETAL LIVER, SIGNAL = 0.62; NT HIT: gi13937343, EVALUE 1.00e-07; EST_HUMAN HIT: BF991852.1, EVALUE 1.00e-05
ggggtgtacgccaccactgtgatgcatttcctaatatccagggaagaagagaagaatattattcccaatgttgcagggggtgtatacccaccccatgatattgtgcctaatatccagaaggaaacaaaatga

SEQ ID NO: 15435 - DNA, 379 bp, Homo sapiens
  MAP TO AC021609.3; EXPRESSED IN FETAL LIVER, SIGNAL = 2.6; EXPRESSED IN BONE MARROW, SIGNAL = 2.4; EXPRESSED IN BRAIN, SIGNAL = 2.2; EXPRESSED IN HELA, SIGNAL = 1.8; EXPRESSED IN PLACENTA, SIGNAL = 3.2; EXPRESSED IN ADULT LIVER, SIGNAL = 3.2; SWISSPROT HIT: Q9UPW0, EVALUE 1.80e+00; EST_HUMAN HIT: AU132586.1, EVALUE 0.00e+00; NT HIT: gi14729757, EVALUE 0.00e+00
tttagaacttgtggttgagccgtggattgctggactctggccagccctcagaaagcattttaggtcaagcagaggacaagaggagataagtggcgcactcccggtggcatcacctgcatcctcgaggacagacctcgtgaagtcagagctgctacacattgaatctcaagtcgagcttctgagattcgatgattcaggaagaaaggattctgaggttttgaagcaaaatgcagtgaacagcaaccaatccaatgttgtaattgaagactttgagtcctcacttacccgttcggtacccccactctcacaagcctctctgaatattcctggtttacccccagaatatttacaggtacatctgcaggagtctcttggccag

SEQ ID NO: 15436 - DNA, 77 bp, Homo sapiens
  MAP TO AL160237.1; EXPRESSED IN BONE MARROW, SIGNAL = 0.51; EXPRESSED IN PLACENTA, SIGNAL = 0.54; EXPRESSED IN LUNG, SIGNAL = 0.67; EXPRESSED IN HELA, SIGNAL = 0.58; EXPRESSED IN BRAIN, SIGNAL = 0.65; EXPRESSED IN FETAL LIVER, SIGNAL = 0.46; NT HIT: M31548.1, EVALUE 5.80e-02; EST_HUMAN HIT: AA075118.1, EVALUE 1.30e+00
cctcctccaagccaccaacttccacagtcatgcgtgagaccttgccattaccaacaacagcattctccccattacct

SEQ ID NO: 15437 - DNA, 136 bp, Homo sapiens
  MAP TO AL137790.1; EXPRESSED IN BRAIN, SIGNAL = 0.44; EXPRESSED IN FETAL LIVER, SIGNAL = 0.56; EXPRESSED IN BONE MARROW, SIGNAL = 0.46; EXPRESSED IN PLACENTA, SIGNAL = 0.54; EXPRESSED IN ADULT LIVER, SIGNAL = 0.62; NT HIT: U35043.1, EVALUE 4.60e-01; SWISSPROT HIT: Q9ZLT4, EVALUE 2.00e+00; EST_HUMAN HIT: AV727034.1, EVALUE 2.70e+00
ctcaaagtggtggatgctgcctttgcacttaactttccaggaggccacacctacgtggggcattccctctgcttcctgaattctagtctgagaatcctctttgtctccattatgggctctttcatcactattcacc

SEQ ID NO: 15438 - DNA, 383 bp, Homo sapiens
  MAP TO AL137800.2; EXPRESSED IN FETAL LIVER, SIGNAL = 0.89; EXPRESSED IN BONE MARROW, SIGNAL = 0.87; EXPRESSED IN BRAIN, SIGNAL = 0.91; EXPRESSED IN PLACENTA, SIGNAL = 0.94; EXPRESSED IN LUNG, SIGNAL = 1.2; EXPRESSED IN ADULT LIVER, SIGNAL = 1.1; SWISSPROT HIT: Q92540, EVALUE 3.00e-30; EST_HUMAN HIT: AU129066.1, EVALUE 0.00e+00; NT HIT: gi7662023, EVALUE 0.00e+00
ggtttccgcccccaacatatgttatccccccgcctgtggcattttctatgggctcaggttacaccttcccagctggtgtttctgtcccaggaacctttcttcagcctacagctcactctccagcaggaaaccaggtgcaagctgggaaacagtcccacattccttacagccagcaacggccctctggaccagggccaatgaaccagggacctcaacaatcacagccaccttcccagcaaccccttacatctttaccagctcagccaacagcacagtctacaagccagctgcaggttcaagctctaactcagcaacaacaatcccctacaaaagctgtgccggctttggggaaaagcccgcctcaccactctggattccagcag

SEQ ID NO: 15439 - DNA, 108 bp, Homo sapiens
  MAP TO AC017082.3; EXPRESSED IN BRAIN, SIGNAL = 0.41; NT HIT: gi14721097, EVALUE 3.00e-54; SWISSPROT HIT: O60241, EVALUE 1.20e+00
attggtccatgctgactggcttgccatcactgcacacacagcttagcaggcgggtcctgacgccttgaccacagggtgcgttttcactcagctggcatgtgctccact

SEQ ID NO: 15440 - DNA, 183 bp, Homo sapiens
  MAP TO AL137798.1; EXPRESSED IN ADULT LIVER, SIGNAL = 1.8; EXPRESSED IN BONE MARROW, SIGNAL = 1.2; EXPRESSED IN LUNG, SIGNAL = 1.7; EXPRESSED IN BRAIN, SIGNAL = 1.2; NT HIT: gi14743839, EVALUE 9.00e-99; SWISSPROT HIT: O15297, EVALUE 4.30e+00; EST_HUMAN HIT: BG106669.1, EVALUE 1.00e-98
ctgcgctcaagctcccggcgaacccgtgcgccattctgcaccgcctcttcctgctcttcctccagccggtcccgctggcgctgcagctcctcctgggcaacctgcagcttctcccgctcctgcggcagctcctcggcctgctgctgggccacctgcaggctgtggaccaggttgctcttctcc

SEQ ID NO: 15441 - DNA, 76 bp, Homo sapiens
  MAP TO AL137840.3; EXPRESSED IN BRAIN, SIGNAL = 0.32; EXPRESSED IN ADULT LIVER, SIGNAL = 0.43; EXPRESSED IN BONE MARROW, SIGNAL = 0.41; EXPRESSED IN PLACENTA, SIGNAL = 0.42; NT HIT: AF067969.1, EVALUE 2.30e-01
ctctgtccttgtgattggaagtggagaactctgacatggagaagtggtgcccactaggaacagctttggatttgta

SEQ ID NO: 15442 - DNA, 128 bp, Homo sapiens
  MAP TO AL138784.1; EXPRESSED IN FETAL LIVER, SIGNAL = 1.3; EXPRESSED IN BONE MARROW, SIGNAL = 1.2; EXPRESSED IN BRAIN, SIGNAL =   2; EXPRESSED IN LUNG, SIGNAL = 1.6; NT HIT: gi14733785, EVALUE 4.00e-66; EST_HUMAN HIT: AA304888.1, EVALUE 3.00e-64; SWISSPROT HIT: Q09298, EVALUE 3.50e-02
acggctgcccctggctggtgatcgcagattttggctgctgcctggctgatgagagcatcggcctgcagttgcccttcagcagctggtacgtggatcggggcggaaacggctgtctgatggccccagag

SEQ ID NO: 15443 - DNA, 100 bp, Homo sapiens
  MAP TO AL133499.1; EXPRESSED IN BRAIN, SIGNAL = 0.45; EXPRESSED IN ADULT LIVER, SIGNAL = 0.55; EXPRESSED IN PLACENTA, SIGNAL = 0.46; NT HIT: AL163301.2, EVALUE 1.00e-49; EST_HUMAN HIT: BG875363.1, EVALUE 3.00e-02; SWISSPROT HIT: Q03368, EVALUE 8.00e+00
atggcgtcgtccaccactgggcctttgcacatggggacctttttcagcatcatggggcgtcggtataaaaggaggcgcaagaagcgctctgagaggaaag

SEQ ID NO: 15444 - DNA, 260 bp, Homo sapiens
  MAP TO AL133492.1; EXPRESSED IN PLACENTA, SIGNAL = 0.61; EXPRESSED IN ADULT LIVER, SIGNAL = 0.68; EXPRESSED IN BONE MARROW, SIGNAL = 0.44; EXPRESSED IN BRAIN, SIGNAL = 0.53; SWISSPROT HIT: Q15054, EVALUE 6.00e+00; NT HIT: AL163303.2, EVALUE 0.00e+00; EST_HUMAN HIT: N63913.1, EVALUE 3.50e-01
atgatcaggctggtccgagttgttttcaccacaattttcatggtagaaaaaagtgtagcaaagtatacaaaaatctttagagaaagaaatgatattctcaacagtacatttgcaacctgtaagaacttgggaaaagtgattctcacaagcattgttgaaagagctcctggagatagaaccagaggccaaaagaggaatggagaaggggggaaggtcacagagagtggcggtggcctcccagaggcacagcgcacagcgga

SEQ ID NO: 15445 - DNA, 222 bp, Homo sapiens
  MAP TO CHR22_174.0; EXPRESSED IN ADULT LIVER, SIGNAL = 0.57; EXPRESSED IN BRAIN, SIGNAL = 0.61; NT HIT: gi14778437, EVALUE 1.00e-122; EST_HUMAN HIT: BG741712.1, EVALUE 7.40e-02; SWISSPROT HIT: P31636, EVALUE 1.00e-33
ctgatttgtgcaccagtaccacaaagctgtaatgggcattccaaatataattcctggccatggaatgtccccagtcacagcatctcggaagatgtggaaggagtccgcccgaggtgtgtagcaactggcactgattgtcaagttgtccccctcgactacggatggggtggcattcacgtacttctcggtaaagctctcataacctccaacttcgttaaatgc

SEQ ID NO: 15446 - DNA, 364 bp, Homo sapiens
  MAP TO CHR22_120.0; EXPRESSED IN BRAIN, SIGNAL = 0.36; EXPRESSED IN FETAL LIVER, SIGNAL = 0.51; NT HIT: gi6678468, EVALUE 5.30e+00; SWISSPROT HIT: P05790, EVALUE 3.00e-03
caatctgatttgtgtcttccttgttgataattgacaccggacccctcgtggggatgtgtactccacccaggagggcagagacctgctccatcagcagctgcgtcctccttgcctgggacagtgcctgggcatcagcagccatgtcctccttgcctgggacagcacctgagcagagacctgctccatcagcagccatgtcctccttgcctgggacagtgcctgggcagagacccgctccatcagcagctgcgtcctccttgcctgggacagtgcctgagcagagacccgctccatcagcagccatgtcctctttgcctgggacagtgcctgggcagagacccgttccatcagcagccatgtcccc

SEQ ID NO: 15447 - DNA, 123 bp, Homo sapiens
  MAP TO CHR22_126.0; EXPRESSED IN BRAIN, SIGNAL = 0.33; EXPRESSED IN PLACENTA, SIGNAL = 0.49; EXPRESSED IN ADULT LIVER, SIGNAL = 0.48; EXPRESSED IN FETAL LIVER, SIGNAL = 0.39; NT HIT: gi9629818, EVALUE 4.10e-01; EST_HUMAN HIT: AW016787.1, EVALUE 9.40e+00; SWISSPROT HIT: P09695, EVALUE 2.70e+00
cgccaccactgaaccttcgcgagtcggcggcaatcgctggtgctgggttccgcagagcccgggctctgtcgccccctcgcggccggagccggtctgggcggcgtcggggaaatcccgaaaagc

SEQ ID NO: 15448 - DNA, 207 bp, Homo sapiens
  MAP TO CHR22_170.0; EXPRESSED IN LUNG, SIGNAL = 1.6; EXPRESSED IN ADULT LIVER, SIGNAL = 1.4; EXPRESSED IN BONE MARROW, SIGNAL = 1.6; EXPRESSED IN HELA, SIGNAL = 0.89; EXPRESSED IN BRAIN, SIGNAL = 1.4; EXPRESSED IN FETAL LIVER, SIGNAL = 1.5; EXPRESSED IN HEART, SIGNAL = 1.3; EST_HUMAN HIT: BE544640.1, EVALUE 4.30e+00; SWISSPROT HIT: P56915, EVALUE 6.40e-01
ctgttctacccgatctcctctgaccaactgaatgaatgaatgaatgaatgtgagaaggagcttggagtgaagcttgctctgagaagggcgaccaatgtagtggcaggaccaggccacccagggctagtggggacagtgggacacagggatgtggggaccaggggagcttcaggtgggtgaagatcaccactgtgaacctcagaagag

SEQ ID NO: 15449 - DNA, 140 bp, Homo sapiens
  MAP TO CHR22_185_2.0; EXPRESSED IN HELA, SIGNAL = 0.5; EXPRESSED IN LUNG, SIGNAL = 0.59; EXPRESSED IN ADULT LIVER, SIGNAL = 0.67; EXPRESSED IN BONE MARROW, SIGNAL = 0.54; EXPRESSED IN BRAIN, SIGNAL = 0.57; NT HIT: AP001510.1, EVALUE 7.40e+00; EST_HUMAN HIT: AI806418.1, EVALUE 1.80e-01; SWISSPROT HIT: P29898, EVALUE 5.90e+00
atgcccctgcccttcttaggcctccacaccctccatagattgtccttcatgaacatgctcttcttcttcctgctcaggctccggctgtccatgcttggcaagctccctaccacccacatagacataaatccccccactgg

SEQ ID NO: 15450 - DNA, 205 bp, Homo sapiens
  MAP TO CHR21_38.0; EXPRESSED IN FETAL LIVER, SIGNAL = 2.3; EXPRESSED IN BONE MARROW, SIGNAL = 3.2; EXPRESSED IN BRAIN, SIGNAL = 1.5; EXPRESSED IN LUNG, SIGNAL = 4.9; EXPRESSED IN ADULT LIVER, SIGNAL = 3.9; SWISSPROT HIT: Q9UL36, EVALUE 3.20e+00; NT HIT: Y15155.1, EVALUE 6.00e-23; EST_HUMAN HIT: AA864766.1, EVALUE 2.00e-23
ctccaaggagtccaacaagctaagatccaccggcttgagggagggaagggcgtccaccattactgaggcttgagtaggctgttttcccctcacagtgtagtagaagccactgggaagctcggactgggcagaactcaccacagtgctgcaaagccgctgtagccagacttcctctctggattcctcctctccgggaaggacattt

SEQ ID NO: 15451 - DNA, 268 bp, Homo sapiens
  MAP TO AC018876.4; EXPRESSED IN BRAIN, SIGNAL = 0.4; NT HIT: gi15319065, EVALUE 6.20e-02; EST_HUMAN HIT: BI549866.1, EVALUE 2.30e-02; SWISSPROT HIT: Q9PL93, EVALUE 6.30e+00
cttggtagtgaagctttagttggccacaggagcagaatgcagggtgctctcagatccaggaagggatgatggggaaagagatgggggatagaaccagagaggcaggtggcatgactggactttctgtctgcatgaatgatgacggcagtgtcactggtgggcttgccaaagtggacaaaatacaagacctgaactataagagttgtggcaattaggccaatagacacaccataaatgttttcaagagtgaccagggttttgctgaaac

SEQ ID NO: 15452 - DNA, 105 bp, Homo sapiens
  MAP TO AC013341.3; EXPRESSED IN ADULT LIVER, SIGNAL = 0.4; EXPRESSED IN BRAIN, SIGNAL = 0.41; NT HIT: AF184886.1, EVALUE 1.30e+00; EST_HUMAN HIT: AV735677.1, EVALUE 7.70e+00
aattgctcagctaacaaataaccagacaagcaacttactgtcttatggtgagaacatcagccttgtgcttaatttaagttatgacttcatagcaacttgccaaat

SEQ ID NO: 15453 - DNA, 170 bp, Homo sapiens
  MAP TO CHR22_162.0; EXPRESSED IN BRAIN, SIGNAL = 1.2; EXPRESSED IN BONE MARROW, SIGNAL = 6.3; EXPRESSED IN LUNG, SIGNAL =  13; SWISSPROT HIT: P39023, EVALUE 2.00e-26; NT HIT: AJ238852.1, EVALUE 5.00e-91; EST_HUMAN HIT: AV647411.1, EVALUE 3.00e-90
caattcttatagaaacgcctcttgcattcatcactgatgtgctcagcaaagacagtcttgaaggtccggaggcctcgaggggtttccacgtagcccacaatgcccacaaccaccatgggtggtgtctctacaatggtcacagcctccaccacctccttcttgttcacctc

SEQ ID NO: 15454 - DNA, 125 bp, Homo sapiens
  MAP TO CHR21_48.0; EXPRESSED IN BRAIN, SIGNAL = 0.29; EXPRESSED IN HELA, SIGNAL = 0.64; NT HIT: AL163252.2, EVALUE 2.00e-64; EST_HUMAN HIT: BE928869.1, EVALUE 6.10e-01; SWISSPROT HIT: Q12265, EVALUE 3.50e+00
gatcttttcccctgtggaagtcaagttgctaccatcagcaatagccaatcctggagtggcaggaattcttgctgtacgtggtgacctagtgaccttaaagttgctatctgactactgggaacctg

SEQ ID NO: 15455 - DNA, 195 bp, Homo sapiens
  MAP TO AC015889.3; EXPRESSED IN PLACENTA, SIGNAL = 0.51; EXPRESSED IN LUNG, SIGNAL = 0.58; EXPRESSED IN BONE MARROW, SIGNAL = 0.53; EXPRESSED IN BRAIN, SIGNAL = 0.58; EST_HUMAN HIT: BI598048.1, EVALUE 2.60e-01; SWISSPROT HIT: P55315, EVALUE 2.20e-01
tgtggaaagtagggccgctgtagaccagtgacacgcagggggttggcttggggagaaagggtaaggagagcgtgaatgccactgctggttgattggaatggctggactggagatttgcaccagaatgagggagttgtgcagatgcagagcagattttgtgcctgacatccacccagttagaagacaaagaatcat

SEQ ID NO: 15456 - DNA, 454 bp, Homo sapiens
  MAP TO AC013648.3; EXPRESSED IN BONE MARROW, SIGNAL = 0.76; EXPRESSED IN LUNG, SIGNAL = 0.84; EXPRESSED IN BRAIN, SIGNAL = 0.87; SWISSPROT HIT: P47901, EVALUE 8.00e-01; NT HIT: AY048292.1, EVALUE 4.30e-01; EST_HUMAN HIT: T81843.1, EVALUE 2.50e+00
acctcgggcatctgctcccttctgccgcttcctgagggaactctcggaaaccccgcagcaggcctcactcaggagaggccgagggaagagatgggcagtgccaccagaggcccctctgagaggcgtttcaacagcttcacctgtgctgacaaagcagccgtggtcagcaccgccgttaaggcggccatcagtggcggctggcatgcagcgtgtacacgaattaacacatcaaacagaaaaactgccaaaagcagtaaagcgaataaggatggctgggtgctcctcactcctccaatgccagtgccccatcccctctcagtgccttcgttcacctctgactcctgtgtccacagtgacgttccaaagaagagccccacagagtggacacacagaaagtcctactcacgtcgaatgtgtcatcctctgcccttccttcctaggctcaccctggcca

SEQ ID NO: 15457 - DNA, 121 bp, Homo sapiens
  MAP TO CHR22_154.0; EXPRESSED IN BONE MARROW, SIGNAL = 0.47; EXPRESSED IN HELA, SIGNAL = 0.92; EXPRESSED IN BRAIN, SIGNAL = 0.47; EXPRESSED IN FETAL LIVER, SIGNAL = 0.47; EXPRESSED IN ADULT LIVER, SIGNAL = 0.53; SWISSPROT HIT: P98056, EVALUE 6.00e+00; NT HIT: gi7662531, EVALUE 1.00e-01; EST_HUMAN HIT: AF074659.1, EVALUE 1.50e-01
aatcagggcatgatacccatttcatggatgaggaatatggagctcacagtggtttgggtgacaagttggatcatcagcagtggaagaaaggagacacatgctggaaactgaaggaggagag

SEQ ID NO: 15458 - DNA, 273 bp, Homo sapiens
  MAP TO CHR22_130.0; EXPRESSED IN LUNG, SIGNAL = 0.45; EXPRESSED IN BRAIN, SIGNAL = 0.41; EXPRESSED IN PLACENTA, SIGNAL = 0.39; SWISSPROT HIT: P81274, EVALUE 5.00e-05; NT HIT: M26061.1, EVALUE 1.60e-02; EST_HUMAN HIT: AA897360.1, EVALUE 2.40e-02
ctaaggtcttggctacatccaagtcctgctgcatatatccggtgctcttctctgtatttccaagagaccagtaagcactgctcagggcagagaaaacagaacctctcagtttgaggctgcaggtgccaatcttcagtgcggcttctaagacaaccacagaggccccatgatggccagctgtcaggagttcctgcccaaccacagacacgaccacaaagggactcttgtccagtttcattttctgaagctgctgataagtgggctcgagggagt

SEQ ID NO: 15459 - DNA, 226 bp, Homo sapiens
  MAP TO AC009472.2; EXPRESSED IN PLACENTA, SIGNAL = 0.41; EXPRESSED IN BRAIN, SIGNAL = 0.46; SWISSPROT HIT: O00469, EVALUE 5.60e+00; EST_HUMAN HIT: BF952845.1, EVALUE 1.00e-114
gtatgtgacagtagatactgtgatgtattctggagatgtaaaatgtgtaagacatgttcattacacctggggaactgaagatacaaattcaattggtgggctgcagcgtatttttgtatcagatcaagtagcagaacatagagctgaaggtcagggcaagattataaagagctttatatgccaagataacgagtctgaactccaatttgtagacaaagaaaggtag

SEQ ID NO: 15460 - DNA, 176 bp, Homo sapiens
  MAP TO AL137859.2; EXPRESSED IN BONE MARROW, SIGNAL = 0.62; EXPRESSED IN BRAIN, SIGNAL = 0.82; EXPRESSED IN LUNG, SIGNAL = 0.89; EXPRESSED IN FETAL LIVER, SIGNAL = 0.69; NT HIT: Z99115.1, EVALUE 2.40e+00; SWISSPROT HIT: O77668, EVALUE 6.60e-01; EST_HUMAN HIT: BG184942.1, EVALUE 9.10e-01
gcaagaagagagaacaacctcatcaaggaaaccctgcccttaaaatgggcaccaatctgggccttggggacattccacttagccccacctgggaagcttcagccttcctgggcttccaccccaatgccaccctgtctcaggacagacttggctactgcatttgggatggaaccact

SEQ ID NO: 15461 - DNA, 210 bp, Homo sapiens
  MAP TO AL096771.11; EXPRESSED IN BONE MARROW, SIGNAL = 0.68; EXPRESSED IN BRAIN, SIGNAL = 0.81; EXPRESSED IN FETAL LIVER, SIGNAL = 0.53; EXPRESSED IN LUNG, SIGNAL = 0.66; NT HIT: gi14757166, EVALUE 5.00e-79; SWISSPROT HIT: Q99715, EVALUE 2.00e-22; EST_HUMAN HIT: AW835049.1, EVALUE 4.00e-65
gttcatattgtagtgacctcaaaaagtgttaagatttacattgactgctatgaaattatagaaaaagacatcaaggaagctggaaatataacaactgatggttatgaaattcttggaaaactccttaaaggggaaaggaaatcagccgcagtgagtaacacatttttatttctcttggtaccttgtgttaagattgaaatggcatttttc

SEQ ID NO: 15462 - DNA, 172 bp, Homo sapiens
  MAP TO AC011950.4; EXPRESSED IN BRAIN, SIGNAL = 0.3; NT HIT: AB010203.1, EVALUE 6.00e-01; SWISSPROT HIT: P54097, EVALUE 2.00e-04; EST_HUMAN HIT: BG753756.1, EVALUE 3.00e-87
ctgtgacaaggaccctcagaccaccgtcattgagaatggccgaagccagcggggccggttttcttttgaagtgttccgatttgtgaaacacaagaatcagaaaatgtccactgtcttcttgcactgcgttaccaagctctgcagagcagatgactgccccttccttatgccg

SEQ ID NO: 15463 - DNA, 100 bp, Homo sapiens
  MAP TO AC018876.4; EXPRESSED IN BRAIN, SIGNAL = 0.41; EXPRESSED IN PLACENTA, SIGNAL = 0.32; NT HIT: D14547.1, EVALUE 2.00e-05; EST_HUMAN HIT: BG654532.1, EVALUE 1.00e-07
gttgacccttgaatgtcatgggattgaactgtgctgcaaatttcttatctccaccacgctgagaaagcaagaccaaaccctcctcttcctcctccttagc

SEQ ID NO: 15464 - DNA, 162 bp, Homo sapiens
  MAP TO AC009472.2; EXPRESSED IN BRAIN, SIGNAL = 0.42; EXPRESSED IN PLACENTA, SIGNAL = 0.44; SWISSPROT HIT: P21954, EVALUE 3.40e+00
atgagtaagaatgaaataaatgaggaggagggaacatttcaggtggtgttaaatgaggagaaaaggcttgtagttaagatagagtcagatgtccccaccagagtcagaagtggcaaaatggagaagaagatgattattccttggaattgtgtcaataggaaa

SEQ ID NO: 15465 - DNA, 196 bp, Homo sapiens
  MAP TO AL136372.1; EXPRESSED IN BONE MARROW, SIGNAL = 0.84; EXPRESSED IN BRAIN, SIGNAL = 0.79; SWISSPROT HIT: Q58042, EVALUE 7.30e+00; EST_HUMAN HIT: AW864375.1, EVALUE 3.00e-10; NT HIT: AL163283.2, EVALUE 4.00e-24
atggacagaaactggaagaatttggaggagcaggctataaaaagcctagatgctgatgagggcttagaagacaagaaggccatgaaaagtttggaactcttcagagattggataaatggttgtgaccagaatgctattagtaatatggacagtaaaagccactctaatgaggtctcagatggaactgagaaacaag

SEQ ID NO: 15466 - DNA, 72 bp, Homo sapiens
  MAP TO CHR21_18.0; EXPRESSED IN FETAL LIVER, SIGNAL = 1.9; EXPRESSED IN ADULT LIVER, SIGNAL =   2; EXPRESSED IN HELA, SIGNAL = 8.4; EXPRESSED IN BRAIN, SIGNAL = 1.9; NT HIT: gi13385573, EVALUE 1.00e-05; EST_HUMAN HIT: BF434775.1, EVALUE 2.00e-30
accctaaaagggacatagttttggatgtcagcagtacaagtagtgaagatagagatgaagagaatgaagaac

SEQ ID NO: 15467 - DNA, 96 bp, Homo sapiens
  MAP TO AC011803.4; EXPRESSED IN PLACENTA, SIGNAL = 0.47; EXPRESSED IN BONE MARROW, SIGNAL = 0.46; EXPRESSED IN BRAIN, SIGNAL = 0.37; EST_HUMAN HIT: AI732468.1, EVALUE 1.10e-01
cttccgcaacctctctttgcagaagtgttttctctctccaatccttggttttgtcatctggacaatgagcataattatattcacctggaagagctg

SEQ ID NO: 15468 - DNA, 98 bp, Homo sapiens
  MAP TO AL138843.2; EXPRESSED IN BRAIN, SIGNAL = 0.68; EXPRESSED IN ADULT LIVER, SIGNAL = 0.32; EXPRESSED IN BONE MARROW, SIGNAL = 0.75; EST_HUMAN HIT: AA669577.1, EVALUE 2.00e-12; NT HIT: AY028319.1, EVALUE 5.00e-06
ccagggctgagggctgaggcaaatggtgagatgttggtcaaagcatagaaactttcagttataagatgagtaagttctggagacctaatgtactgcat

SEQ ID NO: 15469 - DNA, 369 bp, Homo sapiens
  MAP TO CHR22_124.0; EXPRESSED IN FETAL LIVER, SIGNAL = 0.55; EXPRESSED IN BONE MARROW, SIGNAL = 0.74; EXPRESSED IN BRAIN, SIGNAL = 0.44; EXPRESSED IN ADULT LIVER, SIGNAL = 0.51; EST_HUMAN HIT: BI821626.1, EVALUE 0.00e+00; SWISSPROT HIT: P74211, EVALUE 1.70e+00; NT HIT: gi16167005, EVALUE 0.00e+00
tcccgtggagtctccatctgagccctttcctagtccaggcatcccgatgttggtggatggcccatctgagcggccagccctgtgcttcttgctgttggctgtggcaatgtctttcttcggctcagctctatccatagatgaaacacgggcgcatctgttgttgaaagaaaagatgatgcggctgggggggcggctggtgctgaataccaaggaggagctggccaatgagaggctcatgacgctcaaaatcgctgagatgaaggaggccatgaggaccctgatattcccacccagcatgcactttttccaggccaagcatctcattgagagaagtcaagtgtttaatattctaaggatgatgccaaaagg

SEQ ID NO: 15470 - DNA, 123 bp, Homo sapiens
  MAP TO AL136094.1; EXPRESSED IN BONE MARROW, SIGNAL = 2.6; EXPRESSED IN BRAIN, SIGNAL = 2.1; EST_HUMAN HIT: BE463763.1, EVALUE 1.00e-29; NT HIT: gi5922010, EVALUE 9.00e-30
ttgtgccttcaggacctgctcgagcctgatcatgtatacaccacttccatttgatgatagaatgctgctgtgcatgacccactttatggctagattggttatgataggcagctcaggttccat

SEQ ID NO: 15471 - DNA, 208 bp, Homo sapiens
  MAP TO AC018432.4; EXPRESSED IN BRAIN, SIGNAL = 0.36; EST_HUMAN HIT: BE836540.1, EVALUE 1.00e-113; SWISSPROT HIT: P29144, EVALUE 2.00e-36; NT HIT: gi14754137, EVALUE 1.00e-113
cttattgtcaaagagatcagtccatttagtagtttcccaaaatgtttctgccagagaatccaaaggactttctccttcctcctcctttccttctgcatcagtggaaatggctccgtcttgagcctgggtgtgaagaagatggtctgccagggcacaacctttcctacaaagggcatctacgagggtggatttttgtttgtccatgtca

SEQ ID NO: 15472 - DNA, 355 bp, Homo sapiens
  MAP TO CHR22_152.0; EXPRESSED IN BONE MARROW, SIGNAL = 0.52; EXPRESSED IN BRAIN, SIGNAL = 0.48; EXPRESSED IN FETAL LIVER, SIGNAL = 0.49; EST_HUMAN HIT: AI092723.1, EVALUE 0.00e+00; SWISSPROT HIT: O73775, EVALUE 4.00e-47; NT HIT: gi4503662, EVALUE 0.00e+00
ccgctgtgagcgcttgccttgccatgagaatcgggagtgctccaagctgcctctgagaataacctactaccacctctctttccccaccaacatccaagcgcccgcggtggttttccgcatgggcccctccagtgctgtccccggggacagcatgcagctggccatcaccggcggcaatgaggagggctttttcaccacccggaaggtgagcccccacagtggggtggtggccctcaccaagcctgtccccgagcccagggacttgctcctgaccgtcaagatggatctctctcgccacggcaccgtcagctcctttgtggccaagcttttcatctttgtgtctgcagagctctga

SEQ ID NO: 15473 - DNA, 194 bp, Homo sapiens
  MAP TO CHR21_59.0; EXPRESSED IN BRAIN, SIGNAL = 0.39; EXPRESSED IN HELA, SIGNAL = 0.68; SWISSPROT HIT: P48526, EVALUE 3.70e-01
gttgattgtgaccttgctccatgtgccctggattttgggaggcctggtggactatgtttgccacctgagcaaagaacccattgatgaggagctgtgggctgtgggcttgcggcagcagaacaaagagaggagcactggacacagtgggtgtgatgtccacttccaccaagaggtggtgctgtccagggaccagg

SEQ ID NO: 15474 - DNA, 127 bp, Homo sapiens
  MAP TO CHR22_136.0; EXPRESSED IN BONE MARROW, SIGNAL = 0.54; EXPRESSED IN HELA, SIGNAL = 1.4; EXPRESSED IN BRAIN, SIGNAL = 0.46; EST_HUMAN HIT: AA701216.1, EVALUE 6.20e-01; SWISSPROT HIT: Q05793, EVALUE 7.80e+00; NT HIT: gi15642775, EVALUE 4.20e-01
agggagagatggcgtggatggccgagcagctctgaccagttgaacatgtgctggcacctgctggaatgtggagctcctaaacagccgaaagggcaggaagctttctgcaacttccagcttaaacaaa

SEQ ID NO: 15475 - DNA, 133 bp, Homo sapiens
  MAP TO CHR22_88.0; EXPRESSED IN BRAIN, SIGNAL = 0.44; SWISSPROT HIT: P54858, EVALUE 1.50e+00; EST_HUMAN HIT: BF357173.1, EVALUE 1.00e-11
tctcttctggcttggcacatggtgggtctggctcatcagatgatccccttggaggatgctgcaaaactcctcagcaacctgctctgtattctttggctgaagatatcctccactcttggggctcaagtgcatt

SEQ ID NO: 15476 - DNA, 157 bp, Homo sapiens
  MAP TO AL160154.1; EXPRESSED IN BRAIN, SIGNAL = 0.41; SWISSPROT HIT: P34402, EVALUE 1.50e+00; EST_HUMAN HIT: BG025366.1, EVALUE 8.00e-01; NT HIT: gi14744626, EVALUE 5.40e-01
agtgcagtttcaatacttgttaactgggtataattcaaaccacacttgtcagcagccatgcctttatccaccttaccattttgtactccacacaggagaacactcttacaacctttggaactccagaatgaggtgtcatcaggatgaagaaaatgac

SEQ ID NO: 15477 - DNA, 245 bp, Homo sapiens
  MAP TO CHR19.1; EXPRESSED IN HELA, SIGNAL = 1.9; EXPRESSED IN BRAIN, SIGNAL = 1.8; EXPRESSED IN BONE MARROW, SIGNAL = 1.9; EXPRESSED IN HEART, SIGNAL = 2.2; EXPRESSED IN ADULT LIVER, SIGNAL = 3.4; EXPRESSED IN FETAL LIVER, SIGNAL = 1.7; EXPRESSED IN LUNG, SIGNAL = 2.2; SWISSPROT HIT: P15279, EVALUE 8.10e-01
tttattcacccccaattttcagggttctcctgcagaacagggagataagaaagccaaatctgtcttgctgctgacggagaaagatgcgagccatgcggtgggcgtcctgcgctacttggagcgagcggacgccaaggtccccgcagagctgtacgagttcaccgcaggagttctggaagccaaagaagataagaaagccggaaggcctctttgtccatatctgaaggcttttggtttttgcaagt

SEQ ID NO: 15478 - DNA, 196 bp, Homo sapiens
  MAP TO CHR7.1; EXPRESSED IN BRAIN, SIGNAL = 1.6; EXPRESSED IN PLACENTA, SIGNAL = 1.4; EXPRESSED IN FETAL LIVER, SIGNAL = 1.9; EXPRESSED IN LUNG, SIGNAL = 1.4; EXPRESSED IN HELA, SIGNAL =   2; EXPRESSED IN HEART, SIGNAL = 1.4; EXPRESSED IN BONE MARROW, SIGNAL = 1.8; EXPRESSED IN ADULT LIVER, SIGNAL = 1.9; SWISSPROT HIT: O00303, EVALUE 5.60e+00; EST_HUMAN HIT: BF217988.1, EVALUE 1.00e-74; NT HIT: gi5729900, EVALUE 4.00e-70
ttactcacaattttatatcttgagcttccttatgcataatctccagaatagacttacaagccgcagaggtgccttcaggagtagagaggatagtaatcgacttctcagcagcccccgcattttctttacggtggacatcgattctgatagtgggcgcaagcagagaggaaaacgagagcagtaagcgtgtattcac

SEQ ID NO: 15479 - DNA, 190 bp, Homo sapiens
  MAP TO AP002016.2; EXPRESSED IN FETAL LIVER, SIGNAL = 0.92; EXPRESSED IN LUNG, SIGNAL = 1.1; EXPRESSED IN BRAIN, SIGNAL = 0.86; EXPRESSED IN HEART, SIGNAL = 0.78; EXPRESSED IN BONE MARROW, SIGNAL = 0.9; NT HIT: gi16158072, EVALUE 1.00e-103; SWISSPROT HIT: Q9UFF9, EVALUE 8.00e-33
gttaaatttgaaattgaactgccaagtattgattccagaaggatactctcccttctcatttgtgaatgtaaggcccagctggataatttttaaaaggtcaacattgcaccgcagaagctgatattggtaatctatggaactacgaaattcaccaattggtcgcaccacaacacctggaaattctgtgtcc

SEQ ID NO: 15480 - DNA, 204 bp, Homo sapiens
  MAP TO CHR10.1; EXPRESSED IN PLACENTA, SIGNAL = 2.1; EXPRESSED IN HELA, SIGNAL = 2.1; EXPRESSED IN BRAIN, SIGNAL = 1.7; EXPRESSED IN LUNG, SIGNAL = 1.3; EXPRESSED IN HEART, SIGNAL = 1.7; EXPRESSED IN ADULT LIVER, SIGNAL = 4.1; NT HIT: gi14743475, EVALUE 1.00e-111; EST_HUMAN HIT: AV763046.1, EVALUE 1.00e-108; SWISSPROT HIT: Q9NQ30, EVALUE 4.20e+00
atgtactttttgaatatgtgtacaccaaaaccaaaaagttaacttttactttttcctttattggcaacttttgatgcatttttcggttttggttcccagagggcattttttacaaatcttgaagctgcacctctgtccagcttgccagcctttttcttgtctgttatttccttgactctgttcatatatactctgattctttcc

SEQ ID NO: 15481 - DNA, 180 bp, Homo sapiens
  MAP TO CHR1.1; EXPRESSED IN ADULT LIVER, SIGNAL = 0.83; EXPRESSED IN BONE MARROW, SIGNAL = 1.5; EXPRESSED IN FETAL LIVER, SIGNAL = 1.1; EXPRESSED IN LUNG, SIGNAL = 0.72; EXPRESSED IN BRAIN, SIGNAL = 1.4; EXPRESSED IN HEART, SIGNAL = 0.68; NT HIT: J04628.1, EVALUE 6.30e-01; SWISSPROT HIT: P57518, EVALUE 1.50e+00
gagaaatgttaatgtctgcataacacaccatcaataaaactccttttaaaaggttaagctggctgagtgcaatattgaattgagaatgactaggatcaaatgaaatccagtaaagatatttagcagagtaatgaagtttattctggaacaaatggcttttccttatcagaatttgctttt

SEQ ID NO: 15482 - DNA, 171 bp, Homo sapiens
  MAP TO CHR17.1; EXPRESSED IN BONE MARROW, SIGNAL = 1.3; EXPRESSED IN ADULT LIVER, SIGNAL = 0.86; EXPRESSED IN PLACENTA, SIGNAL = 1.2; EXPRESSED IN FETAL LIVER, SIGNAL = 1.2; EXPRESSED IN HELA, SIGNAL = 1.1; EXPRESSED IN BRAIN, SIGNAL = 1.1; EXPRESSED IN LUNG, SIGNAL = 0.68; EXPRESSED IN HEART, SIGNAL = 0.62; NT HIT: gi14786067, EVALUE 1.00e-82; EST_HUMAN HIT: AI572105.1, EVALUE 2.00e-82; SWISSPROT HIT: P42229, EVALUE 3.00e-24
ccctgtctttaccagccctgaccatgtactcgatcaggatggagaattcgacctggatgagaccatggatgtggccaggcacgtggaggaactcttacgccgaccaatggacagtcttgactcccgcctctcgccccctgccggtcttttcacctctgccagaggctccct

SEQ ID NO: 15483 - DNA, 144 bp, Homo sapiens
  MAP TO CHR12.1; EXPRESSED IN ADULT LIVER, SIGNAL = 1.2; EXPRESSED IN FETAL LIVER, SIGNAL = 3.1; EXPRESSED IN LUNG, SIGNAL =   3; EXPRESSED IN BONE MARROW, SIGNAL = 3.8; EXPRESSED IN PLACENTA, SIGNAL = 2.7; EXPRESSED IN BRAIN, SIGNAL = 3.7; EXPRESSED IN HELA, SIGNAL = 2.6; EXPRESSED IN HEART, SIGNAL = 2.3; SWISSPROT HIT: P42858, EVALUE 5.90e+00; NT HIT: gi4502752, EVALUE 1.00e-75; EST_HUMAN HIT: AW950323.1, EVALUE 2.00e-75
gcagaagaaactgaaccgtttaggtggctgtggcctgcaggagcccttctctgtccaacacaccaaaaggagtgagaaaaacaaatgagaaacgtcccccaaacactcacacccccaaaaccaacacctataagccacaaactg

SEQ ID NO: 15484 - DNA, 108 bp, Homo sapiens
  MAP TO CHR17.1; EXPRESSED IN ADULT LIVER, SIGNAL = 0.63; EXPRESSED IN FETAL LIVER, SIGNAL = 0.41; EXPRESSED IN HELA, SIGNAL = 0.57; EXPRESSED IN BRAIN, SIGNAL = 0.49; EXPRESSED IN HEART, SIGNAL = 0.78; EXPRESSED IN BONE MARROW, SIGNAL = 0.4; EST_HUMAN HIT: BF366857.1, EVALUE 9.00e-43; NT HIT: X62163.1, EVALUE 8.80e-02
ttttagggtagaatatcacacccccaccacactcccccctctactccaccatctccccatgataagaaaaagccaacacctttccatctaagaaaacttggcggaggt

SEQ ID NO: 15485 - DNA, 193 bp, Homo sapiens
  MAP TO CHR15.1; EXPRESSED IN BRAIN, SIGNAL = 0.61; EXPRESSED IN HEART, SIGNAL = 0.64; EXPRESSED IN BONE MARROW, SIGNAL = 0.7; EXPRESSED IN ADULT LIVER, SIGNAL = 0.78; EXPRESSED IN FETAL LIVER, SIGNAL = 0.73; SWISSPROT HIT: P14010, EVALUE 5.60e+00; NT HIT: AF111168.2, EVALUE 6.80e-01
ttcattttccttctagaaaactaatcccttccatgttttcccccttccctcaattagttggtagagaatcccatttccatcaagtgcacagaacacatttaaccattttgaaacacttaacatttaacacaaaccacatggccgtaagttttaattagttcccgctatacaaataggtccatttttagaaaaa

SEQ ID NO: 15486 - DNA, 234 bp, Homo sapiens
  MAP TO CHR22.1; EXPRESSED IN BRAIN, SIGNAL = 1.8; EXPRESSED IN PLACENTA, SIGNAL = 1.8; EXPRESSED IN LUNG, SIGNAL =   3; EXPRESSED IN FETAL LIVER, SIGNAL = 1.8; EXPRESSED IN HELA, SIGNAL = 1.9; EXPRESSED IN HEART, SIGNAL = 2.6; EXPRESSED IN BONE MARROW, SIGNAL = 2.1; EXPRESSED IN ADULT LIVER, SIGNAL = 2.6; EST_HUMAN HIT: BF345641.1, EVALUE 1.00e-129; SWISSPROT HIT: P74442, EVALUE 3.00e-07; NT HIT: AY007378.1, EVALUE 1.00e-129
gactcatgaactcaccaatcccgggatcgccgaggtcacgatccggccagatcgcaagatcctggccaccgcaggctgggaccaccgcatccgcgtgttccactggcggacgatgcagccactggccgtgctggccttccacagcgccgctgtccagtgcgtggccttcaccgccgatggcttgctggccgcgggctccaaggatcagcggatcagcctctggtcactctaccc

SEQ ID NO: 15487 - DNA, 388 bp, Homo sapiens
  MAP TO AC009789.19; EXPRESSED IN ADULT LIVER, SIGNAL = 1.1; EXPRESSED IN FETAL LIVER, SIGNAL = 1.1; EXPRESSED IN HELA, SIGNAL =   1; EXPRESSED IN BRAIN, SIGNAL = 1.1; EXPRESSED IN BONE MARROW, SIGNAL = 1.2; EXPRESSED IN HEART, SIGNAL = 0.65; NT HIT: gi4504462, EVALUE 0.00e+00; EST_HUMAN HIT: BE896180.1, EVALUE 5.00e-26; SWISSPROT HIT: P14653, EVALUE 2.00e-59
ggagaaagaggtgagagaattgacctggcctttctccctgccccgcccctagcgaaggtgtcagagccaggcctgggctcgcccagtggcctccgcaccaacttcaccacaaggcagctgacagaactggaaaaggagttccatttcaacaagtacctgagccgggcccggagggtggagattgccgccaccctggagctcaatgaaacacaggtcaagatttggttccagaaccgacgaatgaagcagaagaagcgcgagcgagagggaggtcgggtccccccagccccaccaggctgccccaaggaggcagctggagatgcctcagaccagtcgacatgcacctccccggaagcctcacccagctctgtcacctcctgaactgaac

SEQ ID NO: 15488 - DNA, 252 bp, Homo sapiens
  MAP TO CHR17.1; EXPRESSED IN ADULT LIVER, SIGNAL = 4.1; EXPRESSED IN FETAL LIVER, SIGNAL = 6.6; EXPRESSED IN BONE MARROW, SIGNAL = 7.7; EXPRESSED IN PLACENTA, SIGNAL =   5; EXPRESSED IN LUNG, SIGNAL = 2.9; EXPRESSED IN BRAIN, SIGNAL =   7; EXPRESSED IN HELA, SIGNAL = 4.5; EXPRESSED IN HEART, SIGNAL =   3; EST_HUMAN HIT: AW881124.1, EVALUE 5.30e+00; SWISSPROT HIT: P55535, EVALUE 5.50e+00
tgaaatgaagattaaaaacaaaactgaaaatgccctggagcagttctgccaactcctggtttttccattcggttcctctgatagccactggtttggggagacttccttttcctgctccagcctgtgggcctgtgcacaatagccgctggcacatagcccatcagataacaaggctggctctctgcaggcacagtgtggattggaaaaagtgaaagtttctggctggaaataaaagctcagaaaacctttgct

SEQ ID NO: 15489 - DNA, 223 bp, Homo sapiens
  MAP TO CHR19.1; EXPRESSED IN BONE MARROW, SIGNAL = 3.3; EXPRESSED IN ADULT LIVER, SIGNAL = 2.2; EXPRESSED IN LUNG, SIGNAL = 2.6; EXPRESSED IN FETAL LIVER, SIGNAL = 2.2; EXPRESSED IN HELA, SIGNAL = 2.6; EXPRESSED IN BRAIN, SIGNAL =   3; EXPRESSED IN HEART, SIGNAL =   3; EST_HUMAN HIT: D29588.1, EVALUE 7.50e-02; SWISSPROT HIT: Q09456, EVALUE 4.80e-01
ctttcccaagctcagcaaaatattcacacacacactccaccctgcccccagccctctgtgagctcccactgcacaatgagcccttgtctcggggctccctctgagcagctgtggcaccggggcatgagacagcccagacaggctggcacagagcgggcgacagcgtcagggcagacctcccccctctgggttgccaggcactgcctctgagcataaaggtgag

SEQ ID NO: 15490 - DNA, 160 bp, Homo sapiens
  MAP TO CHR5.1; EXPRESSED IN HEART, SIGNAL = 0.77; EXPRESSED IN BONE MARROW, SIGNAL = 0.5; EXPRESSED IN FETAL LIVER, SIGNAL = 0.44; EXPRESSED IN BRAIN, SIGNAL = 0.48; EXPRESSED IN LUNG, SIGNAL = 0.65; NT HIT: Z97338.2, EVALUE 2.20e+00; EST_HUMAN HIT: BE970832.1, EVALUE 3.20e+00
cttctagactggcacaacaagcaaatccttgaagcagtttccctggagagaagtcatctgtctccttcttttgagctttaaaattatatatctttcatgacactcatcatattctacattgtcatatagatatttgtgtcatgtgacatcttttcttctt

SEQ ID NO: 15491 - DNA, 183 bp, Homo sapiens
  MAP TO CHR14.1; EXPRESSED IN HELA, SIGNAL = 2.6; EXPRESSED IN BRAIN, SIGNAL =   2; EXPRESSED IN HEART, SIGNAL = 1.1; EXPRESSED IN ADULT LIVER, SIGNAL = 1.8; EXPRESSED IN BONE MARROW, SIGNAL = 1.7; EXPRESSED IN FETAL LIVER, SIGNAL = 1.6; EST_HUMAN HIT: BG469938.1, EVALUE 2.40e-01; SWISSPROT HIT: P22736, EVALUE 1.50e+00
gccccctcctgggtcaggccaggacgacacatctgtcctaacacgaggcacaggctgcctcccagagccctgcagcttccccagcccgcaggggccttttgtgaggaagcagctcagccagccctgacaggctcagttcctctgcccgcagcctgaatattccatgggcttgaataatgcagg

SEQ ID NO: 15492 - DNA, 414 bp, Homo sapiens
  MAP TO CHR4.1; EXPRESSED IN FETAL LIVER, SIGNAL = 0.92; EXPRESSED IN HELA, SIGNAL = 0.92; EXPRESSED IN LUNG, SIGNAL = 0.72; EXPRESSED IN BRAIN, SIGNAL = 1.2; EXPRESSED IN BONE MARROW, SIGNAL = 1.3; SWISSPROT HIT: P25059, EVALUE 4.00e-05; NT HIT: gi14861872, EVALUE 1.00e-121; EST_HUMAN HIT: BF983020.1, EVALUE 1.00e-114
tggctatgggagaaacagtaccatatatcggccactgattcagagcatacacagccttctggagcactttgccccagccctgcaaagtattgtcacctagttaccattgtaattgtgacttcaaaagggcattccagcgttctgtcaatccagctgcttcagggtgttaaggaacatgataagaccagtaaattccatgaacgtgagcccattgccgcacttctttacccataagtgagtgccttggtcaaaggcaatgctgtgtgaaatactatgacagtggataaggcattctgtgagtccatggatggtagtcttggcagaagaattgtgtgcaggataggcaaacacatatccagagtaagtgtctattccagtaaggacaaacctctgccctttccatgatggaaaatg

SEQ ID NO: 15493 - DNA, 290 bp, Homo sapiens
  MAP TO CHR6.1; EXPRESSED IN BRAIN, SIGNAL =   4; EXPRESSED IN HEART, SIGNAL =  10; EXPRESSED IN LUNG, SIGNAL = 1.1e+02; EST_HUMAN HIT: AI114563.1, EVALUE 0.00e+00; SWISSPROT HIT: P30482, EVALUE 7.00e-54; NT HIT: AJ309937.1, EVALUE 0.00e+00
ccctccttaccccatctcagggtgaggggcttcggcagcccctcatgctgtacatggcatgtgtatctctgctcttctccagaaggcaccaccacagctgcccacttctggaaggttctatctcctgctggtctggtctccacaagctcggtgtcctgagtttggtcctcgccatcccgctgccaggtcagtgtgatctccgcagggtagaagcccagggcccagcacctcagggtgacctcatggtcagagatggggtggtgggtcacatgtgtctttggggggtctga

SEQ ID NO: 15494 - DNA, 178 bp, Homo sapiens
  MAP TO CHR7.1; EXPRESSED IN FETAL LIVER, SIGNAL = 0.49; EXPRESSED IN BRAIN, SIGNAL = 0.46; EXPRESSED IN LUNG, SIGNAL = 0.63; EXPRESSED IN HEART, SIGNAL = 0.72; EXPRESSED IN BONE MARROW, SIGNAL = 0.41; SWISSPROT HIT: Q00918, EVALUE 1.90e+00; NT HIT: gi14746296, EVALUE 2.00e-19
ttatttctcatgcagtggccaccattcttacagggagggtgacagaaagctaaaagaacacatggcagcaatctgtgaatattacacatcccattactacatatgatacattgcatcatgtgcttgtcatcaatgaggacataaggcagagaaatgtgctattaaaataaaagatcac

SEQ ID NO: 15495 - DNA, 187 bp, Homo sapiens
  MAP TO CHR7.1; EXPRESSED IN HELA, SIGNAL = 0.59; EXPRESSED IN BRAIN, SIGNAL = 1.1; EXPRESSED IN BONE MARROW, SIGNAL = 1.1; EXPRESSED IN FETAL LIVER, SIGNAL = 1.2; SWISSPROT HIT: Q03149, EVALUE 8.50e-01; NT HIT: AJ293313.1, EVALUE 1.70e-01
ccttggcagactgggtgaataagaaaaagaggtttcccaggcacagtcctttaatacaaagttaatctcatcctagattccaaggccccctgcaaagaacccatctcttctaggattaacaagaaaagaattattattcaataagaaagtgtcctactgtttgggactgctgactcctgtcactttg

SEQ ID NO: 15496 - DNA, 138 bp, Homo sapiens
  MAP TO CHR12.1; EXPRESSED IN PLACENTA, SIGNAL = 6.8; EXPRESSED IN FETAL LIVER, SIGNAL = 7.5; EXPRESSED IN LUNG, SIGNAL = 6.1; EXPRESSED IN BRAIN, SIGNAL = 8.9; EXPRESSED IN HELA, SIGNAL = 5.1; EXPRESSED IN HEART, SIGNAL = 5.3; EXPRESSED IN BONE MARROW, SIGNAL =  11; EXPRESSED IN ADULT LIVER, SIGNAL =   8; EST_HUMAN HIT: BE280632.1, EVALUE 4.00e-70; SWISSPROT HIT: Q9Y6Q5, EVALUE 4.00e-20; NT HIT: AF020797.2, EVALUE 3.00e-70
actcctgcaggatcttgctgtcggtggtctgcgggaagccaaagtccatgagctcgtccagcaactcgtagacgatgacaaagttgtcccggatgctctcctcctccagctccttgaagtattcgcagaatacctggg

SEQ ID NO: 15497 - DNA, 274 bp, Homo sapiens
  MAP TO CHR12.1; EXPRESSED IN FETAL LIVER, SIGNAL = 0.68; EXPRESSED IN LUNG, SIGNAL = 0.76; EXPRESSED IN HELA, SIGNAL = 0.75; EXPRESSED IN BRAIN, SIGNAL = 0.85; EXPRESSED IN HEART, SIGNAL = 0.72; EXPRESSED IN ADULT LIVER, SIGNAL = 0.65; EXPRESSED IN BONE MARROW, SIGNAL = 0.97; EST_HUMAN HIT: BF892961.1, EVALUE 1.00e-84; SWISSPROT HIT: P51805, EVALUE 3.00e-10; NT HIT: gi14763485, EVALUE 1.00e-111
gctctctttttcaacaggtgtctgtttgcctccttcctaaccattgcactgcaaaccaagctggtctacctgaccagcatcctagaggtgctgaccagggacttgatggaacagtgtagtaacatgcagccgaaactcatgctgagacgcacggagtccgtcgtcgaaaaactcctcacaaactggatgtccgtctgcctttctggatttctccgggtaagtgtcacatccctcagcaatgtcagaggtaagacaataggcagttatttttagc

SEQ ID NO: 15498 - DNA, 143 bp, Homo sapiens
  MAP TO CHR19.1; EXPRESSED IN PLACENTA, SIGNAL =   4; EXPRESSED IN FETAL LIVER, SIGNAL = 3.5; EXPRESSED IN BRAIN, SIGNAL = 3.9; EXPRESSED IN HEART, SIGNAL = 3.6; EXPRESSED IN BONE MARROW, SIGNAL = 4.5; EXPRESSED IN ADULT LIVER, SIGNAL = 3.7; EXPRESSED IN LUNG, SIGNAL = 3.5; EXPRESSED IN HELA, SIGNAL = 4.4; NT HIT: AF133298.1, EVALUE 3.00e-39; EST_HUMAN HIT: BG741060.1, EVALUE 2.00e-41; SWISSPROT HIT: P51871, EVALUE 9.00e-16
cccttctctggccaggccaaatggcaacgcctggccttggagggcagtgtccgtctggaaatgtttgagcacatcagcctcatgaccttggacagtctgcagaaatgcatcttcagctttgacagcaattgtcaggagtgagt

SEQ ID NO: 15499 - DNA, 447 bp, Homo sapiens
  MAP TO CHR19.1; EXPRESSED IN LUNG, SIGNAL = 0.57; EXPRESSED IN BRAIN, SIGNAL = 0.63; EXPRESSED IN ADULT LIVER, SIGNAL =   1; EXPRESSED IN HEART, SIGNAL = 0.67; NT HIT: gi14786929, EVALUE 0.00e+00; EST_HUMAN HIT: AL548959.1, EVALUE 0.00e+00; SWISSPROT HIT: P37198, EVALUE 3.00e-35
ccatgagcgggtttaattttggaggcactggggcccctacaggcgggttcacgtttggcactgcaaagacggcaacaaccacacctgctacagggttttctttctccacctctggcactggagggtttaattttggggctcccttccaaccagccacaagtaccccttccaccggcctgttctcacttgccacccagactccggccacacagacgacaggcttcacttttggaacagcgactcttgcttcggggggaactggattttctttggggatcggtgcttcaaagctcaacttgagcaacacagctgccaccccagccatggcaaaccccagcggctttgggctgggcagcagcaacctcactaatgccatatcgagcaccgtcacctccagccagggcacagcacccaccggctttgtgtttggcccctccaccacctctg

SEQ ID NO: 15500 - DNA, 167 bp, Homo sapiens
  MAP TO CHR17.1; EXPRESSED IN BONE MARROW, SIGNAL = 0.95; EXPRESSED IN HEART, SIGNAL =   1; EXPRESSED IN ADULT LIVER, SIGNAL = 0.79; EXPRESSED IN FETAL LIVER, SIGNAL = 0.8; EXPRESSED IN LUNG, SIGNAL = 1.2; EXPRESSED IN BRAIN, SIGNAL = 0.94; SWISSPROT HIT: O75616, EVALUE 2.00e-25; NT HIT: AF082658.1, EVALUE 1.00e-85; EST_HUMAN HIT: BI833316.1, EVALUE 2.00e-85
ctttacctctgttcatggacaccgcggggacgcaaggagtcaccgaactgtcgggctgagagaatccgaggaagtggtccagggcagagccctggccattactgcgagaagccgaggccaagcggggaccagagaaagcggaccccgcgacgcaggacacgcacctc

SEQ ID NO: 15501 - DNA, 207 bp, Homo sapiens
  MAP TO CHR7.1; EXPRESSED IN ADULT LIVER, SIGNAL = 1.6; EXPRESSED IN FETAL LIVER, SIGNAL =   1; EXPRESSED IN LUNG, SIGNAL = 1.4; EXPRESSED IN HELA, SIGNAL = 0.61; EXPRESSED IN BRAIN, SIGNAL = 0.62; EXPRESSED IN HEART, SIGNAL = 1.2; EXPRESSED IN BONE MARROW, SIGNAL = 0.56; SWISSPROT HIT: Q15166, EVALUE 1.00e-34; NT HIT: L48516.1, EVALUE 1.00e-112; EST_HUMAN HIT: BF059348.1, EVALUE 1.00e-112
tacttctggtctgctgagactgtgatcccattggcactacaaaatcctttggccaccactttaacctcccttgggctgtagaaaagaacataagtccagcgaagatccaagatcatctcaaaaaatgacaggagggagttggtaaaatagtggtctctggtggcatagaactgttctggtccaagaaccacaatgtcattcacacta

SEQ ID NO: 15502 - DNA, 173 bp, Homo sapiens
  MAP TO CHR19.1; EXPRESSED IN ADULT LIVER, SIGNAL = 3.1; EXPRESSED IN PLACENTA, SIGNAL = 3.6; EXPRESSED IN FETAL LIVER, SIGNAL = 2.3; EXPRESSED IN HELA, SIGNAL = 3.7; EXPRESSED IN BRAIN, SIGNAL = 2.6; EXPRESSED IN BONE MARROW, SIGNAL = 2.5; EXPRESSED IN HEART, SIGNAL = 1.2; EST_HUMAN HIT: BF035805.1, EVALUE 8.90e-01; SWISSPROT HIT: P35458, EVALUE 2.20e-01; NT HIT: AJ271003.1, EVALUE 1.50e-01
agcctccttcctggcccttgcaagggcctccagcctggcagccggagggattaaggacaagaggcccctggcgtccgtgagtctggcgtggctgcccaggagcctcccaggggagtcagcgtgggccagagggctggaggctcccagatcaatcagaggtctgaaggtcactg

SEQ ID NO: 15503 - DNA, 204 bp, Homo sapiens
  MAP TO CHR18.1; EXPRESSED IN FETAL LIVER, SIGNAL = 8.9; EXPRESSED IN LUNG, SIGNAL = 4.1; EXPRESSED IN HELA, SIGNAL =  10; EXPRESSED IN BRAIN, SIGNAL = 7.2; EXPRESSED IN BONE MARROW, SIGNAL = 7.3; EXPRESSED IN HEART, SIGNAL = 4.7; EXPRESSED IN PLACENTA, SIGNAL = 9.5; EST_HUMAN HIT: AI806559.1, EVALUE 2.70e-01; SWISSPROT HIT: P52539, EVALUE 5.60e-02
tcagacgcccgtccaaacagtctctctctggtctccaagagttcccgtgcataccacatgcatattctatttatatgtttctttgtcctgaacaagatttggccccattgtgtgggagcaacaccagaaaagaaaaacaaaatccatccaccgagagaaaatggagattgtgagagcttggagaaatttacatactttgctcat

SEQ ID NO: 15504 - DNA, 169 bp, Homo sapiens
  MAP TO CHR19.1; EXPRESSED IN HEART, SIGNAL = 3.3; EXPRESSED IN BONE MARROW, SIGNAL = 4.4; EXPRESSED IN PLACENTA, SIGNAL = 6.6; EXPRESSED IN FETAL LIVER, SIGNAL = 5.3; EXPRESSED IN HELA, SIGNAL = 6.6; EXPRESSED IN BRAIN, SIGNAL =   6; EXPRESSED IN LUNG, SIGNAL = 3.2; NT HIT: gi14766891, EVALUE 7.00e-84; EST_HUMAN HIT: BI256244.1, EVALUE 6.00e-85; SWISSPROT HIT: Q25158, EVALUE 1.90e+00
gaaggatacatggagaaggtcaccgtgagcaggcaccagaacacagcaatgttagtctccttggctggtcccagcatgtagtagtaggcctctgtgaagaggtacacgccgcccgagtacacagcaaagtccacaaaccactggtactccaggaagaagcgcaggactg

SEQ ID NO: 15505 - DNA, 166 bp, Homo sapiens
  MAP TO CHR5.1; EXPRESSED IN FETAL LIVER, SIGNAL = 0.36; EXPRESSED IN HELA, SIGNAL = 0.4; EXPRESSED IN BRAIN, SIGNAL = 0.46; SWISSPROT HIT: P09853, EVALUE 5.00e-03; NT HIT: M81635.1, EVALUE 3.70e-02; EST_HUMAN HIT: BG399782.1, EVALUE 5.40e-02
gacaaaaccaggcgatgtcatcagggccaccagcggaaatacaaccgaggtcatgggcagattaaatctgacacttgtgatgccatggaaagggtggcggaggagcttgtcacagtgactgaggcccaggttcttgcctgtggcgggtaccccagaaaattccact

SEQ ID NO: 15506 - DNA, 189 bp, Homo sapiens
  MAP TO CHR9.1; EXPRESSED IN FETAL LIVER, SIGNAL =   5; EXPRESSED IN LUNG, SIGNAL = 3.5; EXPRESSED IN HELA, SIGNAL = 7.7; EXPRESSED IN BRAIN, SIGNAL = 4.1; EXPRESSED IN HEART, SIGNAL = 3.1; EXPRESSED IN ADULT LIVER, SIGNAL = 4.1; EXPRESSED IN BONE MARROW, SIGNAL = 5.1; EXPRESSED IN PLACENTA, SIGNAL =   6; EST_HUMAN HIT: BG179450.1, EVALUE 1.00e-101; SWISSPROT HIT: O22212, EVALUE 8.00e-12; NT HIT: gi12734815, EVALUE 1.00e-101
gccatccacagcttgaaggtcctgtcatatgagcaagtggctatgagctgcccatcggaagaaatatctaggcccatcactttgccttcgtggccagccagagtcttcagcggggaccagcctgggtgcgtccagatcttggctgtgttatcataggcaccagtaagcaagaagttcccatggatagct

SEQ ID NO: 15507 - DNA, 212 bp, Homo sapiens
  MAP TO AC007873.4; EXPRESSED IN BRAIN, SIGNAL = 0.41; EXPRESSED IN HEART, SIGNAL = 0.56; EXPRESSED IN FETAL LIVER, SIGNAL = 0.54; EST_HUMAN HIT: AU125631.1, EVALUE 1.00e-105; SWISSPROT HIT: P27694, EVALUE 2.00e-33; NT HIT: gi4506582, EVALUE 1.00e-106
  unsure 211
acctacaagtgagtctttcgacttgttctcgaggtcatcaatccccgtgaaatcaaactgaaccgtaggtaaatgatggtcgtcctcacagggcatgacggaagtctcgttattgaaggtcatctcgtagtcatttttaacagctgtgaactgcttgttagcaatcttcagggtgcctttcgagaaataatacacctgcgaaggaggccana

SEQ ID NO: 15508 - DNA, 155 bp, Homo sapiens
  MAP TO CHR7.1; EXPRESSED IN FETAL LIVER, SIGNAL = 2.8; EXPRESSED IN LUNG, SIGNAL = 1.1; EXPRESSED IN HELA, SIGNAL = 1.8; EXPRESSED IN BRAIN, SIGNAL = 2.7; EXPRESSED IN BONE MARROW, SIGNAL =   3; EXPRESSED IN HEART, SIGNAL =   1; EXPRESSED IN ADULT LIVER, SIGNAL = 1.6; EST_HUMAN HIT: BF085476.1, EVALUE 2.00e-01; SWISSPROT HIT: Q09228, EVALUE 4.40e+00; NT HIT: M27470.1, EVALUE 5.30e-01
tcatttgtccacaccctgttgatatttctttggttccaatgggatcctggaggaggtacacacagtgaaagaggaaatgagactctagccctaagagtgccaatcataactgcactgtccataaagatgtttgcatttgcctttcaggaatgttt

SEQ ID NO: 15509 - DNA, 360 bp, Homo sapiens
  MAP TO CHR4.1; EXPRESSED IN ADULT LIVER, SIGNAL = 0.5; EXPRESSED IN FETAL LIVER, SIGNAL = 0.92; EXPRESSED IN LUNG, SIGNAL = 4.6; EXPRESSED IN HELA, SIGNAL = 0.74; EXPRESSED IN BRAIN, SIGNAL =   1; EXPRESSED IN HEART, SIGNAL = 2.2; EXPRESSED IN BONE MARROW, SIGNAL = 1.2; EST_HUMAN HIT: BI223440.1, EVALUE 1.00e-105; SWISSPROT HIT: P32969, EVALUE 8.00e-44; NT HIT: gi16171180, EVALUE 5.00e-99
atctgtagtcatgcacagaagatgatcaagggcgttatactgggcttctgtgacaagatgaggtctctgtgttctcacttccccatcaatgtcattatgcaggagaatagctctattgtagaagtcagaactttcttgagcgaaaaatatatctgcagggttcgggtgagcccaggtgttgcttgttcaatatcccaagcccagaaagatgagttcatccttaaaggaaatgacattgaacttgtttcaaattcagctgctttgactcagcaaaccacaacagctaaaaaccaggatatcagaacattttggatggtatctatgtctctgaaaaagggacagttcagcaggctgatgagt

SEQ ID NO: 15510 - DNA, 378 bp, Homo sapiens
  MAP TO CHR17.1; EXPRESSED IN ADULT LIVER, SIGNAL = 1.5; EXPRESSED IN FETAL LIVER, SIGNAL = 2.3; EXPRESSED IN LUNG, SIGNAL = 1.9; EXPRESSED IN BONE MARROW, SIGNAL = 2.1; EXPRESSED IN PLACENTA, SIGNAL = 1.7; EXPRESSED IN BRAIN, SIGNAL = 2.3; EXPRESSED IN HELA, SIGNAL = 2.5; EXPRESSED IN HEART, SIGNAL = 2.1; EST_HUMAN HIT: AW771930.1, EVALUE 2.00e-53; SWISSPROT HIT: P35499, EVALUE 2.00e-59; NT HIT: L04225.1, EVALUE 0.00e+00
cttggcagctgcgggtcttcaagctggccaagtcgtggccaacgctgaacatgctcatcaagatcattggcaattcagtgggggcgctgggtaacctgacgctggtgctggctatcatcgtgttcatcttcgccgtggtgggcatgcagctgtttggcaagagctacaaggagtgcgtgtgcaagattgccttggactgcaacctgccgcgctggcacatgcatgatttcttccactccttcctcatcgtcttccgcatcctgtgcggggagtggatcgagaccatgtgggactgcatggaggtggccggccaagccatgtgcctcaccgtcttcctcatggtcatggtcatcggcaatcttgtggtgagtgaggctg

SEQ ID NO: 15511 - DNA, 262 bp, Homo sapiens
  MAP TO CHRX.1; EXPRESSED IN HELA, SIGNAL =   1; EXPRESSED IN BRAIN, SIGNAL = 0.84; EXPRESSED IN FETAL LIVER, SIGNAL = 0.67; EXPRESSED IN LUNG, SIGNAL = 0.94; EXPRESSED IN PLACENTA, SIGNAL = 1.3; NT HIT: L44140.1, EVALUE 0.00e+00; EST_HUMAN HIT: BG911281.1, EVALUE 1.00e-127; SWISSPROT HIT: P51805, EVALUE 3.00e-40
cctgctccccacagacgccacccaacgtggagaaggccctgcgcctcttcgggcagctgctgcacagccgcgcgttcgtgcttaccttcatccacacgctggaggcccagagcagcttctccatgcgcgaccgcggcaccgtggcctcgctcaccatggtggccctgcagagccggctcgactatgccacggggctgctcaagcaactgctggccgacctcatcgagaagaacctcgagagcaagaaccaccccaagctgct

SEQ ID NO: 15512 - DNA, 182 bp, Homo sapiens
  MAP TO CHR2.1; EXPRESSED IN HELA, SIGNAL = 2.8; EXPRESSED IN BRAIN, SIGNAL = 2.6; EXPRESSED IN HEART, SIGNAL = 1.8; EXPRESSED IN ADULT LIVER, SIGNAL = 2.3; EXPRESSED IN BONE MARROW, SIGNAL = 2.7; EXPRESSED IN LUNG, SIGNAL = 1.9; EXPRESSED IN PLACENTA, SIGNAL = 2.1; EXPRESSED IN FETAL LIVER, SIGNAL = 2.7; SWISSPROT HIT: O22469, EVALUE 4.30e+00; NT HIT: AF084363.1, EVALUE 2.00e-31; EST_HUMAN HIT: BE882304.1, EVALUE 3.00e-87
tacttgatcacttggagcttgtaatgagaggccgatgactgggaagccatctggtagagtgtgatgaagtctcctttagggtcatccattctcaaggagccgtcagctgtgccagcgagtagggatgggcagagcagtcgctcttggagatcacatttcagacacactacaataaaaggaga

SEQ ID NO: 15513 - DNA, 149 bp, Homo sapiens
  MAP TO CHR3.1; EXPRESSED IN PLACENTA, SIGNAL = 4.5; EXPRESSED IN FETAL LIVER, SIGNAL = 4.1; EXPRESSED IN LUNG, SIGNAL =   3; EXPRESSED IN BRAIN, SIGNAL = 5.1; EXPRESSED IN HEART, SIGNAL = 3.5; EXPRESSED IN ADULT LIVER, SIGNAL = 6.1; EXPRESSED IN BONE MARROW, SIGNAL = 5.9; SWISSPROT HIT: P27656, EVALUE 1.00e-05; NT HIT: AF035269.1, EVALUE 4.00e-54; EST_HUMAN HIT: BF371301.1, EVALUE 6.00e-54
agtctcttctcacaggcctggaccccgctggacctgagtacaccagggccagtgtggaagagcgcttggatgctggagatgccctcttcgtggaagccatccacacagacaccgacagtgagctggggtgaccttcctgggatgaggga

SEQ ID NO: 15514 - DNA, 168 bp, Homo sapiens
  MAP TO CHR5.1; EXPRESSED IN PLACENTA, SIGNAL = 1.2; EXPRESSED IN FETAL LIVER, SIGNAL =   3; EXPRESSED IN BRAIN, SIGNAL = 0.87; EXPRESSED IN LUNG, SIGNAL =   1; EXPRESSED IN ADULT LIVER, SIGNAL = 2.2; EXPRESSED IN HEART, SIGNAL = 1.6; SWISSPROT HIT: P21374, EVALUE 8.70e-01; NT HIT: gi14728189, EVALUE 4.00e-14; EST_HUMAN HIT: AA280826.1, EVALUE 6.00e-85
aactagtgattagtattttggtcttttgacttcaaccctgcaatggaaggagaaatgggtcagtataagatcaatacactaagcaattcccaccagtcccacagaggaagaataatgccgctcacccatcagcttccatcttcttcctcttctcaatgatctgcaaaa

SEQ ID NO: 15515 - DNA, 305 bp, Homo sapiens
  MAP TO CHR19.1; EXPRESSED IN PLACENTA, SIGNAL = 3.9; EXPRESSED IN LUNG, SIGNAL = 4.1; EXPRESSED IN HELA, SIGNAL = 6.4; EXPRESSED IN BRAIN, SIGNAL = 3.4; EXPRESSED IN HEART, SIGNAL = 2.5; EXPRESSED IN ADULT LIVER, SIGNAL = 2.3; SWISSPROT HIT: Q00839, EVALUE 2.00e-09; NT HIT: gi14786851, EVALUE 0.00e+00; EST_HUMAN HIT: BE793494.1, EVALUE 0.00e+00
cttcctcctagccaacttcacgttgccagatgttggggacttcctggatgaggttctgttcattgagctgcagcgggaggaagcggacaagctagtgaggcagtacaacgaggaaggccgcaaggctgggccaccccctgaaaagcgctttgacaaccgaggtggtggtggcttccggggccgcgggggtggtggtggcttccagcgctatgaaaaccgaggaccccctggaggcaaccgtggcggcttccagaaccgagggggaggcagcggtggaggaggcaactaccgaggaggtgagacat

SEQ ID NO: 15516 - DNA, 295 bp, Homo sapiens
  MAP TO CHR5.1; EXPRESSED IN PLACENTA, SIGNAL = 1.2; EXPRESSED IN FETAL LIVER, SIGNAL = 0.86; EXPRESSED IN LUNG, SIGNAL = 1.5; EXPRESSED IN HELA, SIGNAL = 1.1; EXPRESSED IN BRAIN, SIGNAL = 1.1; EXPRESSED IN HEART, SIGNAL = 1.7; EST_HUMAN HIT: AW973926.1, EVALUE 2.00e-70; SWISSPROT HIT: Q9Y5E5, EVALUE 2.60e-02; NT HIT: gi14861871, EVALUE 0.00e+00
tacctggtggtggcggtggccacagtctcctgcgtcttcctagccttcgtcctcgtactgctggcgctcaggctgcggcgctggcacaagtcacgcctgctgcaggcttcagaaggtggcttggcgaacgtgcccacctcgcactttgtgggcatggacggggtgcaggctttcctgcagacctattcccatgaggtctccctcaccgcggactctcggaagagtcacctgatcttcccccagcccaactatgtagacatgctcatcagccaggagagctgtgagaaaaatgatt

SEQ ID NO: 15517 - DNA, 204 bp, Homo sapiens
  MAP TO CHR14.1; EXPRESSED IN LUNG, SIGNAL = 1.3; EXPRESSED IN BRAIN, SIGNAL = 0.93; EXPRESSED IN HEART, SIGNAL = 1.1; EST_HUMAN HIT: BG675001.1, EVALUE 1.00e-105; SWISSPROT HIT: P43138, EVALUE 8.00e-35; NT HIT: M92444.1, EVALUE 1.00e-111
cagtgggtaaaggaagaagccccagatatactgtgccttcaagagaccaaatgttcagagaacaaactaccagctgaacttcaggagctgcctggactctctcatcaatactggtcagctccttcggacaaggaagggtacagtggcgtgggcctgctttcccgccagtgcccactcaaagtttcttacggcataggtgagacc

SEQ ID NO: 15518 - DNA, 170 bp, Homo sapiens
  MAP TO CHRX.1; EXPRESSED IN FETAL LIVER, SIGNAL = 6.1; EXPRESSED IN LUNG, SIGNAL = 8.7; EXPRESSED IN HELA, SIGNAL = 3.9; EXPRESSED IN BRAIN, SIGNAL = 6.3; EXPRESSED IN HEART, SIGNAL = 7.8; EXPRESSED IN ADULT LIVER, SIGNAL = 4.1; EXPRESSED IN BONE MARROW, SIGNAL = 8.4; EXPRESSED IN PLACENTA, SIGNAL = 4.3; EST_HUMAN HIT: AW665436.1, EVALUE 4.00e-03; SWISSPROT HIT: P08548, EVALUE 7.00e-03; NT HIT: AL163303.2, EVALUE 3.00e-06
tgttggacattgtcaaatgcttcttctgtgtttattgacatgattgtgtgaattttgtcctttattctatgaatatggtatgtagtacattaattgattttcatgcaagttgatacgttcataagtttgtttatgatgtgtctaggtgtagacatttgcattcctaggct

SEQ ID NO: 15519 - DNA, 167 bp, Homo sapiens
  MAP TO CHR4.1; EXPRESSED IN PLACENTA, SIGNAL =  26; EXPRESSED IN FETAL LIVER, SIGNAL =  35; EXPRESSED IN LUNG, SIGNAL =  36; EXPRESSED IN BRAIN, SIGNAL =  33; EXPRESSED IN HELA, SIGNAL =  16; EXPRESSED IN HEART, SIGNAL =  35; EXPRESSED IN BONE MARROW, SIGNAL =  40; NT HIT: gi7710114, EVALUE 6.00e-81; EST_HUMAN HIT: BG033311.1, EVALUE 9.00e-81; SWISSPROT HIT: P35611, EVALUE 2.00e-24
actcaccgcagcccctgctggggtgtgaatgtgcacgacgcacttcacgtccgggcgtgcagcataaattgcagagtgtaaggtgaagccggcctgattcactcccagattagtgcttccacgatctactatatctccttgtagattgatcttaacctgaaaataaa

SEQ ID NO: 15520 - DNA, 229 bp, Homo sapiens
  MAP TO CHR5.1; EXPRESSED IN HEART, SIGNAL =  22; EXPRESSED IN ADULT LIVER, SIGNAL =  23; EXPRESSED IN PLACENTA, SIGNAL =  24; EXPRESSED IN FETAL LIVER, SIGNAL =  30; EXPRESSED IN LUNG, SIGNAL =  21; EXPRESSED IN BRAIN, SIGNAL =  31; SWISSPROT HIT: P47357, EVALUE 1.50e+00; NT HIT: gi14727636, EVALUE 4.00e-83; EST_HUMAN HIT: BG481818.1, EVALUE 5.00e-83
agtacctgctgcttctagcaatgcttctagtcgtgcctgtgtctctggatccacagtgcgtaagtctgctccttctgcagtacttgataagaatatctctgatgttgttttaagcactgggttatccagatcttcttggtccaaaataaatgattcaacctgttaatgaaataaagatgcaatatccatgaaactgatatcaatatgattagaataactacaatttaag

SEQ ID NO: 15521 - DNA, 220 bp, Homo sapiens
  MAP TO CHR19.1; EXPRESSED IN BRAIN, SIGNAL = 1.1; EXPRESSED IN LUNG, SIGNAL = 2.1; EXPRESSED IN BONE MARROW, SIGNAL = 1.6; EXPRESSED IN HEART, SIGNAL = 1.6; EXPRESSED IN ADULT LIVER, SIGNAL = 3.2; EXPRESSED IN PLACENTA, SIGNAL = 2.7; SWISSPROT HIT: O15522, EVALUE 6.00e-01; NT HIT: gi14765970, EVALUE 1.00e-117; EST_HUMAN HIT: BI549119.1, EVALUE 1.00e-117
ccccagatatcccagaggcatccttcctggaggaagaggatgaagaccccatcccacccagcaccacgaccaccattgccacctcagaacagagcacgggctcatgtgacaccagccccgacaccgtctcgccctccctgagccccggcttcgaggacctgtcccatgtccagcctggctccccagccatcaacggccgcagccagacagatgacgagga

SEQ ID NO: 15522 - DNA, 142 bp, Homo sapiens
  MAP TO CHR20.1; EXPRESSED IN FETAL LIVER, SIGNAL = 5.5; EXPRESSED IN HELA, SIGNAL =   4; EXPRESSED IN LUNG, SIGNAL = 4.2; EXPRESSED IN BRAIN, SIGNAL = 5.9; EXPRESSED IN HEART, SIGNAL = 4.3; EXPRESSED IN BONE MARROW, SIGNAL = 7.5; EXPRESSED IN PLACENTA, SIGNAL = 6.3; SWISSPROT HIT: P08579, EVALUE 5.00e-20; NT HIT: gi11421422, EVALUE 2.00e-74; EST_HUMAN HIT: BI260703.1, EVALUE 3.00e-74
agaattgaagagatccctatatgccctgttttctcagtttggtcatgtggtggacattgtggctttaaagaccatgaagatgagggggcaggcctttgtcatatttaaggaactgggctcatccacaaatgccttgagacag

SEQ ID NO: 15523 - DNA, 327 bp, Homo sapiens
  MAP TO CHR17.1; EXPRESSED IN HEART, SIGNAL = 2.1; EXPRESSED IN BONE MARROW, SIGNAL = 2.7; EXPRESSED IN PLACENTA, SIGNAL =   3; EXPRESSED IN FETAL LIVER, SIGNAL = 3.7; EXPRESSED IN BRAIN, SIGNAL = 2.7; EXPRESSED IN LUNG, SIGNAL = 1.7; EST_HUMAN HIT: AL572298.1, EVALUE 0.00e+00; SWISSPROT HIT: Q13829, EVALUE 7.00e-40; NT HIT: gi13652878, EVALUE 0.00e+00
ccaggtggaattcccagaggcccgaatctatgaggagacactcaacgtcctactctatgagactccccgcgtccccgacaactccttgttggaggccacaagccgtagccgcagccaggcttcccccagtgaagatgaggagacctttgaactgcgggaccgtgtccgccgcatccacgtcaagcgctacagcacttacgatgaccggcagctcggccaccagtctacccatcgcgactgaccagaccctcagggagtcagggcacgggaggccctatctcccatcctgtggaacccgccccattggccaccccatgctgctgctgc

SEQ ID NO: 15524 - DNA, 166 bp, Homo sapiens
  MAP TO CHR2.1; EXPRESSED IN HELA, SIGNAL = 0.74; EXPRESSED IN BRAIN, SIGNAL = 0.71; EXPRESSED IN HEART, SIGNAL = 0.49; EXPRESSED IN BONE MARROW, SIGNAL = 0.65; EXPRESSED IN FETAL LIVER, SIGNAL = 0.75; EXPRESSED IN LUNG, SIGNAL = 0.57; EST_HUMAN HIT: AW995079.1, EVALUE 2.00e-88; SWISSPROT HIT: Q9NVP1, EVALUE 3.00e-26; NT HIT: gi13787205, EVALUE 2.00e-81
tctagggaaagcaaaagcaaaataagcgtacaaccacattcttccagttctgcaatgcagattcgggaacactattgtgtacggatgtggcagcgagaggactagacattcctgaagtcgactggattgttcagtatgaccctccggatgaccctaaggtaactgg

SEQ ID NO: 15525 - DNA, 156 bp, Homo sapiens
  MAP TO CHR19.1; EXPRESSED IN ADULT LIVER, SIGNAL = 1.2; EXPRESSED IN FETAL LIVER, SIGNAL = 1.4; EXPRESSED IN BONE MARROW, SIGNAL = 1.5; EXPRESSED IN PLACENTA, SIGNAL = 1.5; EXPRESSED IN LUNG, SIGNAL = 1.1; EXPRESSED IN BRAIN, SIGNAL = 1.4; EXPRESSED IN HELA, SIGNAL = 0.91; EXPRESSED IN HEART, SIGNAL = 1.4; EST_HUMAN HIT: AL568310.1, EVALUE 8.00e-75; SWISSPROT HIT: Q04833, EVALUE 8.80e-01; NT HIT: gi14769063, EVALUE 2.00e-77
gcacctgactggccttggcattgacatcacccatgcagaagagtctctggaccacagccatgtcctcctcttcctgcctcacagaggtgagtgcagccagcatgagggccgagtagccggctcggttctggcggttgacctcgcaggcccctggga

SEQ ID NO: 15526 - DNA, 315 bp, Homo sapiens
  MAP TO CHR2.1; EXPRESSED IN LUNG, SIGNAL = 0.66; EXPRESSED IN BRAIN, SIGNAL = 0.89; EXPRESSED IN HEART, SIGNAL =  14; EXPRESSED IN BONE MARROW, SIGNAL =   2; NT HIT: X92412.1, EVALUE 0.00e+00; EST_HUMAN HIT: BE150892.1, EVALUE 0.00e+00; SWISSPROT HIT: P11799, EVALUE 3.00e-10
tgttccataaaggaattccgcctaaaattgaagctcttccatctgatatcagcattgatgaaggcaaagttctaacagtagcctgtgctttcacgggtgagcctaccccagaagtaacatggtcctgtggtggaagaaaaatccacagtcaagaacaggggaggttccacattgaaaacacagatgacctgacaaccctgatcatcatggacgtacagaaacaagatggtggactttataccctgagtttagggaatgaatttggatctgactctgccactgtgaatatacatattcgatccatttaagagggcc

SEQ ID NO: 15527 - DNA, 248 bp, Homo sapiens
  MAP TO CHR18.1; EXPRESSED IN BRAIN, SIGNAL = 0.9; EXPRESSED IN LUNG, SIGNAL = 0.7; EXPRESSED IN HEART, SIGNAL = 0.85; EXPRESSED IN BONE MARROW, SIGNAL = 0.93; EXPRESSED IN ADULT LIVER, SIGNAL = 1.1; EXPRESSED IN FETAL LIVER, SIGNAL = 0.7; NT HIT: gi14764610, EVALUE 3.00e-96; EST_HUMAN HIT: BF771008.1, EVALUE 4.00e-96; SWISSPROT HIT: P53841, EVALUE 2.50e+00
tcctggaaattgactacctttccagcagataagaggtcctttagacagtacaccctgggagcttctgactaggtagtactttaagtgcttctgcttctttggctgagtggtgagcttcaagttaatgtggttggaaaattccgtgaaatatcgaaatcctctttctccacagccgatacaatttccagaaaaccctgaagtcaggaaaaccaatgttactaatggccttgtaagttgatacaatactt

SEQ ID NO: 15528 - DNA, 179 bp, Homo sapiens
  MAP TO CHR19.1; EXPRESSED IN PLACENTA, SIGNAL = 3.9; EXPRESSED IN LUNG, SIGNAL = 1.9; EXPRESSED IN BRAIN, SIGNAL = 3.4; EXPRESSED IN FETAL LIVER, SIGNAL = 3.1; EXPRESSED IN HELA, SIGNAL =   4; EXPRESSED IN HEART, SIGNAL = 2.4; EXPRESSED IN BONE MARROW, SIGNAL = 3.6; EXPRESSED IN ADULT LIVER, SIGNAL = 3.4; SWISSPROT HIT: Q01741, EVALUE 1.50e+00; NT HIT: gi16174931, EVALUE 2.00e-93; EST_HUMAN HIT: BI829184.1, EVALUE 3.00e-93
tgggcctctgctgctcagccatcccccggaagcctcgcccttgtcctggactccggtgcctcctggcccttgggtccctggacactggctgcctccaggcttctccatgccaccaccagtggtgtgccgcctgctgtaccaagaacctgctgtctctctgcctcccttccctggtaaga

SEQ ID NO: 15529 - DNA, 191 bp, Homo sapiens
  MAP TO CHR12.1; EXPRESSED IN LUNG, SIGNAL = 1.2; EXPRESSED IN BRAIN, SIGNAL = 2.6; EXPRESSED IN PLACENTA, SIGNAL = 1.9; EXPRESSED IN FETAL LIVER, SIGNAL = 2.4; EXPRESSED IN HELA, SIGNAL = 2.2; EXPRESSED IN HEART, SIGNAL = 0.98; EXPRESSED IN BONE MARROW, SIGNAL = 2.8; EXPRESSED IN ADULT LIVER, SIGNAL = 1.8; SWISSPROT HIT: P17403, EVALUE 2.00e-28; NT HIT: gi14767787, EVALUE 1.00e-101; EST_HUMAN HIT: BG994327.1, EVALUE 1.00e-101
ctcaaggcagcactgtacgcagcaccctataagtctgacttcctgaaagcgctctccaaggggcagaatgttacggaggaggagtgcctggagaagatccgcctcttcctagtcaactacacggcgaccatcgatgtcatctacgagatgtacacccagatgaacgctgagcttaactacaaggtgtaggc

SEQ ID NO: 15530 - DNA, 272 bp, Homo sapiens
  MAP TO CHR7.1; EXPRESSED IN BONE MARROW, SIGNAL = 0.63; EXPRESSED IN FETAL LIVER, SIGNAL = 0.74; EXPRESSED IN LUNG, SIGNAL = 0.59; EXPRESSED IN BRAIN, SIGNAL = 0.64; SWISSPROT HIT: Q13228, EVALUE 9.90e-01; NT HIT: gi13631241, EVALUE 0.00e+00
acctgaagttttgtcttccataaacatgtcaaaggcgatcctcccgacagggccggcatctgcaggggagcgctcatgctggggtactggggcgctgctgaaggtgtccagcataacggtcctttggtcagcagagcctgagatgaggacattgtcaatggcccagtcgttctgatccaggccgtcatgtcttggctgccaccagcggaagcgagtggcaatctctttagcatcaggagggagaaggatattcacaaatctataggaaaatg

SEQ ID NO: 15531 - DNA, 198 bp, Homo sapiens
  MAP TO CHR5.1; EXPRESSED IN FETAL LIVER, SIGNAL =   1; EXPRESSED IN HELA, SIGNAL = 0.79; EXPRESSED IN BRAIN, SIGNAL = 0.69; EXPRESSED IN HEART, SIGNAL = 0.58; EXPRESSED IN BONE MARROW, SIGNAL = 0.79; EST_HUMAN HIT: BG614510.1, EVALUE 2.60e-01; SWISSPROT HIT: Q23223, EVALUE 4.20e+00; NT HIT: AJ272424.1, EVALUE 1.80e-01
cctgtcattgctttatgacacagttttaagccacagactaaagatgattgtagctaccactgtcctccttacggttaaaacagctcacacagtattttgccctaatattgtcaagaagcacaattcctttcccagaaaactgctctaattggattcggtagaccttgactggcttgtcactgctgtgttcaaggtgaa

SEQ ID NO: 15532 - DNA, 195 bp, Homo sapiens
  MAP TO CHR12.1; EXPRESSED IN BONE MARROW, SIGNAL = 1.2; EXPRESSED IN ADULT LIVER, SIGNAL = 2.1; EXPRESSED IN FETAL LIVER, SIGNAL = 1.1; EXPRESSED IN LUNG, SIGNAL = 3.9; EXPRESSED IN PLACENTA, SIGNAL = 5.4; EXPRESSED IN BRAIN, SIGNAL = 1.2; EXPRESSED IN HELA, SIGNAL = 1.5; EXPRESSED IN HEART, SIGNAL = 3.2; EST_HUMAN HIT: AA417370.1, EVALUE 1.00e-105; SWISSPROT HIT: P04275, EVALUE 2.00e-34; NT HIT: K03028.1, EVALUE 1.00e-106
gcctcacttgctgcacttcctgggggagcatttgcactccatggcattgagaacctcatggtacacaacagagccattggtgcagtgcagggccacctgcatgggctccgtccgtgtcggagagcagcaggagcactggtcctgcacatcgttgatgtcaatggagtacatggctttgctggcacatttgccctg

SEQ ID NO: 15533 - DNA, 302 bp, Homo sapiens
  MAP TO CHR6.1; EXPRESSED IN BRAIN, SIGNAL = 0.92; EXPRESSED IN HEART, SIGNAL = 1.6; EXPRESSED IN LUNG, SIGNAL = 2.5; EXPRESSED IN FETAL LIVER, SIGNAL = 0.9; NT HIT: gi15208634, EVALUE 0.00e+00; EST_HUMAN HIT: AL042665.2, EVALUE 0.00e+00; SWISSPROT HIT: P22105, EVALUE 1.00e-52
ggccccgcctgtcccagctgtctgtgactgacgtgaccaccagttcactgaggctcaactgggaggccccaccgggggccttcgactccttcctgctccgctttggggttccatcaccaagcactctggagccgcatccgcgtccactgctgcagcgcgagctgatggtgccggggacacggcactcggccgtgctccgggacctgcgttccgggactctgtacagcctgacactgtatgggctgcgaggaccccacaaggccgacagcatccagggaaccgcccgcaccctcagcccaggt

SEQ ID NO: 15534 - DNA, 220 bp, Homo sapiens
  MAP TO CHR7.1; EXPRESSED IN LUNG, SIGNAL = 0.63; EXPRESSED IN BRAIN, SIGNAL = 0.44; EXPRESSED IN HEART, SIGNAL = 0.83; SWISSPROT HIT: Q50864, EVALUE 4.00e+00
gatttgcattttactgcaatgtaatacttttcctcacagggaaaagcagtctactctcactaataggggttttaatgatgctctgccaaggtccacgtgcatagcctcaagcaaaaaggctcaggacaggctctgaattccacagcagggttaactacaagggagcttctttgcagtatgataaaacgcggttaacctcagctggatttgcagctagccc

SEQ ID NO: 15535 - DNA, 315 bp, Homo sapiens
  MAP TO CHR5.1; EXPRESSED IN LUNG, SIGNAL = 1.3; EXPRESSED IN HELA, SIGNAL = 1.6; EXPRESSED IN BRAIN, SIGNAL = 1.9; EXPRESSED IN HEART, SIGNAL = 1.8; EXPRESSED IN ADULT LIVER, SIGNAL = 2.8; EXPRESSED IN FETAL LIVER, SIGNAL = 1.4; SWISSPROT HIT: O84860, EVALUE 2.90e+00; NT HIT: gi15925705, EVALUE 2.90e-01; EST_HUMAN HIT: BI038020.1, EVALUE 7.00e-43
ggccaagtgttaaaagcattccaaaagaaaaggccgaaacagaagctcctcccctccaatctgttcctcatctgtccagggatttattggctctcgcactaaattaatcaattgccaaaagagagctaaaaccacggctccaatgtaaatacttcttggtaacaatccctcagcgtgacacttcagatttcaagtggctgggtggccttccaaacgcctcattaaatagcaactttatagcattaagaggaaaaggctctgggattttctgtacaaatgtataaatcaatcttttcaaagacaaacaacagaaca

SEQ ID NO: 15536 - DNA, 195 bp, Homo sapiens
  MAP TO CHR5.1; EXPRESSED IN FETAL LIVER, SIGNAL = 0.76; EXPRESSED IN LUNG, SIGNAL = 0.58; EXPRESSED IN BRAIN, SIGNAL = 0.75; EXPRESSED IN HEART, SIGNAL = 0.64; EXPRESSED IN ADULT LIVER, SIGNAL = 0.69; EXPRESSED IN BONE MARROW, SIGNAL = 0.81; SWISSPROT HIT: O95235, EVALUE 5.00e-24; NT HIT: AF153329.1, EVALUE 2.00e-99; EST_HUMAN HIT: AI560406.1, EVALUE 1.00e-105
gtctctttttagacctaggctgcccctgccgtcatgtcgcaagggatcctttctccgccagcgggcttgctgtccgatgacgatgtcgtagtttctcccatgtttgagtccacagctgcagatttggggtctgtggtacgcaagaacctgctatcagactgctctgtcgtctctacctccctagaggacaagcag

SEQ ID NO: 15537 - DNA, 133 bp, Homo sapiens
  MAP TO CHR1.1; EXPRESSED IN BRAIN, SIGNAL = 1.7; EXPRESSED IN LUNG, SIGNAL = 1.5; EXPRESSED IN HEART, SIGNAL = 1.7; EXPRESSED IN ADULT LIVER, SIGNAL = 1.7; EXPRESSED IN BONE MARROW, SIGNAL = 1.7; EXPRESSED IN PLACENTA, SIGNAL = 1.3; EXPRESSED IN FETAL LIVER, SIGNAL = 1.6; SWISSPROT HIT: P41687, EVALUE 5.90e+00; NT HIT: U39683.1, EVALUE 4.50e-01; EST_HUMAN HIT: AW139225.1, EVALUE 6.60e-01
ttttgaaacatctgtaacatacctgtttacctttttcaaaattttcactgacaaaatcacactatccctctagtcataatctgaagcactgtgtctccatagtgatgattcaggctcccgttgccatggtgat

SEQ ID NO: 15538 - DNA, 193 bp, Homo sapiens
  MAP TO CHR1.1; EXPRESSED IN LUNG, SIGNAL = 2.5; EXPRESSED IN FETAL LIVER, SIGNAL = 1.7; EXPRESSED IN BRAIN, SIGNAL = 2.5; EXPRESSED IN HEART, SIGNAL = 2.3; EXPRESSED IN ADULT LIVER, SIGNAL = 1.9; SWISSPROT HIT: Q03413, EVALUE 5.00e-32; NT HIT: gi11421868, EVALUE 1.00e-104; EST_HUMAN HIT: AL553937.1, EVALUE 1.00e-104
gcgttggtgcggctctcgtgtggctcattgtactccgtgtacttgagcagcaccttgtccatgtcggtgctggcgtactggaacagcttgttggagtggttgaagatgatgagtgcgatctcgcagtcacatagcacgctcagctcatacgccttcttcatcaggccaaacttccgcttggtgaaagtcacct

SEQ ID NO: 15539 - DNA, 247 bp, Homo sapiens
  MAP TO AC027045.2; EXPRESSED IN BONE MARROW, SIGNAL = 0.5; EXPRESSED IN ADULT LIVER, SIGNAL = 0.46; EXPRESSED IN FETAL LIVER, SIGNAL = 0.55; EXPRESSED IN BRAIN, SIGNAL = 0.44; EXPRESSED IN LUNG, SIGNAL = 0.8; EXPRESSED IN HEART, SIGNAL = 0.58; SWISSPROT HIT: Q09851, EVALUE 7.00e-04; NT HIT: AJ400879.1, EVALUE 5.70e-02; EST_HUMAN HIT: AI091419.1, EVALUE 1.00e-56
tgactctctcattggttcagcagacattcaccccaaagctggtcctgttggacctctcagacatcagctgtgtcccagatgtggcaaaagaagtcctggattgctatggctgtgtggacatcctcatcaacaatgccagtgtgaaggtgaaggggcctgcccataagatttctctggagctcgacaaaaagatcatggatgccaattactttggccccatcacattgaccaaaggtctcgtgagttt

SEQ ID NO: 15540 - DNA, 247 bp, Homo sapiens
  MAP TO CHR5.1; EXPRESSED IN BONE MARROW, SIGNAL = 0.51; EXPRESSED IN FETAL LIVER, SIGNAL = 0.41; EXPRESSED IN LUNG, SIGNAL = 0.69; EXPRESSED IN BRAIN, SIGNAL = 0.63; EXPRESSED IN HEART, SIGNAL = 0.78; EST_HUMAN HIT: BI599585.1, EVALUE 2.00e-79; SWISSPROT HIT: Q9UN74, EVALUE 1.00e-32; NT HIT: gi14728011, EVALUE 0.00e+00
gggctgaaggccatgaggtcggtcttgggtgggccctcaccagagcacaccctcggcctcctctgctgcgagtatgaccagctccccaccgcactggagcacaccagcgtgggcttgcccggagcgcacgcgccctcggtgggcagcgcagagcaccgcagcgcggtgtacagcagcagcgtgagcaccaaaaggctggacaccgcgcagatggcaatgatcaggtatacgttgacatccaccagcg

SEQ ID NO: 15541 - DNA, 329 bp, Homo sapiens
  MAP TO CHR17.1; EXPRESSED IN BONE MARROW, SIGNAL = 1.3; EXPRESSED IN ADULT LIVER, SIGNAL =   1; EXPRESSED IN FETAL LIVER, SIGNAL = 1.3; EXPRESSED IN LUNG, SIGNAL = 1.4; EXPRESSED IN BRAIN, SIGNAL = 1.1; EXPRESSED IN HEART, SIGNAL = 1.3; EST_HUMAN HIT: BI520366.1, EVALUE 3.00e-51; SWISSPROT HIT: Q14147, EVALUE 2.00e-54; NT HIT: gi14756023, EVALUE 0.00e+00
ctcccaccccaggtcggctaccagatccgctttgagagcacacgttcggcggccaccaagattgtattcctgacagtggggctgctcctgcgacaaatccagcgggaacccagcctgccccagtatgaggtcctgattgtggatgaagtccatgagcggcatctccacaacgatttcctcctgggcgtcctccagcgcctgttgcccacgcggcctgacctcaaggtcatcctcatgtcggccaccatcaacatctcgctcttctccagctatttcagcaatgcccctgtggtacaggtgcctgggaggctgttccccatcacggtgag

SEQ ID NO: 15542 - DNA, 152 bp, Homo sapiens
  MAP TO CHR19.1; EXPRESSED IN HEART, SIGNAL = 2.4; EXPRESSED IN BONE MARROW, SIGNAL = 1.4; EXPRESSED IN ADULT LIVER, SIGNAL = 0.67; EXPRESSED IN LUNG, SIGNAL = 2.6; EXPRESSED IN BRAIN, SIGNAL = 1.5; EXPRESSED IN FETAL LIVER, SIGNAL = 1.9; EXPRESSED IN PLACENTA, SIGNAL = 2.2; EXPRESSED IN HELA, SIGNAL = 2.2; NT HIT: gi15305902, EVALUE 9.00e-80; EST_HUMAN HIT: AU132135.1, EVALUE 1.00e-79; SWISSPROT HIT: Q99961, EVALUE 3.00e-23
ctcaccaaagttggactcgccgcccagctccttcccgtggcggatcatgcactcgcccagaagcccctccgactgcgggtagccggggttcttcacctggccccggatcttggacaccgtgttgagcatggtcagcttagcccgcgaggctg

SEQ ID NO: 15543 - DNA, 219 bp, Homo sapiens
  MAP TO CHR20.1; EXPRESSED IN BRAIN, SIGNAL = 1.1; EXPRESSED IN HEART, SIGNAL = 0.95; EXPRESSED IN BONE MARROW, SIGNAL =   1; EXPRESSED IN ADULT LIVER, SIGNAL = 1.2; EXPRESSED IN FETAL LIVER, SIGNAL = 1.1; EXPRESSED IN LUNG, SIGNAL = 1.7; NT HIT: gi6981369, EVALUE 5.00e-67; EST_HUMAN HIT: AA441941.1, EVALUE 1.00e-113; SWISSPROT HIT: P05655, EVALUE 2.30e+00
ggagatgggaaggttagaaaggcagccctcacctctgaggacagaggccggggtccaggcccgtgggcgcaaaggtgcctcatagcatagccagcattcagcacacacaaacctactgcccacatttgggctcagggttggccatttgctagttctgctgccctcttaagatctgactgccaaataaatcatcctcatgtcctttttcctttgacttgt

SEQ ID NO: 15544 - DNA, 231 bp, Homo sapiens
  MAP TO CHR11.1; EXPRESSED IN ADULT LIVER, SIGNAL = 0.63; EXPRESSED IN BRAIN, SIGNAL = 1.2; EXPRESSED IN HEART, SIGNAL = 0.53; EXPRESSED IN BONE MARROW, SIGNAL = 1.4; SWISSPROT HIT: Q9CL24, EVALUE 1.20e+00; NT HIT: AF136579.1, EVALUE 5.30e-02; EST_HUMAN HIT: AW074631.1, EVALUE 4.80e+00
atgccgggcaccacaaacaaacaacaaaaaggattcatgtgttcaatggagctgaattttaattgatactttctcaaacagtggttctgaaccaacatcgctcagcccccaaagatgatgaagggggtgcggtttaacgccacaattagcagacaaccccacaacaaatacagtaaacattaatcatattaaatattgaactcagactttggtacgcttgaagagcaatgg

SEQ ID NO: 15545 - DNA, 256 bp, Homo sapiens
  MAP TO CHR2.1; EXPRESSED IN LUNG, SIGNAL = 2.5; EXPRESSED IN BRAIN, SIGNAL = 2.1; EXPRESSED IN BONE MARROW, SIGNAL = 1.6; EXPRESSED IN HEART, SIGNAL = 2.3; EXPRESSED IN ADULT LIVER, SIGNAL = 4.6; EXPRESSED IN PLACENTA, SIGNAL = 1.8; EXPRESSED IN FETAL LIVER, SIGNAL = 1.7; SWISSPROT HIT: Q06278, EVALUE 9.00e-11; NT HIT: gi13994152, EVALUE 6.00e-05; EST_HUMAN HIT: BE271043.1, EVALUE 8.70e-02
acctgatgataaaacatctttggatatccaactgagattttcttgggtataatgacagttcctctttccttccaataattccacgggttaaattgttctacagtttttttcctgctgtagtatgaagagtttttcatacatttctccagcatcttatcagttcctttggatcaaattcttgcttgtgaattgtcttatcaagcattttgcacatgtttatctctaacctggtggacgaaaatgccaaacttcacaa

SEQ ID NO: 15546 - DNA, 267 bp, Homo sapiens
  MAP TO AC002345.1; EXPRESSED IN LUNG, SIGNAL = 3.3; EXPRESSED IN BRAIN, SIGNAL = 1.9; EXPRESSED IN HEART, SIGNAL =   2; EXPRESSED IN ADULT LIVER, SIGNAL = 1.6; EXPRESSED IN BONE MARROW, SIGNAL = 2.2; EXPRESSED IN PLACENTA, SIGNAL = 2.7; SWISSPROT HIT: P12821, EVALUE 2.00e-03; NT HIT: gi14770936, EVALUE 1.00e-128; EST_HUMAN HIT: BF312177.1, EVALUE 1.00e-108
  unsure 61
  unsure 102
  unsure 106
  unsure 137
  unsure 170
  unsure 174
ccttgcttcccgctcagctcgctcagaagggcccctcccagacagcggccgcgtcagcttncctgggcctggacctggatgcgcaggaggcccgcgtgggcncagntggctgctgctcttcctgggcatcgccctgnctggtagccaccctgggcctcagccagcggctncttncagcatccgccaccgcagcctccaccggcactcccacgggccccagttcggctccgaggtggagctgagacactcctgaggtgacccggctgg

SEQ ID NO: 15547 - DNA, 240 bp, Homo sapiens
  MAP TO CHR5.1; EXPRESSED IN ADULT LIVER, SIGNAL = 0.79; EXPRESSED IN BRAIN, SIGNAL = 0.68; EXPRESSED IN LUNG, SIGNAL = 0.67; EXPRESSED IN BONE MARROW, SIGNAL = 0.71; EXPRESSED IN HEART, SIGNAL = 0.79; EST_HUMAN HIT: H15280.1, EVALUE 4.00e-90; SWISSPROT HIT: Q13591, EVALUE 2.00e-42; NT HIT: gi16159220, EVALUE 1.00e-120
ccacttacctgggcagggcaaaatgttgcattcctggtattccagagatgggccaaggcaaggcattcccccatacttgggttcggggttgttgcaaacacgcttccggttccgaatgcccctgctgcagtcacggctgcactgtgaccacgacgtccaggctgaccaagccccgttgaccgtgtgggcagagtatctcccagcacgcaggaaatccccagaaagccctgccaaggaaac

SEQ ID NO: 15548 - DNA, 152 bp, Homo sapiens
  MAP TO CHR12.1; EXPRESSED IN BONE MARROW, SIGNAL = 1.2; EXPRESSED IN FETAL LIVER, SIGNAL = 1.2; EXPRESSED IN HELA, SIGNAL =   2; EXPRESSED IN BRAIN, SIGNAL = 1.2; EXPRESSED IN LUNG, SIGNAL = 0.85; EXPRESSED IN HEART, SIGNAL = 0.98; EST_HUMAN HIT: AL573821.1, EVALUE 8.00e-75; SWISSPROT HIT: O08608, EVALUE 1.00e-01; NT HIT: gi14784192, EVALUE 5.00e-75
caggctcgggtgcgtcctcgctgtgggcgccttgtggccttcagctccggtgtcgagaatccccatggggtgtgggccgtgactcggggacggcgctgtgccctggcactgtggcacacgtgggcacctgagcacagggagcaggtaaggag

SEQ ID NO: 15549 - DNA, 127 bp, Homo sapiens
  MAP TO CHR14.1; EXPRESSED IN HEART, SIGNAL = 0.87; EXPRESSED IN ADULT LIVER, SIGNAL =   2; EXPRESSED IN PLACENTA, SIGNAL = 3.5; EXPRESSED IN HELA, SIGNAL = 1.7; EXPRESSED IN BRAIN, SIGNAL = 1.2; NT HIT: M99663.1, EVALUE 4.00e-63; EST_HUMAN HIT: BG503730.1, EVALUE 2.00e-65; SWISSPROT HIT: P19181, EVALUE 1.00e-16
cactgtgtctctcgcacagtaatacacagccgtgtcctcggctctcaggctgttcatttgcagatacagcgtgttcttggaattgtctctggagatggtgaatcggcccttcacggagtctgcatag

SEQ ID NO: 15550 - DNA, 169 bp, Homo sapiens
  MAP TO CHR1.1; EXPRESSED IN HELA, SIGNAL = 2.7; EXPRESSED IN BRAIN, SIGNAL = 1.8; EXPRESSED IN FETAL LIVER, SIGNAL = 1.9; EXPRESSED IN LUNG, SIGNAL = 2.5; EXPRESSED IN HEART, SIGNAL = 2.2; EXPRESSED IN BONE MARROW, SIGNAL = 1.8; EXPRESSED IN ADULT LIVER, SIGNAL = 1.9; EXPRESSED IN PLACENTA, SIGNAL = 1.6; SWISSPROT HIT: Q13751, EVALUE 2.00e-30; NT HIT: U17753.1, EVALUE 2.00e-90; EST_HUMAN HIT: BE878933.1, EVALUE 4.00e-83
ctcagcctgcgagtgtgatccggatggggcagtgccaggggctccctgtgacccagtgaccgggcagtgtgtgtgcaaggagcatgtgcagggagagcgctgtgacctatgcaagccgggcttcactggactcacctacgccaacccgcagggctgccaccgtgagtag

SEQ ID NO: 15551 - DNA, 334 bp, Homo sapiens
  MAP TO CHR1.1; EXPRESSED IN PLACENTA, SIGNAL = 1.7; EXPRESSED IN FETAL LIVER, SIGNAL = 1.3; EXPRESSED IN LUNG, SIGNAL = 1.9; EXPRESSED IN BRAIN, SIGNAL = 1.6; EXPRESSED IN HEART, SIGNAL = 1.6; EXPRESSED IN BONE MARROW, SIGNAL = 1.8; SWISSPROT HIT: P14409, EVALUE 4.20e+00; NT HIT: AL163246.2, EVALUE 1.00e-107; EST_HUMAN HIT: BG620088.1, EVALUE 1.00e-110
tctttcaagtccttgatggtggcactgatctctgcaatccctccagggatgcgatattgtttttgatttacatttttctaggtagaggcagctttaatggcttccatttgatctttctcaccatagtagccctcaccctaccagtcagggagccaatgtgggggttctgccagctgctaagtatgtctatgccaattatgcattctggcactggggaaatgaccacaggatgaatctggggacccactggacccactgtaagttggacatgagctaaaactccattaattacctgacctccataagcccctactttaacaggaggaccacaatg

SEQ ID NO: 15552 - DNA, 130 bp, Homo sapiens
  MAP TO CHR2.1; EXPRESSED IN LUNG, SIGNAL = 0.69; EXPRESSED IN HELA, SIGNAL =   1; EXPRESSED IN BRAIN, SIGNAL = 1.1; EXPRESSED IN HEART, SIGNAL = 1.6; EXPRESSED IN ADULT LIVER, SIGNAL = 1.2; EXPRESSED IN BONE MARROW, SIGNAL = 1.3; EXPRESSED IN FETAL LIVER, SIGNAL = 0.93; SWISSPROT HIT: P58008, EVALUE 1.20e+00; NT HIT: AJ277892.1, EVALUE 3.00e-67; EST_HUMAN HIT: BG988724.1, EVALUE 2.00e-35
aaaataagataaataaatatctttaaagcacccgaagtacccaagaaaattgtcccagaagaaaaagttcgtgaagctgttctgaaaaagcctgaagttccaccagctaaaggtatacagtgatgctaat

SEQ ID NO: 15553 - DNA, 215 bp, Homo sapiens
  MAP TO CHR3.1; EXPRESSED IN HELA, SIGNAL = 1.6; EXPRESSED IN LUNG, SIGNAL = 1.6; EXPRESSED IN BONE MARROW, SIGNAL = 1.9; EXPRESSED IN ADULT LIVER, SIGNAL = 2.4; EXPRESSED IN PLACENTA, SIGNAL = 2.5; EXPRESSED IN FETAL LIVER, SIGNAL = 1.6; EXPRESSED IN BRAIN, SIGNAL = 1.7; SWISSPROT HIT: P11150, EVALUE 4.00e-03; NT HIT: AF035269.1, EVALUE 1.00e-112; EST_HUMAN HIT: BI763084.1, EVALUE 1.00e-112
tttcctccaggggatgcacctcctaccccacagccaaagtgcgctgacttccagagcgccaacctttttgaaggcaccgatctcaaagtccagtttctcctctttgtcccttcgaatcctagctgtgggcagctagtagaaggaagcagtgacctccaaaactctgggttcaatgccactctgggaaccaaactaattatccatggattcaggtg

SEQ ID NO: 15554 - DNA, 224 bp, Homo sapiens
  MAP TO CHR12.1; EXPRESSED IN FETAL LIVER, SIGNAL = 3.1; EXPRESSED IN BRAIN, SIGNAL = 1.3; EXPRESSED IN LUNG, SIGNAL = 1.3; EXPRESSED IN HEART, SIGNAL = 1.3; EXPRESSED IN BONE MARROW, SIGNAL =   2; SWISSPROT HIT: P10761, EVALUE 2.50e+00; NT HIT: AF320231.1, EVALUE 4.00e-83; EST_HUMAN HIT: AW601927.1, EVALUE 1.00e-119
ctgtaacagaagacaagtacgaaatactgcaatctgtcgacgatgctgcgattgtgataaaaaacacaaaagagcctccattgtccctgaccatccacctgacatcccctgttgtcagagaagaaatggagaaagtattagctggaggtagggaggccgagacacgccggcaggactttgaaaatgtggtgttccctcactattcaaatgtgctattcagtttt

SEQ ID NO: 15555 - DNA, 181 bp, Homo sapiens
  MAP TO CHR17.1; EXPRESSED IN FETAL LIVER, SIGNAL = 1.4; EXPRESSED IN LUNG, SIGNAL =   3; EXPRESSED IN HELA, SIGNAL = 0.76; EXPRESSED IN BRAIN, SIGNAL = 1.5; EXPRESSED IN HEART, SIGNAL = 2.4; EXPRESSED IN BONE MARROW, SIGNAL = 1.7; EST_HUMAN HIT: AI818797.1, EVALUE 1.00e-89; SWISSPROT HIT: Q11011, EVALUE 2.00e-32; NT HIT: gi15313226, EVALUE 8.00e-90
aggaatggtggactcatctttggttaaatgaaggttttgcatcctggattgaatatctgtgtgtagaccactgcttcccagagtatgatatttggactcagtttgtttctgctgattacacccgtgcccaggagcttgacgccttagataacagccatcctattgaagtgagccatacttt

SEQ ID NO: 15556 - DNA, 108 bp, Homo sapiens
  MAP TO CHR17.1; EXPRESSED IN LUNG, SIGNAL = 0.63; EXPRESSED IN BRAIN, SIGNAL = 0.44; EXPRESSED IN HEART, SIGNAL = 0.67; EXPRESSED IN BONE MARROW, SIGNAL = 0.43; EXPRESSED IN FETAL LIVER, SIGNAL = 0.7; NT HIT: gi14728985, EVALUE 3.50e-01; EST_HUMAN HIT: BF791910.1, EVALUE 5.10e-01
ggttacttgtaaacagctgtgggacgtaatttgtccctggaaacatgaacttatttgaaacagatgggtgttttcttactacctcctcacctgtctcaagtttcagtc

SEQ ID NO: 15557 - DNA, 162 bp, Homo sapiens
  MAP TO CHR3.1; EXPRESSED IN BONE MARROW, SIGNAL = 1.3; EXPRESSED IN ADULT LIVER, SIGNAL = 1.4; EXPRESSED IN PLACENTA, SIGNAL = 1.5; EXPRESSED IN FETAL LIVER, SIGNAL = 1.1; EXPRESSED IN LUNG, SIGNAL = 1.7; EXPRESSED IN HEART, SIGNAL = 1.6; EXPRESSED IN BRAIN, SIGNAL = 1.4; EXPRESSED IN HELA, SIGNAL = 1.2; SWISSPROT HIT: P51178, EVALUE 5.00e-25; NT HIT: gi14737669, EVALUE 2.00e-80; EST_HUMAN HIT: AA625496.1, EVALUE 4.00e-80
acactcaccttgcttgaggctgttcaaggggatggtactctggccaatgaagtcattcttggaggaggcatcataatcttccaccaagaagcggatgagggcaaggtcaggcacaactacctcaaacgcaaactccgtgtcccaccatgggttgaaacctag

SEQ ID NO: 15558 - DNA, 195 bp, Homo sapiens
  MAP TO CHR7.1; EXPRESSED IN HELA, SIGNAL = 0.7; EXPRESSED IN BRAIN, SIGNAL = 0.44; EXPRESSED IN BONE MARROW, SIGNAL = 0.45; EXPRESSED IN HEART, SIGNAL = 0.73; SWISSPROT HIT: P08581, EVALUE 1.00e-33; NT HIT: gi14752522, EVALUE 9.00e-96; EST_HUMAN HIT: R94852.1, EVALUE 5.00e-98
cttctcttcacagatcacgaagatcccattgaatggcttgggctgcagacatttccagtcctgcagtcaatgcctctctgccccaccctttgttcagtgtggctggtgccacgacaaatgtgtgcgatcggaggaatgcctgagcgggacatggactcaacagatctgtctgcctgcaatctacaaggtaggaat

SEQ ID NO: 15559 - DNA, 203 bp, Homo sapiens
  MAP TO CHR12.1; EXPRESSED IN ADULT LIVER, SIGNAL = 0.68; EXPRESSED IN BONE MARROW, SIGNAL = 0.47; EXPRESSED IN FETAL LIVER, SIGNAL = 0.63; EXPRESSED IN HELA, SIGNAL = 0.58; EXPRESSED IN LUNG, SIGNAL = 0.85; EXPRESSED IN BRAIN, SIGNAL = 0.47; EXPRESSED IN HEART, SIGNAL = 0.88; SWISSPROT HIT: Q10105, EVALUE 8.00e-14; NT HIT: gi15308370, EVALUE 2.00e-97; EST_HUMAN HIT: AW504988.1, EVALUE 2.00e-97
ccctcacgggaaaggcctacccaggatctccgggttcctgataacggagccgatctgcctgagcgcctgctgtccagccttctggactttgacatgggagtcggtcagcacctccgtaagcttgggcacaatgttgggtagacaggatgacagctgcttaggagcacagtacgccattgccccaagaagctccactgaccctg

SEQ ID NO: 15560 - DNA, 147 bp, Homo sapiens
  MAP TO CHR19.1; EXPRESSED IN ADULT LIVER, SIGNAL = 1.6; EXPRESSED IN FETAL LIVER, SIGNAL = 1.6; EXPRESSED IN LUNG, SIGNAL = 1.5; EXPRESSED IN HELA, SIGNAL = 1.4; EXPRESSED IN BRAIN, SIGNAL = 1.3; EXPRESSED IN HEART, SIGNAL = 1.5; EXPRESSED IN BONE MARROW, SIGNAL = 1.3
cttaccctgtgttgctttcccagtgctgctaaaaacagagaccctaggggcctgaaccctgcctgatcctgatcatgtgaggtgaagtcagaggccaggcagatcctgggaatgtgttctttatgcgttcccaggcacttgctgccc

SEQ ID NO: 15561 - DNA, 233 bp, Homo sapiens
  MAP TO CHR17.1; EXPRESSED IN FETAL LIVER, SIGNAL = 1.4; EXPRESSED IN BRAIN, SIGNAL = 0.91; EXPRESSED IN LUNG, SIGNAL =   1; EXPRESSED IN HEART, SIGNAL = 1.6; EXPRESSED IN ADULT LIVER, SIGNAL = 1.9; SWISSPROT HIT: P51452, EVALUE 8.00e-34; NT HIT: AF326736.1, EVALUE 1.00e-128; EST_HUMAN HIT: R70568.1, EVALUE 1.00e-114
ccctagggtttcaacttcccctccttggctagtctgtcattgagctggcagagctgggccaggaagccatcgttggggccgatctcacggttctgcctcacgatgctcagggcagacttgacgtccatcttctgccgcatcatgaggtaggcgataactagcgttggggagcggctataaccttcccggcagtggacgagcacccggcctgtaagaaacaggggagacgtggt

SEQ ID NO: 15562 - DNA, 131 bp, Homo sapiens
  MAP TO CHR7.1; EXPRESSED IN BONE MARROW, SIGNAL = 1.2; EXPRESSED IN HEART, SIGNAL = 0.74; EXPRESSED IN FETAL LIVER, SIGNAL = 1.2; EXPRESSED IN BRAIN, SIGNAL = 1.1; EXPRESSED IN LUNG, SIGNAL = 0.71; SWISSPROT HIT: Q99996, EVALUE 7.00e-20; NT HIT: AJ010770.1, EVALUE 6.00e-68; EST_HUMAN HIT: BE670599.1, EVALUE 9.00e-68
gaaaagactgactcattttatcattcttctggtgggctggagttatatggagaaccaagacatactacgtatcgctcaagatcagatctggactatattaggtcccctttaccatttcagaataggtaaga

SEQ ID NO: 15563 - DNA, 195 bp, Homo sapiens
  MAP TO CHR16.1; EXPRESSED IN ADULT LIVER, SIGNAL = 4.1; EXPRESSED IN BONE MARROW, SIGNAL = 2.8; EXPRESSED IN PLACENTA, SIGNAL = 3.4; EXPRESSED IN FETAL LIVER, SIGNAL = 2.5; EXPRESSED IN LUNG, SIGNAL = 1.6; EXPRESSED IN BRAIN, SIGNAL = 2.7; EXPRESSED IN HEART, SIGNAL = 2.1; EST_HUMAN HIT: AW964032.1, EVALUE 1.00e-105; SWISSPROT HIT: P00750, EVALUE 4.30e+00; NT HIT: gi16165047, EVALUE 1.00e-106
cctaccaccggatgcccaggccagtgctggccttctccacggcgtggtactgcgtatgcagcaagcgacctgcacactccgagtccgtgccctgcagccagtgtgtgtacagctcctgaaccccaggcgcgtcctcgggcgcctcagcccggaccatgccgtacagtctctccacgtgctggaggagctctctgc

SEQ ID NO: 15564 - DNA, 288 bp, Homo sapiens
  MAP TO CHR1.1; EXPRESSED IN HEART, SIGNAL = 1.3; EXPRESSED IN ADULT LIVER, SIGNAL = 1.1; EXPRESSED IN FETAL LIVER, SIGNAL = 1.1; EXPRESSED IN LUNG, SIGNAL = 1.4; EXPRESSED IN HELA, SIGNAL = 1.2; EXPRESSED IN BRAIN, SIGNAL = 1.1; EXPRESSED IN BONE MARROW, SIGNAL = 0.96; EXPRESSED IN PLACENTA, SIGNAL = 1.5; EST_HUMAN HIT: BG250740.1, EVALUE 0.00e+00; SWISSPROT HIT: P46062, EVALUE 5.00e-16; NT HIT: AB037810.1, EVALUE 0.00e+00
cttaccttcggggcgagccgtcatcatggggctggatgatgaccaccttcacagtcacagaagtacggagcaggtcgatcatctgctcgtgggtcagagtggccacggctactttgcagatctccacgaggcggctcccttggcgaaggccagccttccaggcaaagccaaaaggttccacatctgcgacaattccttcaaaattcacatggaagccaagctggcccagcccgttcctcctcagggtcatttccacagtctcgcagcctctcgtcactatctaagggg

SEQ ID NO: 15565 - DNA, 145 bp, Homo sapiens
  MAP TO CHR7.1; EXPRESSED IN PLACENTA, SIGNAL = 1.8; EXPRESSED IN BRAIN, SIGNAL = 1.8; EXPRESSED IN HELA, SIGNAL =   2; EXPRESSED IN LUNG, SIGNAL = 0.95; EXPRESSED IN HEART, SIGNAL = 1.7; EXPRESSED IN ADULT LIVER, SIGNAL = 2.5; EXPRESSED IN BONE MARROW, SIGNAL = 1.8; NT HIT: gi14753216, EVALUE 4.00e-48; EST_HUMAN HIT: AV730819.1, EVALUE 7.30e-01; SWISSPROT HIT: Q05921, EVALUE 2.70e-02
aaagaatttccatgagctggtattctatggtacataagaagcttgaggctgtccacattaccagtgtccacagctgcgtgaactggtgtccagccatcctgaaaataaaatgaccagggggaaagggttgataacaacattaatg

SEQ ID NO: 15566 - DNA, 150 bp, Homo sapiens
  MAP TO CHR7.1; EXPRESSED IN HEART, SIGNAL = 1.1; EXPRESSED IN ADULT LIVER, SIGNAL = 0.89; EXPRESSED IN FETAL LIVER, SIGNAL =   1; EXPRESSED IN BRAIN, SIGNAL = 1.1; EXPRESSED IN HELA, SIGNAL = 1.1; EXPRESSED IN LUNG, SIGNAL =   1; NT HIT: AJ289159.1, EVALUE 8.00e+00; EST_HUMAN HIT: T97258.1, EVALUE 1.90e-01; SWISSPROT HIT: P25159, EVALUE 5.10e-01
ctgctcctcactgaccttggggagggcaggcagaggcaccagcttggacacaagccgaaatctgaacatacagattggaggtggaacacgctgagcaggccctgggccagctcttccaactgatccatcaacaagtgtgtgtggggtgac

SEQ ID NO: 15567 - DNA, 331 bp, Homo sapiens
  MAP TO CHR1.1; EXPRESSED IN ADULT LIVER, SIGNAL =   2; EXPRESSED IN BONE MARROW, SIGNAL =   1; EXPRESSED IN FETAL LIVER, SIGNAL = 1.6; EXPRESSED IN HELA, SIGNAL = 0.85; EXPRESSED IN BRAIN, SIGNAL = 0.95; EXPRESSED IN LUNG, SIGNAL = 0.97; EXPRESSED IN HEART, SIGNAL = 1.3; SWISSPROT HIT: O25455, EVALUE 2.10e-01; NT HIT: gi10863978, EVALUE 0.00e+00; EST_HUMAN HIT: BE786578.1, EVALUE 0.00e+00
caggtacatcaggaacatctctatcaagaacacaatttcatcaaggctgagggccatctgaaacagacggagaaaatatatactcagcaaatacaaagcgaggatgtagaattgacctctatgaaaggggaagtcacctccatgaagaaagtgctagaagaatacaagaaaaagttcagtgacatctgagaaacttatggaacgccatcttcagcatcaaaagctccaaggcctctatgatagccttaggctacgtaacatccctattgctaaccgtgaaggcacccttgaaccatctacgattgcacagtctggtgtttttggcttccca

SEQ ID NO: 15568 - DNA, 151 bp, Homo sapiens
  MAP TO CHR5.1; EXPRESSED IN ADULT LIVER, SIGNAL = 1.6; EXPRESSED IN FETAL LIVER, SIGNAL = 0.98; EXPRESSED IN LUNG, SIGNAL = 1.4; EXPRESSED IN HELA, SIGNAL = 0.67; EXPRESSED IN BRAIN, SIGNAL = 1.2; EXPRESSED IN BONE MARROW, SIGNAL = 1.3; EXPRESSED IN HEART, SIGNAL = 1.6; SWISSPROT HIT: P16471, EVALUE 3.00e-13; NT HIT: AF091868.1, EVALUE 3.00e-67; EST_HUMAN HIT: AA033953.1, EVALUE 9.00e-50
gtgatcaaagctttctggctgtttgttttttagacttcaccatgaatgatacaaccgtgtggatctctgtggctgtcctttctgctgtcatctgtttgattattgtctgggcagtggctttgaagggctataggtacttcactgtctctca

SEQ ID NO: 15569 - DNA, 185 bp, Homo sapiens
  MAP TO CHR19.1; EXPRESSED IN HEART, SIGNAL = 1.2; EXPRESSED IN ADULT LIVER, SIGNAL = 0.78; EXPRESSED IN BONE MARROW, SIGNAL = 1.5; EXPRESSED IN FETAL LIVER, SIGNAL = 1.2; EXPRESSED IN PLACENTA, SIGNAL = 1.2; EXPRESSED IN LUNG, SIGNAL = 1.6; EXPRESSED IN BRAIN, SIGNAL = 1.5; EXPRESSED IN HELA, SIGNAL = 0.92; EST_HUMAN HIT: BF980727.1, EVALUE 4.00e-80; NT HIT: AB037816.1, EVALUE 3.00e-80
agctgcctctggtgtccccagatctcggagaacttctacttcgacctgaactcggactccatgaaggggctgcttcgggctcatggcacccaccctgccatctccaccctggcccgctctgccatcttctctgtgacctacccctcacctgacatcttcctggtcatcaaggtgcctgctggggc

SEQ ID NO: 15570 - DNA, 152 bp, Homo sapiens
  MAP TO CHR6.1; EXPRESSED IN ADULT LIVER, SIGNAL = 3.6; EXPRESSED IN BRAIN, SIGNAL = 3.5; EXPRESSED IN BONE MARROW, SIGNAL = 3.5; EXPRESSED IN FETAL LIVER, SIGNAL = 3.4; EXPRESSED IN PLACENTA, SIGNAL = 3.9; EXPRESSED IN LUNG, SIGNAL = 2.1; EXPRESSED IN HELA, SIGNAL = 3.9; EXPRESSED IN HEART, SIGNAL =   2; EST_HUMAN HIT: BE891494.1, EVALUE 3.00e-80; SWISSPROT HIT: P43535, EVALUE 6.00e-06; NT HIT: gi14761357, EVALUE 2.00e-80
aggtgtatgaggaattgcgggccactggggcggcagctgcagaggccaaagcacggcggatcctggctggcctgggctttgaccctgaaatgcagaatcgacccacacagaagttctcagggggctggcgcatgcgtgtctccctggccagg

SEQ ID NO: 15571 - DNA, 275 bp, Homo sapiens
  MAP TO CHR2.1; EXPRESSED IN BRAIN, SIGNAL = 0.97; EXPRESSED IN HEART, SIGNAL = 3.4; EXPRESSED IN BONE MARROW, SIGNAL =   1; EXPRESSED IN FETAL LIVER, SIGNAL = 0.67; NT HIT: gi4507720, EVALUE 0.00e+00; EST_HUMAN HIT: BF576571.1, EVALUE 1.00e-87; SWISSPROT HIT: Q90688, EVALUE 1.00e-03
ttttcagaaatcgaacttgactttgctgtgcccctgaaggatgtcactgttccagaaaggcgacaggctcgattcgaatgtgtcctcacccgagaggcaaatgttatatggtccaaaggacctgatataattaagtcatctgacaaatttgatatcatcgctgatggaaagaaacatattcttgttattaatgattctcaatttgatgatgaaggggtctatactgctgaggtggagggcaagaagacctcagctcggttgtttgtcacaggtaa

SEQ ID NO: 15572 - DNA, 212 bp, Homo sapiens
  MAP TO CHR19.1; EXPRESSED IN LUNG, SIGNAL = 1.7; EXPRESSED IN BRAIN, SIGNAL = 3.7; EXPRESSED IN HEART, SIGNAL = 2.5; EXPRESSED IN ADULT LIVER, SIGNAL = 3.7; EXPRESSED IN BONE MARROW, SIGNAL = 3.6; EXPRESSED IN PLACENTA, SIGNAL =   4; EXPRESSED IN FETAL LIVER, SIGNAL = 4.5; NT HIT: gi15303154, EVALUE 1.00e-114; EST_HUMAN HIT: BG675723.1, EVALUE 1.00e-115; SWISSPROT HIT: Q63413, EVALUE 5.00e-19
taccctcagaaggatgctcaaagccacagtccacgatggcccgcaggagctccggcttcagcagaaagtcccggaagccagagctgtggatggaaacgtaggatcccttgatgtctttcttagggggagctggtgtgctctcttgaggagcctggggctcttcctcttcatcgtaatccaaaagatcgttttccacatcctgttctgccatg

SEQ ID NO: 15573 - DNA, 402 bp, Homo sapiens
  MAP TO CHR1.1; EXPRESSED IN HELA, SIGNAL = 0.75; EXPRESSED IN BRAIN, SIGNAL = 0.64; EXPRESSED IN HEART, SIGNAL = 0.77; EXPRESSED IN BONE MARROW, SIGNAL = 0.43; EXPRESSED IN ADULT LIVER, SIGNAL = 0.48; EXPRESSED IN FETAL LIVER, SIGNAL = 0.55; EXPRESSED IN LUNG, SIGNAL = 0.58; SWISSPROT HIT: P52720, EVALUE 8.60e-01; NT HIT: AL163204.2, EVALUE 1.00e-04; EST_HUMAN HIT: AL600360.1, EVALUE 1.00e-11
caccccactgatccccacaccccacaaggattgcacagatgtgccacagtggccactctcagtcagagcatggtgcagggaactcatgcctccttgctctaaacccatcaattagaacttctcacgggaaacctgcttgggtagtgttgtggactccaataaagtctttggccttcgggtcctttgtgtcctttctcttgcttcctgcccactggttgagtgtgtgtgtcctggtcagctcccttcctgttggccctgtgaagggtgctcccctcttctctctgggacctgtaagtaataaactgcttgtgatattttatgtgttttgttgtgtcacctcttctgtttctcaccagattgacacacctgaacctaatttctttcctggtcagggcttgccta

SEQ ID NO: 15574 - DNA, 241 bp, Homo sapiens
  MAP TO CHR5.1; EXPRESSED IN BONE MARROW, SIGNAL = 4.7; EXPRESSED IN ADULT LIVER, SIGNAL = 4.8; EXPRESSED IN PLACENTA, SIGNAL = 3.7; EXPRESSED IN FETAL LIVER, SIGNAL = 3.4; EXPRESSED IN HEART, SIGNAL = 2.6; EXPRESSED IN LUNG, SIGNAL = 2.3; EXPRESSED IN BRAIN, SIGNAL = 4.5; EXPRESSED IN HELA, SIGNAL = 2.6; SWISSPROT HIT: P16471, EVALUE 1.00e-28; NT HIT: AF091865.1, EVALUE 1.00e-109; EST_HUMAN HIT: BG426437.1, EVALUE 0.00e+00
tttcttattcattcctaatacattacttattgcagagagacactcatgcatgaatgtccagactacataaccggtggccccaactcctgccactttggcaagcagtacacctccatgtggaggacatacatcatgatggtcaatgccactaaccagatgggaagcagtttctcggatgaactttatgtggacgtgacttacataggtaaggggaaggaaagtgggtgaggaatttcttact

SEQ ID NO: 15575 - DNA, 223 bp, Homo sapiens
  MAP TO CHR20.1; EXPRESSED IN HEART, SIGNAL =   4; EXPRESSED IN ADULT LIVER, SIGNAL = 2.1; EXPRESSED IN FETAL LIVER, SIGNAL = 3.2; EXPRESSED IN LUNG, SIGNAL = 4.4; EXPRESSED IN HELA, SIGNAL = 3.2; EXPRESSED IN BRAIN, SIGNAL = 3.3; EXPRESSED IN BONE MARROW, SIGNAL = 3.4; EXPRESSED IN PLACENTA, SIGNAL = 2.6; SWISSPROT HIT: P51531, EVALUE 2.80e-01; NT HIT: AJ310932.1, EVALUE 3.10e+00; EST_HUMAN HIT: AU141999.1, EVALUE 7.50e-02
ggcccagcccacctagtccttctacagagactcaggggtcggcctgcctgattaatgaggttccatggcaaccagggcctgggagggtggagggtggcagatggaaggacaggcagagggaggggatcagcagctggtccagctgccccgcccctgcagagaaggcctcccagccaggagggctgtccccagaggcctggccggccaggcctgcacctggcag

SEQ ID NO: 15576 - DNA, 134 bp, Homo sapiens
  MAP TO CHR7.1; EXPRESSED IN BRAIN, SIGNAL = 0.88; EXPRESSED IN BONE MARROW, SIGNAL = 0.99; EXPRESSED IN FETAL LIVER, SIGNAL = 0.63; EXPRESSED IN LUNG, SIGNAL = 0.58; SWISSPROT HIT: Q04735, EVALUE 3.00e-08; NT HIT: gi6912583, EVALUE 1.00e-47; EST_HUMAN HIT: BE937272.1, EVALUE 2.00e-47
gataaattgtttctctgtccattttgttttacagcttctcttttaaaaggactaaaacatgctaacatagtgctacttcatgacatcatccataccaaggagacgctgacacttgtgtttgaatatgtggtaag

SEQ ID NO: 15577 - DNA, 229 bp, Homo sapiens
  MAP TO CHR7.1; EXPRESSED IN BONE MARROW, SIGNAL = 3.8; EXPRESSED IN HEART, SIGNAL = 5.5; EXPRESSED IN ADULT LIVER, SIGNAL = 0.9; EXPRESSED IN FETAL LIVER, SIGNAL = 3.3; EXPRESSED IN LUNG, SIGNAL = 6.3; EXPRESSED IN HELA, SIGNAL = 3.3; EXPRESSED IN BRAIN, SIGNAL = 3.6; SWISSPROT HIT: P41658, EVALUE 3.40e+00
ttctcatagtatttatcacagccaacaataagcgatccttcccaggaggtgctctagctacctttctaatatgaattgccatctgttcctaataactcagcctctccacaccatcttgtatttttacttacactgttactcatcacgattagggtcaaagaagataggcttattaatattattcctctgagcagttgcagaggataatgaattctgtacccttgaagag

SEQ ID NO: 15578 - DNA, 178 bp, Homo sapiens
  MAP TO CHR1.1; EXPRESSED IN HELA, SIGNAL = 2.3; EXPRESSED IN BRAIN, SIGNAL = 1.7; EXPRESSED IN BONE MARROW, SIGNAL = 1.7; EXPRESSED IN HEART, SIGNAL = 2.6; EXPRESSED IN PLACENTA, SIGNAL = 2.2; EXPRESSED IN FETAL LIVER, SIGNAL = 2.3; EXPRESSED IN LUNG, SIGNAL = 2.5; EST_HUMAN HIT: BI753651.1, EVALUE 7.00e-91; SWISSPROT HIT: P25323, EVALUE 2.00e-09; NT HIT: gi15296356, EVALUE 5.00e-91
ccccacagtgtggctctgcagaatacatggcccctgaggtagtggaggtcttcacggaccaggccacattctacgacaagcgctgtgacctgtggagcctgggcgtggtcctctacatcatgctgagtggctacccacccttcgtgggtcactgcggggccgactgtggctgggaccg

SEQ ID NO: 15579 - DNA, 154 bp, Homo sapiens
  MAP TO CHR1.1; EXPRESSED IN PLACENTA, SIGNAL = 1.4; EXPRESSED IN FETAL LIVER, SIGNAL =   1; EXPRESSED IN LUNG, SIGNAL = 0.82; EXPRESSED IN HELA, SIGNAL = 1.3; EXPRESSED IN BRAIN, SIGNAL = 1.8; EXPRESSED IN HEART, SIGNAL =   1; EXPRESSED IN ADULT LIVER, SIGNAL = 2.2; EXPRESSED IN BONE MARROW, SIGNAL = 1.3; EST_HUMAN HIT: AA457415.1, EVALUE 5.00e-79; SWISSPROT HIT: Q9UBM4, EVALUE 1.00e-22; NT HIT: gi16160965, EVALUE 4.00e-79
tcctccatcgataatgatgccttccgactgctacatgccctccaggacctcatcctcccagagaaccagttggaagctctgcccgtgctgcccagtggcattgagttcctggatgtccgcctaaatcggctccagagctcggggatacagcctg

SEQ ID NO: 15580 - DNA, 224 bp, Homo sapiens
  MAP TO CHR1.1; EXPRESSED IN FETAL LIVER, SIGNAL = 1.7; EXPRESSED IN BRAIN, SIGNAL =   2; EXPRESSED IN HELA, SIGNAL = 2.1; EXPRESSED IN BONE MARROW, SIGNAL = 2.1; EXPRESSED IN ADULT LIVER, SIGNAL = 1.5; EXPRESSED IN LUNG, SIGNAL = 1.9; EXPRESSED IN PLACENTA, SIGNAL =   2; EXPRESSED IN HEART, SIGNAL = 2.2; EST_HUMAN HIT: N23469.1, EVALUE 1.20e+00; SWISSPROT HIT: P29402, EVALUE 5.60e+00; NT HIT: X68249.1, EVALUE 1.30e-02
agactctggggaagggattgttttggctggaatttgacaaggcacaggtggttttaccagctgcaagttctttagttcttgttggccgcccaccaactcttggtcttttcacagtcctttctgtggtggtggtggaggaggaggggcaggaagggacagtaagtccttgatgttgttgttccacatcagcagctgtctcaggttggcattgagtccggagtgtt

SEQ ID NO: 15581 - DNA, 255 bp, Homo sapiens
  MAP TO CHR17.1; EXPRESSED IN FETAL LIVER, SIGNAL = 0.33; EXPRESSED IN BRAIN, SIGNAL = 0.46; EXPRESSED IN ADULT LIVER, SIGNAL = 0.55; EXPRESSED IN BONE MARROW, SIGNAL = 0.52; NT HIT: gi13652329, EVALUE 0.00e+00; EST_HUMAN HIT: BG758764.1, EVALUE 4.00e-41; SWISSPROT HIT: Q12809, EVALUE 6.00e-17
cagttactgcgtgacttcccagacgagctgagagctgacattgctatgcacctgaatcgggagatcctgcagctgccgttgttcggggcagcgagcaggggctgcctgcgggccctatcgctgcacatcaagacctcgttctgcgctccgggcgagtacctgttgcgccgtggggatgccctgcaggcacattactatgtctgctccggctcgcttgaggtgctccgagacaacatggtgctggccatcctgggt

SEQ ID NO: 15582 - DNA, 235 bp, Homo sapiens
  MAP TO CHR19.1; EXPRESSED IN PLACENTA, SIGNAL = 2.5; EXPRESSED IN FETAL LIVER, SIGNAL =   2; EXPRESSED IN LUNG, SIGNAL = 3.7; EXPRESSED IN HELA, SIGNAL = 2.9; EXPRESSED IN BRAIN, SIGNAL = 1.8; EXPRESSED IN HEART, SIGNAL = 3.5; EXPRESSED IN BONE MARROW, SIGNAL = 1.9; NT HIT: gi14758681, EVALUE 1.40e-02; EST_HUMAN HIT: BF371577.1, EVALUE 3.10e-01
agggctcacctcggccgcggctgctgccctccttggcacgccggtactggttcagctctttggtgaagtcgtcatagtcctccttgcccatgtcctcctcctcgtcgccctcatattccccatactgctcattctcgtagtcctcgtacatgccataactcttgctgtccatcttggagtatgccttcttgggcaggggcgtggcatgcgatggggggtactgctggtgggactg

SEQ ID NO: 15583 - DNA, 240 bp, Homo sapiens
  MAP TO CHR1.1; EXPRESSED IN BONE MARROW, SIGNAL = 0.88; EXPRESSED IN LUNG, SIGNAL = 0.69; EXPRESSED IN HELA, SIGNAL = 0.87; EXPRESSED IN BRAIN, SIGNAL = 0.87; EXPRESSED IN HEART, SIGNAL =   1; SWISSPROT HIT: P11311, EVALUE 1.30e+00; NT HIT: AY048260.1, EVALUE 5.50e-02; EST_HUMAN HIT: BE901661.1, EVALUE 8.10e-02
gtttatctgctttctttgtacatgaagctcttcttccctgagagttccctgagggcagaggctgagcaggatacatctgggccccctatgcccagcccagggtctgggccacagcaggcatcgttcagtgctccctgaattgaagcattgatgtctgctgggggaagggccctttggtgagtgctacaaaggggcatctataagtcagcctctgccagatgtccagctgctttctctcct

SEQ ID NO: 15584 - DNA, 221 bp, Homo sapiens
  MAP TO CHR8.1; EXPRESSED IN BONE MARROW, SIGNAL = 7.4; EXPRESSED IN ADULT LIVER, SIGNAL = 9.6; EXPRESSED IN PLACENTA, SIGNAL = 5.2; EXPRESSED IN FETAL LIVER, SIGNAL = 6.1; EXPRESSED IN BRAIN, SIGNAL = 6.9; EXPRESSED IN HEART, SIGNAL =   6; EXPRESSED IN LUNG, SIGNAL =   5; EXPRESSED IN HELA, SIGNAL = 4.1; SWISSPROT HIT: Q60803, EVALUE 3.20e+00; NT HIT: gi14744803, EVALUE 1.00e-121; EST_HUMAN HIT: BE279786.1, EVALUE 1.00e-121
gcctcacctgtgtagccaatcttctcgaagctgagcaggctgaagatgctgttgtacagctgcatctccttgcggtggctctggtccatcccatccaggatctccatcagctcactgcctgtcttggtcgggtgggcgcacgcagcctcgtgcaccgtcagctcatggaaggggccgtgccatgggcagccgatgcgtttgtacttgcactgggttaccct

SEQ ID NO: 15585 - DNA, 215 bp, Homo sapiens
  MAP TO CHR6.1; EXPRESSED IN FETAL LIVER, SIGNAL = 4.2; EXPRESSED IN HELA, SIGNAL = 3.7; EXPRESSED IN BRAIN, SIGNAL = 3.6; EXPRESSED IN PLACENTA, SIGNAL = 3.1; EXPRESSED IN LUNG, SIGNAL = 4.1; EXPRESSED IN HEART, SIGNAL = 3.5; EXPRESSED IN BONE MARROW, SIGNAL = 3.5; EXPRESSED IN ADULT LIVER, SIGNAL = 3.9; EST_HUMAN HIT: AW889671.1, EVALUE 1.00e-77; SWISSPROT HIT: Q15776, EVALUE 6.00e-41; NT HIT: gi5454177, EVALUE 1.00e-118
ccacattctttacatttatagggtctttctccagtgtggattctctgatgttcaataaggcctgacttctgactgaaggccctcccacactcattgcatttgtagggtttctccccagtgtggctcctctgatgaccaataagatgtgagctccgcctgaaggttttcccacactcatcacactcatagggcttctccccagtgtggattctctg

SEQ ID NO: 15586 - DNA, 131 bp, Homo sapiens
  MAP TO CHR14.1; EXPRESSED IN BONE MARROW, SIGNAL = 0.99; EXPRESSED IN ADULT LIVER, SIGNAL = 0.63; EXPRESSED IN FETAL LIVER, SIGNAL = 0.9; EXPRESSED IN BRAIN, SIGNAL = 0.94; EXPRESSED IN HEART, SIGNAL = 0.58; EST_HUMAN HIT: BI014947.1, EVALUE 1.00e-36; SWISSPROT HIT: P98167, EVALUE 1.50e+00; NT HIT: gi13385891, EVALUE 4.00e-32
tggtactcaccaagctcagcagcaatttccttccgggccctcaaggctgctccactccagatggcatctagcacacggctgccatggcgactacaggccagagccacatattgtccctgtatggagacaag

SEQ ID NO: 15587 - DNA, 222 bp, Homo sapiens
  MAP TO CHR1.1; EXPRESSED IN LUNG, SIGNAL = 1.9; EXPRESSED IN BRAIN, SIGNAL = 2.4; EXPRESSED IN HEART, SIGNAL = 1.6; EXPRESSED IN ADULT LIVER, SIGNAL = 2.8; EXPRESSED IN BONE MARROW, SIGNAL = 2.7; EXPRESSED IN PLACENTA, SIGNAL = 1.8; EXPRESSED IN FETAL LIVER, SIGNAL = 2.2; EXPRESSED IN HELA, SIGNAL = 1.6; EST_HUMAN HIT: AI174897.1, EVALUE 1.00e-116; SWISSPROT HIT: P53865, EVALUE 2.80e-01
taactgaatctagacaaagtattttgaagctagagagtgagttagagaacaaagacgaaatacttagagacaaattttctttaatgaatgaaaaccgagaattaaaggtccgtgttgcagcacagaatgagcgactagatttatgtcaacaagaaattgaaagttcaagggtagaactaagaagtttggaaaagattatatcccagttgccagtaagtatgt

SEQ ID NO: 15588 - DNA, 243 bp, Homo sapiens
  MAP TO CHR7.1; EXPRESSED IN PLACENTA, SIGNAL = 1.6; EXPRESSED IN FETAL LIVER, SIGNAL = 1.4; EXPRESSED IN HELA, SIGNAL = 3.4; EXPRESSED IN LUNG, SIGNAL = 0.96; EXPRESSED IN BRAIN, SIGNAL = 1.7; EXPRESSED IN HEART, SIGNAL = 0.87; EXPRESSED IN ADULT LIVER, SIGNAL = 1.3; NT HIT: L35936.1, EVALUE 0.00e+00; EST_HUMAN HIT: BI226620.1, EVALUE 0.00e+00; SWISSPROT HIT: P08243, EVALUE 1.00e-46
catgtgtggcatttgggcgctgtttggcagtgatgattgcctttctgttcagtgtctgagtgctatgaagattgcacacagaggtccagatgcattccgttttgagaatgtcaatggatacaccaactgctgctttggatttcaccggttggcggtagttgacccgctgtttggaatgcagccaattcgagtgaagaaatatccgtatttgtggctctgttacaatggtgaaatctacaacca

SEQ ID NO: 15589 - DNA, 127 bp, Homo sapiens
  MAP TO CHR17.1; EXPRESSED IN HELA, SIGNAL = 3.7; EXPRESSED IN BRAIN, SIGNAL = 4.2; EXPRESSED IN HEART, SIGNAL = 2.1; EXPRESSED IN ADULT LIVER, SIGNAL = 5.6; EXPRESSED IN PLACENTA, SIGNAL = 3.8; EXPRESSED IN FETAL LIVER, SIGNAL = 3.7; EXPRESSED IN LUNG, SIGNAL =   2; SWISSPROT HIT: Q12263, EVALUE 3.00e-11; NT HIT: gi15302254, EVALUE 2.00e-61; EST_HUMAN HIT: BF529174.1, EVALUE 3.00e-61
cagccacagagacctaaagcccgagaacctgcttttggatgagaaaaacaacatccgcattgcagacttcggcatggcgtccctgcaggtgggggacagcctcctggagaccagctgcgggtgagtg

SEQ ID NO: 15590 - DNA, 201 bp, Homo sapiens
  MAP TO CHRX.1; EXPRESSED IN FETAL LIVER, SIGNAL = 3.2; EXPRESSED IN HELA, SIGNAL =   4; EXPRESSED IN BRAIN, SIGNAL = 4.2; EXPRESSED IN BONE MARROW, SIGNAL = 3.3; EXPRESSED IN ADULT LIVER, SIGNAL = 5.1; EXPRESSED IN PLACENTA, SIGNAL = 5.3; EXPRESSED IN LUNG, SIGNAL = 5.4; EXPRESSED IN HEART, SIGNAL =   4; SWISSPROT HIT: Q15904, EVALUE 6.00e-21; NT HIT: L44140.1, EVALUE 1.00e-109; EST_HUMAN HIT: BG771775.1, EVALUE 1.00e-106
cagaatgccctggacctggccccctcctcactggtgcttcctgccgtcgactggtatgcagtcagcactctgaccacttacctgcaggagaagctcggggccagccccttgcatgtggacctggccaccctgcgggagctgaagctcaatgccagcctccctgctctgctgctcattcgcctgccctacacagccaggtac

SEQ ID NO: 15591 - DNA, 212 bp, Homo sapiens
  MAP TO CHR22.1; EXPRESSED IN FETAL LIVER, SIGNAL = 0.92; EXPRESSED IN LUNG, SIGNAL = 0.74; EXPRESSED IN HELA, SIGNAL = 0.91; EXPRESSED IN BRAIN, SIGNAL = 0.79; EXPRESSED IN BONE MARROW, SIGNAL = 0.88; EXPRESSED IN HEART, SIGNAL = 1.1; EXPRESSED IN ADULT LIVER, SIGNAL = 1.3; SWISSPROT HIT: Q9Z0J4, EVALUE 2.80e+00
atgttaagtgcccttggcctcttgggactgcctggtgccagctgctggaaatgcctgggaggagtgctaggaccgtggcctcagcactcccattcatgctgtgaggaagcagcttggcctgctgccggctggcctcagctgccctgggaggcttagcacatggacgctggctggcagaggccaaggctccttgccacccagagacctgccag

SEQ ID NO: 15592 - DNA, 165 bp, Homo sapiens
  MAP TO CHR15.1; EXPRESSED IN HELA, SIGNAL = 0.43; EXPRESSED IN BRAIN, SIGNAL = 0.44; EXPRESSED IN LUNG, SIGNAL = 0.69; EXPRESSED IN HEART, SIGNAL = 0.56; EXPRESSED IN BONE MARROW, SIGNAL = 0.39; NT HIT: AL163301.2, EVALUE 1.40e-01
tgggatttctggaaccatatatttcatacacctattaggaaattcagaggactggcttatgttttgtaatcaccacaataaggaaaagggtaaagttcacaggcatacagagctgagcaacctccacagaataggtgggtggcaggtgcctcactacacacacac

SEQ ID NO: 15593 - DNA, 174 bp, Homo sapiens
  MAP TO CHR10.1; EXPRESSED IN LUNG, SIGNAL = 0.65; EXPRESSED IN BRAIN, SIGNAL = 0.8; EXPRESSED IN HEART, SIGNAL = 0.63; EXPRESSED IN ADULT LIVER, SIGNAL =   1; EXPRESSED IN BONE MARROW, SIGNAL = 0.77; SWISSPROT HIT: P13674, EVALUE 1.00e-26; NT HIT: U14612.1, EVALUE 3.00e-89; EST_HUMAN HIT: AU117496.1, EVALUE 1.00e-86
cggagacagaaaaaactcttttgccgctaccatgatggaaaccgtaatcctaaatttattctggctccagctaaacaggaggatgaatgggacaagcctcgtattattcgcttccatgatattatttctgatgcagaaattgaaatcgtcaaagacctacaaaaccaagggtaa

SEQ ID NO: 15594 - DNA, 138 bp, Homo sapiens
  MAP TO CHR19.1; EXPRESSED IN HELA, SIGNAL = 0.83; EXPRESSED IN BRAIN, SIGNAL = 0.6; EXPRESSED IN HEART, SIGNAL = 0.98; EXPRESSED IN BONE MARROW, SIGNAL = 0.6; SWISSPROT HIT: Q9ZSR8, EVALUE 5.20e-01; NT HIT: gi14786907, EVALUE 3.00e-67; EST_HUMAN HIT: BG479422.1, EVALUE 4.00e-67
gcaggcaggcactgtggccccaggaggggtgagcggcccttccccagcccagctgggagccccagccctcggtgggcagcagtcagtctccaataagcttctggcctggagcggggtcctggagtggcaagaggtgag

SEQ ID NO: 15595 - DNA, 343 bp, Homo sapiens
  MAP TO CHR1.1; EXPRESSED IN ADULT LIVER, SIGNAL = 0.9; EXPRESSED IN BONE MARROW, SIGNAL = 0.74; EXPRESSED IN FETAL LIVER, SIGNAL = 0.56; EXPRESSED IN BRAIN, SIGNAL = 0.75; EXPRESSED IN HEART, SIGNAL = 0.63; EST_HUMAN HIT: AL563767.1, EVALUE 0.00e+00; SWISSPROT HIT: P03448, EVALUE 3.40e+00; NT HIT: AF039104.1, EVALUE 3.20e-01
agtctcctacagcaggctccattcctcagactggaatctgtgtactgtatttgggatcctcctgggctatcctgttccctatacctttcacctgaaccagggagatgacaactgcttagctctgactccactacgagtattcactgcccggatctcatggttgctaggtcaacccccaatcctgctctattcttttagtgtcccagagagtttgttcccaggcctgagggacattctaaacacctgggagaaggacctcagaacccgatttaggactcagaatgactttgctgatctcagcatctcctctgagatagtcacactgccggctgtggccctctga

SEQ ID NO: 15596 - DNA, 336 bp, Homo sapiens
  MAP TO CHR17.1; EXPRESSED IN BONE MARROW, SIGNAL =  11; EXPRESSED IN ADULT LIVER, SIGNAL = 6.9; EXPRESSED IN HELA, SIGNAL = 7.2; EXPRESSED IN PLACENTA, SIGNAL = 6.7; EXPRESSED IN LUNG, SIGNAL =  12; EXPRESSED IN FETAL LIVER, SIGNAL = 9.8; EXPRESSED IN BRAIN, SIGNAL = 9.2; EXPRESSED IN HEART, SIGNAL =  11; NT HIT: gi9910207, EVALUE 0.00e+00; EST_HUMAN HIT: BE256708.1, EVALUE 0.00e+00; SWISSPROT HIT: Q38953, EVALUE 3.00e-13
aaacagatgtcaatgccaatcgcatcatcccgaggagacgtggagagtgtccgccgctgcctggctcacagcctcttcatgagcaccgccgagcttcagccagatggcacctatgccaccacggacacccaccagccagtggccatccacccgtcgtctgtcctcttccactgcaagccggcctgcgtcgtgtacactgagctgctctacaccaacaagtgctacatgcgggacctctgcgtcatagatgcacagtggctgtacgaggctgcccctgagtactttaggaggaagctgagaaccgccagaaactgagccgccccaggatgccgccag

SEQ ID NO: 15597 - DNA, 253 bp, Homo sapiens
  MAP TO CHR15.1; EXPRESSED IN FETAL LIVER, SIGNAL = 0.75; EXPRESSED IN LUNG, SIGNAL = 3.3; EXPRESSED IN HELA, SIGNAL = 0.69; EXPRESSED IN BRAIN, SIGNAL = 1.9; EXPRESSED IN HEART, SIGNAL =  11; EXPRESSED IN ADULT LIVER, SIGNAL = 1.8; EXPRESSED IN BONE MARROW, SIGNAL = 1.4; SWISSPROT HIT: P04406, EVALUE 3.00e-37; NT HIT: gi14761214, EVALUE 9.00e-69; EST_HUMAN HIT: BF337557.1, EVALUE 1.00e-68
tggcaaagtggatattgttgccatcaatgatccctttgttgacctcaactacatggtctacatgttctagtatgattccacccatagcaagttccacagcatcatcaagcctgagaatgggaaacttgtcatcaatggaaatgccatcatcatcttccaagagagagatcccaccaaaatcaaatggggtgatgctggcactaattacatcatggagtccactggtgtcttcactaccatgaagaaggctggg

SEQ ID NO: 15598 - DNA, 493 bp, Homo sapiens
  MAP TO CHR5.1; EXPRESSED IN HEART, SIGNAL = 2.7; EXPRESSED IN PLACENTA, SIGNAL = 3.2; EXPRESSED IN FETAL LIVER, SIGNAL = 3.1; EXPRESSED IN BONE MARROW, SIGNAL = 2.7; EXPRESSED IN ADULT LIVER, SIGNAL = 4.1; EXPRESSED IN LUNG, SIGNAL = 1.9; EXPRESSED IN BRAIN, SIGNAL = 3.2; EXPRESSED IN HELA, SIGNAL = 3.2; SWISSPROT HIT: Q9UN66, EVALUE 2.00e-46; NT HIT: gi14724405, EVALUE 0.00e+00; EST_HUMAN HIT: BI036374.1, EVALUE 0.00e+00
ggtgtgctgtatgctctgtgctcctttgactatgagcagtttagagatttgcaaatgcaggtgacggcaagtgacagtggaagcccaccacttagcagcaatgtgtcattgagactgtttgttttggaccagaatgacaatgccccagaaatcctgtaccctgccctccccactgatggttctactggtgtggagctggcaccccgctctgcagagcctggctacctggtgaccaaggtggtggcagtggacagagactcaggccagaatgcttggctctcctaccgcctattcaaggccagtgagccagggctcttctcggtggggctgcacacaggtgaagtgcgcacagctcgggccctgctagatagagatgcgctcaaacagagccttgtggtggctgtacaggaccatggccagccccctctctcggccactgtcacgctcacagtagccatagctgacagcatcccagacatcctggctgacctgg

SEQ ID NO: 15599 - DNA, 154 bp, Homo sapiens
  MAP TO CHR2.1; EXPRESSED IN HELA, SIGNAL = 3.3; EXPRESSED IN BRAIN, SIGNAL = 2.9; EXPRESSED IN PLACENTA, SIGNAL = 3.4; EXPRESSED IN FETAL LIVER, SIGNAL = 2.7; EXPRESSED IN LUNG, SIGNAL = 1.7; EXPRESSED IN HEART, SIGNAL = 1.9; EXPRESSED IN BONE MARROW, SIGNAL = 3.1; EXPRESSED IN ADULT LIVER, SIGNAL = 3.6; SWISSPROT HIT: P26550, EVALUE 1.00e-01; NT HIT: gi8923935, EVALUE 6.00e-78; EST_HUMAN HIT: AI580110.1, EVALUE 8.00e-78
ccacacctggttgtccttcttgatgacactctgggcggccagggtattggtcttgaggctccgggccagtcctagcatctcttccgccagcttttcctggaggttctgatgtcgctgcaggacgaggtctagctcagctgccgactgcttctca

SEQ ID NO: 15600 - DNA, 193 bp, Homo sapiens
  MAP TO CHR17.1; EXPRESSED IN FETAL LIVER, SIGNAL = 0.69; EXPRESSED IN LUNG, SIGNAL = 0.83; EXPRESSED IN HELA, SIGNAL = 0.43; EXPRESSED IN BRAIN, SIGNAL = 0.54; EXPRESSED IN BONE MARROW, SIGNAL = 0.52; EXPRESSED IN HEART, SIGNAL = 0.87; SWISSPROT HIT: P53193, EVALUE 3.80e-01; NT HIT: AB037822.1, EVALUE 2.00e-96; EST_HUMAN HIT: BI253708.1, EVALUE 3.00e-96
acttgttgactaaccgaattcgagcagccacatcacggggcgtgtccacttcatctggaaacatctcttccagtctttcttgtttatatttctccaacatttttgcctcagcttcttcatctactttcttatcatacagatcatcatgcacagactccccaatagtcatagtttcatattcttcctcttcttc

SEQ ID NO: 15601 - DNA, 425 bp, Homo sapiens
  MAP TO CHR17.1; EXPRESSED IN HEART, SIGNAL = 1.6; EXPRESSED IN ADULT LIVER, SIGNAL = 1.5; EXPRESSED IN FETAL LIVER, SIGNAL = 1.4; EXPRESSED IN LUNG, SIGNAL = 1.8; EXPRESSED IN BRAIN, SIGNAL = 1.4; EXPRESSED IN HELA, SIGNAL = 2.6; EXPRESSED IN BONE MARROW, SIGNAL = 1.2; EXPRESSED IN PLACENTA, SIGNAL = 1.4; SWISSPROT HIT: Q14258, EVALUE 4.00e-85; NT HIT: gi15208652, EVALUE 0.00e+00; EST_HUMAN HIT: AW499619.1, EVALUE 1.00e-48
actaccggccgcatccccagaggttcacatactgctctcaggtgctgggcctgcactgctacaagaaggggatccactactgggaggtggagctgcagaagaacaacttctgtggggtaggcatctgctacggaagcatgaaccggcagggcccagaaagcaggctcggccgcaacagcgcctcctggtgcgtggagtggttcaacaccaagatctctgcctggcacaataacgtggagaaaaccctgccctccaccaaggccacgcgggtgggcgtgcttctcaactgtgaccacggctttgtcatcttcttcgctgttgccgacaaggtccacctgatgtataagttcagggtggactttactgaggctttgtacccggctttctgggtattttctgctggtgccacactctccatctgctcc

SEQ ID NO: 15602 - DNA, 160 bp, Homo sapiens
  MAP TO CHR17.1; EXPRESSED IN LUNG, SIGNAL =   1; EXPRESSED IN HELA, SIGNAL = 1.2; EXPRESSED IN BRAIN, SIGNAL = 0.93; EXPRESSED IN ADULT LIVER, SIGNAL = 1.3; EXPRESSED IN BONE MARROW, SIGNAL =   1; SWISSPROT HIT: P34703, EVALUE 4.00e-09; NT HIT: D79984.1, EVALUE 3.00e-67; EST_HUMAN HIT: AL135310.1, EVALUE 5.00e-67
tccagctctctcccccagatcctgaagcagaacaacacccggctcgagagccggacccagctggtcaccatgtgccacatgggtcccaaagtcttcatgaattgtgctggcttcctcaagatcgacacggcctccctgggggacaggtgatgccctctgc

SEQ ID NO: 15603 - DNA, 205 bp, Homo sapiens
  MAP TO CHR11.1; EXPRESSED IN BRAIN, SIGNAL = 0.71; EXPRESSED IN HEART, SIGNAL =   1; EXPRESSED IN BONE MARROW, SIGNAL = 0.66; EXPRESSED IN LUNG, SIGNAL = 1.1; EXPRESSED IN FETAL LIVER, SIGNAL = 0.48; EST_HUMAN HIT: BI755888.1, EVALUE 2.00e-94; SWISSPROT HIT: gi461671, EVALUE 1.30e-02; NT HIT: AF091493.1, EVALUE 1.00e-102
aaggctggcgtgccagggggtgggacatgccaatcactggctgtgcctctcccgctgccagcacagggcgcagctccccctgggagccaggtgtttgggtccctggagacgccgcaggcccccagggaggcagtggggctgaggaccctacagacccctcttcagccccgtggtgagtacatttgggagggcttgggaggggctg

SEQ ID NO: 15604 - DNA, 198 bp, Homo sapiens
  MAP TO CHR5.1; EXPRESSED IN LUNG, SIGNAL = 1.2; EXPRESSED IN HELA, SIGNAL = 2.5; EXPRESSED IN BRAIN, SIGNAL = 1.6; EXPRESSED IN HEART, SIGNAL = 1.1; EXPRESSED IN ADULT LIVER, SIGNAL = 1.2; EXPRESSED IN BONE MARROW, SIGNAL = 1.8; EXPRESSED IN PLACENTA, SIGNAL = 1.6; EXPRESSED IN FETAL LIVER, SIGNAL = 1.6; NT HIT: gi14728178, EVALUE 1.00e-97; EST_HUMAN HIT: BG773808.1, EVALUE 2.00e-97; SWISSPROT HIT: O14727, EVALUE 5.00e-03
gttgtacctggctgtcagcagcagctttttggctggatccagagccatgtctgcgatgtactcttcatgttgcctcatatccattaaggggccctccttccgctggtcccagagacggataccacctgtgtcatccccagtggccagaacattctcatccaccagcagaagactgttgatgggggcactagagacaca

SEQ ID NO: 15605 - DNA, 302 bp, Homo sapiens
  MAP TO CHR14.1; EXPRESSED IN ADULT LIVER, SIGNAL = 0.48; EXPRESSED IN BONE MARROW, SIGNAL = 0.53; EXPRESSED IN FETAL LIVER, SIGNAL = 0.62; EXPRESSED IN LUNG, SIGNAL = 1.1; EXPRESSED IN BRAIN, SIGNAL = 0.53; EXPRESSED IN HEART, SIGNAL = 0.79; NT HIT: gi14750850, EVALUE 0.00e+00; EST_HUMAN HIT: BF663442.1, EVALUE 0.00e+00; SWISSPROT HIT: Q9DBU0, EVALUE 3.00e-38
tgcagtgcctttcttcctgacgtggagtgtggtgaactcagtgcattgggccaatggttcgacacaggctctgccagccacaaccatcctgctgcttctgacggtttggctgctggtgggctttcccctcactgtcattggaggcatctttgggaagaacaacgccagcccctttgatgcaccctgtcgcaccaagaacatcgcccgggagattccaccccagccctggtacaagtctactgtcatccacatgactgttggaggcttcctgcctttcaggtatcctccctttattccatggc

SEQ ID NO: 15606 - DNA, 216 bp, Homo sapiens
  MAP TO CHR17.1; EXPRESSED IN HELA, SIGNAL = 2.2; EXPRESSED IN HEART, SIGNAL = 1.9; EXPRESSED IN PLACENTA, SIGNAL = 1.9; EXPRESSED IN FETAL LIVER, SIGNAL = 2.7; EXPRESSED IN BRAIN, SIGNAL = 2.3; EXPRESSED IN LUNG, SIGNAL = 1.6; EXPRESSED IN BONE MARROW, SIGNAL = 2.7; EXPRESSED IN ADULT LIVER, SIGNAL = 2.7; NT HIT: AJ242525.1, EVALUE 8.00e-04; EST_HUMAN HIT: AI345388.1, EVALUE 1.00e-113; SWISSPROT HIT: Q39575, EVALUE 2.00e-12
ctctatggccacatacctttggtggctctgtggtcatcttgatgctgacctgcaagattgagatagggaagtctgggtgggggatggagctgagccagaggcggaaggatggatgaggatcctccacctgcagctgctccaccagcttgtccagattaggcatccaagacagtgacaggtggcagtttgccaggaacacccagtgtcctgcaagga

SEQ ID NO: 15607 - DNA, 208 bp, Homo sapiens
  MAP TO CHR13.1; EXPRESSED IN LUNG, SIGNAL = 0.97; EXPRESSED IN FETAL LIVER, SIGNAL = 0.61; EXPRESSED IN HELA, SIGNAL = 1.1; EXPRESSED IN BRAIN, SIGNAL = 0.68; EXPRESSED IN HEART, SIGNAL = 0.61; EXPRESSED IN BONE MARROW, SIGNAL = 0.63; SWISSPROT HIT: Q13495, EVALUE 1.90e+00; NT HIT: gi4557388, EVALUE 2.90e+00; EST_HUMAN HIT: BF203952.1, EVALUE 1.00e-113
aggagataaaaacagttcgaagttgctggaacatcaagcgcaaggcagggagcggtgggagttcaggctggagcggtggggcctagcaaggtggccacaggcacaagcccgcgtaattcccagaggttgggtaccggagggccgcttacgcaattcgcaagtgaacgaatttgggcgcccatggcgaggctctgtcagtgacggtcgg

SEQ ID NO: 15608 - DNA, 237 bp, Homo sapiens
  MAP TO CHR11.1; EXPRESSED IN PLACENTA, SIGNAL = 2.2; EXPRESSED IN FETAL LIVER, SIGNAL = 2.2; EXPRESSED IN BRAIN, SIGNAL = 2.2; EXPRESSED IN HELA, SIGNAL = 1.8; EXPRESSED IN LUNG, SIGNAL = 2.4; EXPRESSED IN HEART, SIGNAL = 2.6; EXPRESSED IN ADULT LIVER, SIGNAL = 2.8; EXPRESSED IN BONE MARROW, SIGNAL = 2.2; SWISSPROT HIT: Q57145, EVALUE 1.70e+00; NT HIT: AF303378.1, EVALUE 3.00e-87; EST_HUMAN HIT: BI458262.1, EVALUE 4.00e-87
taggtattggttttcgctttgcttcatacatcaataatgatatggtgctgcagaaggagcctgctggggcagtgatatggggcttcggtacacctggagccacagtgaccgtgaccctgcgccaaggtcaggaaaccatcatgaagaaagtgaccagtgtgaaaggtaaggcagcccatcttccgttcagctattgccctcttctgccacctgctggattatctgaaaatgaatgct

SEQ ID NO: 15609 - DNA, 275 bp, Homo sapiens
  MAP TO AC013470.9; EXPRESSED IN ADULT LIVER, SIGNAL = 1.2; EXPRESSED IN BONE MARROW, SIGNAL = 1.1; EXPRESSED IN FETAL LIVER, SIGNAL = 0.87; EXPRESSED IN BRAIN, SIGNAL = 0.92; EXPRESSED IN HEART, SIGNAL = 1.1; SWISSPROT HIT: P17867, EVALUE 5.10e+00; NT HIT: gi14746296, EVALUE 0.00e+00
ctggaagaacttacttattttttcccagaggaccatgctgaggatgtacagcaagagtttttcccctcttggcccactccctctggcctcaccgagtatagcaccttgaccctctgtcaggagactctagccaactccagcataggaaggctgtgtcttgcttttcttggcaagagattagacagtgttatagagatgtgtgtgaaggatgttctgttaaaagatgatcttagttgggcagaagcaggtgtggcccttttagaaaatgaatgtga

SEQ ID NO: 15610 - DNA, 189 bp, Homo sapiens
  MAP TO CHR2.1; EXPRESSED IN LUNG, SIGNAL = 0.67; EXPRESSED IN HELA, SIGNAL =   2; EXPRESSED IN BRAIN, SIGNAL = 1.8; EXPRESSED IN BONE MARROW, SIGNAL = 1.7; EXPRESSED IN ADULT LIVER, SIGNAL = 1.2; EXPRESSED IN PLACENTA, SIGNAL = 1.7; NT HIT: AF210835.1, EVALUE 1.00e-102
aggccttttgcccccagtgaaattggcataagtccttttgttttccccttgctgtcagtccagaagggttctcaacaatcttgtcttgttagctgctatttgaaaacattagcatctctgctatgtggctagtagcattctggcaaagagctattttacagaaatgacttctagatgactcacgaagcc

SEQ ID NO: 15611 - DNA, 210 bp, Homo sapiens
  MAP TO CHR17.1; EXPRESSED IN BRAIN, SIGNAL = 0.78; EXPRESSED IN BONE MARROW, SIGNAL =   1; EXPRESSED IN HEART, SIGNAL = 0.69; EXPRESSED IN LUNG, SIGNAL = 0.82; EXPRESSED IN HELA, SIGNAL = 1.2; NT HIT: gi14773797, EVALUE 1.00e-109; SWISSPROT HIT: P23477, EVALUE 2.40e+00; EST_HUMAN HIT: AA146812.1, EVALUE 1.00e-109
taattactgtaatggttttttctcttagccattcaggatccttttcatcttcactatctacttccatttcttgtggacggagaggtaagcaggtatcactatggaaatacagacgattgtggccactactatatgttctttgctgttctacttccccatcttcagattcaagaaattcagacatgcttgcttttgttcgttttggcctaa

SEQ ID NO: 15612 - DNA, 204 bp, Homo sapiens
  MAP TO CHR7.1; EXPRESSED IN FETAL LIVER, SIGNAL = 0.64; EXPRESSED IN BRAIN, SIGNAL = 0.69; EXPRESSED IN BONE MARROW, SIGNAL = 0.75; EXPRESSED IN ADULT LIVER, SIGNAL = 1.2; EXPRESSED IN LUNG, SIGNAL = 0.74; NT HIT: gi13640193, EVALUE 2.00e-93; SWISSPROT HIT: Q09461, EVALUE 5.00e-13; EST_HUMAN HIT: AL574758.1, EVALUE 3.00e-93
tgtttgtattagttggtgcagtaactgtgataagtccactagaattgattagaaccaagatgcagtccaagaagttttcttacgtggaactgcatcgatttgtcagcaagaaagtatctgaagatggttggatttccctttggaggggctgggctcctactgttcttagagatgtacctttctcaggtaggatttatcttattt

SEQ ID NO: 15613 - DNA, 118 bp, Homo sapiens
  MAP TO CHR7.1; EXPRESSED IN BONE MARROW, SIGNAL = 0.83; EXPRESSED IN ADULT LIVER, SIGNAL = 1.2; EXPRESSED IN FETAL LIVER, SIGNAL = 0.65; EXPRESSED IN LUNG, SIGNAL =   1; EXPRESSED IN HELA, SIGNAL =   1; EXPRESSED IN BRAIN, SIGNAL = 0.91; EXPRESSED IN HEART, SIGNAL = 0.92; EST_HUMAN HIT: BI828524.1, EVALUE 5.00e-60; NT HIT: gi14756039, EVALUE 9.80e-02; SWISSPROT HIT: P78032, EVALUE 4.60e+00
ctgcttcggcccacactccggtagcccccaggtgttagagaaaactgcagtaataaagacacccctatccccatggcagagctcagacctctgactgcagagaggccagccttacctg

SEQ ID NO: 15614 - DNA, 162 bp, Homo sapiens
  MAP TO CHR6.1; EXPRESSED IN BRAIN, SIGNAL =   2; EXPRESSED IN HEART, SIGNAL = 0.86; EXPRESSED IN BONE MARROW, SIGNAL = 1.6; EXPRESSED IN ADULT LIVER, SIGNAL =   5; EXPRESSED IN PLACENTA, SIGNAL = 1.5; EXPRESSED IN FETAL LIVER, SIGNAL = 2.8; EXPRESSED IN HELA, SIGNAL = 1.6; EST_HUMAN HIT: AW378446.1, EVALUE 3.30e+00; SWISSPROT HIT: P53842, EVALUE 4.40e+00
tcagaaacctgatattgtttgtagttgctgagaaactaatattgagcaatgaaaggtttctcccttcccctgaaaaaaagaaacagaactctttctaatgtaaaaatttcggtgtttcatttttcattttgtgtatttaagcagagcacctgcaggaaacaa

SEQ ID NO: 15615 - DNA, 125 bp, Homo sapiens
  MAP TO CHR19.1; EXPRESSED IN HEART, SIGNAL = 3.1; EXPRESSED IN ADULT LIVER, SIGNAL = 4.3; EXPRESSED IN PLACENTA, SIGNAL = 3.9; EXPRESSED IN FETAL LIVER, SIGNAL = 2.8; EXPRESSED IN LUNG, SIGNAL =   3; EXPRESSED IN HELA, SIGNAL = 3.6; EXPRESSED IN BRAIN, SIGNAL = 2.9; SWISSPROT HIT: P14314, EVALUE 2.00e-07; NT HIT: U50321.1, EVALUE 2.00e-64; EST_HUMAN HIT: BI226555.1, EVALUE 3.00e-61
ttgagctacaggctgggaagaagtctctggaagaccaggtggagatgctgcggacagtgaaggaggaagctgagaagccagagagagaggccaaagagcagcaccagaagctgtgggaaggtatg

SEQ ID NO: 15616 - DNA, 250 bp, Homo sapiens
  MAP TO CHR11.1; EXPRESSED IN HELA, SIGNAL = 0.77; EXPRESSED IN BRAIN, SIGNAL = 0.85; EXPRESSED IN HEART, SIGNAL = 0.67; EXPRESSED IN ADULT LIVER, SIGNAL = 0.93; EXPRESSED IN BONE MARROW, SIGNAL = 0.9; EXPRESSED IN FETAL LIVER, SIGNAL = 0.64; SWISSPROT HIT: P34985, EVALUE 1.00e-23; NT HIT: AF282280.1, EVALUE 2.00e-07
catttctgaatgttatgtgctgacgtcaatggcgtatgatcgctgtggccatctgtaacccacttctgtatcacattgccatgtctcctacagtgtgctccagccttatgtttggttcctatttgatggccttttctggtgccatggcccacactggatgcatgctgagactgactttctgtgatgcgaacaccatcgatcactacttctgtgacatcctccctctgctccagctctcctgcaccagcac

SEQ ID NO: 15617 - DNA, 437 bp, Homo sapiens
  MAP TO CHR19.1; EXPRESSED IN LUNG, SIGNAL = 0.93; EXPRESSED IN HELA, SIGNAL = 1.1; EXPRESSED IN BRAIN, SIGNAL = 0.91; EXPRESSED IN HEART, SIGNAL = 0.75; EXPRESSED IN ADULT LIVER, SIGNAL = 0.77; EXPRESSED IN BONE MARROW, SIGNAL = 0.79; SWISSPROT HIT: Q01656, EVALUE 1.00e-23; EST_HUMAN HIT: BE888501.1, EVALUE 2.00e-03; NT HIT: gi15304769, EVALUE 0.00e+00
tggaagccgccgcccgtgatccccaaggaggagagccgctcaggcgccaacaagtacctgtactttgtgtgcaacgagccgggcctgccatggacgcggctgccccacgtcactccagcccagatcgtgaacgcccgaaagatcaagaagttcttcacaggctacctggacacgccagtcgtcagctacccacccttcccgggcaacgaggccaactacctgcgggcccagatagcccgcatctcggccgccacgcaggtcagcccgctgggcttctaccagtttagtgaggaggagggcgacgaggaggaggaaggtggtgctgggcgcgactcctacgaggagaacccggacttcgagggcatccccgtgctggagctggtcgactccatggccaactgggtgcatcacacacagcacatcctgccgcaggtgag

SEQ ID NO: 15618 - DNA, 334 bp, Homo sapiens
  MAP TO CHR17.1; EXPRESSED IN PLACENTA, SIGNAL =  10; EXPRESSED IN FETAL LIVER, SIGNAL = 9.6; EXPRESSED IN LUNG, SIGNAL = 4.5; EXPRESSED IN HELA, SIGNAL = 9.1; EXPRESSED IN BRAIN, SIGNAL = 9.6; EXPRESSED IN HEART, SIGNAL = 4.8; EXPRESSED IN ADULT LIVER, SIGNAL =  10; EXPRESSED IN BONE MARROW, SIGNAL = 8.8; SWISSPROT HIT: O15353, EVALUE 4.00e-26; EST_HUMAN HIT: BG481596.1, EVALUE 2.90e-02; NT HIT: Y11746.1, EVALUE 0.00e+00
ctaggaaacctgtgggaacagttgaaggatgatagcttggccctcgaccccctggtactggtgacctcatccccgacatcatcttcgatgccaccaccccagccaccacctcactgcttcccccctgggccctgtctgacagagacaggcagtggggcaggtgacttggcagccccgggcagtggtggctccggggcactgggtgacctgcacctcaccaccctctactctgcctttatggagctggagcccacgccccccacggcccctgcaggcccctctgtgtacctcagccccagctccaagcccgtggccctggcatgagctgtgccca

SEQ ID NO: 15619 - DNA, 182 bp, Homo sapiens
  MAP TO CHR22.1; EXPRESSED IN HEART, SIGNAL =   1; EXPRESSED IN PLACENTA, SIGNAL = 2.4; EXPRESSED IN FETAL LIVER, SIGNAL = 0.94; EXPRESSED IN LUNG, SIGNAL = 1.3; EXPRESSED IN BRAIN, SIGNAL = 1.1; NT HIT: X00560.1, EVALUE 3.00e-98; SWISSPROT HIT: P01128, EVALUE 9.00e-32; EST_HUMAN HIT: BG008010.1, EVALUE 8.00e-97
atcgccgagtgcaagacgcgcaccgaggtgttcgagatctcccggcgcctcatagaccgcaccaacgccaacttcctggtgtggccgccctgtgtggaggtgcagcgctgctccggctgctgcaacaaccgcaacgtgcagtgccgccccacccaggtgcagctgcgacctgtccaggtgcg

SEQ ID NO: 15620 - DNA, 187 bp, Homo sapiens
  MAP TO CHR18.1; EXPRESSED IN FETAL LIVER, SIGNAL = 2.8; EXPRESSED IN LUNG, SIGNAL = 1.7; EXPRESSED IN HELA, SIGNAL = 4.5; EXPRESSED IN BRAIN, SIGNAL = 2.1; EXPRESSED IN HEART, SIGNAL = 1.2; EXPRESSED IN BONE MARROW, SIGNAL = 2.9; EXPRESSED IN ADULT LIVER, SIGNAL = 1.5; EST_HUMAN HIT: AV712250.1, EVALUE 5.00e-89; NT HIT: gi14760146, EVALUE 1.00e-101; SWISSPROT HIT: Q15357, EVALUE 6.00e-29
caaggcttctaacatgatgatactatttcctcgtattaccaccattccaatattgttctattgaccactagtcgccatctccacacattcgtctatcacaaggttcataaaaggatcaaatccccgcaatattccttgcacatgtctgccaccatttaatttcaatgataacttcttgtccataaat

SEQ ID NO: 15621 - DNA, 198 bp, Homo sapiens
  MAP TO CHR19.1; EXPRESSED IN BONE MARROW, SIGNAL = 2.6; EXPRESSED IN PLACENTA, SIGNAL = 3.1; EXPRESSED IN FETAL LIVER, SIGNAL = 2.3; EXPRESSED IN BRAIN, SIGNAL = 2.4; EXPRESSED IN HEART, SIGNAL = 1.7; EST_HUMAN HIT: BG677372.1, EVALUE 1.00e-103; NT HIT: AB058728.1, EVALUE 1.00e-103; SWISSPROT HIT: P90747, EVALUE 5.00e-08
tgcacataccttctgcttgggagccacacgggcgaacacctgcacatgggggatgaggcggagcagctgctgggggtcggtggcctgcaggtgggccaagccgtcgcctgtgaggcacagtgcgtactccagggccagtgcctttggggagccccgggccaggggcagcacgatgctgccgtcaatggagcgccactc

SEQ ID NO: 15622 - DNA, 158 bp, Homo sapiens
  MAP TO CHR19.1; EXPRESSED IN HEART, SIGNAL = 1.1; EXPRESSED IN ADULT LIVER, SIGNAL =   2; EXPRESSED IN FETAL LIVER, SIGNAL = 2.7; EXPRESSED IN HELA, SIGNAL = 2.9; EXPRESSED IN BRAIN, SIGNAL = 3.1; EXPRESSED IN BONE MARROW, SIGNAL = 3.2; EXPRESSED IN PLACENTA, SIGNAL = 2.9; EXPRESSED IN LUNG, SIGNAL = 0.95; SWISSPROT HIT: P82251, EVALUE 2.00e-23; EST_HUMAN HIT: AW590596.1, EVALUE 8.00e-78; NT HIT: AB033548.1, EVALUE 2.00e-80
cttaccttgataggcctttccagctctttccttgtaaatctcatcacgatgagtcctagaatcgtcaggccataaaacagccatgcggcaaagctgaaataattgactaacgagtttatgtcaccagggatgatataaatcgttgctatgatacccta

SEQ ID NO: 15623 - DNA, 225 bp, Homo sapiens
  MAP TO CHR3.1; EXPRESSED IN HELA, SIGNAL = 1.4; EXPRESSED IN BONE MARROW, SIGNAL = 1.4; EXPRESSED IN LUNG, SIGNAL = 1.6; EXPRESSED IN PLACENTA, SIGNAL = 1.3; EXPRESSED IN BRAIN, SIGNAL = 1.4; EXPRESSED IN HEART, SIGNAL = 1.2; EXPRESSED IN ADULT LIVER, SIGNAL = 0.58; EXPRESSED IN FETAL LIVER, SIGNAL = 1.1; SWISSPROT HIT: P54289, EVALUE 6.00e-15; EST_HUMAN HIT: BG538136.1, EVALUE 1.20e+00; NT HIT: gi5174402, EVALUE 6.00e-85
ggccagcctgaggccactcaccaccctactgttcctgcagttcaacgagaaggcacagcctgtgtcatgcttcacacacctggtgcaggccaatgtgcgcaacaagaaggtgttcaaggaagctgtgcagggcatggtggccaagggcaccacaggctacaaggccggctttgagtatgcctttgaccagctgcagaacgtgagccccatgggtgggcaagtggg

SEQ ID NO: 15624 - DNA, 151 bp, Homo sapiens
  MAP TO CHR5.1; EXPRESSED IN LUNG, SIGNAL = 0.87; EXPRESSED IN HELA, SIGNAL = 1.5; EXPRESSED IN BRAIN, SIGNAL = 0.92; EXPRESSED IN BONE MARROW, SIGNAL = 0.98; EXPRESSED IN HEART, SIGNAL = 0.64; EXPRESSED IN ADULT LIVER, SIGNAL = 1.3; EXPRESSED IN PLACENTA, SIGNAL = 1.4; SWISSPROT HIT: P34670, EVALUE 5.00e-06; EST_HUMAN HIT: BF763862.1, EVALUE 3.00e-77; NT HIT: gi13385045, EVALUE 2.00e-53
acctcttctctgagctccttcatcctttcctcaaaatcataatccttctgcttctcttccatcttcttcttgttgacctcaaaacgtttcttcacctgatccagggtggaacgttccacacgcatagacatgcccaggtttctctgatctg

SEQ ID NO: 15625 - DNA, 234 bp, Homo sapiens
  MAP TO CHR22.1; EXPRESSED IN HELA, SIGNAL = 1.2; EXPRESSED IN BRAIN, SIGNAL = 1.1; EXPRESSED IN HEART, SIGNAL = 0.88; EXPRESSED IN ADULT LIVER, SIGNAL = 1.9; EXPRESSED IN BONE MARROW, SIGNAL = 1.3; EXPRESSED IN FETAL LIVER, SIGNAL = 1.1; EXPRESSED IN PLACENTA, SIGNAL = 1.5; SWISSPROT HIT: P02460, EVALUE 7.00e-03; EST_HUMAN HIT: AI091441.1, EVALUE 3.10e-01; NT HIT: AF055872.1, EVALUE 2.10e-01
tccctctggggttctgtctctttgtcactttgtaatccttgcccagacgctatctacgggggaacagcatttcctgcctttgtttcctctccccgttgggcccctggctccctctcaaaagcattcccgggccctttcaatcccgcctgtgctggggggcggtgaggcaggcaggagggggccccagctgggcccacctattgttcgccagggcccccacccgatgtctcccac

SEQ ID NO: 15626 - DNA, 206 bp, Homo sapiens
  MAP TO CHR16.1; EXPRESSED IN FETAL LIVER, SIGNAL = 1.9; EXPRESSED IN BRAIN, SIGNAL = 1.9; EXPRESSED IN HELA, SIGNAL = 1.3; EXPRESSED IN LUNG, SIGNAL = 1.8; EXPRESSED IN HEART, SIGNAL = 2.6; EXPRESSED IN ADULT LIVER, SIGNAL = 2.2; EXPRESSED IN BONE MARROW, SIGNAL = 1.9; NT HIT: gi15317437, EVALUE 1.00e-107; SWISSPROT HIT: Q9Y4W6, EVALUE 5.00e-14; EST_HUMAN HIT: BI055064.1, EVALUE 4.20e+00
ggccacactcaccttctccacatgctcccggcaccgtgtcagcaggtccagggtgcacctgtaggtggcactgacgaggtgccggacctcgtcatcaaggagctgggcgcttgcctcgccgtacagcttctccaccagggtcttgccgtgtcgggaaaagtcgaaggacacctggcccagcttctcactcaccccaaactgcacaa

SEQ ID NO: 15627 - DNA, 180 bp, Homo sapiens
  MAP TO CHR17.1; EXPRESSED IN LUNG, SIGNAL = 0.58; EXPRESSED IN FETAL LIVER, SIGNAL = 0.44; EXPRESSED IN BRAIN, SIGNAL = 0.52; EXPRESSED IN HEART, SIGNAL = 2.1; EST_HUMAN HIT: AW950405.1, EVALUE 4.00e-86; NT HIT: gi13632183, EVALUE 8.00e-93; SWISSPROT HIT: P13535, EVALUE 3.00e-26
cacccaccctggcctccagtttctggatctgcttcttcccacccttcagcgccagctgctcggcctcatctagacgatgctgcaggtccttcaccgtctgctccaggttcttcttcatccgctccaggtgggcgctggtgtcctgttccttcttcagctcctcagccatcatggcagcct

SEQ ID NO: 15628 - DNA, 192 bp, Homo sapiens
  MAP TO CHR17.1; EXPRESSED IN BRAIN, SIGNAL = 2.8; EXPRESSED IN HEART, SIGNAL = 2.5; EXPRESSED IN BONE MARROW, SIGNAL = 2.5; EXPRESSED IN ADULT LIVER, SIGNAL = 5.7; EXPRESSED IN PLACENTA, SIGNAL = 1.9; EXPRESSED IN LUNG, SIGNAL = 2.2; EXPRESSED IN FETAL LIVER, SIGNAL = 2.1; EST_HUMAN HIT: BF359284.1, EVALUE 5.00e-89; NT HIT: AF298656.1, EVALUE 6.80e-01; SWISSPROT HIT: Q39565, EVALUE 8.00e-14
ccccagtcacacggatcgtgcgggtcattggacagcctcggggcaacatgctcctggtgggtatcgggggcagcggacgccagagtctggcccgcctggcttcatccatctgcgactacaccaccttccagatcgaggtcaccaaacattatcggaagcaggagttccgagatggtacggctgggtttctga

SEQ ID NO: 15629 - DNA, 413 bp, Homo sapiens
  MAP TO CHR7.1; EXPRESSED IN HEART, SIGNAL =   3; EXPRESSED IN ADULT LIVER, SIGNAL = 2.9; EXPRESSED IN BONE MARROW, SIGNAL = 2.2; EXPRESSED IN PLACENTA, SIGNAL =   3; EXPRESSED IN FETAL LIVER, SIGNAL = 4.7; EXPRESSED IN BRAIN, SIGNAL = 1.9; EXPRESSED IN LUNG, SIGNAL = 2.1; EST_HUMAN HIT: AW576853.1, EVALUE 0.00e+00; NT HIT: M61942.1, EVALUE 0.00e+00; SWISSPROT HIT: P07942, EVALUE 3.00e-72
tggctcattaactacttactctgcttcctcaaagagattcccaatgtttttcagtggctctgctgcggggctctgcgccaggatgtcttttatctcgctgactttcctctccaccgagtccacagtctcacggtaaggcccgatcacaccactgatcttcaaggccttggctttctccaggaatctgtgtgtcctgttggtcagctcggcaatgatcacatcccagagagcaaagcactggtggcagggtgtgcagtcagggaagacccccgagtaccctcgcgtgcacttgtcacagcgtggaccctcaacaccctcaacgcagacacactggcccgtggactggtcacactgtggcgtctcaatgcccctggggtcacagtcacaggctagaagggaataagcaatgctag

SEQ ID NO: 15630 - DNA, 244 bp, Homo sapiens
  MAP TO CHR7.1; EXPRESSED IN FETAL LIVER, SIGNAL = 0.54; EXPRESSED IN LUNG, SIGNAL = 0.64; EXPRESSED IN BRAIN, SIGNAL = 0.37; EXPRESSED IN BONE MARROW, SIGNAL = 0.41; EXPRESSED IN HEART, SIGNAL = 0.77; SWISSPROT HIT: O43316, EVALUE 1.00e-39; NT HIT: AB008913.1, EVALUE 1.00e-120
agggtacttacactgggagtcttgtcctgggtgcaaagcccttcagcacaaagctggcgttggatttcccaggcaaagagggctggacactcacccttcagctgggcaattcgagccaccacagggggtgtagccagccgtggcttgcttcccccaatgccctttggctccaagacacctgtgcggtagtaacgccctaggatcttgctcacacagccattagatacctgagtcaggtgagaag

SEQ ID NO: 15631 - DNA, 174 bp, Homo sapiens
  MAP TO AC019085.3; EXPRESSED IN PLACENTA, SIGNAL = 4.4; EXPRESSED IN FETAL LIVER, SIGNAL = 3.8; EXPRESSED IN LUNG, SIGNAL = 3.5; EXPRESSED IN HELA, SIGNAL = 4.2; EXPRESSED IN BRAIN, SIGNAL = 3.9; EXPRESSED IN BONE MARROW, SIGNAL = 4.4; EXPRESSED IN ADULT LIVER, SIGNAL = 2.7; EXPRESSED IN HEART, SIGNAL = 2.5; SWISSPROT HIT: Q62771, EVALUE 9.00e-24; EST_HUMAN HIT: AW937765.1, EVALUE 1.00e-80; NT HIT: gi14786067, EVALUE 3.00e-83
aggcagcagtcacctggtcaccagggctgagataatgtccgtgatggtggcgttgacctcggccagcatctcctccactgggccggggatgggcagctgctggcagaggtgctcagccctgcggatctgctgccggttctgccagatgatctcggccaacttctcacacctgca

SEQ ID NO: 15632 - DNA, 184 bp, Homo sapiens
  MAP TO CHR1.1; EXPRESSED IN BRAIN, SIGNAL = 1.8; EXPRESSED IN ADULT LIVER, SIGNAL =   2; EXPRESSED IN BONE MARROW, SIGNAL = 1.9; EXPRESSED IN LUNG, SIGNAL = 1.2; EXPRESSED IN FETAL LIVER, SIGNAL = 1.4; SWISSPROT HIT: P44777, EVALUE 7.40e+00; EST_HUMAN HIT: H85865.1, EVALUE 2.00e-76; NT HIT: AF009353.1, EVALUE 4.10e-02
ttttctctagtatctccagaggcagttggatttttgtcagctgttggggtgtttattatcttgatgctgctcctttttctctatattaataagaagttctgttttgaaaatgttggcgggtttccagatcttggttcagaatacagtacaaggaagaattcacaagataaaatttgtaagtatc

SEQ ID NO: 15633 - DNA, 148 bp, Homo sapiens
  MAP TO CHR7.1; EXPRESSED IN FETAL LIVER, SIGNAL = 0.98; EXPRESSED IN BRAIN, SIGNAL = 0.94; EXPRESSED IN LUNG, SIGNAL = 1.2; EXPRESSED IN HEART, SIGNAL = 0.55; EXPRESSED IN BONE MARROW, SIGNAL = 1.1; EXPRESSED IN ADULT LIVER, SIGNAL = 0.64; SWISSPROT HIT: O95859, EVALUE 1.00e-26; EST_HUMAN HIT: T94622.1, EVALUE 3.00e-77; NT HIT: gi6912527, EVALUE 2.00e-77
acctcttgataaaggtcactgagatcttcctggtgggcctgtttggaacatcctgggaattctctaacacagcaggaatctgggggccagtccatctctgtcatttccaaccagtcagtgaaatatactactccacagcacttaaact

SEQ ID NO: 15634 - DNA, 183 bp, Homo sapiens
  MAP TO CHR6.1; EXPRESSED IN HELA, SIGNAL = 3.5; EXPRESSED IN BONE MARROW, SIGNAL = 5.8; EXPRESSED IN HEART, SIGNAL =   4; EXPRESSED IN LUNG, SIGNAL = 4.3; EXPRESSED IN BRAIN, SIGNAL = 5.4; EXPRESSED IN ADULT LIVER, SIGNAL = 8.9; EXPRESSED IN FETAL LIVER, SIGNAL = 5.3; EXPRESSED IN PLACENTA, SIGNAL = 4.4; EST_HUMAN HIT: AV693098.1, EVALUE 1.00e-98
agcctctagtcataaaaataaggaacacactaagaatcacacccctgtgatcccacatcagatgtctcctcccatcctgagttattaataattttattaagaatatgctttcaacacgcttgtatttatatatgtacttaacaagaaatcaccaagactgcagcgggcagttcctcttccctt

SEQ ID NO: 15635 - DNA, 113 bp, Homo sapiens
  MAP TO CHR19.1; EXPRESSED IN LUNG, SIGNAL = 0.71; EXPRESSED IN HELA, SIGNAL = 0.55; EXPRESSED IN BRAIN, SIGNAL = 0.52; EXPRESSED IN HEART, SIGNAL = 0.83; EXPRESSED IN BONE MARROW, SIGNAL = 0.5; EST_HUMAN HIT: BF795891.1, EVALUE 5.40e-01; NT HIT: AF115925.1, EVALUE 9.30e-02; SWISSPROT HIT: P18346, EVALUE 1.20e+00
agccgggactcggatgtccactcgatgtacactttgaggcccaggagtgtgagcagtgctgacaggcagagaaggcacttggggcagcgcatgacccggcccagggaaggggc

SEQ ID NO: 15636 - DNA, 172 bp, Homo sapiens
  MAP TO CHR12.1; EXPRESSED IN FETAL LIVER, SIGNAL = 0.76; EXPRESSED IN HELA, SIGNAL = 0.76; EXPRESSED IN BONE MARROW, SIGNAL = 0.77; EXPRESSED IN ADULT LIVER, SIGNAL = 0.99; EXPRESSED IN PLACENTA, SIGNAL = 1.7; EXPRESSED IN LUNG, SIGNAL = 1.2; EXPRESSED IN BRAIN, SIGNAL = 0.82; EXPRESSED IN HEART, SIGNAL = 1.5; EST_HUMAN HIT: AU140938.1, EVALUE 6.00e-79; NT HIT: M25842.1, EVALUE 3.00e-92; SWISSPROT HIT: P04275, EVALUE 7.00e-30
gtgactcaccatgcccggggggcagaggcagccagagacacagcccatgctcatgcactccaggtcatagttctggcacgttttggtacactcgagcccttcagcccgcaggttgtcagcgggacacaccagcttgaccatggggggccgacaggataggctccttttgcct

SEQ ID NO: 15637 - DNA, 289 bp, Homo sapiens
  MAP TO CHR12.1; EXPRESSED IN ADULT LIVER, SIGNAL =   2; EXPRESSED IN HELA, SIGNAL = 1.1; EXPRESSED IN BRAIN, SIGNAL = 0.98; EXPRESSED IN LUNG, SIGNAL = 0.98; EXPRESSED IN HEART, SIGNAL = 1.1; EXPRESSED IN BONE MARROW, SIGNAL = 1.6; SWISSPROT HIT: P78560, EVALUE 3.00e-34; EST_HUMAN HIT: T78285.1, EVALUE 0.00e+00; NT HIT: gi14763473, EVALUE 0.00e+00
attttggctctttccagggagaaatggaggccagagacaaacaagtactccgctcacttcgcctggagctgggtgcagaggtattggtggagggactggttcttcagtacctctaccaggaaggaatcttgacggaaaaccatattcaagaaatcaatgctcaaaccacaggcctccggaaaacaatgctcctgctggatatcctaccttccaggggccctaaagcatttgatacattcctagattccctacaggagtttccctgggtcagggagaagctgaagaaggc

SEQ ID NO: 15638 - DNA, 170 bp, Homo sapiens
  MAP TO CHR19.1; EXPRESSED IN HEART, SIGNAL = 0.87; EXPRESSED IN BONE MARROW, SIGNAL = 1.8; EXPRESSED IN ADULT LIVER, SIGNAL = 0.85; EXPRESSED IN FETAL LIVER, SIGNAL = 1.5; EXPRESSED IN BRAIN, SIGNAL = 1.5; EXPRESSED IN LUNG, SIGNAL = 1.7; SWISSPROT HIT: P13728, EVALUE 5.70e+00; EST_HUMAN HIT: BI822534.1, EVALUE 3.00e-90; NT HIT: AB037816.1, EVALUE 4.00e-88
agggcattcctgttgcacaagaaggccatcagtgctgtgcacagcctgctatgtggccatgacactgacccccgctacgccgaggccactgtgaaggctcgtgtggccgagctgtacctgccactgctatcgattgcacgggataccttgccacggctgcatgactttgc

SEQ ID NO: 15639 - DNA, 253 bp, Homo sapiens
  MAP TO CHR11.1; EXPRESSED IN BRAIN, SIGNAL = 0.97; EXPRESSED IN BONE MARROW, SIGNAL =   1; EXPRESSED IN HEART, SIGNAL = 0.61; EXPRESSED IN ADULT LIVER, SIGNAL = 0.91; EXPRESSED IN FETAL LIVER, SIGNAL = 0.76; EXPRESSED IN LUNG, SIGNAL = 0.57; EXPRESSED IN HELA, SIGNAL = 0.92; NT HIT: AF282277.1, EVALUE 3.00e-53; SWISSPROT HIT: Q15620, EVALUE 1.00e-31; EST_HUMAN HIT: AI239808.1, EVALUE 9.00e-08
tgagtttaattaatctaatttgcctgaattcacaccttcacactcccatgtattttttccttttcaatctgtccttcattgatctctgttattcatttgtctttacccccaaaatgctgatgagctttatttcagagaggaacatcatctcctttccaggatgcataactcagctctttttcttctgcttttttgtccactctgagtgctatgtactgacagccatggcctatgatcgctatgtggccatctg

SEQ ID NO: 15640 - DNA, 256 bp, Homo sapiens
  MAP TO CHR7.1; EXPRESSED IN BRAIN, SIGNAL = 0.79; EXPRESSED IN BONE MARROW, SIGNAL = 0.7; EST_HUMAN HIT: R55918.1, EVALUE 1.00e-126; NT HIT: gi4826977, EVALUE 0.00e+00; SWISSPROT HIT: Q46654, EVALUE 5.70e+00
ttcttaccatcatcaaaagtgtccaccaattggctgggattgatttctgctccaccaatcaaaatgttgtccagtgcccactgagcacgctccaccccagagaccacaattccattgctgatcacaaaaggctgccaccagcgaagtcgagttgtgttggtgagggcatcttcaggaagaagtatgtagtcgtgtctaacagaaatgtatttctggtaatccatctcatggagcaaagtccaggtaattcctataa

SEQ ID NO: 15641 - DNA, 183 bp, Homo sapiens
  MAP TO CHR5.1; EXPRESSED IN FETAL LIVER, SIGNAL = 2.7; EXPRESSED IN HELA, SIGNAL = 3.1; EXPRESSED IN BRAIN, SIGNAL = 2.6; EXPRESSED IN LUNG, SIGNAL = 0.63; EXPRESSED IN BONE MARROW, SIGNAL = 2.2; EXPRESSED IN HEART, SIGNAL = 0.79; EXPRESSED IN PLACENTA, SIGNAL = 3.6; NT HIT: AF395008.1, EVALUE 9.00e-99; SWISSPROT HIT: P30414, EVALUE 4.40e-02
gaggggaagggagagacagcaacagaaagtgaggtcgtaagtagaaaattgcttctgggatttcaaatggctttgtcatggggccctcccttgctgccgagaaatcagttgatctgggaaagtttgttgcaaacccttgccctcttgcttttgggtggagctgagaaatgaatgaagataatg

SEQ ID NO: 15642 - DNA, 168 bp, Homo sapiens
  MAP TO CHR19.1; EXPRESSED IN FETAL LIVER, SIGNAL = 1.1; EXPRESSED IN HELA, SIGNAL = 0.94; EXPRESSED IN BRAIN, SIGNAL = 0.96; EXPRESSED IN HEART, SIGNAL = 0.71; EXPRESSED IN BONE MARROW, SIGNAL = 1.1; SWISSPROT HIT: P24864, EVALUE 1.00e-27; EST_HUMAN HIT: BF980866.1, EVALUE 4.00e-86; NT HIT: U40788.1, EVALUE 4.00e-88
gcagggtatcagtggtgcgacatagagaactgtgtcaagtggatggttccatttgccatggttataagggagacggggagctcaaaactgaagcacttcaggggcgtcgctgatgaagatgcacacaacatacagacccacagagacagcttggatttgctggtcagt

SEQ ID NO: 15643 - DNA, 208 bp, Homo sapiens
  MAP TO CHR17.1; EXPRESSED IN ADULT LIVER, SIGNAL = 1.7; EXPRESSED IN BONE MARROW, SIGNAL = 1.5; EXPRESSED IN LUNG, SIGNAL = 1.1; EXPRESSED IN HELA, SIGNAL = 1.4; EXPRESSED IN BRAIN, SIGNAL = 1.4; EXPRESSED IN HEART, SIGNAL = 1.3; SWISSPROT HIT: Q09884, EVALUE 2.00e-03; EST_HUMAN HIT: BF879575.1, EVALUE 1.00e-108; NT HIT: gi13652313, EVALUE 1.00e-104
gctgacctgcaggacgtggttgatggccccatcgagtttggaggccccgccagtgcctggggaggctgtgagacccagcacctggggtagcggctgtgccctctggagtttaagttctaggtactggctcatgatgacgttgtagacggtgtccttgtgcgtgtggtggcactcatccaccacgatcagggagaagactgagggcaca

SEQ ID NO: 15644 - DNA, 136 bp, Homo sapiens
  MAP TO CHR5.1; EXPRESSED IN LUNG, SIGNAL = 1.4; EXPRESSED IN HELA, SIGNAL = 1.2; EXPRESSED IN BRAIN, SIGNAL = 1.2; EXPRESSED IN ADULT LIVER, SIGNAL = 0.7; EXPRESSED IN BONE MARROW, SIGNAL = 1.4; SWISSPROT HIT: P22182, EVALUE 9.00e-03; EST_HUMAN HIT: BG054507.1, EVALUE 4.00e-70; NT HIT: gi16171823, EVALUE 3.00e-70
cagccaatgggagcgaactccacatcagcagtgttcggtatgaagacacaggggcatacacctgcattgccaaaaatgaagtgggtgtggatgaagatatctcctcgctcttcattgaagactcagctagaaagac

SEQ ID NO: 15645 - DNA, 283 bp, Homo sapiens
  MAP TO CHRX.1; EXPRESSED IN HELA, SIGNAL = 2.1; EXPRESSED IN HEART, SIGNAL = 2.8; EXPRESSED IN BONE MARROW, SIGNAL = 2.3; EXPRESSED IN FETAL LIVER, SIGNAL = 2.1; EXPRESSED IN BRAIN, SIGNAL = 2.8; EXPRESSED IN LUNG, SIGNAL = 3.2; SWISSPROT HIT: Q13474, EVALUE 2.00e-31; EST_HUMAN HIT: BG538680.1, EVALUE 3.80e-01; NT HIT: gi4503392, EVALUE 0.00e+00
ctccatcctcacctgcaggagaagctccctcagacgctgcagctgggactctagctgcttgttgtgatcttcgaggatctgcatgcgcgtctccaggcggctcttatgttgccgaaggatacgggcctcggccagaagctcctcattgcggtggtctgttgctgcctcagtggagccgtcagccagactgggtgcctcagctgcctcctcatgctgccacttcaggcgcctcagctctccctggagaatcctgccatggagagagacaccaagacctatggct

SEQ ID NO: 15646 - DNA, 241 bp, Homo sapiens
  MAP TO CHR14.1; EXPRESSED IN HELA, SIGNAL = 2.8; EXPRESSED IN BRAIN, SIGNAL = 2.8; EXPRESSED IN HEART, SIGNAL =   2; EXPRESSED IN PLACENTA, SIGNAL = 5.3; EXPRESSED IN FETAL LIVER, SIGNAL = 2.7; EXPRESSED IN LUNG, SIGNAL =  15; SWISSPROT HIT: P01790, EVALUE 5.00e-32; EST_HUMAN HIT: BG398259.1, EVALUE 6.00e-83; NT HIT: X92206.1, EVALUE 0.00e+00
gaatcatctcttgagatggtgaatctgcctttcacagacgcggcgtattctgtggtgtaactgttagctttgtttctagtacggccaacccactccagccccttccctggagcctggcggacccagtccatgtagtggtcactgaaggtgaatccagaggctgcacaggagagtctcagggaccctccaggctggaccaagcctcccccagactccaccagctgcacctcacactggacac

SEQ ID NO: 15647 - DNA, 186 bp, Homo sapiens
  MAP TO CHR7.1; EXPRESSED IN PLACENTA, SIGNAL = 3.4; EXPRESSED IN FETAL LIVER, SIGNAL = 1.2; EXPRESSED IN HELA, SIGNAL = 2.9; EXPRESSED IN BRAIN, SIGNAL = 1.3; EXPRESSED IN LUNG, SIGNAL = 0.81; EXPRESSED IN HEART, SIGNAL = 0.89; EXPRESSED IN ADULT LIVER, SIGNAL = 0.88; SWISSPROT HIT: P08548, EVALUE 4.00e-10; EST_HUMAN HIT: BI048020.1, EVALUE 2.00e-08; NT HIT: X14061.1, EVALUE 7.00e-04
atgtagaaaatggaaacagttttggcaatttcttattaagttaaacatacacttaccaacaaacccatcaatcccacttctaggcatctacccaagaaaaatgaagaaatacgtccacattaaaagttttatgtgaatgttcgtaatagcatcattcataatagccaaaaactggaaagaacccaa

SEQ ID NO: 15648 - DNA, 391 bp, Homo sapiens
  MAP TO CHR2.1; EXPRESSED IN FETAL LIVER, SIGNAL = 1.2; EXPRESSED IN LUNG, SIGNAL = 1.1; EXPRESSED IN HELA, SIGNAL = 1.4; EXPRESSED IN HEART, SIGNAL = 1.1; EXPRESSED IN BONE MARROW, SIGNAL = 1.5; EXPRESSED IN PLACENTA, SIGNAL = 1.8; EXPRESSED IN BRAIN, SIGNAL = 1.3; EXPRESSED IN ADULT LIVER, SIGNAL = 0.9; NT HIT: gi14723798, EVALUE 0.00e+00; SWISSPROT HIT: O43174, EVALUE 9.00e-24; EST_HUMAN HIT: AA012833.1, EVALUE 3.00e-89
ctcagcatggcctccgtctccggcaggatctcgttctggttggagtccaggccaaagaacttgacgctgaggccatccacggggtgcaggacggggaccaaggtgatgcgggggaaggtccgtgtggccagctcaaagcggctggtgctagccagctccaccgccagcaccttcaggaacagcttggccaggtgcttgcccaggcaggtccggacaccgccaccgaacgggaggtaatggaagcggccatccttgtcctcgctccgcgcctggctgaagcgatcggggtcgaacacgttcacgtctttgaacacgggcgctgtgtcatgggtgtcccggatgctatacatgacactccagcctttggggatctggaaaccctggagcaaga

SEQ ID NO: 15649 - DNA, 499 bp, Homo sapiens
  MAP TO CHR3.1; EXPRESSED IN PLACENTA, SIGNAL =  43; EXPRESSED IN LUNG, SIGNAL =  29; EXPRESSED IN FETAL LIVER, SIGNAL =  21; EXPRESSED IN BRAIN, SIGNAL =  24; EXPRESSED IN HEART, SIGNAL =  15; NT HIT: gi11038618, EVALUE 0.00e+00; SWISSPROT HIT: P53506, EVALUE 6.00e-66; EST_HUMAN HIT: BG424840.1, EVALUE 0.00e+00
caactgggatgacatgaagaagatttggcaccacaccttctacaatgagttgcgtgtggccccggaggagcacctggtgctgctgacagaggcccttgtgaaccccaaggccaacagagagaagatgacccagatcatgtttgagaccttcaacaccctgtccatgtacgtggccatccaggccatgctgtccctctatgcctctggatgcaccactggcattgttaatggaccctggagatggggtcactcatacagtgcccatctacgaggcctaagccctcccccatgccgtcctgcatctggacctggctggtggggacctgactgactacctcatgaagatcctcaccgagcacagctacagcttcaacaccatggctgagtgggagatcttgggtgacatcaaggagaagccgtgctatgttgccctggacttcgaacaggagatggccaccgccgcatcctcctcctctctggagaagagctaggagctgcc

SEQ ID NO: 15650 - DNA, 161 bp, Homo sapiens
  MAP TO CHR1.1; EXPRESSED IN FETAL LIVER, SIGNAL = 1.5; EXPRESSED IN LUNG, SIGNAL = 1.1; EXPRESSED IN HELA, SIGNAL =   2; EXPRESSED IN BRAIN, SIGNAL = 1.5; EXPRESSED IN BONE MARROW, SIGNAL = 1.7; EXPRESSED IN ADULT LIVER, SIGNAL = 0.93; EXPRESSED IN PLACENTA, SIGNAL =   2; EXPRESSED IN HEART, SIGNAL = 0.84; EST_HUMAN HIT: AW972047.1, EVALUE 1.00e-61; NT HIT: AF233322.1, EVALUE 1.00e-23; SWISSPROT HIT: Q63118, EVALUE 4.40e+00
tttcaggtacagcagttgcaaggagtttacagtttacaggaacagcacttctggactttatgttctgacgtttatgttgggaccttgaaattaatagtagcacctgatgctgatgctaggtggattttaagccaaacacataatatttttactcaggtatg

SEQ ID NO: 15651 - DNA, 169 bp, Homo sapiens
  MAP TO CHR10.1; EXPRESSED IN ADULT LIVER, SIGNAL = 0.49; EXPRESSED IN LUNG, SIGNAL = 1.1; EXPRESSED IN HELA, SIGNAL = 0.43; EXPRESSED IN BRAIN, SIGNAL = 0.44; EXPRESSED IN HEART, SIGNAL = 1.1; SWISSPROT HIT: O15403, EVALUE 2.00e-09; EST_HUMAN HIT: BF029814.1, EVALUE 3.40e+00; NT HIT: AF344451.1, EVALUE 1.50e-01
ttgtttttgaagctccacttgggagtgttgtcagtaaccatttatcctgtcaagtgggaatcatgctgggtggcttgcttgcatctactggactcatcctgagctcatttgccacgagtctgaagcatctctacctcactctgggagttcttacaggtaagggcacttt

SEQ ID NO: 15652 - DNA, 116 bp, Homo sapiens
  MAP TO CHR12.1; EXPRESSED IN FETAL LIVER, SIGNAL = 0.71; EXPRESSED IN BRAIN, SIGNAL = 0.72; EXPRESSED IN LUNG, SIGNAL = 0.59; EXPRESSED IN BONE MARROW, SIGNAL = 0.79; EXPRESSED IN HEART, SIGNAL = 0.62; SWISSPROT HIT: P33203, EVALUE 2.00e+00; EST_HUMAN HIT: BI905835.1, EVALUE 1.40e-01
agcatagatttcaccacttttgttctttcctgtcttacaccaagattgtttaagtacttcccaaaaataatgagccacgtgtgggtgtgttcgttctccagaatgaatcactgtga

SEQ ID NO: 15653 - DNA, 147 bp, Homo sapiens
  MAP TO CHR7.1; EXPRESSED IN FETAL LIVER, SIGNAL = 1.9; EXPRESSED IN LUNG, SIGNAL = 3.2; EXPRESSED IN BRAIN, SIGNAL =   2; EXPRESSED IN HEART, SIGNAL = 3.1; SWISSPROT HIT: P34535, EVALUE 2.00e+00; EST_HUMAN HIT: W46782.1, EVALUE 8.00e-44; NT HIT: AF402318.1, EVALUE 5.00e-44
ctaagattctaccttacctttgtcatagttgtgtcatctttcttgggagtaaagtttccaaaaaatcgaaggctatagaagccgacaacagaggacaccataagatagctgtgagaatcaaggaaaaaaactctccaacagaatgca

SEQ ID NO: 15654 - DNA, 115 bp, Homo sapiens
  MAP TO CHR2.1; EXPRESSED IN FETAL LIVER, SIGNAL = 0.33; EXPRESSED IN BRAIN, SIGNAL = 0.42; EXPRESSED IN BONE MARROW, SIGNAL = 0.49; NT HIT: AL163204.2, EVALUE 1.50e+00
catgtttacacatttattgtcaactgtaattacttgtttattagaacagaggtttccctgtttattacagtcattatagtctgtcagcaagagacagtgtgcttgaatttcacaa

SEQ ID NO: 15655 - DNA, 247 bp, Homo sapiens
  MAP TO AC027045.2; EXPRESSED IN BRAIN, SIGNAL = 0.62; EXPRESSED IN HEART, SIGNAL = 0.76; EXPRESSED IN BONE MARROW, SIGNAL = 0.62; EXPRESSED IN LUNG, SIGNAL = 0.78; EXPRESSED IN HELA, SIGNAL = 0.5; SWISSPROT HIT: P22089, EVALUE 1.40e+00; EST_HUMAN HIT: R68545.1, EVALUE 1.00e-118; NT HIT: AF137950.1, EVALUE 5.70e-02
gccctcaggatcccagagggcctggccaggggcctgggcagccggctcgagagggatgtctggtcagcccccagctctctccgcctccctcgtaaagccagcagggccccgagaggcagtgcactgggcatgtcacaaaggactgttccaggggagcaggcttcttatggcacctttcagagagtcaaatatcacactctttctttaggtcgaaagaaaaccttaccggagtccagcttttgatgga

SEQ ID NO: 15656 - DNA, 202 bp, Homo sapiens
  MAP TO CHR8.1; EXPRESSED IN FETAL LIVER, SIGNAL = 2.8; EXPRESSED IN HELA, SIGNAL = 2.7; EXPRESSED IN BRAIN, SIGNAL = 3.3; EXPRESSED IN LUNG, SIGNAL = 2.1; EXPRESSED IN PLACENTA, SIGNAL =   3; EXPRESSED IN HEART, SIGNAL = 2.5; EXPRESSED IN BONE MARROW, SIGNAL = 3.8; EXPRESSED IN ADULT LIVER, SIGNAL = 4.4; NT HIT: gi15431278, EVALUE 4.60e-02; SWISSPROT HIT: P22273, EVALUE 8.40e-01; EST_HUMAN HIT: AW996620.1, EVALUE 1.00e-06
ccactcctaccattctgggtgagctttgtggagcagatgagggtggcaatctgaaagctgtctttagtgctatccttgcttggggtgaaggtgaccaggtttttagatgcttgaagctctttttcttccatctccatcttggttccaggcagggtcaggtagaatttagcatcttccatttttttgttgtcaccctaaaagg

SEQ ID NO: 15657 - DNA, 319 bp, Homo sapiens
  MAP TO CHR2.1; EXPRESSED IN FETAL LIVER, SIGNAL = 0.28; EXPRESSED IN BRAIN, SIGNAL = 0.44; EXPRESSED IN HEART, SIGNAL = 0.47; EXPRESSED IN BONE MARROW, SIGNAL = 0.46; EST_HUMAN HIT: AA194556.1, EVALUE 0.00e+00; NT HIT: gi16157781, EVALUE 0.00e+00; SWISSPROT HIT: O70468, EVALUE 3.00e-17
tatatttagtcccaccaagcgctcctaccagacctgaggtctaccatgtgtctgccaatgccatgtctattcgttgggaagaaccctaccacgatggtggcagtaaaatcattggctactgggttgagaagaaagaacgtaatacaattctttgggtgaaagaaaacaaagtgccatgcttagagtgcaactacaaagtaactggtttagtagaaggactggaatatcagttcagaacttatgcactcaatgctgcaggtgttagcaaggccagcgaagcttcaagacctataatggctcaaaatccagttggtatgta

SEQ ID NO: 15658 - DNA, 237 bp, Homo sapiens
  MAP TO CHR19.1; EXPRESSED IN LUNG, SIGNAL = 2.3; EXPRESSED IN HELA, SIGNAL = 0.79; EXPRESSED IN BRAIN, SIGNAL = 2.3; EXPRESSED IN HEART, SIGNAL = 2.6; EXPRESSED IN ADULT LIVER, SIGNAL = 2.1; EXPRESSED IN FETAL LIVER, SIGNAL =   2; SWISSPROT HIT: Q9Y2Q1, EVALUE 1.00e-38; EST_HUMAN HIT: AI554749.1, EVALUE 1.00e-106; NT HIT: gi16163761, EVALUE 1.00e-114
ctggttaaaggctttgccacattctccacatttgtagggtttctctccagtatgaattaccttatgtttagaaagagttgaggactggttaaaagctttgccacattcttcacatttgtagggtttctctccagtatgaattatcttatgtgtagtaaggtgtgaagataggttaaaagctttgccacattcttcacatttgtagggtttctctccagtatgaattatcttatgtgt

SEQ ID NO: 15659 - DNA, 185 bp, Homo sapiens
  MAP TO CHR9.1; EXPRESSED IN ADULT LIVER, SIGNAL = 3.4; EXPRESSED IN PLACENTA, SIGNAL = 3.9; EXPRESSED IN FETAL LIVER, SIGNAL = 4.1; EXPRESSED IN LUNG, SIGNAL = 2.9; EXPRESSED IN BRAIN, SIGNAL = 3.7; EXPRESSED IN HEART, SIGNAL = 3.2; EXPRESSED IN BONE MARROW, SIGNAL = 3.4; SWISSPROT HIT: P48634, EVALUE 2.00e-15; EST_HUMAN HIT: BE794550.1, EVALUE 2.00e-97; NT HIT: gi16161606, EVALUE 1.00e-97
tgcagttattcctagacatggcttacagagtcttgggaaagttgctgcagcccggcgcatgccaccgcctgcaaacctgccaagcttgaagtctgaaaacaaaggaaacgaccccaacatcgtgatagtacccaaggacgggacgggatgggcaaacaagcaggatcagcaagacccaaagaggt

SEQ ID NO: 15660 - DNA, 189 bp, Homo sapiens
  MAP TO CHR7.1; EXPRESSED IN HELA, SIGNAL = 0.78; EXPRESSED IN BRAIN, SIGNAL = 0.89; EXPRESSED IN HEART, SIGNAL = 0.84; EXPRESSED IN BONE MARROW, SIGNAL = 0.95; EXPRESSED IN ADULT LIVER, SIGNAL = 0.55; EXPRESSED IN LUNG, SIGNAL = 0.83; SWISSPROT HIT: Q9Y6U3, EVALUE 8.00e-27; EST_HUMAN HIT: T60653.1, EVALUE 9.00e-69; NT HIT: gi14743059, EVALUE 3.00e-92
tccgagtctcccaaggcaaagagcctgttcacctactgagtttgttcaaagacaaaccgctcattatttacaagaatggaacatcaaagaaaggaggtcaggcacctgctccccctacacgcctctttcaagtccggagaaacctggcatctatcaccagaattgtggaggtaatgtcatgcattccat

SEQ ID NO: 15661 - DNA, 127 bp, Homo sapiens
  MAP TO CHR19.1; EXPRESSED IN PLACENTA, SIGNAL =  27; EXPRESSED IN LUNG, SIGNAL = 7.9; EXPRESSED IN HELA, SIGNAL =  14; EXPRESSED IN BRAIN, SIGNAL = 1.8; EXPRESSED IN HEART, SIGNAL = 3.6; EXPRESSED IN FETAL LIVER, SIGNAL = 7.9; SWISSPROT HIT: Q02543, EVALUE 6.00e-15; EST_HUMAN HIT: BI858086.1, EVALUE 8.00e-56; NT HIT: AB007175.1, EVALUE 1.00e-59
cactcacgtggaactgcttgacagccggccggcggcacttgctggccgcgatctcctccaccttcatgatctgaatggagtgggctcgggcgcggtgccgggcacccatgtctcggtctgtggaaag

SEQ ID NO: 15662 - DNA, 261 bp, Homo sapiens
  MAP TO CHR6.1; EXPRESSED IN LUNG, SIGNAL = 7.8; EXPRESSED IN HELA, SIGNAL = 7.8; EXPRESSED IN FETAL LIVER, SIGNAL = 8.6; EXPRESSED IN BRAIN, SIGNAL = 9.8; EXPRESSED IN HEART, SIGNAL = 6.3; EXPRESSED IN ADULT LIVER, SIGNAL =  14; EXPRESSED IN BONE MARROW, SIGNAL = 9.8; EXPRESSED IN PLACENTA, SIGNAL = 9.9; SWISSPROT HIT: O15056, EVALUE 3.00e-46; EST_HUMAN HIT: AI452967.1, EVALUE 0.00e+00; NT HIT: gi14747877, EVALUE 0.00e+00
tgagcttcctggtgttggtgacaggctgcacatctgtgggcagaattccagatgctgaaatctacaaaatcactgccactgacttttaccctcttcaggaagaggccaaggaggaggaacgcctcatagctttgaagaaaatcctcagctcgggggtgttctatttctcatggccaaacgatgggtctcgctttgacctgactgtccgcacgcagaagcagggggatgacagctctgaatgggggaactccttcttctggt

SEQ ID NO: 15663 - DNA, 262 bp, Homo sapiens
  MAP TO CHR7.1; EXPRESSED IN ADULT LIVER, SIGNAL = 0.76; EXPRESSED IN FETAL LIVER, SIGNAL = 1.2; EXPRESSED IN LUNG, SIGNAL = 0.85; EXPRESSED IN HELA, SIGNAL = 1.3; EXPRESSED IN BRAIN, SIGNAL = 1.2; EXPRESSED IN HEART, SIGNAL = 0.58; NT HIT: gi16161041, EVALUE 1.00e-128; SWISSPROT HIT: Q08759, EVALUE 9.00e-07; EST_HUMAN HIT: BG282900.1, EVALUE 1.00e-128
gtagtctggatgatttccttttttcagggaagtggacagaagaagaagaaaagagacttgcagaagtggttcatgagttgacaagcactgagccaggtgacatagtcacacagggtgtgtcttgggcagctgtggctgaacgagtcggtacccgctcagaaaagcaatgtcgttctaaatggctcaactacctgaattggaaacagagtgggggtactgaatggaccaaggaagatgaaatcaatctcatcctcaggtttgt

SEQ ID NO: 15664 - DNA, 132 bp, Homo sapiens
  MAP TO AC007910.3; EXPRESSED IN FETAL LIVER, SIGNAL = 0.44; EXPRESSED IN LUNG, SIGNAL = 0.84; EXPRESSED IN BRAIN, SIGNAL = 0.35; EXPRESSED IN HEART, SIGNAL = 0.72; EXPRESSED IN BONE MARROW, SIGNAL = 0.33; EST_HUMAN HIT: AU155452.1, EVALUE 2.00e-68; NT HIT: gi14736006, EVALUE 2.00e-68; SWISSPROT HIT: O14511, EVALUE 7.80e+00
catttagataacatatgaagtatggcccccttggatccttgtttttaagttactttcgatgtgtatacgaacaaagaccagggagaaacagaacttttaaaactataggctgctgtgttggggccagaaata

SEQ ID NO: 15665 - DNA, 420 bp, Homo sapiens
  MAP TO CHRX.1; EXPRESSED IN BRAIN, SIGNAL = 1.2; EXPRESSED IN HEART, SIGNAL = 0.97; EXPRESSED IN BONE MARROW, SIGNAL = 0.59; EXPRESSED IN LUNG, SIGNAL = 0.73; SWISSPROT HIT: Q02280, EVALUE 1.00e-06; EST_HUMAN HIT: BI490063.1, EVALUE 0.00e+00; NT HIT: gi14762746, EVALUE 0.00e+00
tcccactggtggatgtagcggatcaggcgcgagaggcgcagcagccgcaggaggctgaggatcttggtgaagcgcacgatccgcagggcgcacgccgtcttgtagacctcggagtcgatgcccttctccacgatgaggaagatgtagtccacggggatggaggacacgaagtccaccatgaaccacgtgcgcacgtacttcttgatcttctcttggtccaggatgatctccgtgttgtcctcgatcacaatgccggtgcggaagttcaacaccaggtccatgaggcagaaggtgtccgagaccacgttgaacacgatccacagggcagtggtctcgtccttgaagaaggtgatgcccactgggatgatgatgaggtttcccaccatgaacagcagcatggtgaagtcccagtagaacctg

SEQ ID NO: 15666 - DNA, 263 bp, Homo sapiens
  MAP TO CHR22.1; EXPRESSED IN FETAL LIVER, SIGNAL = 2.5; EXPRESSED IN BRAIN, SIGNAL = 2.3; EXPRESSED IN LUNG, SIGNAL = 3.7; EXPRESSED IN HELA, SIGNAL = 1.8; EXPRESSED IN HEART, SIGNAL = 3.3; EXPRESSED IN BONE MARROW, SIGNAL = 2.8; EXPRESSED IN ADULT LIVER, SIGNAL = 0.73; SWISSPROT HIT: P10162, EVALUE 7.00e-05; EST_HUMAN HIT: BE314982.1, EVALUE 3.50e-01; NT HIT: gi14778779, EVALUE 1.00e-129
gagcctcacctaccccctcacctcatccccaggtgaccatgctccctgccaaacaggcagaactgacccggcggagccaagcagagccccctcatccttggagtcctgagaagagacctgagggagatcggcagctccaggggtccccgctgccccccaggacatcagccaggacccctgagagggagctgcggacacagagacctctggagagtggccaagcaggcccaagacagcctctgggggtgtggcagagtcaggag

SEQ ID NO: 15667 - DNA, 413 bp, Homo sapiens
  MAP TO CHR5.1; EXPRESSED IN BRAIN, SIGNAL = 0.79; EXPRESSED IN HEART, SIGNAL = 0.68; EXPRESSED IN BONE MARROW, SIGNAL = 0.59; SWISSPROT HIT: Q9Y5H5, EVALUE 9.00e-75; EST_HUMAN HIT: BF920578.1, EVALUE 0.00e+00; NT HIT: gi14717405, EVALUE 0.00e+00
tggttggcacgtccaggaagaaatactcattggggctcagtctgtaagtgagcagggcgttctccccgatatctgcatcggacgcgccctctagtggaaaccgagagtcaagcggcctggattccgcgatgaacagattcttttgtgtcgctgggaacactggagggttgtcgttaatgtccttcacctccacgtccacatggaaaacctgcagcggcctgtctacgatcacctccaggtggatgctgcactccgcgctccgcccgcacagctcctcgcggtcgatccgagaattcacaaacaaaatgccattctgcagatttacctccagaaggtccccgcggcctttggaatccaactggaacaggcgcggcaccagctccgccagctccagccccaggtcctgcgcgatg

SEQ ID NO: 15668 - DNA, 310 bp, Homo sapiens
  MAP TO CHR20.1; EXPRESSED IN PLACENTA, SIGNAL = 3.5; EXPRESSED IN LUNG, SIGNAL = 1.6; EXPRESSED IN HELA, SIGNAL = 1.6; EXPRESSED IN BRAIN, SIGNAL = 1.3; EXPRESSED IN HEART, SIGNAL = 1.3; NT HIT: AF133282.1, EVALUE 5.00e-74; SWISSPROT HIT: P28356, EVALUE 8.40e-02; EST_HUMAN HIT: AW732051.1, EVALUE 1.00e-124
gccaccccgggctctctgctgtacatatttgagactagtttttattccttgtgaagatgatatactatttttgttaagcgtgtctgtatttatgtgtgaggagctgctggcttgcagtgcgcgtgcacgtggagagctggtgcccggagattggacggcctgatgctccctcccctgccctggtccagggaagctggccgagggtcctggctcctgaggggcatctgcccctcccccaacccccaccccacacttgttccagctctttgaaatagtctgtgtgaaggtgaaagtgcagttcagtaataaa

SEQ ID NO: 15669 - DNA, 273 bp, Homo sapiens
  MAP TO CHR17.1; EXPRESSED IN FETAL LIVER, SIGNAL = 0.53; EXPRESSED IN BRAIN, SIGNAL = 0.56; EXPRESSED IN HEART, SIGNAL = 0.5; EXPRESSED IN BONE MARROW, SIGNAL = 0.52; EXPRESSED IN ADULT LIVER, SIGNAL = 1.2; NT HIT: AF333981.1, EVALUE 1.60e-02; SWISSPROT HIT: Q9JIB6, EVALUE 2.20e+00
tccatgggctgtctctgcctctgattcaaaccatctttacaactccctgccaaatcccttactttgattttccatatggaggcttggtctcatttgccaggttggtgtttataaggatgggttttttgacagtttcgctgtcggtgaaacagaggatgggaccccaccccttgaacatgaatcactttcttgtcatccaaaaaagagtgaaagatcaacattctgaagcaataacaacaacaaaatagaaaccccagaggtatctagcaatgg

SEQ ID NO: 15670 - DNA, 124 bp, Homo sapiens
  MAP TO CHR5.1; EXPRESSED IN BONE MARROW, SIGNAL = 0.7; EXPRESSED IN LUNG, SIGNAL = 0.87; EXPRESSED IN BRAIN, SIGNAL = 0.66; EXPRESSED IN HEART, SIGNAL = 0.78; EST_HUMAN HIT: BE884247.1, EVALUE 1.00e-57; NT HIT: gi14722739, EVALUE 8.00e-58; SWISSPROT HIT: Q13283, EVALUE 6.00e-04
agccccgtccagagtctaagcctgaatctcagattccaccacaaagacctcagcgggatcaaagagtgcgagaacaacgaataaatattcctccccaaaggggacccagaccaagtaagagctc

SEQ ID NO: 15671 - DNA, 147 bp, Homo sapiens
  MAP TO CHR6.1; EXPRESSED IN ADULT LIVER, SIGNAL = 0.77; EXPRESSED IN FETAL LIVER, SIGNAL = 0.54; EXPRESSED IN HELA, SIGNAL = 0.55; EXPRESSED IN BRAIN, SIGNAL = 0.55
agagctggaatgtgtataatgtaaagagacagttgcattaaagcattaggcctcatggcctgattaacatcatttgatcttttcctattgaaaagaccctatgtgtttccaaaggcagtggctttttaaataaaaccagaagtctgg

SEQ ID NO: 15672 - DNA, 140 bp, Homo sapiens
  MAP TO CHR1.1; EXPRESSED IN ADULT LIVER, SIGNAL =  17; EXPRESSED IN PLACENTA, SIGNAL =  56; EXPRESSED IN BRAIN, SIGNAL = 3.5; EXPRESSED IN LUNG, SIGNAL =  37; EXPRESSED IN HEART, SIGNAL = 9.7; SWISSPROT HIT: P40429, EVALUE 2.00e-08; EST_HUMAN HIT: BE274986.1, EVALUE 8.00e-53; NT HIT: gi14591905, EVALUE 2.00e-52
gaggctacggaaacgggccgagaagaacgtggagaagaaaactgacaaatacacagaggtcctcaagacccacgggctcctggtctgagcccaataaagactgttaattcctcatgcttggcctggcctgcccttcctcc

SEQ ID NO: 15673 - DNA, 180 bp, Homo sapiens
  MAP TO CHR16.1; EXPRESSED IN BONE MARROW, SIGNAL = 1.9; EXPRESSED IN ADULT LIVER, SIGNAL = 4.2; EXPRESSED IN LUNG, SIGNAL = 1.7; EXPRESSED IN FETAL LIVER, SIGNAL = 1.5; EXPRESSED IN HELA, SIGNAL = 2.3; EXPRESSED IN BRAIN, SIGNAL = 2.1; EXPRESSED IN HEART, SIGNAL = 1.8; SWISSPROT HIT: Q9Y4W6, EVALUE 2.00e-18; EST_HUMAN HIT: AA350737.1, EVALUE 2.00e-88; NT HIT: gi15317433, EVALUE 1.00e-91
atacctttggaatttttgctcctaagtcctgatactgcttgggattcttcaggaaattcacaaattccataatttccaatttgattcttcgcacccagctacgtctgcaaataacacatcgatgttgctttttaagatcttggctgctgtctcaccaacaccgaagaggccccctcctcg

SEQ ID NO: 15674 - DNA, 152 bp, Homo sapiens
  MAP TO CHR19.1; EXPRESSED IN HELA, SIGNAL = 4.2; EXPRESSED IN BRAIN, SIGNAL = 3.3; EXPRESSED IN LUNG, SIGNAL = 1.2; EXPRESSED IN HEART, SIGNAL = 1.2; EXPRESSED IN BONE MARROW, SIGNAL = 2.6; EXPRESSED IN ADULT LIVER, SIGNAL = 1.8; EXPRESSED IN PLACENTA, SIGNAL = 3.7; EXPRESSED IN FETAL LIVER, SIGNAL = 2.6; SWISSPROT HIT: P09421, EVALUE 8.80e-01; EST_HUMAN HIT: AL571521.1, EVALUE 1.00e-58; NT HIT: gi14786883, EVALUE 2.00e-80
cagaccctggccatcgagggcggcgccgaggacctgggccaggaggaggtggtccagcagtgcatgcggaaccagccgtggctggaacagctctttgactccttcagtgacctgctggcccaagcacaggcccacagccgctgcgggtgacc

SEQ ID NO: 15675 - DNA, 149 bp, Homo sapiens
  MAP TO CHR12.1; EXPRESSED IN LUNG, SIGNAL = 4.9; EXPRESSED IN BRAIN, SIGNAL = 3.8; EXPRESSED IN HEART, SIGNAL = 3.5; EXPRESSED IN ADULT LIVER, SIGNAL = 3.6; EXPRESSED IN PLACENTA, SIGNAL = 5.1; EST_HUMAN HIT: BG755897.1, EVALUE 4.80e-02
gagctgacaggctggggctgaaagaccggcccctcagctagaaatagccctccgagaagtgtgtggtggctacgtgtccacagggaagggaggaggcagggcaggggagccaaggagtcccaggatcccgagataacaccagtccggat

SEQ ID NO: 15676 - DNA, 194 bp, Homo sapiens
  MAP TO CHR19.1; EXPRESSED IN LUNG, SIGNAL = 1.9; EXPRESSED IN HEART, SIGNAL =   2; EXPRESSED IN FETAL LIVER, SIGNAL =   3; EXPRESSED IN BRAIN, SIGNAL = 3.6; EXPRESSED IN BONE MARROW, SIGNAL = 4.3; EXPRESSED IN ADULT LIVER, SIGNAL = 2.7; EXPRESSED IN PLACENTA, SIGNAL =   3; EXPRESSED IN HELA, SIGNAL = 2.4; SWISSPROT HIT: P25172, EVALUE 1.10e+00; EST_HUMAN HIT: BF838015.1, EVALUE 2.60e-01; NT HIT: X16290.1, EVALUE 1.70e-01
cagcactgccacctcagctcctggagaaagtctcggtgtgacagcctgcaaagtaatcctgcatttgaatttcactgacaaatcctggcttcctccagacaagctccaacctgcacagatggcccctcgcatcaaaaagtaaaaataacaaagcttgcaattctgggcctccctttttctctgggcagatgtgc

SEQ ID NO: 15677 - DNA, 166 bp, Homo sapiens
  MAP TO CHR20.1; EXPRESSED IN HELA, SIGNAL = 0.99; EXPRESSED IN LUNG, SIGNAL = 1.6; EXPRESSED IN BRAIN, SIGNAL = 0.97; EXPRESSED IN HEART, SIGNAL = 0.86; EXPRESSED IN BONE MARROW, SIGNAL = 1.2; EXPRESSED IN ADULT LIVER, SIGNAL = 1.7; SWISSPROT HIT: Q07050, EVALUE 2.00e-22; EST_HUMAN HIT: R60159.1, EVALUE 4.00e-80; NT HIT: M60705.1, EVALUE 4.00e-85
attcttctagggtagtagagtcaaagaagaaggctgttcagagactggaggaacagttgatgaagctggaagttcaagccacagaccgagaggaaaataaacagattgccctgggaacctccaaactcaattatctggaccctaggatcacagtggcttggtaagt

SEQ ID NO: 15678 - DNA, 158 bp, Homo sapiens
  MAP TO CHR8.1; EXPRESSED IN ADULT LIVER, SIGNAL = 1.4; EXPRESSED IN FETAL LIVER, SIGNAL =   2; EXPRESSED IN HELA, SIGNAL =   3; EXPRESSED IN BRAIN, SIGNAL = 2.2; EXPRESSED IN LUNG, SIGNAL = 1.2; EXPRESSED IN HEART, SIGNAL =   1; EXPRESSED IN BONE MARROW, SIGNAL = 2.5; SWISSPROT HIT: Q9JKZ2, EVALUE 7.60e+00; EST_HUMAN HIT: BF699225.1, EVALUE 1.00e-67; NT HIT: gi14732953, EVALUE 6.00e-04
acctgcagaataaaatcttcatctatcggggaaaggagtatgagaggcgagaggacttcagcctgaggttgttaacccagttccccaatgcggagaagatgaccagtaccacgcctcctggggaagacatcaagtcgtcccccaagcagtgtatcctt

SEQ ID NO: 15679 - DNA, 122 bp, Homo sapiens
  MAP TO CHR2.1; EXPRESSED IN FETAL LIVER, SIGNAL = 0.34; EXPRESSED IN LUNG, SIGNAL = 0.76; EXPRESSED IN BRAIN, SIGNAL = 0.39; EXPRESSED IN HEART, SIGNAL = 0.7; EXPRESSED IN ADULT LIVER, SIGNAL = 0.43; NT HIT: gi14742988, EVALUE 1.00e-59; EST_HUMAN HIT: AL561878.1, EVALUE 2.00e-59
acctccttgaactctttcacagtcttaaagtatagcctctgcttttctaacagctccaagtactggtcgttcaactggtctcttctcattttgttctcttgctttttcttttccatctgttg

SEQ ID NO: 15680 - DNA, 121 bp, Homo sapiens
  MAP TO CHR19.1; EXPRESSED IN FETAL LIVER, SIGNAL =   4; EXPRESSED IN BONE MARROW, SIGNAL = 4.3; EXPRESSED IN PLACENTA, SIGNAL = 5.7; EXPRESSED IN LUNG, SIGNAL = 2.9; EXPRESSED IN BRAIN, SIGNAL = 4.1; EXPRESSED IN HELA, SIGNAL = 6.7; EXPRESSED IN HEART, SIGNAL = 2.6; EXPRESSED IN ADULT LIVER, SIGNAL = 4.8; EST_HUMAN HIT: BG396474.1, EVALUE 8.00e-62; NT HIT: gi11427371, EVALUE 5.00e-62; SWISSPROT HIT: P30118, EVALUE 2.70e+00
aggaggaagtttggcaggatgaagctcctgcagttctgtgagaaccaccggcctgcctactggggtacctggaataagaagacggcactcatccgcgcgcgagacccctgggcccaggaca

SEQ ID NO: 15681 - DNA, 193 bp, Homo sapiens
  MAP TO CHR2.1; EXPRESSED IN BONE MARROW, SIGNAL = 3.2; EXPRESSED IN ADULT LIVER, SIGNAL = 3.9; EXPRESSED IN PLACENTA, SIGNAL = 3.9; EXPRESSED IN FETAL LIVER, SIGNAL =   4; EXPRESSED IN LUNG, SIGNAL = 3.4; EXPRESSED IN HELA, SIGNAL = 4.5; EXPRESSED IN BRAIN, SIGNAL = 4.4; EXPRESSED IN HEART, SIGNAL = 2.5; EST_HUMAN HIT: BG676751.1, EVALUE 1.00e+00; SWISSPROT HIT: Q09288, EVALUE 2.50e+00
agccttgtggccataagcctgtgatgactcatgccagctttgggtgctctaagatgctttcccatgtctgtaatgcttttcatatcatcctacacactcactgtcacctctcctcaccccagcacacagaaaagatgtgcttattatgtgcacttaggttttgttgtactattaaacacaatgacccactcct

SEQ ID NO: 15682 - DNA, 398 bp, Homo sapiens
  MAP TO CHR7.1; EXPRESSED IN PLACENTA, SIGNAL = 4.8; EXPRESSED IN FETAL LIVER, SIGNAL = 5.5; EXPRESSED IN HELA, SIGNAL = 3.7; EXPRESSED IN BRAIN, SIGNAL = 5.7; EXPRESSED IN BONE MARROW, SIGNAL = 5.8; EXPRESSED IN ADULT LIVER, SIGNAL = 6.8; EXPRESSED IN LUNG, SIGNAL = 4.6; EXPRESSED IN HEART, SIGNAL = 4.4; NT HIT: gi10863946, EVALUE 0.00e+00; EST_HUMAN HIT: AW611815.1, EVALUE 0.00e+00; SWISSPROT HIT: Q64727, EVALUE 1.20e-01
tttaatgttttatagccagaacatttgttgaacacaagtgataatgttacagtgcagtgtcacacaccaagagtcatcattcagactgttgccacagaggacatcacttcttccatatcccaagcagaactgacagtcgatagtgatattcagtcatctgattttcctgagcctccagacgccctagaagcagacactttcccagatgaaattcatcaccctaagatgactgtggagccatcatttaatgatgctcatgtatccaaattcagtgaccaaaatagcacagaactgatgaatagtgttatggtcagaacagaagaagaaatctctgacaccgaccttaaacaagaggaatcaccctctgatttagccagtgcttatgttactgaggtaag

SEQ ID NO: 15683 - DNA, 297 bp, Homo sapiens
  MAP TO CHR1.1; EXPRESSED IN BRAIN, SIGNAL = 6.2; EXPRESSED IN LUNG, SIGNAL = 4.3; EXPRESSED IN HEART, SIGNAL = 4.8; EXPRESSED IN ADULT LIVER, SIGNAL = 5.9; EXPRESSED IN BONE MARROW, SIGNAL = 7.6; EXPRESSED IN PLACENTA, SIGNAL = 5.8; EXPRESSED IN FETAL LIVER, SIGNAL = 5.2; EXPRESSED IN HELA, SIGNAL = 6.2; SWISSPROT HIT: P35658, EVALUE 7.80e+00; NT HIT: U49854.1, EVALUE 4.30e+00; EST_HUMAN HIT: BG566496.1, EVALUE 1.60e+00
ggggaggaagcttggaggaacataaaagatgcaatccacagctgtctgcttttaattataattatcccctttcgcttcctttctggctaatgaggggggggatttaaatttttttctcccttttctcccccttcctcctttccctggaattgaggggtggggtgagttcaggatcctcctccccttcctcccttatcccctggttactgggagaaaggcagactccagagggtggtgacagtatgaagagatttgcaggaacaaaagaaggacaggtttggattgctggacacgtcc

SEQ ID NO: 15684 - DNA, 175 bp, Homo sapiens
  MAP TO CHR12.1; EXPRESSED IN HELA, SIGNAL = 0.57; EXPRESSED IN BRAIN, SIGNAL = 0.69; EXPRESSED IN HEART, SIGNAL = 0.97; EXPRESSED IN BONE MARROW, SIGNAL = 0.7; EXPRESSED IN LUNG, SIGNAL = 0.94; SWISSPROT HIT: O32124, EVALUE 3.30e+00; NT HIT: gi14755124, EVALUE 3.00e-86; EST_HUMAN HIT: BE536459.1, EVALUE 4.00e-86
taagcattcaggtagaactggaagccgaggcggaaaagatgcgggtgtcccagcaagaattactttctgttgatgaatctgtttacactccagactctgatgtggccgcaccacagatcaacaggaacctcatccagaaggctggttaccttaatcttagaaagtgagaacgcca

SEQ ID NO: 15685 - DNA, 172 bp, Homo sapiens
  MAP TO CHR2.1; EXPRESSED IN PLACENTA, SIGNAL = 1.5; EXPRESSED IN LUNG, SIGNAL = 0.71; EXPRESSED IN HELA, SIGNAL = 2.1; EXPRESSED IN BRAIN, SIGNAL = 1.7; EXPRESSED IN BONE MARROW, SIGNAL = 1.3; SWISSPROT HIT: P29371, EVALUE 3.80e-01; NT HIT: U62293.1, EVALUE 2.00e-03; EST_HUMAN HIT: BG957228.1, EVALUE 1.00e-03
ttttcttggccccttcgccagactcgcggcaggggtgcctggtctactcggctcgctgttctcagccccttgcaggagggagcacttgagcaagtgagtgcaggatccagccggccactccactgacacaggagcaagctctgtgcagggcccgcagccagaccaggtgtgt

SEQ ID NO: 15686 - DNA, 129 bp, Homo sapiens
  MAP TO CHR7.1; EXPRESSED IN ADULT LIVER, SIGNAL = 3.3; EXPRESSED IN PLACENTA, SIGNAL = 3.7; EXPRESSED IN FETAL LIVER, SIGNAL = 2.2; EXPRESSED IN LUNG, SIGNAL = 1.9; EXPRESSED IN HELA, SIGNAL = 3.6; EXPRESSED IN BRAIN, SIGNAL = 2.9; EXPRESSED IN HEART, SIGNAL = 1.5; EST_HUMAN HIT: AV725304.1, EVALUE 9.90e+00
ttattttaagatacaaaatttctcccttatattaggatataatcttgacagctaagggggtaaacagtcacaagaggttgctcaatggaaaaatttcagtagcgctaagttcaagaagaatttaaaatg

SEQ ID NO: 15687 - DNA, 163 bp, Homo sapiens
  MAP TO CHR20.1; EXPRESSED IN PLACENTA, SIGNAL = 4.2; EXPRESSED IN FETAL LIVER, SIGNAL = 3.9; EXPRESSED IN HELA, SIGNAL = 2.8; EXPRESSED IN BRAIN, SIGNAL = 4.7; EXPRESSED IN LUNG, SIGNAL = 3.9; EXPRESSED IN HEART, SIGNAL = 4.1; SWISSPROT HIT: P33453, EVALUE 5.80e+00; EST_HUMAN HIT: AW976116.1, EVALUE 8.30e-01
ccaggataccactgcgtctagggtagcacctctaataaaactaattgatatttctgcagcaaactgtgtaaatattcacactaattggtgtaaaacatcttcatatccattgaggtcagatttttgcgtgcaaagaatcaaccatgaattaactgtaaaagaa

SEQ ID NO: 15688 - DNA, 183 bp, Homo sapiens
  MAP TO CHR19.1; EXPRESSED IN BRAIN, SIGNAL = 3.9; EXPRESSED IN LUNG, SIGNAL = 4.3; EXPRESSED IN HEART, SIGNAL = 2.7; EXPRESSED IN BONE MARROW, SIGNAL = 4.9; EXPRESSED IN ADULT LIVER, SIGNAL =   5; EXPRESSED IN FETAL LIVER, SIGNAL =   6; NT HIT: gi14756722, EVALUE 3.00e-92; EST_HUMAN HIT: U70058.1, EVALUE 7.00e-88
ccagtacatggagggcttcaacgacgagctggaagccttcaaggagcgtgtgcgggccgtgccaagctgcgcatcgagaaggccatgaaggagtacgaggaggaggagcgcaagaagcggctcggccccggcggcctggaccccgtcgaggtctacgagtccctccctgaggtggggctcccc

SEQ ID NO: 15689 - DNA, 201 bp, Homo sapiens
  MAP TO CHR7.1; EXPRESSED IN BRAIN, SIGNAL = 2.6; EXPRESSED IN HEART, SIGNAL = 2.2; EXPRESSED IN ADULT LIVER, SIGNAL = 3.4; EXPRESSED IN BONE MARROW, SIGNAL =   3; EXPRESSED IN PLACENTA, SIGNAL = 2.4; EXPRESSED IN LUNG, SIGNAL = 2.1; EXPRESSED IN FETAL LIVER, SIGNAL = 2.3; NT HIT: L13756.1, EVALUE 1.00e-109; EST_HUMAN HIT: BG675041.1, EVALUE 1.00e-104; SWISSPROT HIT: P49819, EVALUE 2.00e-31
agggttcagtttggcaaagacttggtgcagatgtgacagcagttgaatttttaggtcatgtaggtggagttggaattgatatggagatatctaaaaactttcaacgcatccttcaaaaacaggggtttaaatttaaattgaatacaaaggttactggtgctaccaagaagtcagatggaaaaattgatgtttcgtaagtat

SEQ ID NO: 15690 - DNA, 178 bp, Homo sapiens
  MAP TO CHR22.1; EXPRESSED IN BRAIN, SIGNAL = 7.7; EXPRESSED IN HEART, SIGNAL = 6.1; EXPRESSED IN ADULT LIVER, SIGNAL = 7.7; EXPRESSED IN BONE MARROW, SIGNAL = 8.5; EXPRESSED IN LUNG, SIGNAL = 7.5; NT HIT: Y18000.1, EVALUE 8.00e-96; EST_HUMAN HIT: BF956772.1, EVALUE 3.00e-31; SWISSPROT HIT: Q00153, EVALUE 1.30e-01
aaagagaaatcacagcaaggatcatgagaacagaacctcgggctcgcagaacgagtttgcatctggctcttccctcccactgttgcagcaacgaatccggtgccgaggagagctgcactgaaacacatcttcagtgccgaggggccgaacagggtgttttactgcctcaaataaggcc

SEQ ID NO: 15691 - DNA, 160 bp, Homo sapiens
  MAP TO CHR6.1; EXPRESSED IN FETAL LIVER, SIGNAL = 1.8; EXPRESSED IN BRAIN, SIGNAL = 1.5; EXPRESSED IN LUNG, SIGNAL = 1.2; EXPRESSED IN HEART, SIGNAL = 1.3; EXPRESSED IN ADULT LIVER, SIGNAL = 1.5; EXPRESSED IN PLACENTA, SIGNAL = 1.3; NT HIT: gi14782848, EVALUE 4.00e-85; EST_HUMAN HIT: BG402863.1, EVALUE 6.00e-85; SWISSPROT HIT: Q08274, EVALUE 4.40e+00
cgctctgtccccagggccttgacctgctgctgggcatctctgagctggtcctgaagctgctggttctcttggtccaacgtttgagtcctctcacggcaccgttttagttctgcatttaggtcacataactgaccctttaagtcccaggctggacgtttgc

SEQ ID NO: 15692 - DNA, 130 bp, Homo sapiens
  MAP TO CHRX.1; EXPRESSED IN FETAL LIVER, SIGNAL = 0.48; EXPRESSED IN LUNG, SIGNAL = 0.63; EXPRESSED IN BRAIN, SIGNAL = 0.45; EXPRESSED IN HEART, SIGNAL = 0.64; EXPRESSED IN BONE MARROW, SIGNAL = 0.48; EST_HUMAN HIT: AA610346.1, EVALUE 6.40e-01
gagaaggtcacaggcataagccatcagctgaagtgctcacaagtgtctgagcatttgggtattctgctggtcaagtggatctgggaagagcaccaatatcatctattaacagagggttagaaaaactaga

SEQ ID NO: 15693 - DNA, 155 bp, Homo sapiens
  MAP TO CHR2.1; EXPRESSED IN HELA, SIGNAL = 0.59; EXPRESSED IN BRAIN, SIGNAL = 0.54; EXPRESSED IN HEART, SIGNAL = 2.6; EXPRESSED IN BONE MARROW, SIGNAL = 0.62; EXPRESSED IN FETAL LIVER, SIGNAL = 0.72; EXPRESSED IN LUNG, SIGNAL =   3; SWISSPROT HIT: P46952, EVALUE 3.00e-24; NT HIT: gi13637830, EVALUE 1.00e-78; EST_HUMAN HIT: AV697461.1, EVALUE 2.00e-78
attacctgggtctcataggtgtccccaaacaggctgagtggtgtgcctgcctgcagctccctgtggtggctgtccagccaggcatccagggacatgggctccatgatggatcgtgtgctcagagggaatggtggctccttgagcagctggtctgc

SEQ ID NO: 15694 - DNA, 134 bp, Homo sapiens
  MAP TO CHR9.1; EXPRESSED IN ADULT LIVER, SIGNAL = 3.6; EXPRESSED IN BONE MARROW, SIGNAL = 3.7; EXPRESSED IN PLACENTA, SIGNAL = 4.1; EXPRESSED IN LUNG, SIGNAL = 3.4; EXPRESSED IN FETAL LIVER, SIGNAL = 3.4; EXPRESSED IN HELA, SIGNAL =   5; EXPRESSED IN BRAIN, SIGNAL = 4.2; EXPRESSED IN HEART, SIGNAL = 3.3; SWISSPROT HIT: P40484, EVALUE 4.00e-11; NT HIT: gi13639766, EVALUE 1.00e-69; EST_HUMAN HIT: AU132477.1, EVALUE 4.00e-67
tcctgccaccgatactcatatttggggccccctgacatcacaggacaggtccgctcggtgcagaactcacagatggtgccatagatgaggttgatccgattgaagaagtccaccacatgtactgccacccagtc

SEQ ID NO: 15695 - DNA, 145 bp, Homo sapiens
  MAP TO CHR19.1; EXPRESSED IN HEART, SIGNAL = 0.95; EXPRESSED IN LUNG, SIGNAL = 1.8; EXPRESSED IN FETAL LIVER, SIGNAL = 0.5; EXPRESSED IN HELA, SIGNAL = 0.39; EXPRESSED IN BRAIN, SIGNAL = 0.62; EST_HUMAN HIT: BF812544.1, EVALUE 3.00e-46; SWISSPROT HIT: P15621, EVALUE 4.00e-20; NT HIT: gi7706462, EVALUE 8.00e-40
taaaggctttgccacattgtttacatatatagggtttctctccagtgtgaattcttgcatgttttcgaatggaactggaacaactgaaggctttcccacatttattacattcatagggtttctctccagtgtgagttctttcatg

SEQ ID NO: 15696 - DNA, 254 bp, Homo sapiens
  MAP TO CHR19.1; EXPRESSED IN PLACENTA, SIGNAL = 7.5; EXPRESSED IN FETAL LIVER, SIGNAL = 9.7; EXPRESSED IN HELA, SIGNAL = 7.2; EXPRESSED IN BRAIN, SIGNAL = 7.1; EXPRESSED IN BONE MARROW, SIGNAL = 8.2; EXPRESSED IN ADULT LIVER, SIGNAL =  11; EXPRESSED IN LUNG, SIGNAL = 3.6; EXPRESSED IN HEART, SIGNAL = 4.1; NT HIT: gi14756107, EVALUE 1.00e-128; EST_HUMAN HIT: AA985483.1, EVALUE 6.00e-12; SWISSPROT HIT: Q19981, EVALUE 1.70e-01
atggttacctgtgggcctgatccccggacaagcaggccccatggcaccaggtgcaggccccagactggttacaagcttcaggtgaggacagcaggcggcaggggtcagggggcagggtcagtgccagcaggcggcccagggccactcccccgaaacccccagagatatacaggcggctcccgactgctgccacagcatgggccacagactcctccattgggggccccacagaggccgagcctgaggaaagatgg

SEQ ID NO: 15697 - DNA, 188 bp, Homo sapiens
  MAP TO CHR10.1; EXPRESSED IN FETAL LIVER, SIGNAL = 3.6; EXPRESSED IN LUNG, SIGNAL = 1.8; EXPRESSED IN BRAIN, SIGNAL = 4.5; EXPRESSED IN HEART, SIGNAL = 2.5; EXPRESSED IN BONE MARROW, SIGNAL = 3.8; NT HIT: AJ276513.1, EVALUE 6.60e-01; EST_HUMAN HIT: BE077398.1, EVALUE 6.20e-02; SWISSPROT HIT: Q99558, EVALUE 1.30e-01
ctctgtcccccagggattgtacaggcctggaacacactgcacatgccacctggtccttccccccaggccccagctctgtgagcggtgggaaggggcccgccaaacaccctggcttcattgtgccccagaaagaggggactaattactcgcctacactctggagcgcccagagagaaaacagaggccag

SEQ ID NO: 15698 - DNA, 133 bp, Homo sapiens
  MAP TO CHR7.1; EXPRESSED IN BRAIN, SIGNAL = 2.9; EXPRESSED IN HEART, SIGNAL = 2.6; EXPRESSED IN BONE MARROW, SIGNAL = 2.3; EXPRESSED IN FETAL LIVER, SIGNAL = 3.7; EXPRESSED IN LUNG, SIGNAL = 1.9; NT HIT: gi14745434, EVALUE 6.00e-59; EST_HUMAN HIT: AV694401.1, EVALUE 6.00e-66; SWISSPROT HIT: P49606, EVALUE 7.80e+00
tcctgtcttgcaggtgactcagatattgctgggggttgtgagttgtgttcttggagtgtgtctcagcttggggccctggactgtgctgagtgcctcaggctgtgccttctgggcggggtctgtggtgagtaag

SEQ ID NO: 15699 - DNA, 274 bp, Homo sapiens
  MAP TO CHR20.1; EXPRESSED IN BONE MARROW, SIGNAL = 6.2; EXPRESSED IN FETAL LIVER, SIGNAL = 6.1; EXPRESSED IN PLACENTA, SIGNAL = 5.8; EXPRESSED IN HELA, SIGNAL =   8; EXPRESSED IN BRAIN, SIGNAL = 4.9; EXPRESSED IN LUNG, SIGNAL = 3.4; EXPRESSED IN ADULT LIVER, SIGNAL = 5.7; EXPRESSED IN HEART, SIGNAL =   4; NT HIT: gi14772626, EVALUE 0.00e+00; EST_HUMAN HIT: BE466468.1, EVALUE 0.00e+00; SWISSPROT HIT: O08529, EVALUE 7.60e-01
ttggagggacggctcttgttatagacgaggaagtctgagatgtcgtgccatacattgctgtcctcatagaggtaggtcatggaggactgcagcgagggctgcagggtggatcggtgatactcaaagagccacagcaccagcccccacaccaccgcagtgagcagcgggaacgggtcccacctgggttcagggatgtagcccttctctacagccaggcggctcagggcaaacaggacgcgtgacaacaggtacatgttgatctgcaaagagggaa

SEQ ID NO: 15700 - DNA, 196 bp, Homo sapiens
  MAP TO CHR19.1; EXPRESSED IN PLACENTA, SIGNAL = 1.9; EXPRESSED IN LUNG, SIGNAL = 0.78; EXPRESSED IN BRAIN, SIGNAL = 1.2; EXPRESSED IN HEART, SIGNAL = 0.96; EXPRESSED IN ADULT LIVER, SIGNAL = 0.87; EXPRESSED IN BONE MARROW, SIGNAL = 0.92; SWISSPROT HIT: Q99676, EVALUE 1.00e-09; NT HIT: gi14768838, EVALUE 1.00e-106; EST_HUMAN HIT: AV708395.1, EVALUE 3.00e-59
tgtaagttttctgacgccttttaagggactgaccaggaataaaggtttcctcacacactttacccttgttttcaaatgggttccctctagtatggattttctgatgttctttcagggatgagctatgaaggaaagtctccccacacaccttacattcgtacattttctctttaccatacattttctgaaactcatt

SEQ ID NO: 15701 - DNA, 502 bp, Homo sapiens
  MAP TO CHR5.1; EXPRESSED IN PLACENTA, SIGNAL = 2.3; EXPRESSED IN FETAL LIVER, SIGNAL = 1.1; EXPRESSED IN BRAIN, SIGNAL = 1.2; EXPRESSED IN LUNG, SIGNAL = 1.7; EXPRESSED IN HEART, SIGNAL = 3.1; EXPRESSED IN ADULT LIVER, SIGNAL = 1.8; SWISSPROT HIT: Q9UN66, EVALUE 5.00e-36; NT HIT: gi14724464, EVALUE 0.00e+00; EST_HUMAN HIT: BI488619.1, EVALUE 0.00e+00
tggaccagaacgacaacgcgcccgagatcctgtaccccgccctccccacagacggttccactggcgtggagctggcgcctcgctccgcagagcccggctacctggtgaccaaggtggtggcggtggacagagactcgggccagaacgcctggctgtcctaccgcctgctcaaggccagcgagccgggactcttctcggtgggtctgcacacgggcgaggtgcgcacggcgcgagccctgctggacagagacgcgctcaagcagagcctcgtggtggccgtccaggaccacggccagccccctctctccgccactgtcacgctcaccgtggccgtggccgacaggatccccgacatcctggccgacctgggcagcctcgagccctccgccaaacccaacgattcggacctcactctgtacctggtggtggcggtggccgcggtctcctgcgtcttcctggccttcgtcatcgtgctgctggcgctcaggctgcggcgctggca

SEQ ID NO: 15702 - DNA, 458 bp, Homo sapiens
  MAP TO CHR7.1; EXPRESSED IN LUNG, SIGNAL = 0.98; EXPRESSED IN HELA, SIGNAL = 0.83; EXPRESSED IN BRAIN, SIGNAL = 0.63; EXPRESSED IN HEART, SIGNAL = 0.96; EXPRESSED IN BONE MARROW, SIGNAL = 0.62; EXPRESSED IN FETAL LIVER, SIGNAL = 0.56; SWISSPROT HIT: Q9UDV6, EVALUE 4.00e-77; NT HIT: gi11420492, EVALUE 0.00e+00; EST_HUMAN HIT: BE546228.1, EVALUE 0.00e+00
ccagaggagagccttaggcccaggccacggctgaaaccacagaccaaaaaggccaagctgcatcagtgtgatgtgtgcctgaggagcttcagctgcaaggtgagcctggtgacccatcagcgttgccacctgcaggaggggcccagtgccggccagcatgtccaagagaggttctcacccaacagcctggttgccctgcctggccacatcccttggaggaaaagccggagttccctcatctgtggttactgtggcaagagcttcagtcacccatctgacttggtgcggcaccagcgcatccacacgggtgagcggccctacagctgcactgagtgtgagaagagctttgtccagaagcagcacctcctgcagcaccagaagatccaccagcgggagcggggtgggctggccctggagcccggaaggcccaatggcctgctttaagggtgcagcccctc

SEQ ID NO: 15703 - DNA, 482 bp, Homo sapiens
  MAP TO CHR2.1; EXPRESSED IN ADULT LIVER, SIGNAL = 7.8; EXPRESSED IN BONE MARROW, SIGNAL =  12; EXPRESSED IN PLACENTA, SIGNAL = 8.2; EXPRESSED IN LUNG, SIGNAL =  11; EXPRESSED IN FETAL LIVER, SIGNAL =  12; EXPRESSED IN HELA, SIGNAL = 9.4; EXPRESSED IN BRAIN, SIGNAL =  13; EXPRESSED IN HEART, SIGNAL =  13; EST_HUMAN HIT: BG211364.1, EVALUE 0.00e+00; SWISSPROT HIT: P32323, EVALUE 8.70e-01; NT HIT: gi14723939, EVALUE 0.00e+00
tcaccatggtgcccgccatcttggtatctattgtcctgctggtagccaccaccctggtatccacttcctgtatatgaagaagatgtttggaagccaccataacctccgccttgatagccaccactgctgtggccaccatgatagccacctggctggaaacctgaatctcgataaccaccatcttggtagccacctcctccaccactccctccatctgtccagcctccttgatgcttatttcctcttcctccccctcggccaccatggtcatagccaccacgtccacctctcccgcctccttgttcatgacctcctcgtcctccgtatgaggaatgttcatagccacctctccctcctcctcggcctcctgtttgctgctgggggccatcttgcctcttctgccacggtggcatctctgggggtggaggttcgatttcattgggtctaccacctctgtcaggcaccctgcccatcaacaccta

SEQ ID NO: 15704 - DNA, 169 bp, Homo sapiens
  MAP TO CHR17.1; EXPRESSED IN ADULT LIVER, SIGNAL = 1.7; EXPRESSED IN PLACENTA, SIGNAL = 1.4; EXPRESSED IN LUNG, SIGNAL =   4; EXPRESSED IN FETAL LIVER, SIGNAL = 1.3; EXPRESSED IN BRAIN, SIGNAL = 1.5; SWISSPROT HIT: P54259, EVALUE 1.50e+00; NT HIT: U14655.1, EVALUE 5.90e-01
caaggaaaggaagcaaggagacttccacacctctgcagcatcacctgctccagcaagctcccaaagccaccggagccagccagactgcctgggccccacacccccttctctgacggctttagctccagcccagcccacaggatgcagtgcctgatgccacttccgagca

SEQ ID NO: 15705 - DNA, 212 bp, Homo sapiens
  MAP TO CHR6.1; EXPRESSED IN LUNG, SIGNAL = 4.6; EXPRESSED IN HELA, SIGNAL = 4.8; EXPRESSED IN FETAL LIVER, SIGNAL = 4.8; EXPRESSED IN BRAIN, SIGNAL = 5.4; EXPRESSED IN HEART, SIGNAL = 4.7; EXPRESSED IN ADULT LIVER, SIGNAL = 4.9; EXPRESSED IN BONE MARROW, SIGNAL = 5.4; NT HIT: D63395.1, EVALUE 1.00e-115; EST_HUMAN HIT: AA283694.1, EVALUE 2.80e-01; SWISSPROT HIT: P31695, EVALUE 9.00e-36
ccctgggaacctctgctggatggaggggcctgtccccaggctcacaccgtgggcactggggagacccccctgcacctggctgcccgattctcccggccaaccgctgcccgccgcctccttgaggctggagccaaccccaaccagccagaccgggcagggcgcacaccccttcatgctgctgtggctgctgatgctcgggaggtctgccaggt

SEQ ID NO: 15706 - DNA, 278 bp, Homo sapiens
  MAP TO CHR4.1; EXPRESSED IN BONE MARROW, SIGNAL =   3; EXPRESSED IN ADULT LIVER, SIGNAL = 3.1; EXPRESSED IN LUNG, SIGNAL = 1.9; EXPRESSED IN BRAIN, SIGNAL = 2.7; EXPRESSED IN HEART, SIGNAL = 1.8; EXPRESSED IN PLACENTA, SIGNAL = 1.9; EXPRESSED IN FETAL LIVER, SIGNAL = 2.2; EXPRESSED IN HELA, SIGNAL = 2.1; NT HIT: U16290.1, EVALUE 0.00e+00; EST_HUMAN HIT: BG533341.1, EVALUE 2.40e-02; SWISSPROT HIT: P40394, EVALUE 2.00e-37
gtcttaccatggtttcaagatgcccaataacttcaaaggtgtatcccacgttgttgcctgtcatttctgacagcacctcactgatgggtttggtagagtccttgggactgatacactcagtggcacctacagccatggccttctcaaatttgtctttgttgaggtcaatcccaatgatcctagatgcaccagctgacttacagcccatgatgactgacaggccaactcctcccaggccaaagacgacgcaagtggaaccaggtttgacctgtggagag

SEQ ID NO: 15707 - DNA, 198 bp, Homo sapiens
  MAP TO CHR11.1; EXPRESSED IN BRAIN, SIGNAL = 0.76; EXPRESSED IN BONE MARROW, SIGNAL = 0.86; NT HIT: AF282290.1, EVALUE 3.00e-43; EST_HUMAN HIT: BF083448.1, EVALUE 1.00e-03; SWISSPROT HIT: Q9GZM6, EVALUE 5.00e-18
acacagcaagcagagctccagctgcccctcttcctcctgttcctgggaatctatgtggtcacagtagtgggcaacctgggcatgattctcctgattgcagtcagccctctacttcacacccccatgtactatttcctcagcagcttgtccttcgtcgatttctgctattcctctgtcattactcccaaaatgctggtg

SEQ ID NO: 15708 - DNA, 169 bp, Homo sapiens
  MAP TO CHR19.1; EXPRESSED IN ADULT LIVER, SIGNAL = 0.89; EXPRESSED IN LUNG, SIGNAL =   1; EXPRESSED IN FETAL LIVER, SIGNAL = 0.88; EXPRESSED IN HELA, SIGNAL = 1.2; EXPRESSED IN BRAIN, SIGNAL = 1.2; EXPRESSED IN HEART, SIGNAL = 0.94; NT HIT: gi14575809, EVALUE 2.00e-90; EST_HUMAN HIT: BG123000.1, EVALUE 4.00e-89; SWISSPROT HIT: P12789, EVALUE 4.00e-16
gcagctggaaggctgggggaatgttgaaaaggccactgacggtgggcttgaggctcagggtgtccggcgggcacgggctctccagggagaaggcttgtaggatggtggtgaagaagaggaagagctccgcttttgccaggccctctccaaggcagacacgcttccctgg

SEQ ID NO: 15709 - DNA, 300 bp, Homo sapiens
  MAP TO CHR17.1; EXPRESSED IN HEART, SIGNAL = 1.6; EXPRESSED IN BONE MARROW, SIGNAL = 1.7; EXPRESSED IN FETAL LIVER, SIGNAL = 1.5; EXPRESSED IN PLACENTA, SIGNAL = 2.2; EXPRESSED IN BRAIN, SIGNAL = 1.6; SWISSPROT HIT: Q02388, EVALUE 2.60e+00; NT HIT: gi14773838, EVALUE 0.00e+00; EST_HUMAN HIT: AL551564.1, EVALUE 0.00e+00
cctggaggcaatgccagctccaggacagaggctcaggtgcccaacgggcaaggcagcccagggggctgtgtctgttcaagtcaggcttccccggcccctcgcgcagcagcgcctccacgggcagcccggggccccaccccacgcactgaagaggccgcctgggctgccatggccctgaccttcctgctggtgctgctcaccctggccacgctctgcacacggctgcacagaaacttccgacgcggggagagcatctactgggggcccacagcggacagccaggacacagtggctggtgag

SEQ ID NO: 15710 - DNA, 114 bp, Homo sapiens
  MAP TO CHR1.1; EXPRESSED IN BONE MARROW, SIGNAL = 0.62; EXPRESSED IN FETAL LIVER, SIGNAL = 0.75; EXPRESSED IN LUNG, SIGNAL = 0.91; EXPRESSED IN BRAIN, SIGNAL = 0.83; EXPRESSED IN HELA, SIGNAL = 3.7; SWISSPROT HIT: O43175, EVALUE 3.00e-15; NT HIT: gi14744620, EVALUE 8.00e-58; EST_HUMAN HIT: BF669377.1, EVALUE 1.00e-57
aggcttgctgaatgacaacacctttgcccagtgcaagaagggggtgcgtgtggtgaactgtgcccgtggagggatcgtggacgaaggcgccctgctccgggccctgcagtctgg

SEQ ID NO: 15711 - DNA, 183 bp, Homo sapiens
  MAP TO CHR5.1; EXPRESSED IN FETAL LIVER, SIGNAL = 0.85; EXPRESSED IN HELA, SIGNAL = 1.2; EXPRESSED IN BRAIN, SIGNAL = 0.94; EXPRESSED IN HEART, SIGNAL = 0.64; EXPRESSED IN BONE MARROW, SIGNAL = 0.95; SWISSPROT HIT: Q11181, EVALUE 7.40e+00; NT HIT: AB060275.1, EVALUE 6.40e-01
gtagatggtgtgagctaagccctgttttgagagttccatagaaggtgtctttgacctattttcaagggctgtggtggtaggaggaatttttggccacatcataaagagttttgtggccacctctgatatacctagctcaggaagttgtaattttccatgattaggttattagtcaccaaagtg

SEQ ID NO: 15712 - DNA, 227 bp, Homo sapiens
  MAP TO CHR4.1; EXPRESSED IN HELA, SIGNAL = 0.59; EXPRESSED IN BRAIN, SIGNAL = 0.88; EXPRESSED IN BONE MARROW, SIGNAL =   1; SWISSPROT HIT: P15699, EVALUE 1.50e+00; NT HIT: M16022.1, EVALUE 2.10e-01; EST_HUMAN HIT: BF895919.1, EVALUE 3.00e-01
ttcccagatggcactcccttggacagcattgcatctttggctctttgtggctgcccatagaggagaacaatggtgagacctgccccagggcacaatactggttacctctgtgccaagacccattattaaaagtgtctttgtaaggacagagttgccagaagacatctttccatagcacatggtcacttttgtgatctttagaattatccaaagcaaatggcctgaaa

SEQ ID NO: 15713 - DNA, 248 bp, Homo sapiens
  MAP TO CHR2.1; EXPRESSED IN ADULT LIVER, SIGNAL = 9.5; EXPRESSED IN BONE MARROW, SIGNAL = 7.1; EXPRESSED IN PLACENTA, SIGNAL = 6.6; EXPRESSED IN LUNG, SIGNAL = 4.4; EXPRESSED IN HELA, SIGNAL = 7.7; EXPRESSED IN FETAL LIVER, SIGNAL =   6; EXPRESSED IN BRAIN, SIGNAL = 8.3; EXPRESSED IN HEART, SIGNAL =   5; NT HIT: gi14779225, EVALUE 0.00e+00; EST_HUMAN HIT: BG744646.1, EVALUE 0.00e+00; SWISSPROT HIT: O76071, EVALUE 3.00e-44
tagctcagaggccttcaggccgctgatacttccagaaggccacctccccatcatcactgcaggaggccagtagccctggctccttggggttccaggccacacagttgacatcctgggaatgggcctgatgcaagtgggctgtcagggagaaggtgggctgctgtggatccgagttgggatcctcctgaaacacgcggatcgcgtcatccccacaagctgtggccagagcccctgtcagctgacacctg

SEQ ID NO: 15714 - DNA, 144 bp, Homo sapiens
  MAP TO CHR19.1; EXPRESSED IN BONE MARROW, SIGNAL = 0.94; EXPRESSED IN ADULT LIVER, SIGNAL = 1.5; EXPRESSED IN PLACENTA, SIGNAL = 1.8; EXPRESSED IN FETAL LIVER, SIGNAL = 0.9; EXPRESSED IN HELA, SIGNAL = 1.3; EXPRESSED IN BRAIN, SIGNAL =   1; EXPRESSED IN LUNG, SIGNAL = 0.87; SWISSPROT HIT: Q01201, EVALUE 6.00e-17; NT HIT: gi14755911, EVALUE 1.00e-75; EST_HUMAN HIT: BI823375.1, EVALUE 2.00e-75
ggccccggcacctccgctgcacacaacagcgctagcgtgtggcggtgccgggggcagcaggtccagcatggtgaagagtgtgggggccgtagggtcgtaggcaaagccatcgtccaggaggtcaggcccgccagggggctccag

SEQ ID NO: 15715 - DNA, 482 bp, Homo sapiens
  MAP TO CHR19.1; EXPRESSED IN FETAL LIVER, SIGNAL = 0.37; EXPRESSED IN BRAIN, SIGNAL = 0.43; EXPRESSED IN LUNG, SIGNAL = 0.94; EXPRESSED IN HEART, SIGNAL = 0.74; EXPRESSED IN BONE MARROW, SIGNAL = 0.52; SWISSPROT HIT: Q9NY97, EVALUE 7.00e-22; EST_HUMAN HIT: AI760623.1, EVALUE 1.00e-100
tctgctggccaggctgtgaggaagcctgggtgggcctggggcaccaggcccagggctcggatgcaaaggccagtgtagacgtcctcaaaggggaagggtgccacacgggctgccgcccgcagcagccagggtgccaggcgcccggcaatgacgtagccacccccgcttgcataggctgggtagccaccttcgaagaaggactcgggcacatagaagggtcctcctggcttccggagaggcatggcctgggtaaagacctcacccaggtagaggcttcgggccgaggcaggtggcagggcccgcaggtgagccagcagggcaggggtgtgtacaaaggcatcgtcctgagctcgcaagacaaaactcacggtggggcagtggcggcccagccaggccagcagcagcaggtctttgagcgtctggttgaatgggacgtcgaggaagtcccagagcagcaggtcactgtagcgacggctctccca

SEQ ID NO: 15716 - DNA, 266 bp, Homo sapiens
  MAP TO CHR18.1; EXPRESSED IN FETAL LIVER, SIGNAL = 0.52; EXPRESSED IN BRAIN, SIGNAL = 0.66; EXPRESSED IN HELA, SIGNAL = 0.49; EXPRESSED IN HEART, SIGNAL = 0.5; EXPRESSED IN ADULT LIVER, SIGNAL = 0.56; EXPRESSED IN BONE MARROW, SIGNAL = 0.73; SWISSPROT HIT: P71380, EVALUE 1.20e+00; NT HIT: AF286231.1, EVALUE 2.40e-01; EST_HUMAN HIT: N98893.1, EVALUE 1.40e+00
gtcagcatagtttatattctgggctgagaactccttttattatttttttccctctgtgaagatgtgcaaaaagaggttgtctaagcatatattttgatttcacttgccaacagattgtgaatagctgatttaaggtcactgtcacccccaaatgggaaaagattaggtttctgaggaccagaaatattaaaaagtctgcccaaacaatatttgctgctcaccagaattcaaaattgctgattttcaccccagaaacatcccatgga

SEQ ID NO: 15717 - DNA, 205 bp, Homo sapiens
  MAP TO CHR17.1; EXPRESSED IN FETAL LIVER, SIGNAL = 0.78; EXPRESSED IN LUNG, SIGNAL = 1.2; EXPRESSED IN BRAIN, SIGNAL = 0.73; EXPRESSED IN HELA, SIGNAL = 0.89; EXPRESSED IN HEART, SIGNAL = 0.97; EXPRESSED IN ADULT LIVER, SIGNAL = 0.95; SWISSPROT HIT: Q01167, EVALUE 1.00e-31; NT HIT: U58197.1, EVALUE 1.00e-106; EST_HUMAN HIT: BG705861.1, EVALUE 1.00e-106
ttttccaggtgcacattcaggttcccgagcacaaacatcaagataacgttcactgccctgtccagcgagaagagagagaagcaggaggcgtctgagtctccagtgaaggccgtacagccacacatctcgcccctgaccatcaacattccagacaccatggcccacctcatcagccctctgccctcccccacgggaaccatcaggt

SEQ ID NO: 15718 - DNA, 212 bp, Homo sapiens
  MAP TO CHR12.1; EXPRESSED IN HEART, SIGNAL = 3.7; EXPRESSED IN BONE MARROW, SIGNAL = 2.1; EXPRESSED IN ADULT LIVER, SIGNAL = 2.9; EXPRESSED IN HELA, SIGNAL = 2.4; EXPRESSED IN PLACENTA, SIGNAL = 4.9; EXPRESSED IN LUNG, SIGNAL = 5.3; EXPRESSED IN FETAL LIVER, SIGNAL = 2.7; EXPRESSED IN BRAIN, SIGNAL = 2.7; SWISSPROT HIT: P04275, EVALUE 9.00e-31; NT HIT: M25858.1, EVALUE 1.00e-116; EST_HUMAN HIT: AL038892.1, EVALUE 1.00e-111
taccttgtcgggaaggcaggtggttgtggtacagccacagtcattggtggcggttgaggccaagtacccaaggggacagctcactgtggagttgacacagttgcaggcacactcatactcatcacagcactgggtcttccgaagggtgggcaaacggtgcggggggcaggagggtggggacactcttttgcactcctccttcctgcaggctg

SEQ ID NO: 15719 - DNA, 226 bp, Homo sapiens
  MAP TO CHR17.1; EXPRESSED IN ADULT LIVER, SIGNAL = 0.69; EXPRESSED IN LUNG, SIGNAL = 0.67; EXPRESSED IN FETAL LIVER, SIGNAL = 0.62; EXPRESSED IN BRAIN, SIGNAL = 0.53; EXPRESSED IN HEART, SIGNAL = 0.65; SWISSPROT HIT: P42837, EVALUE 8.50e-01
agaagcatctttcttggtcctttgaagagcaagatgaggacatcaagaagatccagacccaaatcagcagcggcatgactaacaacgcaagcctgctgcagaactacctcaagacctgggacatgtaccgggagatctgggagatcaacaaggactccttcattcatcgctaccagcgcctcaaccctcctgtctcttcttttgttgccgacattgcccggtgagt

SEQ ID NO: 15720 - DNA, 182 bp, Homo sapiens
  MAP TO CHR7.1; EXPRESSED IN PLACENTA, SIGNAL =   2; EXPRESSED IN FETAL LIVER, SIGNAL =   2; EXPRESSED IN LUNG, SIGNAL = 1.5; EXPRESSED IN BRAIN, SIGNAL = 2.4; EXPRESSED IN HELA, SIGNAL = 2.1; EXPRESSED IN BONE MARROW, SIGNAL = 2.8; EXPRESSED IN ADULT LIVER, SIGNAL = 2.7; EXPRESSED IN HEART, SIGNAL = 1.4; SWISSPROT HIT: P34908, EVALUE 3.00e-19; NT HIT: gi4757867, EVALUE 9.00e-62; EST_HUMAN HIT: BG029902.1, EVALUE 4.00e-52
caatgtcaccacattacatacttaccatgccactttcccttgtagactgttccaaatgatccagatccaattctttgtcccactgtaatctgcccatcaggaatctcccaatcatcactcgagtcccgtctaccaagtgttttcttgataaaaacagtaaaaaagtcaagtcaagccaaaca

SEQ ID NO: 15721 - DNA, 362 bp, Homo sapiens
  MAP TO CHR19.1; EXPRESSED IN BRAIN, SIGNAL = 2.5; EXPRESSED IN HEART, SIGNAL = 2.3; EXPRESSED IN BONE MARROW, SIGNAL = 2.2; EXPRESSED IN ADULT LIVER, SIGNAL = 1.8; EXPRESSED IN LUNG, SIGNAL = 2.3; EXPRESSED IN FETAL LIVER, SIGNAL =   2; EXPRESSED IN HELA, SIGNAL = 2.3; EST_HUMAN HIT: BE543060.1, EVALUE 0.00e+00; SWISSPROT HIT: P10221, EVALUE 1.70e+00; NT HIT: AB028987.1, EVALUE 0.00e+00
gaactgctggggcccacagggctggaatgaaggctgccttcgggcttggaggtgggcagggcgcgagccagccgaggatcggagggtcccgaatcacctgggccagacccgccagaagcctccacatggcgggtgagtctggggtcccggctgaggcgagggtcagccagccggcttcctgtggggtgtcccttctggaggcgggggtcccccagcccactgctgctcagctccccaactgaagccgggggtcggctggacgtctgctgcctcaaggtcttcaggatggaggtgacactgcttccaccctcatcctcatcacttgagtaccagtttccggtgtcacctgggaaagaacagag

SEQ ID NO: 15722 - DNA, 126 bp, Homo sapiens
  MAP TO CHR14.1; EXPRESSED IN PLACENTA, SIGNAL = 1.4; EXPRESSED IN FETAL LIVER, SIGNAL = 1.1; EXPRESSED IN LUNG, SIGNAL = 1.4; EXPRESSED IN BRAIN, SIGNAL = 1.2; EXPRESSED IN HELA, SIGNAL = 1.4; EXPRESSED IN BONE MARROW, SIGNAL = 1.1; EST_HUMAN HIT: BE906151.1, EVALUE 5.00e-60; SWISSPROT HIT: P97887, EVALUE 2.00e-16; NT HIT: AF109907.1, EVALUE 6.00e-65
ggagtaaaacttggattgggagatttcattttctacagtgttctggttggtaaagcctcagcaacagccagtggagactggaacacaaccatagcctgtttcgtagccatattaattgtaagtata

SEQ ID NO: 15723 - DNA, 105 bp, Homo sapiens
  MAP TO CHR5.1; EXPRESSED IN HELA, SIGNAL = 6.2; EXPRESSED IN BRAIN, SIGNAL = 6.8; EXPRESSED IN LUNG, SIGNAL = 3.6; EXPRESSED IN HEART, SIGNAL = 4.3; EXPRESSED IN BONE MARROW, SIGNAL = 7.3; EXPRESSED IN PLACENTA, SIGNAL = 6.7; EXPRESSED IN FETAL LIVER, SIGNAL = 5.3; NT HIT: AF061282.1, EVALUE 3.40e-01; EST_HUMAN HIT: AW993994.1, EVALUE 2.00e+00
tgacctaatttccctcccataaaaatcacagcacataataaagagtacaccacacacattacagggagactcctaatccttttaaattgcaggcgcatgtgacag

SEQ ID NO: 15724 - DNA, 215 bp, Homo sapiens
  MAP TO CHR19.1; EXPRESSED IN PLACENTA, SIGNAL = 1.2; EXPRESSED IN FETAL LIVER, SIGNAL = 1.1; EXPRESSED IN LUNG, SIGNAL = 1.2; EXPRESSED IN HELA, SIGNAL = 1.1; EXPRESSED IN BRAIN, SIGNAL = 1.6; EXPRESSED IN HEART, SIGNAL = 1.3; EXPRESSED IN ADULT LIVER, SIGNAL = 0.99; EXPRESSED IN BONE MARROW, SIGNAL = 1.5; SWISSPROT HIT: P97849, EVALUE 1.00e-34; NT HIT: AF023258.1, EVALUE 2.00e-60; EST_HUMAN HIT: AI124693.1, EVALUE 1.00e-117
accttgccgtccatgttggcaatgctgcagttgcactcggtggcgccgtagaactccccgatttggcgtacgccgaagcgctccgtgaactcctcccagatggcaggacgcagcccgttccccaccgccaggcgcacgcggtgtcgcctctccgcctcgcgcaccggctgcttcagcaggtagcggcagatctccccgatgtactgaaccacctg

SEQ ID NO: 15725 - DNA, 157 bp, Homo sapiens
  MAP TO CHR5.1; EXPRESSED IN HELA, SIGNAL = 0.75; EXPRESSED IN BRAIN, SIGNAL = 0.69; EXPRESSED IN HEART, SIGNAL = 0.69; EXPRESSED IN FETAL LIVER, SIGNAL = 0.57; SWISSPROT HIT: P14778, EVALUE 3.00e-01; NT HIT: AB028984.1, EVALUE 7.00e-62; EST_HUMAN HIT: BG054507.1, EVALUE 6.00e-57
caggactttggagaggatgattccctgtacatcaccaaggtgaccaccatccacatgggcaattacacctgccatgcttccggccacgagcagctgttccagacccacgtcctgcaggtgaatggttagtaaatggctccatgcatgttgtcccctc

SEQ ID NO: 15726 - DNA, 239 bp, Homo sapiens
  MAP TO CHR6.1; EXPRESSED IN HEART, SIGNAL = 1.2; EXPRESSED IN BONE MARROW, SIGNAL =   1; EXPRESSED IN FETAL LIVER, SIGNAL = 1.1; EXPRESSED IN LUNG, SIGNAL = 1.2; EXPRESSED IN HELA, SIGNAL = 0.94; EXPRESSED IN BRAIN, SIGNAL =   1; SWISSPROT HIT: Q43931, EVALUE 3.90e+00; NT HIT: AF305535.1, EVALUE 5.00e-70; EST_HUMAN HIT: BE897251.1, EVALUE 8.10e-02
agttgttttgaaagttgttttgcgttgggagctggtgggaaagttcggtcttccccatttggaaaaggcaggctgggttccgctcctgcaccacacgcgctttccatttttagcttcattcagaggcagacagagctccttcctcttcctctccttgtttgtgacacttttctgaggcagcttttccacagtgccgagggtctggcggccatgaccccaggcattctgggacactggac

SEQ ID NO: 15727 - DNA, 472 bp, Homo sapiens
  MAP TO CHR11.1; EXPRESSED IN BRAIN, SIGNAL = 0.79; EXPRESSED IN HELA, SIGNAL = 0.9; EXPRESSED IN BONE MARROW, SIGNAL = 0.85; EXPRESSED IN HEART, SIGNAL = 0.95; EXPRESSED IN FETAL LIVER, SIGNAL = 0.77; EXPRESSED IN LUNG, SIGNAL = 0.82; SWISSPROT HIT: Q15620, EVALUE 5.00e-63; NT HIT: AF282279.1, EVALUE 4.00e-32; EST_HUMAN HIT: AI962273.1, EVALUE 5.00e-17
ttggttcctatttgatggccttttctggtgccatggcccacactggatgcatgctgagactgactttctgtgatgcgaacaccatcgatcactacttctgtgacatcctccctctgctccagctctcctgcaccagcacctacatcaatgagctggtggttttcactgtggttggcatcaacatcattgtgcccactgttaccatctttatctcttatggtttcatcctctccagcatcctccatatcagttccaaggagggcaggtccaaagctttcagcacttgcagttcccatataattgctgtttctctgttctttggatcaggtgcatttatgtatctcaacccatcttctgctgggtccatggataagagaaaattatcttctgtcttttatacaaatgtggttcccatgttgaaccccttaatctacagcctgaggaacaaagatgttaaatttgccctaagaaa

SEQ ID NO: 15728 - DNA, 213 bp, Homo sapiens
  MAP TO CHR5.1; EXPRESSED IN BONE MARROW, SIGNAL = 0.74; EXPRESSED IN LUNG, SIGNAL = 0.99; EXPRESSED IN HELA, SIGNAL = 0.71; EXPRESSED IN BRAIN, SIGNAL = 0.72; EXPRESSED IN HEART, SIGNAL = 0.77; SWISSPROT HIT: P36202, EVALUE 8.00e-36; NT HIT: gi14781263, EVALUE 1.00e-115; EST_HUMAN HIT: AI367836.1, EVALUE 1.00e-114
caggggcaccatcgtcaaggcacgggacaagctctaccatcccgagtgcttcatgtgcagtgactgcggcctgaacctcaagcagcgtggttacttctttctggacgagcggctctactgtgagagccacgccaaggcgcgcgtgaagccgcccgagggctacgacgtggtggcggtgtaccccaatgccaaggtggaactcgtctgagctgg

SEQ ID NO: 15729 - DNA, 123 bp, Homo sapiens
  MAP TO CHR5.1; EXPRESSED IN FETAL LIVER, SIGNAL = 0.99; EXPRESSED IN LUNG, SIGNAL = 0.63; EXPRESSED IN BRAIN, SIGNAL = 1.2; EXPRESSED IN BONE MARROW, SIGNAL = 1.2; EST_HUMAN HIT: BI023259.1, EVALUE 8.00e-25; SWISSPROT HIT: P07897, EVALUE 2.00e+00; NT HIT: AL163202.2, EVALUE 5.00e-16
aggcagggaaatactgggtagaagagggtggttccctggcaaaggcaccactctcaagcctggaaactcatggctgtaaatgggaacaggcattcctatttttgctccccaatgttgcctttt

SEQ ID NO: 15730 - DNA, 139 bp, Homo sapiens
  MAP TO CHR15.1; EXPRESSED IN HELA, SIGNAL = 1.1; EXPRESSED IN BRAIN, SIGNAL = 0.9; EXPRESSED IN HEART, SIGNAL = 0.98; EXPRESSED IN BONE MARROW, SIGNAL = 0.91; EXPRESSED IN FETAL LIVER, SIGNAL = 0.99; SWISSPROT HIT: Q60886, EVALUE 2.00e-17; NT HIT: AF282283.1, EVALUE 4.00e-20
tgaaaaccaccagctcattgatgtaggtgctggtgcaggagagctggagcagagggaggatgtcacagaagtagtgatcgatggtgttcgcatcacagaaagtcagtctcagcatgcatccagtgtgggccatggcacc

SEQ ID NO: 15731 - DNA, 346 bp, Homo sapiens
  MAP TO CHR20.1; EXPRESSED IN FETAL LIVER, SIGNAL = 0.55; EXPRESSED IN LUNG, SIGNAL = 0.83; EXPRESSED IN BRAIN, SIGNAL = 0.59; EXPRESSED IN HEART, SIGNAL = 0.82; EXPRESSED IN ADULT LIVER, SIGNAL = 0.7; EXPRESSED IN BONE MARROW, SIGNAL = 0.52; NT HIT: gi14772422, EVALUE 0.00e+00; EST_HUMAN HIT: AL546961.1, EVALUE 0.00e+00; SWISSPROT HIT: P55041, EVALUE 2.00e-02
cctacctcccagctgttcatggaggtccctctcttgcttccctgcaaagaggctggccaagctggtcttccccactccaggatctccaagtagcaccacacggtagagagcctcccaggagccttcagagtcgctggattcagaagaccaatcatctggggcaggtgaaggtttctgggtgggagggttgagggaggctgattggcccagccggggatgctgggattgagtggaaggcactgtgctcaggcggccaggctggtggccccgtggggacaggggcagtggggtgctggctcgccggtgcagaggggtctttgcttcctgctcggtgttgagtgtcatc

SEQ ID NO: 15732 - DNA, 113 bp, Homo sapiens
  MAP TO CHR19.1; EXPRESSED IN LUNG, SIGNAL = 2.1; EXPRESSED IN BRAIN, SIGNAL = 2.7; EXPRESSED IN HEART, SIGNAL = 2.5; EXPRESSED IN ADULT LIVER, SIGNAL = 2.6; EXPRESSED IN BONE MARROW, SIGNAL = 1.8; EXPRESSED IN PLACENTA, SIGNAL = 2.3; EXPRESSED IN FETAL LIVER, SIGNAL = 2.1; EXPRESSED IN HELA, SIGNAL =   4; SWISSPROT HIT: P06132, EVALUE 5.30e-01; NT HIT: Y11107.3, EVALUE 1.50e+00; EST_HUMAN HIT: BF059001.1, EVALUE 2.10e+00
ccagggggctgggcacagctggcatgccacagctggaatcccccacattcctccctgccaggctgcccacctggctgtggctagcagcaggtgcgttcctaccatgcaggtgt

SEQ ID NO: 15733 - DNA, 416 bp, Homo sapiens
  MAP TO CHR16.1; EXPRESSED IN FETAL LIVER, SIGNAL = 1.4; EXPRESSED IN LUNG, SIGNAL = 1.6; EXPRESSED IN BRAIN, SIGNAL = 1.6; EXPRESSED IN HEART, SIGNAL = 2.8; EXPRESSED IN BONE MARROW, SIGNAL = 1.6; EXPRESSED IN ADULT LIVER, SIGNAL = 1.7; SWISSPROT HIT: P04530, EVALUE 2.40e-01; NT HIT: gi16164754, EVALUE 0.00e+00; EST_HUMAN HIT: BI545676.1, EVALUE 0.00e+00
gactccaacaccaggcatgagataggggcagatacccaaggtaactacaaactgcaaaacgaactggacagtcttctgttgtgagatactaagtgcatcggggctcagggcaggagcaacttccggagtcctagggttgggtttacctggattgaaattagctgcaaggcggatcatggtttccttcaagcacaaaagcaacaacaaggtttgagaggtaaaactccaagtgacatccacagagttttgtggccattctgccttatcagcaatttcatctcttaggagtttcagattcttccactgaggatccttcagaaacttgtcctccaaagcagacaggttagattttaaagtagccaacaagacatcatgttttgtgacctgtagtgaacttgagcccgagccttttgaag

SEQ ID NO: 15734 - DNA, 232 bp, Homo sapiens
  MAP TO CHR7.1; EXPRESSED IN FETAL LIVER, SIGNAL = 0.72; EXPRESSED IN LUNG, SIGNAL = 0.79; EXPRESSED IN HELA, SIGNAL = 0.94; EXPRESSED IN BRAIN, SIGNAL = 0.64; EXPRESSED IN BONE MARROW, SIGNAL = 0.69; EXPRESSED IN HEART, SIGNAL = 0.87; SWISSPROT HIT: P08581, EVALUE 2.00e-31; NT HIT: gi4557746, EVALUE 1.00e-106; EST_HUMAN HIT: BF208095.1, EVALUE 6.00e-92
ccatattttattccagacacttctgagaaattcatcaggctgtgaagcgcgccgtgatgaatatcgaacagagtttaccacagctttgcagcgcgttgacttattcatgggtcaattcagcgaagtcctcttaacatctatatccaccttcattaaaggagacctcaccatagctaatcttgggacatcagagggtcgcttcatgcaggtaagtgctttctgagagtagctg

SEQ ID NO: 15735 - DNA, 382 bp, Homo sapiens
  MAP TO CHR6.1; EXPRESSED IN ADULT LIVER, SIGNAL = 0.72; EXPRESSED IN FETAL LIVER, SIGNAL = 1.3; EXPRESSED IN LUNG, SIGNAL = 1.3; EXPRESSED IN HELA, SIGNAL = 1.7; EXPRESSED IN BRAIN, SIGNAL = 1.1; EXPRESSED IN BONE MARROW, SIGNAL =   1; EXPRESSED IN HEART, SIGNAL = 1.1; SWISSPROT HIT: O43426, EVALUE 2.50e-01; NT HIT: gi14781652, EVALUE 0.00e+00; EST_HUMAN HIT: BE782401.1, EVALUE 0.00e+00
tccaaaaacagccagctgtttgctgccagccagaagttcaggaagaacacagctccatctctctccagccggaagaacatggacctagcgaagtcaggtatcaagatcctcgtgcctaaaagccccgttaagagcaggaccgcagtggacggctttcagagcgagagccctgagaaactggaccccgtcgagcagggtcaggaggacacagtggcacccgaagtggcagcggaaaagccggtcggagctttattgggccccggtgccgagagggccaggatggggagcaggcccaggatacacccactagtgcctcaggtgcccggccctgtgactgcagccatggccacaggcttagctgttaacgggaaaggtgagtgtc

SEQ ID NO: 15736 - DNA, 309 bp, Homo sapiens
  MAP TO CHR7.1; EXPRESSED IN BRAIN, SIGNAL = 5.9; EXPRESSED IN ADULT LIVER, SIGNAL = 4.2; EXPRESSED IN FETAL LIVER, SIGNAL =  12; EXPRESSED IN LUNG, SIGNAL = 4.2; EXPRESSED IN HELA, SIGNAL =  15; EXPRESSED IN HEART, SIGNAL = 3.5; EXPRESSED IN BONE MARROW, SIGNAL = 6.9; EXPRESSED IN PLACENTA, SIGNAL = 8.9; SWISSPROT HIT: P11464, EVALUE 1.00e-03; NT HIT: gi9790064, EVALUE 2.90e-01; EST_HUMAN HIT: AI040942.1, EVALUE 0.00e+00
cacacatacctacggaagtgatgataactgtgaaatgagtttcatcttgcctgccggttatgttgttgtaagcacagcacacatagtccattgtcttctgggctactttctcagatgcaacttctaagcgaggcccatgcttaatgatatatgtagtattgtcagtcctcctaatccaggagtaggtgttggggggatgagaatcagcagaacaatcaaataggatggcctctccaaggtcaacagtaaacacttcccctacttttagccctttatcagaattcacttgaagtccataaggtccatctg

SEQ ID NO: 15737 - DNA, 170 bp, Homo sapiens
  MAP TO CHR16.1; EXPRESSED IN HELA, SIGNAL = 4.4; EXPRESSED IN BONE MARROW, SIGNAL = 5.2; EXPRESSED IN HEART, SIGNAL = 2.9; EXPRESSED IN FETAL LIVER, SIGNAL = 4.2; EXPRESSED IN LUNG, SIGNAL = 2.7; EXPRESSED IN BRAIN, SIGNAL = 4.7; SWISSPROT HIT: Q9Y4W6, EVALUE 3.00e-17; NT HIT: AF329695.1, EVALUE 1.00e-29; EST_HUMAN HIT: BE885361.1, EVALUE 4.00e-12
gtccatctccacgagcatctggttcagggtgttctcctgctcactctggcctccaaagtgcccttggcctcgcttcctgccaatcgcatcaatctcatcaatgaataagatacatggagcgtttttttcgggccattgcaaacatgtcatgaacctgaaacaggaaccca

SEQ ID NO: 15738 - DNA, 391 bp, Homo sapiens
  MAP TO CHR5.1; EXPRESSED IN LUNG, SIGNAL = 0.91; EXPRESSED IN FETAL LIVER, SIGNAL = 0.47; EXPRESSED IN HELA, SIGNAL = 0.5; EXPRESSED IN BRAIN, SIGNAL = 0.74; EXPRESSED IN HEART, SIGNAL = 1.2; EST_HUMAN HIT: BE537133.1, EVALUE 1.40e-01; SWISSPROT HIT: P21817, EVALUE 7.00e-57; NT HIT: U48465.1, EVALUE 0.00e+00
tggacggcactgtggacacgcccccctgcctgcgcctgacccaccgcacctggggctcccagaacagcctggtggagatgcttttcctgcggctgagcctcccagtccagttccaccagcacttccgctgcactgcaggggccaccccgctggcacctcctggcctgcagccccccgccgaggacgaggcccgggcggcggaacccgaccctgactacgaaaacctgcgccgctcagctgggggctggagcgaggcagagaacggcaaagaagggactgcgaaggagggcgcccccgggggcaccccgcaggcggggggagaggcgcagcccgccagggcggagaatgagaaggatgccaccaccgagaagaacaagaagagagggtgagt

SEQ ID NO: 15739 - DNA, 220 bp, Homo sapiens
  MAP TO CHR19.1; EXPRESSED IN BONE MARROW, SIGNAL = 0.88; EXPRESSED IN HEART, SIGNAL = 1.1; EXPRESSED IN FETAL LIVER, SIGNAL = 0.91; EXPRESSED IN HELA, SIGNAL = 1.2; EXPRESSED IN BRAIN, SIGNAL = 0.87; EST_HUMAN HIT: BF362993.1, EVALUE 1.00e-105; SWISSPROT HIT: P90747, EVALUE 8.00e-03; NT HIT: gi9966896, EVALUE 1.00e-105
ggactcacttgttgctcccaaatttcttctcagctgctcggatctctgagtcttcctggaagcctctgttgctctgatagtatgagaaggcgtttcccacaggaaaggccacggggagaaactgcttcttctccagggcatcgtaggaatacttgatcttctggaattcgaaggacagcacctcaagcccgtcttcgccctgcggtagaaggtgtgtttg

SEQ ID NO: 15740 - DNA, 243 bp, Homo sapiens
  MAP TO CHR15.1; EXPRESSED IN ADULT LIVER, SIGNAL = 2.9; EXPRESSED IN FETAL LIVER, SIGNAL = 2.4; EXPRESSED IN LUNG, SIGNAL = 1.7; EXPRESSED IN HELA, SIGNAL =   5; EXPRESSED IN BRAIN, SIGNAL = 3.3; EXPRESSED IN HEART, SIGNAL = 1.6; NT HIT: gi15300074, EVALUE 2.00e-72; EST_HUMAN HIT: BF513828.1, EVALUE 2.00e-73; SWISSPROT HIT: P39816, EVALUE 6.00e-01
gcagtaagacgggtgatatcaaagagaactatctggaaacatttatcttcaatccaaaatggagccttatgtttgtcataaatctacgtactcttcttttccaggtgactacaattgcaaagtagaatttgctttgacacctgatgccaggacaatagtatgttaccatccttctatagacattccatatgaacgcacaaaacctatcccttgaccagatcctgtgtataataatgaagaaac

SEQ ID NO: 15741 - DNA, 250 bp, Homo sapiens
  MAP TO CHR5.1; EXPRESSED IN FETAL LIVER, SIGNAL = 0.9; EXPRESSED IN HELA, SIGNAL = 0.92; EXPRESSED IN BRAIN, SIGNAL =   1; EXPRESSED IN LUNG, SIGNAL = 1.1; EXPRESSED IN HEART, SIGNAL = 1.1; EXPRESSED IN ADULT LIVER, SIGNAL = 0.72; EXPRESSED IN BONE MARROW, SIGNAL = 0.98; SWISSPROT HIT: Q9Y5I0, EVALUE 1.00e-34; NT HIT: gi14727911, EVALUE 0.00e+00; EST_HUMAN HIT: BG709151.1, EVALUE 1.00e-65
gaggaaggctgggactgaaggccatgaggtccgtcttatgcgggccctccccagagcacaccctcggccgcctctgctgcgagtacgaccaactccctgccgcgctggagcacactagagtgggcttgcccggcgcgcacgcgccctcggtgggcggtgccgagcaccgcagcgcagtatacagcagcaacgtgagcaccaacaggctggacaccgcgcagatggcaatgatcaagtaaacattgacatc

SEQ ID NO: 15742 - DNA, 161 bp, Homo sapiens
  MAP TO CHR19.1; EXPRESSED IN ADULT LIVER, SIGNAL = 2.4; EXPRESSED IN PLACENTA, SIGNAL = 2.6; EXPRESSED IN FETAL LIVER, SIGNAL = 1.4; EXPRESSED IN BRAIN, SIGNAL = 1.2; EXPRESSED IN LUNG, SIGNAL = 2.4; EXPRESSED IN HEART, SIGNAL = 2.2; SWISSPROT HIT: Q63665, EVALUE 2.00e-23; NT HIT: Y07661.1, EVALUE 1.00e-85; EST_HUMAN HIT: W17190.1, EVALUE 6.00e-85
ctccccaggctgtgatccaaaatcccttcagcaatggtggcagtccggcggccgaggctgtcagcggggaggcacgatttgcctatttcccagcgtccagtgtgggagatactacggctgtgtccgtacagaccacagaccagagcttgcaggctggaggt

SEQ ID NO: 15743 - DNA, 186 bp, Homo sapiens
  MAP TO CHR15.1; EXPRESSED IN BONE MARROW, SIGNAL =   1; EXPRESSED IN FETAL LIVER, SIGNAL = 0.96; EXPRESSED IN HELA, SIGNAL = 1.1; EXPRESSED IN LUNG, SIGNAL = 1.4; EXPRESSED IN BRAIN, SIGNAL = 1.2; SWISSPROT HIT: P34679, EVALUE 7.00e-05; NT HIT: AF301601.1, EVALUE 2.00e-31; EST_HUMAN HIT: BI758303.1, EVALUE 8.00e-94
caaggatacgtgatggtggtgtgcgcggctcccagcccctcagcgtggttcagcacgtagaccaggccgaaggccacgacgcccaccatgtgtgcactgagtgacagcaggaacaggaagaagtagcgatagtttcgacgcccgatgcagttgttgacccaggggcagtggtggtcaaagtcctgg

SEQ ID NO: 15744 - DNA, 223 bp, Homo sapiens
  MAP TO CHR17.1; EXPRESSED IN HELA, SIGNAL = 1.6; EXPRESSED IN BRAIN, SIGNAL = 1.5; EXPRESSED IN HEART, SIGNAL = 0.71; EXPRESSED IN BONE MARROW, SIGNAL = 1.5; EXPRESSED IN ADULT LIVER, SIGNAL = 1.1; EXPRESSED IN FETAL LIVER, SIGNAL = 1.3; EXPRESSED IN LUNG, SIGNAL = 0.64; SWISSPROT HIT: P22273, EVALUE 2.80e-01
ctaattaagcctctacccacgagtgaatgtgaggctaataaggcagccccattccagggcacctccacacccagccagccggtctgcctgtttattgcccgtatggagatcattaatgcctcctgacactggggtcactcccggggtcaatcccggagccccttctggaaaacaaggggaaatgaacttcccagcacatgtggctcagccttggcagggaggg

SEQ ID NO: 15745 - DNA, 236 bp, Homo sapiens
  MAP TO CHR5.1; EXPRESSED IN HEART, SIGNAL = 0.77; EXPRESSED IN BONE MARROW, SIGNAL = 1.2; EXPRESSED IN ADULT LIVER, SIGNAL = 0.7; EXPRESSED IN PLACENTA, SIGNAL = 1.3; EXPRESSED IN FETAL LIVER, SIGNAL = 0.87; EXPRESSED IN HELA, SIGNAL = 1.3; EXPRESSED IN BRAIN, SIGNAL = 0.97; SWISSPROT HIT: P04433, EVALUE 2.90e+00; EST_HUMAN HIT: AW959797.1, EVALUE 3.10e-01
tcctagcctttgacctggagcccagggtcccccatgggtggctgcatcggctcctctggttacctgggacaacaggcatttcctccatccccagcccctcctcttcctgctccaaccatccgggccaagaggcctcccagtcagacctggacggctccagccgtgtcctgaggagctggaccagccacatcccctggggctgcagttgaagcagaaccaagtggccatcccggcgt

SEQ ID NO: 15746 - DNA, 291 bp, Homo sapiens
  MAP TO CHR19.1; EXPRESSED IN HELA, SIGNAL = 0.49; EXPRESSED IN BRAIN, SIGNAL = 0.61; EXPRESSED IN LUNG, SIGNAL = 1.2; EXPRESSED IN BONE MARROW, SIGNAL = 1.1; EXPRESSED IN ADULT LIVER, SIGNAL =  15; SWISSPROT HIT: Q08477, EVALUE 4.00e-45; NT HIT: AB002458.1, EVALUE 0.00e+00; EST_HUMAN HIT: BG743769.1, EVALUE 1.00e-126
atcctgcaggaagcccagtgaatatattgccgccatcttggagctcagtgcccttgtgacaaaaagacaccagcagatcctcctgtacatagacttcctgtattatctcacccctgatgggcagcgtttccgcagggcctgccgcctggtgcacgacttcacagatgccgtcatccaggagcggcgccgcaccctccctagccagggtgttgatgacttcctccaagccaaggccaaatccaagactttggacttcattgatgtactcctgctgagcaaggtgggcctctc

SEQ ID NO: 15747 - DNA, 159 bp, Homo sapiens
  MAP TO CHR19.1; EXPRESSED IN BONE MARROW, SIGNAL = 1.2; EXPRESSED IN ADULT LIVER, SIGNAL = 2.4; EXPRESSED IN HELA, SIGNAL = 0.7; EXPRESSED IN FETAL LIVER, SIGNAL = 1.2; EXPRESSED IN BRAIN, SIGNAL = 0.99; EXPRESSED IN LUNG, SIGNAL = 3.8; EXPRESSED IN HEART, SIGNAL = 2.7; EST_HUMAN HIT: AI203571.1, EVALUE 2.00e-84; SWISSPROT HIT: P17024, EVALUE 3.00e-22; NT HIT: gi15304226, EVALUE 2.00e-40
acatctaaagactttaccacattggttacatttatagggtttctctccagtgtgagtccttccatgccttcgaaggtttgagggacatccaaaagctttcccacattgcttacatttatacggtttctctccagtgtgagtccttccatgcatttgaag

SEQ ID NO: 15748 - DNA, 206 bp, Homo sapiens
  MAP TO CHR14.1; EXPRESSED IN FETAL LIVER, SIGNAL = 2.3; EXPRESSED IN BONE MARROW, SIGNAL = 2.2; EXPRESSED IN ADULT LIVER, SIGNAL = 4.3; EXPRESSED IN LUNG, SIGNAL = 2.1; EXPRESSED IN PLACENTA, SIGNAL = 2.5; EXPRESSED IN BRAIN, SIGNAL = 2.6; EXPRESSED IN HEART, SIGNAL = 2.1; EXPRESSED IN HELA, SIGNAL = 2.3; EST_HUMAN HIT: AV685589.1, EVALUE 3.00e-50; NT HIT: gi13649630, EVALUE 1.00e-108; SWISSPROT HIT: P03181, EVALUE 3.30e-02
taccaggaaggctgtcttgccctgtcctgactgccccgtcaccaggctcagccttccgtggggcagcatcagccgttgcactgtgtcctgaagaaggcgtggccgggcaggactcggtggcttctgcagctgctggaaggtggcctggaccaagtcatcgtctgggatggacactggctgctccagcagggccccaggctgagggt

SEQ ID NO: 15749 - DNA, 143 bp, Homo sapiens
  MAP TO CHR22.1; EXPRESSED IN LUNG, SIGNAL = 2.5; EXPRESSED IN HELA, SIGNAL = 2.6; EXPRESSED IN BRAIN, SIGNAL = 2.8; EXPRESSED IN HEART, SIGNAL = 2.9; EXPRESSED IN ADULT LIVER, SIGNAL = 2.5; EXPRESSED IN BONE MARROW, SIGNAL = 2.8; EXPRESSED IN PLACENTA, SIGNAL = 1.9; SWISSPROT HIT: O75746, EVALUE 3.00e-05; EST_HUMAN HIT: BI822368.1, EVALUE 1.00e-64; NT HIT: gi14776826, EVALUE 7.00e-65
acctacattcctttgtacatggctttcccatgctggttctgcaggcgagtcttggccaagtcgatggggaacacgcaggtcacccccacgagccctgctacacctccattgatgagtttggctgtgatgctaggacaggggga

SEQ ID NO: 15750 - DNA, 161 bp, Homo sapiens
  MAP TO CHR12.1; EXPRESSED IN BRAIN, SIGNAL = 1.2; EXPRESSED IN HEART, SIGNAL = 1.5; EXPRESSED IN BONE MARROW, SIGNAL = 1.3; EXPRESSED IN ADULT LIVER, SIGNAL = 1.6; EXPRESSED IN HELA, SIGNAL = 1.3; EXPRESSED IN LUNG, SIGNAL = 1.4; SWISSPROT HIT: P47819, EVALUE 1.70e-01; EST_HUMAN HIT: BF797805.1, EVALUE 6.00e-82; NT HIT: gi14769146, EVALUE 6.00e-47
atcatggtggaggacatcatgaagctgctgtgctccctttctggggagaggaagatgaaggcggctgtcaagcactctgggaagggtgccctggtcacaggggccatggccttcgtcgggggtttggtgggcggcccaccgggactcgccgttggtaagtg

SEQ ID NO: 15751 - DNA, 422 bp, Homo sapiens
  MAP TO CHR19.1; EXPRESSED IN HEART, SIGNAL = 0.64; EXPRESSED IN BONE MARROW, SIGNAL = 0.7; EXPRESSED IN FETAL LIVER, SIGNAL = 1.3; EXPRESSED IN BRAIN, SIGNAL = 1.1; NT HIT: gi14768832, EVALUE 0.00e+00; SWISSPROT HIT: Q9UL59, EVALUE 2.00e-18; EST_HUMAN HIT: AU118352.1, EVALUE 2.00e-99
gtctcatatgctcattaagggcagagctatgaatgaagccttgtccacacaaaaggcatcgaatggccgacccagcaagagcaggattcctctctgcagcacgattcctccgtggcttcatgggcaagagggcaataaaaccatcatcacaccccttcatggaatacaactggtcttgttcatggattctctgatgctcgaaaaggaatgagctatgaataaaagattccccacactttggacattcatacagctgctctccagtgtaatctctctgatactcgctgatggaatgggtgtgaattacagaatgtgtgtactcccgactgtcaaccaggcacttcctgctgtggactttctgatggtctgtgaggtctgtgagatccacaaagcccaggccacagtcctcacattcatagatt

SEQ ID NO: 15752 - DNA, 227 bp, Homo sapiens
  MAP TO CHR19.1; EXPRESSED IN HELA, SIGNAL = 1.3; EXPRESSED IN BRAIN, SIGNAL = 1.3; EXPRESSED IN BONE MARROW, SIGNAL = 1.3; EXPRESSED IN ADULT LIVER, SIGNAL = 1.5; EXPRESSED IN PLACENTA, SIGNAL = 1.4; EXPRESSED IN FETAL LIVER, SIGNAL = 1.5; EXPRESSED IN LUNG, SIGNAL = 2.3; NT HIT: gi14747644, EVALUE 3.20e+00; SWISSPROT HIT: Q09472, EVALUE 7.00e-03; EST_HUMAN HIT: BG818613.1, EVALUE 1.20e+00
gccagctcccgctccctccctgccggctcccggccggcgcggtataattacagcccattgatccgacccgggccggaaagcggctccctcggggagccaagcctttgcgttccgacaccgccaacctctgcctaccgccccctccagcggagctgccgggccaccagccaggcctgtcccctcccgctggccccgggctcgcgggtgacctctgagcctcagctccc

SEQ ID NO: 15753 - DNA, 248 bp, Homo sapiens
  MAP TO CHR3.1; EXPRESSED IN BONE MARROW, SIGNAL = 6.1; EXPRESSED IN ADULT LIVER, SIGNAL = 7.2; EXPRESSED IN HEART, SIGNAL = 3.4; EXPRESSED IN PLACENTA, SIGNAL =   4; EXPRESSED IN FETAL LIVER, SIGNAL = 5.4; EXPRESSED IN LUNG, SIGNAL = 3.5; EXPRESSED IN BRAIN, SIGNAL = 5.8; EXPRESSED IN HELA, SIGNAL = 4.2; NT HIT: X86560.1, EVALUE 8.90e-01; SWISSPROT HIT: O75144, EVALUE 6.40e-01; EST_HUMAN HIT: BG757771.1, EVALUE 1.00e-71
ccaatcagactctgaaatgccccaggtgcaatttgacaggattgatgatgaggatgtggccacatgcatctcaaaggactagtacctcacgcccattgtgacatggctggaccggacagagagggacctgagcaaccacagcatcgtggaaatcctggaggagcagatgaatggcttctacagggtgttctccatcctgaaataccctgtcaagttaaatgagaaatatctctgccacataacagaga

SEQ ID NO: 15754 - DNA, 227 bp, Homo sapiens
  MAP TO CHR5.1; EXPRESSED IN LUNG, SIGNAL = 1.4; EXPRESSED IN BRAIN, SIGNAL = 1.8; EXPRESSED IN HEART, SIGNAL = 1.5; EXPRESSED IN ADULT LIVER, SIGNAL = 2.1; NT HIT: gi14772274, EVALUE 8.00e-72; SWISSPROT HIT: O53553, EVALUE 2.60e-02; EST_HUMAN HIT: BF970815.1, EVALUE 1.00e-71
tctcggaggacccaatcctagcccgacctgtctcggcccgcaacttccccgaagctgttggtgccactcccagcccatgtgggcccccgcaggctgccaacgcctgtccgccagctccccgttccgctgggctttccaaaacctcgccaggggtgactttctgagccgcttgctccatacccctctctgcagcctctcctgccacttagggctgccgttccccctcc

SEQ ID NO: 15755 - DNA, 100 bp, Homo sapiens
  MAP TO CHR5.1; EXPRESSED IN BRAIN, SIGNAL = 0.69; EXPRESSED IN ADULT LIVER, SIGNAL = 0.45; EXPRESSED IN BONE MARROW, SIGNAL = 0.68; EXPRESSED IN FETAL LIVER, SIGNAL = 0.52
gcagatattatatatagaagacaactagagttaaaacaggactcttcttcctgcccatttcctcaaggaaactcagtgctccacccagccttgtgcataa

SEQ ID NO: 15756 - DNA, 209 bp, Homo sapiens
  MAP TO CHR14.1; EXPRESSED IN HEART, SIGNAL = 1.1; EXPRESSED IN BONE MARROW, SIGNAL = 1.5; EXPRESSED IN ADULT LIVER, SIGNAL = 0.91; EXPRESSED IN PLACENTA, SIGNAL = 1.6; EXPRESSED IN FETAL LIVER, SIGNAL = 1.5; EXPRESSED IN BRAIN, SIGNAL = 1.4; EXPRESSED IN LUNG, SIGNAL =   2; EST_HUMAN HIT: AU117331.1, EVALUE 1.00e-110; NT HIT: M92444.1, EVALUE 1.00e-114; SWISSPROT HIT: P27695, EVALUE 2.00e-24
ttactcattttatagagccagaggccaagaagagtaagacggccgcaaagaaaaatgacaaagaggcagcaggagagggcccagccctgtatgaggaccccccagatcagaaaacctcacccagtggcaaacctgccacactcaagatctgctcttggaatgtggatgggcttcgagcctggattaagaagaaaggattagatgtgagt

SEQ ID NO: 15757 - DNA, 251 bp, Homo sapiens
  MAP TO CHR19.1; EXPRESSED IN PLACENTA, SIGNAL = 3.9; EXPRESSED IN FETAL LIVER, SIGNAL = 2.8; EXPRESSED IN HELA, SIGNAL = 3.7; EXPRESSED IN BRAIN, SIGNAL = 2.9; EXPRESSED IN BONE MARROW, SIGNAL = 2.5; EST_HUMAN HIT: BG676612.1, EVALUE 1.00e-47; NT HIT: gi14763636, EVALUE 1.00e-49; SWISSPROT HIT: P32043, EVALUE 1.60e-01
tcctggcggggtccatggctccgtcctgctcccttggcgtcccccctgggtgtgccgcctccgagctcgggccctcttacctgagcccaggatgagtaacctcgccccaggcaaccccagccttgcccaaccgggccaactcagcgtcggctgtggggcggggccccgcccctaggcgcgtcatccaagggagagcggtccctgccctgtgaagttgccaaggagggaaagggtgggagctgaggttccct

SEQ ID NO: 15758 - DNA, 211 bp, Homo sapiens
  MAP TO CHR17.1; EXPRESSED IN BRAIN, SIGNAL = 1.4; EXPRESSED IN ADULT LIVER, SIGNAL = 1.7; EXPRESSED IN PLACENTA, SIGNAL = 2.1; EXPRESSED IN FETAL LIVER, SIGNAL = 2.1; EXPRESSED IN LUNG, SIGNAL = 0.84; EXPRESSED IN HELA, SIGNAL = 4.5; SWISSPROT HIT: Q09714, EVALUE 2.40e+00; NT HIT: gi4557568, EVALUE 1.00e-104
tctctcccatgcaaggttatcaacctggttgaccagacttcagaaaacgcacctaccaccgtgtctcgggatgtggaggagaagcccgcccatgcccctgcccggcccgaggcccccgtggactccatgcttaaggacatggctaccatcatcctgagcaccttcctgctgattggctgggtggccttcatcatcacctatcccctggtaa

SEQ ID NO: 15759 - DNA, 155 bp, Homo sapiens
  MAP TO CHR7.1; EXPRESSED IN HEART, SIGNAL = 0.82; EXPRESSED IN BONE MARROW, SIGNAL = 0.58; EXPRESSED IN LUNG, SIGNAL = 0.86; EXPRESSED IN BRAIN, SIGNAL = 0.55; SWISSPROT HIT: Q23917, EVALUE 6.70e-01; EST_HUMAN HIT: AW246394.1, EVALUE 5.00e-76; NT HIT: gi14753015, EVALUE 3.00e-76
tgcaggtctgggcccactatgaggagcagcccgtggaggaggtgatgccagtgctggaggagaaggagcgatctgctagctacaagcccgtgtttgtgactgagatcactgatgacctgcacttctacgtgcaggatgtggagaccggtgagtgc

SEQ ID NO: 15760 - DNA, 425 bp, Homo sapiens
  MAP TO CHR7.1; EXPRESSED IN HEART, SIGNAL = 1.3; EXPRESSED IN BONE MARROW, SIGNAL = 1.2; EXPRESSED IN FETAL LIVER, SIGNAL = 1.3; EXPRESSED IN LUNG, SIGNAL = 3.8; EXPRESSED IN BRAIN, SIGNAL = 0.96; NT HIT: gi16175835, EVALUE 0.00e+00; SWISSPROT HIT: Q05209, EVALUE 8.00e-66; EST_HUMAN HIT: BI868780.1, EVALUE 0.00e+00
tcagttgccttgttgaaggggatgctaaagaagaaatactgcagccaccggaacctcatccagtgccacccatcttgacaccttctcccccttcagcttttccaacagtcactactgtgtggcaggacaatgatagataccatccaaagccagtgttgcatatggtttcatcagaacaacattcagcagacctcaacagaaactatagtaaatcaacagaacttccagggaaaaatgaatcaacaattgaacagatagataaaaaattggaacgaaatttaagttttgagattaagaaggtccctctccaagagggaccaaaaagttttgatgggaacacacttttgaataggggacatgcaattaaaattaaatctgcttcaccttgtatagctgataaaatctctaagccacaggaattaagt

SEQ ID NO: 15761 - DNA, 150 bp, Homo sapiens
  MAP TO CHR5.1; EXPRESSED IN LUNG, SIGNAL = 0.67; EXPRESSED IN BRAIN, SIGNAL = 0.51; EXPRESSED IN FETAL LIVER, SIGNAL = 0.38; NT HIT: U78510.1, EVALUE 3.00e-79; SWISSPROT HIT: P04150, EVALUE 3.00e-23; EST_HUMAN HIT: AA252234.1, EVALUE 2.00e-75
aacttactcattaataatcagatcaggagcaaaacacagcaggtttgcacttgattgtctatatgatctccaccccagagcaaatgccataagaaacatccaggagtactgcagtagggtcatttggtcatccaggtgtaagttcctgaa

SEQ ID NO: 15762 - DNA, 299 bp, Homo sapiens
  MAP TO CHR5.1; EXPRESSED IN PLACENTA, SIGNAL = 2.5; EXPRESSED IN FETAL LIVER, SIGNAL = 2.3; EXPRESSED IN LUNG, SIGNAL = 4.5; EXPRESSED IN HELA, SIGNAL = 3.8; EXPRESSED IN BRAIN, SIGNAL = 3.1; EXPRESSED IN HEART, SIGNAL = 3.5; EXPRESSED IN ADULT LIVER, SIGNAL = 1.5; EXPRESSED IN BONE MARROW, SIGNAL = 2.5; NT HIT: gi14861872, EVALUE 0.00e+00; SWISSPROT HIT: Q9Y5I0, EVALUE 1.00e-45; EST_HUMAN HIT: BI465306.1, EVALUE 9.00e-61
gcttggccgctctccaccagcgacaacagcaccgttgccgtggccgtcagcgcgggctcaccgtggtccttcaccagcaccagaaggcggtggtgcggcgcgtccacctcgtccagagggcgcgtcgtgctgatctcgccagtgtacagccccacgcggaacgggatgcgcgcgccgaccgccgccagctgcaattcatacgaaagccacgcattgtagcccgaatcggcgtccaccgcgcgcaccttcgccaccacgtggcctgcacccaccgaccgcggcatcagctcgctcactgt

SEQ ID NO: 15763 - DNA, 211 bp, Homo sapiens
  MAP TO CHR17.1; EXPRESSED IN ADULT LIVER, SIGNAL = 8.8; EXPRESSED IN BONE MARROW, SIGNAL = 9.3; EXPRESSED IN PLACENTA, SIGNAL = 5.8; EXPRESSED IN FETAL LIVER, SIGNAL =   8; EXPRESSED IN LUNG, SIGNAL = 5.7; EXPRESSED IN HELA, SIGNAL = 5.7; EXPRESSED IN BRAIN, SIGNAL = 8.7; EXPRESSED IN HEART, SIGNAL =   7; NT HIT: U85023.1, EVALUE 1.20e-02; SWISSPROT HIT: P45444, EVALUE 6.00e-03; EST_HUMAN HIT: AA551572.1, EVALUE 1.00e-110
ggaccttctgctgctcatctgcctcccgcttctgctgcacaatgatgaccaggtactcctcacactgcttctggaactcagccaccttcttcttggcatcctccagctccaacgacatcacttgcaccttttccctagtttcgtcgatcttgaacaagcctgtccgcagtttattggcttgggccagcagctcctgccgtttttctcccag

SEQ ID NO: 15764 - DNA, 194 bp, Homo sapiens
  MAP TO CHR2.1; EXPRESSED IN HELA, SIGNAL =   3; EXPRESSED IN BRAIN, SIGNAL =   3; EXPRESSED IN HEART, SIGNAL =   2; EXPRESSED IN ADULT LIVER, SIGNAL = 3.3; EXPRESSED IN PLACENTA, SIGNAL = 1.9; EXPRESSED IN FETAL LIVER, SIGNAL =   2; SWISSPROT HIT: P47989, EVALUE 2.00e-29; EST_HUMAN HIT: N49068.1, EVALUE 6.50e-02; NT HIT: gi9257259, EVALUE 1.00e-101
cttacttggaaagctgcctctgagtggtcttgagggctgagatggttctgttggccattccaccatagcaaagggccagctcctgtacctctgtggttcctggcttgaataaaactctcatgccactggttaccttggcaatgtcatcttctctccgggaggcctgcttgaatgctgagaaatactccccctaa

SEQ ID NO: 15765 - DNA, 262 bp, Homo sapiens
  MAP TO CHR12.1; EXPRESSED IN HEART, SIGNAL = 1.7; EXPRESSED IN FETAL LIVER, SIGNAL =   3; EXPRESSED IN BONE MARROW, SIGNAL = 3.1; EXPRESSED IN ADULT LIVER, SIGNAL =   3; EXPRESSED IN PLACENTA, SIGNAL =   3; EXPRESSED IN LUNG, SIGNAL =   2; EXPRESSED IN BRAIN, SIGNAL =   3; EXPRESSED IN HELA, SIGNAL = 3.8; NT HIT: gi4826699, EVALUE 1.00e-128; SWISSPROT HIT: P50570, EVALUE 7.00e-07; EST_HUMAN HIT: BF125432.1, EVALUE 1.00e-123
agccccactccacagcgccgaccggtgtccagcatacacccccctggccggcccccagcagtgaggggccccactccagggccccccctgattcctgttcccgtgggggcagcagcctccttctcggcgcccccaatcccatcccggcctggaccccagagcgtgtttgccaacagtgacctcttcccagccccgcctcagatcccatctcggccagttcggatccccccagggattcccccaggagtgcccaggtaaggcc

SEQ ID NO: 15766 - DNA, 394 bp, Homo sapiens
  MAP TO CHR5.1; EXPRESSED IN BONE MARROW, SIGNAL = 2.4; EXPRESSED IN LUNG, SIGNAL = 1.2; EXPRESSED IN BRAIN, SIGNAL = 2.9; EXPRESSED IN HELA, SIGNAL = 5.5; EXPRESSED IN HEART, SIGNAL = 1.4; EXPRESSED IN ADULT LIVER, SIGNAL = 1.9; EXPRESSED IN FETAL LIVER, SIGNAL = 2.3; EXPRESSED IN PLACENTA, SIGNAL = 3.2; NT HIT: gi14861872, EVALUE 0.00e+00; SWISSPROT HIT: Q9UN74, EVALUE 5.00e-65; EST_HUMAN HIT: AW161561.1, EVALUE 0.00e+00
ttcttttgtgttgctgggaacaccggcgggttatcgttaatgtccctcacctccacgtccacatggaaaacctgcagcggcctgtctacgatcacctccaggtggatgctgcactccgcgctccgccggcacagctcctcccggtcgatccgagaattcacaaacaaaatgccattctgcagatttacctccagaaggcctccgcggcccttggacgccacccggaacaggcgcggcaccagctccgccagctccagtcccaggtcctgcgcgatgcggcccacgaaggtgccgtgtttggcctcctcggagaccgagtagtggagctgaccgttccctgcctcccaggctgcgaggagaagaagtaagagcagcagacgccgggattcctggc

SEQ ID NO: 15767 - DNA, 209 bp, Homo sapiens
  MAP TO CHR17.1; EXPRESSED IN BRAIN, SIGNAL = 1.4; EXPRESSED IN HELA, SIGNAL = 1.9; EXPRESSED IN ADULT LIVER, SIGNAL = 1.5; EXPRESSED IN BONE MARROW, SIGNAL = 1.4; EXPRESSED IN FETAL LIVER, SIGNAL = 1.4; NT HIT: gi4506910, EVALUE 4.00e-89; SWISSPROT HIT: Q16586, EVALUE 1.00e-28; EST_HUMAN HIT: AA424260.1, EVALUE 2.00e-70
ccagggtccctcctcaccagggtcacattgcaccagtcaacgcggaagtggggtgccaaggtgtcgtagcaagacagaagtggaggctggccctgggcacagcgggcgtggctatcgggggatgccaccatcttcaggcaagtagaaaaaggtgaggcagaacccaccttaatgtataccctgggaccagatagaagtcactgtcagca

SEQ ID NO: 15768 - DNA, 427 bp, Homo sapiens
  MAP TO CHR4.1; EXPRESSED IN HEART, SIGNAL = 1.1; EXPRESSED IN ADULT LIVER, SIGNAL = 1.1; EXPRESSED IN PLACENTA, SIGNAL = 1.5; EXPRESSED IN FETAL LIVER, SIGNAL = 1.2; EXPRESSED IN HELA, SIGNAL = 1.2; EXPRESSED IN LUNG, SIGNAL = 2.1; EXPRESSED IN BRAIN, SIGNAL = 1.4; NT HIT: gi14781060, EVALUE 0.00e+00; SWISSPROT HIT: P35611, EVALUE 1.00e-37; EST_HUMAN HIT: BI916960.1, EVALUE 0.00e+00
ttcccaaagcctccgaagccccagctacccaacttgctctacgtcatctaactatgaacagtaaggtaggcacagaccaagcagttggtaatacagcttggcacgcagacaccggacgagagagactgcagcaagggtttcacgtgatcgtgtgtaatgttcgtccacaccttagtcttcgacttgggactgcttccattctgcccttcctcggaagcttcgtcgccccggccagagttcagccatcttgtcttctcccgctgctgcttctgaaaactgtgtctgagtggggagcaagtgcccgaatcaccgtcactagcaaaggagtaacctgtgacactagcaggaacctccacatcgctgtattttttagacttctctctcagagcagggtatcgataagggtagccagttctgtagccctagg

SEQ ID NO: 15769 - DNA, 291 bp, Homo sapiens
  MAP TO CHR14.1; EXPRESSED IN FETAL LIVER, SIGNAL = 0.34; EXPRESSED IN BRAIN, SIGNAL = 0.41; EXPRESSED IN BONE MARROW, SIGNAL = 0.47; NT HIT: M35617.1, EVALUE 0.00e+00; SWISSPROT HIT: P01738, EVALUE 3.00e-34; EST_HUMAN HIT: BI906836.1, EVALUE 0.00e+00
tcactgtctctgaaggagcctcactggagttgagatgtaactattcctatggggcaacaccttatctcttctggtatgtccagtcccccggccaaggcctccagctgctcctgaagtacttttcaggagacactctggttcaaggcattaaaggctttgaggctgaatttaagaggagtcaatcttccttcaatctgaggaaaccctctgtgcattggagtgatgctgctgagtacttctgtgctgtgggtgccacagtgcctgggtctgcagggggagctgaacacaaac

SEQ ID NO: 15770 - DNA, 357 bp, Homo sapiens
  MAP TO CHR14.1; EXPRESSED IN BRAIN, SIGNAL =   1; EXPRESSED IN HEART, SIGNAL = 1.2; EXPRESSED IN BONE MARROW, SIGNAL = 1.1; EXPRESSED IN FETAL LIVER, SIGNAL = 0.85; EXPRESSED IN LUNG, SIGNAL = 1.3; EXPRESSED IN HELA, SIGNAL = 1.2; EST_HUMAN HIT: BI821699.1, EVALUE 7.00e-71; NT HIT: AF027557.1, EVALUE 1.00e-80; SWISSPROT HIT: P06322, EVALUE 1.00e-23
caatggagattcagtggtccagacagaaggccaagtgctcccctctgaaggggattccctgattgtgaactgctcctatgaaaccacacagtacccttcccttttttggtatgtccaatatcctggagaaggtccacagctccacctgaaagccatgaaggccaatgacaagggaaggaacaaaggttttgaagccatgtaccgtaaagaaaccacttctttccacttggagaaagactcagttcaagagtcagactccgctgtgtacttctgtgctctgagtgacacagtgacagggactgcaggggaagctgagcacaaactctgagcagcacgaggggcctggctgctgagtgt

SEQ ID NO: 15771 - DNA, 143 bp, Homo sapiens
  MAP TO CHR14.1; EXPRESSED IN FETAL LIVER, SIGNAL = 2.2; EXPRESSED IN HEART, SIGNAL = 1.8; EXPRESSED IN BONE MARROW, SIGNAL =   3; EXPRESSED IN ADULT LIVER, SIGNAL = 2.3; EXPRESSED IN PLACENTA, SIGNAL = 2.9; EXPRESSED IN LUNG, SIGNAL = 1.6; EXPRESSED IN BRAIN, SIGNAL = 2.7; EXPRESSED IN HELA, SIGNAL = 3.3; SWISSPROT HIT: P56216, EVALUE 8.90e-01; NT HIT: AE008686.1, EVALUE 4.00e-23
gtctgctgctctctggtccccctggcagccctcgggggctcatttattcagaagccccattaccgcgagacaattctgcggtctgacctttcaccacaaatcccaaatgggaaagggagctctgggaattttaaagagcaaac

SEQ ID NO: 15772 - DNA, 156 bp, Homo sapiens
  MAP TO CHR19.1; EXPRESSED IN HELA, SIGNAL = 1.3; EXPRESSED IN BRAIN, SIGNAL = 0.95; EXPRESSED IN BONE MARROW, SIGNAL =   1; EXPRESSED IN ADULT LIVER, SIGNAL = 1.4; EXPRESSED IN PLACENTA, SIGNAL = 1.4; EXPRESSED IN FETAL LIVER, SIGNAL =   1; NT HIT: AF274313.1, EVALUE 9.00e-40; SWISSPROT HIT: Q16204, EVALUE 4.40e+00; EST_HUMAN HIT: BG334109.1, EVALUE 8.00e-41
ggtccctcccacttttcccaaacaaagctcccggcaactttctccctcgcagcgccccgcccgcccgcggctccccagccccaggccgggaggtaggaaggcgccggcgggagtcggggatcctgctttggggtgtgtgagttggggtggggagtt

SEQ ID NO: 15773 - DNA, 107 bp, Homo sapiens
  MAP TO CHR5.1; EXPRESSED IN HEART, SIGNAL = 0.98; EXPRESSED IN BONE MARROW, SIGNAL = 1.1; EXPRESSED IN FETAL LIVER, SIGNAL = 0.81; EXPRESSED IN LUNG, SIGNAL = 0.63; EXPRESSED IN HELA, SIGNAL = 1.2; EXPRESSED IN BRAIN, SIGNAL = 1.2; NT HIT: AJ320541.1, EVALUE 8.70e-02; SWISSPROT HIT: P98095, EVALUE 8.00e+00; EST_HUMAN HIT: AW866296.1, EVALUE 5.10e-01
tcacaattcaactcaaaaaatttagcacatcttcagaataaattattattgtcattagcacattaccacccaagaaaatcttgtacaggaacagaatgcccagagtg

SEQ ID NO: 15774 - DNA, 276 bp, Homo sapiens
  MAP TO CHR7.1; EXPRESSED IN BONE MARROW, SIGNAL = 1.7; EXPRESSED IN HELA, SIGNAL = 1.3; EXPRESSED IN FETAL LIVER, SIGNAL = 1.2; EXPRESSED IN BRAIN, SIGNAL = 1.7; EXPRESSED IN LUNG, SIGNAL = 0.84; EXPRESSED IN HEART, SIGNAL = 1.1
taaatttaaagagcttcttgttttaaaattgacatgggaaagtagtaaagacctccaaaatatgaacctcaaattgcttgcatgtttgctttccatgtgaagccaggattcatacctcaaacttttccctggaatttatctaagctttttctggtacaaaatgctcaggagacaagactttcatgaaaggtcttcaattctatagccttattctttagaagatgatttggaagagacatccaagtaaaagatttttcccttgaaaaagggtattga

SEQ ID NO: 15775 - DNA, 213 bp, Homo sapiens
  MAP TO CHR20.1; EXPRESSED IN FETAL LIVER, SIGNAL = 0.96; EXPRESSED IN LUNG, SIGNAL = 0.68; EXPRESSED IN HELA, SIGNAL = 0.94; EXPRESSED IN BRAIN, SIGNAL =   1; EXPRESSED IN HEART, SIGNAL = 1.2; EXPRESSED IN BONE MARROW, SIGNAL = 1.1; NT HIT: gi4507688, EVALUE 1.00e-109; SWISSPROT HIT: O94759, EVALUE 7.00e-33; EST_HUMAN HIT: BI906484.1, EVALUE 2.00e-36
agcctcacctttttggtccactcgacaatcctgctttccgtgaaggtctcaaacatctcctggaagaacacgctcagtttctgctggatcagggagatagtgatgtccgagacaggcaggttggccacctgggcaatgacgtcggccacgcggcccgagccctccacaaccacacagggggtgccgttggtggtggcgttgtcgatggtctgc

SEQ ID NO: 15776 - DNA, 179 bp, Homo sapiens
  MAP TO CHR11.1; EXPRESSED IN HEART, SIGNAL = 1.7; EXPRESSED IN BONE MARROW, SIGNAL = 0.44; EXPRESSED IN LUNG, SIGNAL = 1.7; EXPRESSED IN BRAIN, SIGNAL = 0.45; NT HIT: AB026906.1, EVALUE 2.00e-96; SWISSPROT HIT: O14521, EVALUE 3.00e-17; EST_HUMAN HIT: BG568861.1, EVALUE 3.00e-96
aggtcagagcttccacagcatggcaacagctttgcagatgcccacatcgtgatagttgaaatagcaaagcccagcaaaggttaaagctgaaagtgccaaaagccctgccttggcagctttctgcaaggcatccccatgaacatagtcagtaacaacttgtccaaggcccctaaagaaaa

SEQ ID NO: 15777 - DNA, 199 bp, Homo sapiens
  MAP TO CHR9.1; EXPRESSED IN FETAL LIVER, SIGNAL = 1.2; EXPRESSED IN LUNG, SIGNAL = 1.2; EXPRESSED IN HELA, SIGNAL = 0.89; EXPRESSED IN BRAIN, SIGNAL = 1.1; EXPRESSED IN BONE MARROW, SIGNAL = 0.98; EXPRESSED IN HEART, SIGNAL = 1.1; EXPRESSED IN ADULT LIVER, SIGNAL = 0.94; NT HIT: Y07557.1, EVALUE 2.00e-13; SWISSPROT HIT: P30953, EVALUE 4.00e-11; EST_HUMAN HIT: AA909905.1, EVALUE 5.00e-12
gtgacagatgaaaaggagatgtcagtgagggccaagtggctaaggaagaagtacatgggggtgtgaaggtgagagtctagctggatgagcagcatgatgagcaggttccccagcaccgtggtcaggtacatgcccaggaacagggcgaagaacacggcctgctgctctggccggatggggaggcccaggaggaggaact

SEQ ID NO: 15778 - DNA, 231 bp, Homo sapiens
  MAP TO CHR5.1; EXPRESSED IN BONE MARROW, SIGNAL = 4.5; EXPRESSED IN PLACENTA, SIGNAL =   3; EXPRESSED IN FETAL LIVER, SIGNAL =   4; EXPRESSED IN LUNG, SIGNAL = 2.2; EXPRESSED IN HELA, SIGNAL = 4.1; EXPRESSED IN BRAIN, SIGNAL = 4.4; EXPRESSED IN ADULT LIVER, SIGNAL = 3.8; EXPRESSED IN HEART, SIGNAL = 1.9; SWISSPROT HIT: Q91994, EVALUE 1.30e-01; NT HIT: gi14150034, EVALUE 1.00e-103; EST_HUMAN HIT: T80528.1, EVALUE 7.00e-67
cctagtgatgaggatgagctgaggaaatccctgtctgagctggtggatgacaagttcgggacaggcacgaagaaggtgacgcgaatcctggatggtggcaaccccttcctggatgtcccacaggcgctcagtgccaccacctacaagcacggcgtcctgacccggaagactcacgctgacatggatggcaagaggagtgggtgtcaggctgggagaggggcatgggaggga

SEQ ID NO: 15779 - DNA, 190 bp, Homo sapiens
  MAP TO CHR6.1; EXPRESSED IN ADULT LIVER, SIGNAL = 1.6; EXPRESSED IN BONE MARROW, SIGNAL = 1.8; EXPRESSED IN PLACENTA, SIGNAL = 1.4; EXPRESSED IN FETAL LIVER, SIGNAL = 1.5; EXPRESSED IN LUNG, SIGNAL = 0.95; EXPRESSED IN BRAIN, SIGNAL = 1.7; EXPRESSED IN HEART, SIGNAL = 1.7; SWISSPROT HIT: O15056, EVALUE 2.00e-12; NT HIT: gi14747865, EVALUE 3.00e-43; EST_HUMAN HIT: BF086627.1, EVALUE 4.00e-43
ggctggtgtcgggtcacaggtggccggatcccgttacccagcccaggacgttcggtttcattgaagaatacctttccctttctgtttccttgtgccgcagatgatttacatggacgatggagtgtcatcttttgtccagatcagaggctccgttccgctgttctgggaacagccagggcttcaggtaggt

SEQ ID NO: 15780 - DNA, 381 bp, Homo sapiens
  MAP TO CHR3.1; EXPRESSED IN BRAIN, SIGNAL = 0.7; EXPRESSED IN BONE MARROW, SIGNAL = 0.57; EXPRESSED IN HEART, SIGNAL = 1.7; EXPRESSED IN ADULT LIVER, SIGNAL = 3.2; EXPRESSED IN HELA, SIGNAL =   1; EXPRESSED IN LUNG, SIGNAL = 5.9; SWISSPROT HIT: P48794, EVALUE 1.00e-09; NT HIT: gi15147355, EVALUE 0.00e+00; EST_HUMAN HIT: BG769235.1, EVALUE 0.00e+00
tccaggagacctgccagtacctcaaagattacctgacacggctgctggtcccctacgtggtcaatgtgtcctgggccacccaatattgcagccgggcccagtgccatggccatgggcgctgtgtgcgccgcaaccccagtgccagtaccttcctgcatctcagcaccaacagtttccgcctagtgcctggccatgcacctggtgaaccccagctgcgacctgtgggggagctcagttgggccgacattgaccacctgcagacacacttccgctgccagtgctacttgggctggagtggtgagcaatgccagtgggaccataggcaggcagctggaggtgccagcgaggcctgggctgggtcccacctcaccagtctgctgg

SEQ ID NO: 15781 - DNA, 175 bp, Homo sapiens
  MAP TO AC015913.4; EXPRESSED IN FETAL LIVER, SIGNAL = 0.85; EXPRESSED IN HELA, SIGNAL = 0.82; EXPRESSED IN BRAIN, SIGNAL =   1; EXPRESSED IN HEART, SIGNAL = 1.7; EXPRESSED IN BONE MARROW, SIGNAL = 0.94; EXPRESSED IN ADULT LIVER, SIGNAL = 1.1; EXPRESSED IN LUNG, SIGNAL = 1.5; NT HIT: gi14774504, EVALUE 3.00e-83; SWISSPROT HIT: O14939, EVALUE 5.00e-25; EST_HUMAN HIT: AL524142.1, EVALUE 2.00e-79
gcctcacctgtgggaggtatcgatccgcacgccgtgccgtgcctccgtgctccttttccccacttgcacctcaaagccagggtcaaagagctgaacaaatgagatggcacctgtctcgaggcacatgtacagcaggaaggagtccttcaccaccagccacctagagcagaagggc

SEQ ID NO: 15782 - DNA, 294 bp, Homo sapiens
  MAP TO CHR22.1; EXPRESSED IN ADULT LIVER, SIGNAL =   1; EXPRESSED IN FETAL LIVER, SIGNAL = 0.77; EXPRESSED IN PLACENTA, SIGNAL = 1.6; EXPRESSED IN LUNG, SIGNAL = 0.64; EXPRESSED IN HELA, SIGNAL = 1.2; EXPRESSED IN BRAIN, SIGNAL = 0.97; EXPRESSED IN HEART, SIGNAL = 1.1; NT HIT: gi6912457, EVALUE 0.00e+00; SWISSPROT HIT: Q9Y6J0, EVALUE 1.00e-51; EST_HUMAN HIT: AW001907.1, EVALUE 0.00e+00
ctgcttacccacaggagcgcctgtctccaacagaccaggactgtgcagtgggaagctggttgtagccacagaggtgtaggagaccacaggctcggcgacagccacagctgggttggtgctgacagtgcttggctggatcacgttaactggcgtcaccaccatggaggactcaagaggctggctggggtcctggtagtccgacaaatcaatccttttgccaaggctgggacgtgggggctcacaggtggtgagatgattgtacatggccagcaagctctctccgaggcacttcca

SEQ ID NO: 15783 - DNA, 159 bp, Homo sapiens
  MAP TO CHR2.1; EXPRESSED IN ADULT LIVER, SIGNAL = 1.3; EXPRESSED IN FETAL LIVER, SIGNAL = 1.1; EXPRESSED IN LUNG, SIGNAL = 0.71; EXPRESSED IN HELA, SIGNAL = 1.3; EXPRESSED IN BRAIN, SIGNAL = 1.3; EXPRESSED IN BONE MARROW, SIGNAL = 1.2; SWISSPROT HIT: P74168, EVALUE 2.60e-02; EST_HUMAN HIT: BG682373.1, EVALUE 1.00e-52
cccacacttacctgtgctatatcaagcaggaaaagctgcaggtaaaaggctgtggcgctggaggctatctggttggggaccccaccaatgccatagcacacctttgtacagaatgagaggcgaccggctctgctgtcctggaggagacacaggaactaa

SEQ ID NO: 15784 - DNA, 354 bp, Homo sapiens
  MAP TO CHR5.1; EXPRESSED IN HELA, SIGNAL = 1.8; EXPRESSED IN BRAIN, SIGNAL = 0.92; EXPRESSED IN LUNG, SIGNAL = 1.6; EXPRESSED IN HEART, SIGNAL = 1.1; EXPRESSED IN BONE MARROW, SIGNAL = 0.98; EXPRESSED IN PLACENTA, SIGNAL = 1.1; NT HIT: D49676.1, EVALUE 0.00e+00; SWISSPROT HIT: Q15695, EVALUE 2.00e-70; EST_HUMAN HIT: AA601026.1, EVALUE 0.00e+00
acctaccaacagttcctagatttctatgaggatgtgttgcccgagttcaagaacgtggggaaagtgattcagttcaaggtcagctgcaatttggaacctcacctgaggggcaatgtatatgttcagtaccagtcggaagaagaatgccaagcagccctttctctgtttaacggacgatggtatgcaggacgacagctgcaatgtgaattctgcccagtgacccggtggaaaatggcgatttgtggtttatttgaaatacaacaatgtccaagaggaaaacactgcaactttcttcatgtgttcagaaatcccaacaatgaattctgggaagctaatagagacatctacttgtct

SEQ ID NO: 15785 - DNA, 188 bp, Homo sapiens
  MAP TO CHR7.1; EXPRESSED IN BONE MARROW, SIGNAL = 1.1; EXPRESSED IN HEART, SIGNAL = 0.96; EXPRESSED IN ADULT LIVER, SIGNAL = 1.2; EXPRESSED IN FETAL LIVER, SIGNAL = 1.1; EXPRESSED IN LUNG, SIGNAL = 1.2; EXPRESSED IN HELA, SIGNAL =   1; EXPRESSED IN BRAIN, SIGNAL = 0.96; SWISSPROT HIT: P15056, EVALUE 1.00e-29; EST_HUMAN HIT: BI039024.1, EVALUE 8.00e-97; NT HIT: gi16161515, EVALUE 6.00e-97
gaacttactccatgccctgtgcagtctgtcgtgcaatatctataagtttgatcatctcaaatttggtctcaatgatatggagatggtgatacaagctggagccctcacaccactgggtaacaatagccagttgtggctttgtggaatagcccatgaagagtaggatattcacatgtcgtgttttcctg

SEQ ID NO: 15786 - DNA, 165 bp, Homo sapiens
  MAP TO CHR12.1; EXPRESSED IN PLACENTA, SIGNAL = 1.7; EXPRESSED IN FETAL LIVER, SIGNAL = 1.2; EXPRESSED IN BRAIN, SIGNAL = 1.1; EXPRESSED IN ADULT LIVER, SIGNAL = 0.45; EXPRESSED IN LUNG, SIGNAL = 1.8; EXPRESSED IN HELA, SIGNAL = 1.5; EXPRESSED IN HEART, SIGNAL = 1.5; EXPRESSED IN BONE MARROW, SIGNAL = 1.2; NT HIT: gi14756825, EVALUE 6.00e-81; SWISSPROT HIT: Q9Y6Q5, EVALUE 2.00e-24; EST_HUMAN HIT: BE266374.1, EVALUE 9.00e-81
tggggtggatacagtagaggttgctgtgtttgatccataggaagtggacctggccgtggctcagcagcggggccagggcgccttcctcctcccgctgtaccagcaaaggcatgaagtgctcaatcttgctcatggccacatcgcccttgtagttgcggctgatca

SEQ ID NO: 15787 - DNA, 223 bp, Homo sapiens
  MAP TO CHR14.1; EXPRESSED IN PLACENTA, SIGNAL = 1.3; EXPRESSED IN FETAL LIVER, SIGNAL = 1.1; EXPRESSED IN HELA, SIGNAL = 1.1; EXPRESSED IN BRAIN, SIGNAL = 1.2; EXPRESSED IN BONE MARROW, SIGNAL = 0.98; NT HIT: M97710.1, EVALUE 1.00e-100; SWISSPROT HIT: P01737, EVALUE 1.00e-15; EST_HUMAN HIT: BI821699.1, EVALUE 1.00e-96
cttttctggtatgtccaatatcctggagaaggtctacagctcctcctgaaagccacgaaggctgatgacaagggaagcaacaaaggttttgaagccacataccgtaaagaaaccacttctttccacttggagaaaggctcagttcaagtgtcagactcagcggtgtacttctgtgctctgagtgacacagtgacagggactgcagggggagctgagcacaaac

SEQ ID NO: 15788 - DNA, 162 bp, Homo sapiens
  MAP TO CHR7.1; EXPRESSED IN LUNG, SIGNAL = 0.78; EXPRESSED IN HELA, SIGNAL = 2.9; EXPRESSED IN BRAIN, SIGNAL = 2.3; EXPRESSED IN ADULT LIVER, SIGNAL = 2.3; EXPRESSED IN BONE MARROW, SIGNAL = 1.9; EXPRESSED IN PLACENTA, SIGNAL = 1.3; EXPRESSED IN FETAL LIVER, SIGNAL = 1.7; SWISSPROT HIT: P19811, EVALUE 1.50e+00
gctccacagctgtcccaggcttcagagccctgcagtgccagtcatgaggctggctctgccatgtctctccacactcctggcaagggatctttttgttgttattcccccttcttcccttctgattccagacccagtgtttgcttgtcttgcagccaaagataa

SEQ ID NO: 15789 - DNA, 237 bp, Homo sapiens
  MAP TO CHR7.1; EXPRESSED IN ADULT LIVER, SIGNAL = 0.39; EXPRESSED IN FETAL LIVER, SIGNAL = 0.76; EXPRESSED IN HELA, SIGNAL = 1.3; EXPRESSED IN BRAIN, SIGNAL = 0.73; EXPRESSED IN LUNG, SIGNAL = 1.2; EXPRESSED IN HEART, SIGNAL = 0.96; EXPRESSED IN BONE MARROW, SIGNAL = 0.63; NT HIT: D30612.1, EVALUE 2.00e-29; EST_HUMAN HIT: BI768519.1, EVALUE 1.00e-129; SWISSPROT HIT: Q9UDV7, EVALUE 2.00e-17
cagcacaggagaaaacgacgctccacacctttaacttcttccacacttccttcacaagcaacagagaaaagctcctattttcagaccaccgagatttcactctggacggtggtggccgctattcaggctgtggagaagaagatggagtcccaggctgcccggctacagagcctggaggggcgcacggggacagccgagaagaagctggctgactgcgagaagatggccgtggagttc

SEQ ID NO: 15790 - DNA, 336 bp, Homo sapiens
  MAP TO CHR14.1; EXPRESSED IN FETAL LIVER, SIGNAL = 5.7; EXPRESSED IN LUNG, SIGNAL = 2.7; EXPRESSED IN HELA, SIGNAL = 7.7; EXPRESSED IN BRAIN, SIGNAL = 6.3; EXPRESSED IN HEART, SIGNAL = 3.4; EXPRESSED IN BONE MARROW, SIGNAL = 6.5; EXPRESSED IN ADULT LIVER, SIGNAL = 5.8; NT HIT: M97710.1, EVALUE 0.00e+00; EST_HUMAN HIT: BI821699.1, EVALUE 0.00e+00; SWISSPROT HIT: P06322, EVALUE 7.00e-24
acccgtggaaattcagtgacccagatggaagggccagtgactctctcagaagaggccttcctgactataaactgcacgtacacagccacaggatacccttcccttttctggtatgtccaatatcctggagaaggtctacagctcctcctgaaagccacgaaggctgatgacaagggaagcaacaaaggttttgaagccacataccgtaaagaaaccacttctttccacttggagaaaggctcagttcaagtgtcagactcagcggtgtacttctgtgctctgagtgacacagtgacagggactgcagggggagctgagcacaaactctgagcagca

SEQ ID NO: 15791 - DNA, 234 bp, Homo sapiens
  MAP TO CHR14.1; EXPRESSED IN HELA, SIGNAL = 0.44; EXPRESSED IN BRAIN, SIGNAL = 0.81; EXPRESSED IN BONE MARROW, SIGNAL = 0.8; EXPRESSED IN HEART, SIGNAL = 0.42; EXPRESSED IN FETAL LIVER, SIGNAL = 0.69; NT HIT: gi13375882, EVALUE 1.00e-122; SWISSPROT HIT: Q00709, EVALUE 7.20e-01
aggctcttgttaccttggctgaagctggccccttccagttcaagtactgctctagttctgtgcccttagcccgggccctggaggagtcaaacactttcctcttggaaccccgcatcctgctgcagatgttggagtgtctctccagcctgaacgagaggaatttgcgcccacagtggctgcactcacccagctgtggctcttcaatggagccgctggaacctgaggagtctggtg

SEQ ID NO: 15792 - DNA, 193 bp, Homo sapiens
  MAP TO CHRX.1; EXPRESSED IN PLACENTA, SIGNAL = 3.5; EXPRESSED IN FETAL LIVER, SIGNAL = 5.1; EXPRESSED IN HELA, SIGNAL = 3.5; EXPRESSED IN BRAIN, SIGNAL = 5.4; EXPRESSED IN LUNG, SIGNAL = 3.4; EXPRESSED IN HEART, SIGNAL =   3; EXPRESSED IN ADULT LIVER, SIGNAL = 6.9; EXPRESSED IN BONE MARROW, SIGNAL = 4.8; SWISSPROT HIT: P51793, EVALUE 2.00e-35; NT HIT: gi14764587, EVALUE 1.00e-103; EST_HUMAN HIT: AI087050.1, EVALUE 1.00e-103
acctctgactgattcaccagcagctccgaccatttctgccacaggggacacttgtctctgtcctcaaaagtggtctcgttagaagtccagcaacactgctcatggctataccagaaggcagacaggcagaccccctccttcaggtccgtcatccagtccacggcgagatcgatgaccccagccaaggtgcctg

SEQ ID NO: 15793 - DNA, 122 bp, Homo sapiens
  MAP TO CHR9.1; EXPRESSED IN BRAIN, SIGNAL = 0.52; EXPRESSED IN HEART, SIGNAL = 0.67; EXPRESSED IN LUNG, SIGNAL = 0.61; SWISSPROT HIT: Q24372, EVALUE 1.20e-02; NT HIT: gi15303543, EVALUE 4.00e-01; EST_HUMAN HIT: BF213537.1, EVALUE 9.30e+00
tgcttggagccggggccgctcaggaggtgctaggattggccggtgcagacgtggagctgcagtgttggacctcaggggtccccacgccccaggtggagtggaccaaggacaggcagtgagtg

SEQ ID NO: 15794 - DNA, 260 bp, Homo sapiens
  MAP TO CHR19.1; EXPRESSED IN ADULT LIVER, SIGNAL = 4.7; EXPRESSED IN BONE MARROW, SIGNAL = 3.7; EXPRESSED IN PLACENTA, SIGNAL = 5.2; EXPRESSED IN FETAL LIVER, SIGNAL = 3.8; EXPRESSED IN LUNG, SIGNAL = 3.3; EXPRESSED IN HEART, SIGNAL = 3.5; EXPRESSED IN BRAIN, SIGNAL = 4.9; EXPRESSED IN HELA, SIGNAL = 6.9; EST_HUMAN HIT: BI913992.1, EVALUE 0.00e+00; SWISSPROT HIT: Q61554, EVALUE 8.00e-21; NT HIT: gi14787035, EVALUE 0.00e+00
tgcagatgtggatgaatgcacccagagcccaggcctgtgtggccgaggggcctgcaagaacctgcctggctctttccgctgtgtttgcccggctggcttccggggctcggcgtgtgaagaggatgtggatgagtgtgcccaggagccgccgccctgtgggcccggccgctgtgacaacacggcaggctcctttcactgtgcctgccctgctggcttccgctcccgagggcccggggccccctgccaaggtgagggtgctg

SEQ ID NO: 15795 - DNA, 105 bp, Homo sapiens
  MAP TO CHR6.1; EXPRESSED IN LUNG, SIGNAL = 0.89; EXPRESSED IN HELA, SIGNAL = 0.95; EXPRESSED IN BRAIN, SIGNAL = 0.78; EXPRESSED IN BONE MARROW, SIGNAL = 0.78; EXPRESSED IN HEART, SIGNAL = 0.81; EXPRESSED IN ADULT LIVER, SIGNAL = 0.7; EXPRESSED IN FETAL LIVER, SIGNAL = 0.97; NT HIT: AL161592.2, EVALUE 5.20e+00; EST_HUMAN HIT: BE874969.1, EVALUE 1.30e-01
aagacatttgatccatctaatggaagaggaagaaaacagagagatgagatcaggggaatttctgaaaaagaaattctgaaacacaagggacaaaagagtgagtca

SEQ ID NO: 15796 - DNA, 218 bp, Homo sapiens
  MAP TO CHR7.1; EXPRESSED IN FETAL LIVER, SIGNAL = 0.99; EXPRESSED IN LUNG, SIGNAL = 1.4; EXPRESSED IN HELA, SIGNAL = 0.83; EXPRESSED IN BRAIN, SIGNAL = 0.84; EXPRESSED IN HEART, SIGNAL = 1.3; EXPRESSED IN BONE MARROW, SIGNAL = 0.71; EST_HUMAN HIT: BG104352.1, EVALUE 5.00e-40; SWISSPROT HIT: Q03674, EVALUE 7.90e-01
gagaaaggcgcccttcctgcggtgcctgctggtaattggctctccggaaccagccggggacacgagggcctgctgggtcaggaagtggtggacaatgccaccctttcaggggagacacggcttggtcttaggtcctgtgtgactccagggaagtccagagaacagcctgttctcagatgatgttccctaacccagagccccctccagaggtgagacac

SEQ ID NO: 15797 - DNA, 140 bp, Homo sapiens
  MAP TO CHR7.1; EXPRESSED IN BONE MARROW, SIGNAL = 0.98; EXPRESSED IN HELA, SIGNAL = 0.97; EXPRESSED IN LUNG, SIGNAL = 1.8; EXPRESSED IN BRAIN, SIGNAL = 1.1; EXPRESSED IN HEART, SIGNAL = 1.9; NT HIT: gi14739838, EVALUE 1.00e-60; EST_HUMAN HIT: BG576218.1, EVALUE 1.00e-60; SWISSPROT HIT: Q9CPH8, EVALUE 4.60e-02
cctgttcatccagtgactttcttatacaattctttaattcttcgattccttctccagtaactgcagatatggggatgatatgttggaactctacagtcctctctggaatcatgtttttttcaaataaatgcagaaaatct

SEQ ID NO: 15798 - DNA, 115 bp, Homo sapiens
  MAP TO AL159162.5; EXPRESSED IN PLACENTA, SIGNAL =  24; EXPRESSED IN LUNG, SIGNAL =  11; EXPRESSED IN BRAIN, SIGNAL =  15; EXPRESSED IN HEART, SIGNAL =  12; NT HIT: gi14761214, EVALUE 1.00e-41; EST_HUMAN HIT: BE396405.1, EVALUE 1.00e-41; SWISSPROT HIT: P04406, EVALUE 4.00e-12
gcagggatgatgttctggagagccctgtggctgtcacgccacagtttcctggagggtccattcacagtcttctgggtggcagtgatggcgtggactgtggtcatgagtccttcca

SEQ ID NO: 15799 - DNA, 202 bp, Homo sapiens
  MAP TO CHRX.1; EXPRESSED IN FETAL LIVER, SIGNAL = 0.41; EXPRESSED IN LUNG, SIGNAL = 0.79; EXPRESSED IN BRAIN, SIGNAL = 0.5; NT HIT: gi6912503, EVALUE 5.00e-88; EST_HUMAN HIT: BG182104.1, EVALUE 8.00e-88; SWISSPROT HIT: Q02173, EVALUE 2.00e-03
tgaaatcaccacaacgtactgtttgtttttagtcgggtaggttcactgttccggctgccggcttggtttatggctttaacgatgaagatgtagcgagtcccgctctggagtccatgcactgtgtaatggttctgtttaatgttgggaacaatcatccagctgtctactgaattatacaggcctgtaacatggggaaagacaa

SEQ ID NO: 15800 - DNA, 219 bp, Homo sapiens
  MAP TO CHR17.1; EXPRESSED IN BONE MARROW, SIGNAL = 2.9; EXPRESSED IN PLACENTA, SIGNAL =  19; EXPRESSED IN FETAL LIVER, SIGNAL =   5; EXPRESSED IN LUNG, SIGNAL = 3.8; EXPRESSED IN BRAIN, SIGNAL = 0.89; EXPRESSED IN HEART, SIGNAL = 0.66; NT HIT: X14945.1, EVALUE 1.00e-113; EST_HUMAN HIT: H82114.1, EVALUE 1.00e-101; SWISSPROT HIT: O14345, EVALUE 3.00e+00
gttaaggctatactttcagggatcatttctatagtgtgttactagagaagtttctttgaacgtgtagagcaccgaaaaccccgaggaagagaggtagcgttttctcctgagcgtgaagccggctttctggcgttgcttggctgcaactgccgtcagccattgatgatcgttcttctctccgtattggggagtgagagggagagaacgcggtctgagtgg

SEQ ID NO: 15801 - DNA, 262 bp, Homo sapiens
  MAP TO CHR17.1; EXPRESSED IN ADULT LIVER, SIGNAL = 2.2; EXPRESSED IN PLACENTA, SIGNAL = 2.7; EXPRESSED IN FETAL LIVER, SIGNAL = 2.8; EXPRESSED IN LUNG, SIGNAL = 2.7; EXPRESSED IN HELA, SIGNAL = 5.1; EXPRESSED IN BRAIN, SIGNAL = 2.6; EXPRESSED IN HEART, SIGNAL = 2.2; NT HIT: gi14774048, EVALUE 0.00e+00; EST_HUMAN HIT: BE612456.1, EVALUE 0.00e+00
tcaggaagctgcaagtggattcgaactcctgcaatcatctactctgttcacaccatgacaaccttaattccgatactctccacatttctgtttgaggatttctccaaagccagtggtttcaagggacaaagacctgagactttgcatgaacggttaacccttgtgtctgtctatgccccctacttactcatcccattcatacttttaattttcatgttgcggagcccctactacaagtatgaagagaaaagaaaaaaaaaat

SEQ ID NO: 15802 - DNA, 199 bp, Homo sapiens
  MAP TO CHR7.1; EXPRESSED IN FETAL LIVER, SIGNAL = 3.4; EXPRESSED IN HELA, SIGNAL = 1.7; EXPRESSED IN BRAIN, SIGNAL = 3.9; EXPRESSED IN LUNG, SIGNAL = 4.2; EXPRESSED IN PLACENTA, SIGNAL = 2.8; EXPRESSED IN HEART, SIGNAL =   4; EXPRESSED IN ADULT LIVER, SIGNAL =   2; NT HIT: gi14744152, EVALUE 1.00e-88; SWISSPROT HIT: O60628, EVALUE 1.90e-02; EST_HUMAN HIT: BI759387.1, EVALUE 2.00e-88
cagggtaagttacctgggggatggccaggcctagagccacaccaccaagtaagaataggttgctgtgtatccagttgaccaacttgtcaatacagccattggtgtagatgactttgctagcttccaagtagtcaaaggcctgcataccttggccacacatagtgttgatcactgcctggggaaagagttgaaaagccaa

SEQ ID NO: 15803 - DNA, 204 bp, Homo sapiens
  MAP TO CHR5.1; EXPRESSED IN BRAIN, SIGNAL = 0.54; EXPRESSED IN HEART, SIGNAL = 0.58; EXPRESSED IN ADULT LIVER, SIGNAL = 0.82; EXPRESSED IN BONE MARROW, SIGNAL = 0.62; SWISSPROT HIT: P40480, EVALUE 4.00e-05; EST_HUMAN HIT: AW247150.1, EVALUE 1.00e-103; NT HIT: gi13386461, EVALUE 1.00e-103
ttaaagccacataccagaagccagcaaatatttaaccaattccaggtgtccctcctgagatgcctccatcagaggtgtggagcagccaagttctatatcagcccctgccttaataagaaagtctgcaacttcagaaaatcctccacagcaagccaaagtaagagcagtttcttgagtttcttctgtctgggcatttatatttgc

SEQ ID NO: 15804 - DNA, 285 bp, Homo sapiens
  MAP TO CHR16.1; EXPRESSED IN PLACENTA, SIGNAL = 3.3; EXPRESSED IN LUNG, SIGNAL = 3.3; EXPRESSED IN FETAL LIVER, SIGNAL = 3.2; EXPRESSED IN HELA, SIGNAL = 3.2; EXPRESSED IN BRAIN, SIGNAL = 3.8; EXPRESSED IN HEART, SIGNAL = 3.5; EXPRESSED IN ADULT LIVER, SIGNAL = 3.5; EXPRESSED IN BONE MARROW, SIGNAL = 3.8; NT HIT: U41302.1, EVALUE 0.00e+00; SWISSPROT HIT: P48029, EVALUE 5.00e-47; EST_HUMAN HIT: AL118749.1, EVALUE 1.00e-126
caggcctgggctatgcctccatggtgatcgtcttctactgcaacacctactacatcatggtgctggcctggggcttctattacctggtcaagtcctttaccaccacgctgccctgggccacatgtggccacacctggaacactcccgactgtgtggagatcttccaccatgaagactgtgccagtgccagcctggccaacctcacttgtgaccagcttgctgaccgccagtcccctgtcatcgagttctgggagtgagtccagcacctctgggccaagcccatcc

SEQ ID NO: 15805 - DNA, 153 bp, Homo sapiens
  MAP TO CHR17.1; EXPRESSED IN BRAIN, SIGNAL = 0.42; EXPRESSED IN HEART, SIGNAL = 0.57; EXPRESSED IN ADULT LIVER, SIGNAL = 0.57; NT HIT: AB017483.1, EVALUE 3.00e-52; SWISSPROT HIT: P26640, EVALUE 1.50e+00; EST_HUMAN HIT: BE393222.1, EVALUE 3.00e-43
tcccagtgggccagtagagctgccccagttcttcatcgccccacttctaggtccctccttcaccttgtagcgcaagcacaaggcctggttcagcttctctatgtctgcttcttttgccttctggacttcctgatgctgttcttcctgggcctg

SEQ ID NO: 15806 - DNA, 269 bp, Homo sapiens
  MAP TO CHR12.1; EXPRESSED IN BONE MARROW, SIGNAL = 0.65; EXPRESSED IN BRAIN, SIGNAL = 0.6; EXPRESSED IN HEART, SIGNAL = 0.58; NT HIT: AF261690.1, EVALUE 0.00e+00; SWISSPROT HIT: O13394, EVALUE 4.90e+00
taattggcttttagttcacgtcaatatgcgtcctttcctgtctcttttcagtctaactccaatcataacgttcctggctgcccgcctgatttctgattggttttaatcagcttcatcctctcctattcctgcctacttcttacctctccgcccactaggattttgcccaagcatatcccggattctggttggccgttgttctgtcattcctatcaaagctttgcctatccctacgtctcagggagcccgcctgccggttgactggtttc

SEQ ID NO: 15807 - DNA, 241 bp, Homo sapiens
  MAP TO CHR1.1; EXPRESSED IN FETAL LIVER, SIGNAL =   4; EXPRESSED IN HELA, SIGNAL = 4.5; EXPRESSED IN LUNG, SIGNAL = 6.1; EXPRESSED IN BRAIN, SIGNAL =   4; EXPRESSED IN HEART, SIGNAL = 4.8; EXPRESSED IN BONE MARROW, SIGNAL =   4; EXPRESSED IN ADULT LIVER, SIGNAL = 0.68; EXPRESSED IN PLACENTA, SIGNAL = 5.1; NT HIT: gi14744979, EVALUE 0.00e+00; EST_HUMAN HIT: AA446194.1, EVALUE 3.00e-04; SWISSPROT HIT: P16236, EVALUE 2.00e-01
aagaagatgtgtgggcggatcttctcaaggagagggcccttgggcgctccagcaaggaacaaggcttcatctgtctccaggccccagctgcgcagggtcttgagagcccgggccccggaactggctgcactgcgtgctgtcaccaagtaggtacgaattgggcactccagccgcaggcctttggagtagaacttcttctgcaacctacccagtgcctccagaaagccctttaaggggccct

SEQ ID NO: 15808 - DNA, 207 bp, Homo sapiens
  MAP TO CHR5.1; EXPRESSED IN HELA, SIGNAL = 1.6; EXPRESSED IN BRAIN, SIGNAL = 1.4; EXPRESSED IN BONE MARROW, SIGNAL = 1.4; EXPRESSED IN ADULT LIVER, SIGNAL = 1.5; EXPRESSED IN PLACENTA, SIGNAL = 1.4; EXPRESSED IN FETAL LIVER, SIGNAL = 1.5; NT HIT: L05072.1, EVALUE 1.00e-113; EST_HUMAN HIT: BI771693.1, EVALUE 4.00e-96; SWISSPROT HIT: P10914, EVALUE 4.00e-30
tcccaaggacccagagtccttggataccttttctctggttcttggtgagaggtggaagcatccggtacactcgcacagctgagctgcccttgttcctgctctggtctttcacctcctcgatatctggcagggagttcatggcacagcgaaagttggccttccacgtcttgggatctggctccttttcccctgctttgtatcggccta

SEQ ID NO: 15809 - DNA, 209 bp, Homo sapiens
  MAP TO CHR17.1; EXPRESSED IN HELA, SIGNAL = 0.86; EXPRESSED IN BRAIN, SIGNAL = 0.66; EXPRESSED IN BONE MARROW, SIGNAL = 0.72; EXPRESSED IN HEART, SIGNAL = 0.62; EXPRESSED IN ADULT LIVER, SIGNAL = 0.78; NT HIT: AF081118.2, EVALUE 4.80e-02; EST_HUMAN HIT: BG425641.1, EVALUE 1.00e-114; SWISSPROT HIT: P06909, EVALUE 2.80e-01
atggcgtcctctttgcttgcgggcgagcgattggtgcgtgctttgggccccggcggggagctggagccagagcggctaccccgaaagctgcgggccgagcttgaggccgcgctggggaagaagcacaagggcggtgatagctccagtggcccccaacgcttggtttctttccgtctcatccgggatctgcaccagcatctgagagaaag

SEQ ID NO: 15810 - DNA, 224 bp, Homo sapiens
  MAP TO CHR19.1; EXPRESSED IN HELA, SIGNAL = 1.8; EXPRESSED IN BRAIN, SIGNAL = 1.3; EXPRESSED IN HEART, SIGNAL = 0.78; EXPRESSED IN BONE MARROW, SIGNAL = 1.6; EXPRESSED IN PLACENTA, SIGNAL = 1.9; EXPRESSED IN FETAL LIVER, SIGNAL = 1.3; EXPRESSED IN LUNG, SIGNAL = 1.1; NT HIT: AF309082.1, EVALUE 1.00e-122; EST_HUMAN HIT: AW402065.1, EVALUE 1.00e-122; SWISSPROT HIT: Q15139, EVALUE 4.00e-13
aggatgacgggcatcagggcctggcggatggctgtctcccagccccgggcggcctcagccccctgcccacttggcccacccggagtcccgccaggcatctcgcccacgaagtaggtggcattggcagtgacgatctcaaagcagtgtgggttggtgcccggcggcacaaggctgaagttctgggcggactccaccgtgaggatttctgacagcggaatttcctg

SEQ ID NO: 15811 - DNA, 305 bp, Homo sapiens
  MAP TO CHR19.1; EXPRESSED IN PLACENTA, SIGNAL = 6.5; EXPRESSED IN FETAL LIVER, SIGNAL = 6.3; EXPRESSED IN LUNG, SIGNAL = 3.7; EXPRESSED IN HELA, SIGNAL =   7; EXPRESSED IN BRAIN, SIGNAL = 6.8; EXPRESSED IN HEART, SIGNAL = 3.6; EXPRESSED IN ADULT LIVER, SIGNAL = 8.1; EXPRESSED IN BONE MARROW, SIGNAL = 7.7; SWISSPROT HIT: Q05469, EVALUE 3.00e-53; NT HIT: gi11525931, EVALUE 0.00e+00; EST_HUMAN HIT: AA861626.1, EVALUE 0.00e+00
gacacccccgagatgtcgctgtcagctgagacacttagcccctccacaccctccgatgtcaacttcttattaccacctgaggatgcaggggaagaggctgaggccaaaaatgagctgagccccatggacagaggcctgggcgtccgtgccgccttccccgagggtttccacccccgacgctccagccagggtgccacacagatgcccctctactcctcacccatagtcaagaaccccttcatgtcgccgctgctggcacccgacagcatgctcaagagcctgccacctgtgcacatcgtggtgag

SEQ ID NO: 15812 - DNA, 205 bp, Homo sapiens
  MAP TO CHR14.1; EXPRESSED IN BRAIN, SIGNAL = 0.62; EXPRESSED IN HEART, SIGNAL = 0.51; EXPRESSED IN ADULT LIVER, SIGNAL = 0.4; EXPRESSED IN BONE MARROW, SIGNAL = 0.71; EST_HUMAN HIT: T79714.1, EVALUE 1.10e+00; SWISSPROT HIT: P76473, EVALUE 1.10e+00
ggcatcctgtgctgggaagcagagtggtcagaatgcagaggcactgagcactccatccaggaataaaaatattatcccaggaggtaaggaacatgggccaagccaagtccctctcagctgcttccctgggagaagatttaaaggggataaatcaacaaacgaacgccaaacaaaccacagagaccattctaggggaaacggctga

SEQ ID NO: 15813 - DNA, 110 bp, Homo sapiens
  MAP TO CHR6.1; EXPRESSED IN PLACENTA, SIGNAL = 1.5; EXPRESSED IN FETAL LIVER, SIGNAL = 1.4; EXPRESSED IN LUNG, SIGNAL = 0.71; EXPRESSED IN HELA, SIGNAL = 1.7; EXPRESSED IN BRAIN, SIGNAL = 1.7; EXPRESSED IN ADULT LIVER, SIGNAL = 1.1; EXPRESSED IN BONE MARROW, SIGNAL = 1.7; EXPRESSED IN HEART, SIGNAL = 0.71; NT HIT: gi13652184, EVALUE 1.40e+00; EST_HUMAN HIT: BG282494.1, EVALUE 2.10e+00
gatgagcccattctgaaggccaagttcagtaaaaataagtcaagccgaaagagaaaacttgactattgtaaaggttgaaccagatgtttgtatagagccagtccaatcat

SEQ ID NO: 15814 - DNA, 166 bp, Homo sapiens
  MAP TO CHR22.1; EXPRESSED IN BRAIN, SIGNAL = 0.3; EXPRESSED IN HEART, SIGNAL = 0.72; EXPRESSED IN FETAL LIVER, SIGNAL = 0.32; NT HIT: gi14140235, EVALUE 2.00e-81; SWISSPROT HIT: P31636, EVALUE 3.00e-11; EST_HUMAN HIT: BG742097.1, EVALUE 2.00e-41
ggttcactcaccgtccagctatcaggagctctttctccgacgcttgcttccgcatcttggtgtagaggtcaatggtgaagagggtgctggcgctgttgaagatggaggtcagggagctcatgagagaggccagcatgaccgaaagcatcaggcctcgcagtcctgg

SEQ ID NO: 15815 - DNA, 235 bp, Homo sapiens
  MAP TO CHR12.1; EXPRESSED IN PLACENTA, SIGNAL = 2.1; EXPRESSED IN FETAL LIVER, SIGNAL = 1.8; EXPRESSED IN LUNG, SIGNAL = 1.2; EXPRESSED IN BRAIN, SIGNAL = 2.2; EXPRESSED IN BONE MARROW, SIGNAL = 2.4; EXPRESSED IN HEART, SIGNAL = 1.3; EXPRESSED IN ADULT LIVER, SIGNAL = 1.9; SWISSPROT HIT: Q09222, EVALUE 6.20e+00; EST_HUMAN HIT: BF209650.1, EVALUE 2.00e-02
aactgagaaggcagcagcttggttgggatccgcccccctcaccacccctcccctcaagctgctgtgccctgcccagtgtattctgccagaaccagctcatggcctgaaaactgcaagtcagagtggaaagccttcattactgcatcaccagtactgagtagaacagcatgatgtgaggcccagttcaggatcatcactgtgatttgtggtttgcttggtttgctaggctttgatc

SEQ ID NO: 15816 - DNA, 194 bp, Homo sapiens
  MAP TO CHR2.1; EXPRESSED IN HELA, SIGNAL = 1.3; EXPRESSED IN BRAIN, SIGNAL = 1.1; EXPRESSED IN HEART, SIGNAL = 1.3; EXPRESSED IN ADULT LIVER, SIGNAL = 1.4; EXPRESSED IN BONE MARROW, SIGNAL = 1.1; EXPRESSED IN PLACENTA, SIGNAL = 1.5; EXPRESSED IN FETAL LIVER, SIGNAL = 1.1; EXPRESSED IN LUNG, SIGNAL = 1.2; NT HIT: AJ277892.1, EVALUE 1.00e-103; SWISSPROT HIT: Q9DBU0, EVALUE 8.40e-01; EST_HUMAN HIT: BF791260.1, EVALUE 2.00e-39
tagctactttagaaaatataaagtcaattctaaaaatgtctcttcaagttcctgaagtacagaagggagttgtgacagaagaaaaaataaccattgtaactcaaagagaggaatctccaccaccagcaggtacttaatcccatctccatgaaataaccttgtctttccttcaagcctctttaattgcatgtctt

SEQ ID NO: 15817 - DNA, 159 bp, Homo sapiens
  MAP TO CHR1.1; EXPRESSED IN PLACENTA, SIGNAL = 6.6; EXPRESSED IN FETAL LIVER, SIGNAL = 7.7; EXPRESSED IN LUNG, SIGNAL = 5.5; EXPRESSED IN HELA, SIGNAL = 5.4; EXPRESSED IN BRAIN, SIGNAL = 8.5; EXPRESSED IN HEART, SIGNAL = 6.7; EXPRESSED IN ADULT LIVER, SIGNAL = 8.4; EXPRESSED IN BONE MARROW, SIGNAL =  10; NT HIT: AF177767.1, EVALUE 9.00e-03; SWISSPROT HIT: P31916, EVALUE 1.30e-01; EST_HUMAN HIT: BE398119.1, EVALUE 2.00e-01
tatctgctttgatctttttcctttgataaattgtagagaatgcaagatggagattgaagacaaaaagcaggagctccttgaaatggatcaggcacttaaagagagaaattgggaactaaagcaaagagcagctcaggttgatttttcttgattatattt

SEQ ID NO: 15818 - DNA, 221 bp, Homo sapiens
  MAP TO CHR6.1; EXPRESSED IN HEART, SIGNAL =  11; EXPRESSED IN ADULT LIVER, SIGNAL =  16; EXPRESSED IN BONE MARROW, SIGNAL =  17; EXPRESSED IN PLACENTA, SIGNAL =  10; EXPRESSED IN FETAL LIVER, SIGNAL =  13; EXPRESSED IN HELA, SIGNAL = 7.1; EXPRESSED IN BRAIN, SIGNAL =  15; EXPRESSED IN LUNG, SIGNAL =  11; NT HIT: L35475.1, EVALUE 1.00e-121; SWISSPROT HIT: Q9GZK4, EVALUE 4.00e-37; EST_HUMAN HIT: AL520186.1, EVALUE 2.90e-01
agaaaggcctttgggacctgctcctcccatctcactgtggtcaccctcttctacagctcagtcattgctgtctacctccagcccaaaaatccgtatgcccaagggaggggcaagttctttggtctcttctatgcagtgggcactccttcacttaaccctctcgtatacaccctgaggaacaaggagataaagcgagcactcaggaggttactagggaagga

SEQ ID NO: 15819 - DNA, 238 bp, Homo sapiens
  MAP TO CHR17.1; EXPRESSED IN BONE MARROW, SIGNAL =  23; EXPRESSED IN ADULT LIVER, SIGNAL =  17; EXPRESSED IN FETAL LIVER, SIGNAL =  16; EXPRESSED IN BRAIN, SIGNAL =  18; EXPRESSED IN LUNG, SIGNAL =  15; EXPRESSED IN HEART, SIGNAL =  17; SWISSPROT HIT: Q91094, EVALUE 3.00e-03; EST_HUMAN HIT: BF753101.1, EVALUE 1.00e-115; NT HIT: gi7705331, EVALUE 1.00e-123
cataccatgaggcaccaatgtggaatgacctatctgggggacactccaaggactccactcctgtcggccatctcctcgggcgcagactctgaactggtaatcaacgttggggtctatgtgcaatactatgaattcagtttcagaacctacatatacatcctcaaaatgatttgaagtacatttacgaaactggagcctgtaatcttgggctgtaaagtcatcatccacctagggagaa

SEQ ID NO: 15820 - DNA, 165 bp, Homo sapiens
  MAP TO AL359813.20; EXPRESSED IN BRAIN, SIGNAL = 0.75; EXPRESSED IN HEART, SIGNAL = 0.92; EXPRESSED IN ADULT LIVER, SIGNAL = 0.72; EXPRESSED IN BONE MARROW, SIGNAL = 0.82; EXPRESSED IN LUNG, SIGNAL = 1.1; EXPRESSED IN FETAL LIVER, SIGNAL = 0.53; SWISSPROT HIT: O15160, EVALUE 2.00e-26; EST_HUMAN HIT: BG773833.1, EVALUE 1.00e-82; NT HIT: gi14781499, EVALUE 1.00e-82
cctccagtgtataccaggcatatgacatggatccccctggggaaccaggctgatctctttccagagggcactatccgaccagtgcatgatgatatcctcatcgctcagctgcggcctggccaagaaattgacctgctcatgcactgtgtcaagggcattggtgag

SEQ ID NO: 15821 - DNA, 424 bp, Homo sapiens
  MAP TO CHR17.1; EXPRESSED IN HELA, SIGNAL = 0.85; EXPRESSED IN BRAIN, SIGNAL = 0.75; EXPRESSED IN HEART, SIGNAL = 1.2; EXPRESSED IN ADULT LIVER, SIGNAL = 0.79; EXPRESSED IN BONE MARROW, SIGNAL = 0.98; EXPRESSED IN LUNG, SIGNAL = 1.1; EXPRESSED IN FETAL LIVER, SIGNAL = 0.95; EXPRESSED IN PLACENTA, SIGNAL = 1.7; SWISSPROT HIT: Q03211, EVALUE 9.00e-03; EST_HUMAN HIT: BF845921.1, EVALUE 1.00e-118; NT HIT: gi14770669, EVALUE 0.00e+00
ctgggcctgtgtcctttcccccaccaccctatctggccagaagtatagacccccttccccggcctcccagcccagcacagaacccccaggacccacctcttgtacccctgactcttgccctgcctccagcccctccttcctcctgccaccaaaatacctcaggaagcttcaggcgcccggagagcccccggcccagggtctccttcccaaagacccccgaggtggggccggggccacccccaggccccctgagtaaagccccccagcctgtgccgcctggggttggggagctgcctgcccgaggccctcgactctttgattttccccccactccgctggaggaccagtttgaggagccagccgaattcaagatcctacctgatgggctggccaacatcatgaagatgctggacgaatccattcg

SEQ ID NO: 15822 - DNA, 248 bp, Homo sapiens
  MAP TO CHR13.1; EXPRESSED IN BONE MARROW, SIGNAL = 0.79; EXPRESSED IN FETAL LIVER, SIGNAL = 0.83; EXPRESSED IN LUNG, SIGNAL = 0.71; EXPRESSED IN BRAIN, SIGNAL = 0.79; EXPRESSED IN HEART, SIGNAL = 0.81; NT HIT: AL049801.1, EVALUE 0.00e+00; SWISSPROT HIT: Q15323, EVALUE 9.30e-02; EST_HUMAN HIT: AA370740.1, EVALUE 1.30e+00
cagggtgacgactccgatgaggaagatctttgtatcagcaacaaatggactttccaaagaaccagtcgcaggtggtctcgtgtggacgacctctacacgctgctccctcgaggagacagaaatgggtcaccgggaggcacggggatgaggaacacgaccagcagtgagagcgtcctcacagacctgagcgagcctgaggtctgctccattcacagcgaaagcagtggaggcagcgacagtcgcagcca

SEQ ID NO: 15823 - DNA, 153 bp, Homo sapiens
  MAP TO CHR17.1; EXPRESSED IN FETAL LIVER, SIGNAL = 0.76; EXPRESSED IN LUNG, SIGNAL = 0.82; EXPRESSED IN BRAIN, SIGNAL = 0.9; EXPRESSED IN HEART, SIGNAL = 0.7; EXPRESSED IN BONE MARROW, SIGNAL =   1; EXPRESSED IN ADULT LIVER, SIGNAL = 1.3; NT HIT: gi14773065, EVALUE 2.00e-77; SWISSPROT HIT: P41233, EVALUE 2.00e-05; EST_HUMAN HIT: BF885208.1, EVALUE 2.00e-16
ttgtacctctttatccacttcttgtggcagaatcccttttattttagcaaagagtctgaggttttctcttacagtgaggaagtcaaattgcacattggattgtggacaaactccggtcagcttgctgagattttctaggtcagccatttctga

SEQ ID NO: 15824 - DNA, 372 bp, Homo sapiens
  MAP TO CHR9.1; EXPRESSED IN LUNG, SIGNAL = 0.66; EXPRESSED IN BRAIN, SIGNAL = 0.79; EXPRESSED IN HEART, SIGNAL = 0.69; EXPRESSED IN BONE MARROW, SIGNAL = 0.88; NT HIT: L04289.2, EVALUE 8.80e-02; SWISSPROT HIT: Q19020, EVALUE 6.70e+00; EST_HUMAN HIT: BF911743.1, EVALUE 5.10e-01
tctatttcttccccttcctgccatgcagagttctatatgaagggaaagaacggcttattccaggatgtgaagtgatcctagccacaccctatggtcgctgtgccaatgtcaacaatagttcaactacttcacaaagaatctttatcacttatcgaagggctcctccagttcgaccccagaattccttggctgtaactgatatctgtgttattgtaaccagtaaaggagaaactcctcctcataccttctgcaaagttgacaaaaacttaaattgtggaatggtaagaataaagttttcatcttcaaagtttcatatgaaaccaaaaagggatacgttttggattcctgtttactgttgggtatatactcaca

SEQ ID NO: 15825 - DNA, 196 bp, Homo sapiens
  MAP TO CHR17.1; EXPRESSED IN HELA, SIGNAL = 1.2; EXPRESSED IN BRAIN, SIGNAL = 1.6; EXPRESSED IN HEART, SIGNAL = 2.8; EXPRESSED IN ADULT LIVER, SIGNAL = 2.5; EXPRESSED IN LUNG, SIGNAL = 3.3; EXPRESSED IN BONE MARROW, SIGNAL = 1.9; EXPRESSED IN FETAL LIVER, SIGNAL = 1.8; EXPRESSED IN PLACENTA, SIGNAL = 1.2; SWISSPROT HIT: P23098, EVALUE 5.00e-07; EST_HUMAN HIT: AA701546.1, EVALUE 2.60e-01
caccttctcccagtagaaccgaagttggctgagccagtcaaaggaattgacatccatgaggccactcttgtaaagcttctccaacacatcccgggcatgaatttctatcgtcaccagagccacaattttaagccgcatgatcttggtcaagttccccctgatggcttctgaatacttattcaggattgacacctgt

SEQ ID NO: 15826 - DNA, 156 bp, Homo sapiens
  MAP TO CHR7.1; EXPRESSED IN PLACENTA, SIGNAL = 1.3; EXPRESSED IN HELA, SIGNAL =   1; EXPRESSED IN BRAIN, SIGNAL = 1.3; EXPRESSED IN BONE MARROW, SIGNAL = 1.2; EXPRESSED IN ADULT LIVER, SIGNAL = 1.4; EXPRESSED IN FETAL LIVER, SIGNAL = 1.3; EXPRESSED IN LUNG, SIGNAL = 1.1; SWISSPROT HIT: P20850, EVALUE 4.40e+00; EST_HUMAN HIT: BF755277.1, EVALUE 4.00e-18; NT HIT: gi14750332, EVALUE 3.40e-02
ttttatttttctgctggacaatgttccctctagggttgtttcccggcttaggaggcggtggttgcggctgctgctcctacggatattgcgcaagactggggcgttggaaaccctgtaggtctggggaatgaaaaaggaagtgggactttgggaagt

SEQ ID NO: 15827 - DNA, 198 bp, Homo sapiens
  MAP TO CHR7.1; EXPRESSED IN HELA, SIGNAL = 0.57; EXPRESSED IN BRAIN, SIGNAL = 0.54; EXPRESSED IN HEART, SIGNAL = 0.69; EXPRESSED IN ADULT LIVER, SIGNAL = 1.1; EXPRESSED IN BONE MARROW, SIGNAL = 0.49; SWISSPROT HIT: P08581, EVALUE 3.00e-25; EST_HUMAN HIT: BG205092.1, EVALUE 3.00e-87; NT HIT: X54559.1, EVALUE 2.00e-87
tcagtgtgtcaaacagtattcttgaatgttataccccagcccaaaccatttcaactgagtttgctgttaaattgaaaattgacttagccaaccgagagacaagcatcttcagttaccgtgaagatcccattgtctatgaaattcatccaaccaaatcttttattaggtaagtagaagcttctgatgggtataagaaaa

SEQ ID NO: 15828 - DNA, 190 bp, Homo sapiens
  MAP TO CHR7.1; EXPRESSED IN PLACENTA, SIGNAL = 8.9; EXPRESSED IN FETAL LIVER, SIGNAL =  16; EXPRESSED IN BRAIN, SIGNAL =  15; EXPRESSED IN HELA, SIGNAL =   9; EXPRESSED IN LUNG, SIGNAL =  10; EXPRESSED IN HEART, SIGNAL =  10; EXPRESSED IN ADULT LIVER, SIGNAL =  18; EXPRESSED IN BONE MARROW, SIGNAL =  19; SWISSPROT HIT: P14994, EVALUE 1.50e+00; EST_HUMAN HIT: BG716928.1, EVALUE 1.00e-98; NT HIT: gi14739735, EVALUE 9.00e-99
ctagcgagttgaagaatttctcagcaaagatatcagttatcttatttcaaataagaaggaagctaaatttgcacaaaccttgggtcgaatttctcctgtaccaagtccagaatctgcatatactgcagaaaccacttcacctcatcccagccatgatggaagttcatttaagtcaccagacacagtaagt

SEQ ID NO: 15829 - DNA, 237 bp, Homo sapiens
  MAP TO AC015947.3; EXPRESSED IN FETAL LIVER, SIGNAL = 0.82; EXPRESSED IN LUNG, SIGNAL = 0.61; EXPRESSED IN HELA, SIGNAL = 0.77; EXPRESSED IN BRAIN, SIGNAL = 0.98; EXPRESSED IN BONE MARROW, SIGNAL = 0.94; EXPRESSED IN HEART, SIGNAL = 0.65; EXPRESSED IN ADULT LIVER, SIGNAL = 0.61; SWISSPROT HIT: O69873, EVALUE 1.10e-01; EST_HUMAN HIT: BI758933.1, EVALUE 3.20e-01
agacaaagggcaatgttggggggcgggcgaggaagagagaagggagttgggtggggggctggagcgcccccctccttcattctcacgggcctgggaaactggggctgagtgggacctcaatggctggtagcccctttaagggtgaattctcctcccgcctcgtaaattacgctggtccaccctctggccggcccgtgaggcagtgaccgtgaacgccagcggggaagggagaatcag

SEQ ID NO: 15830 - DNA, 289 bp, Homo sapiens
  MAP TO CHR22.1; EXPRESSED IN ADULT LIVER, SIGNAL = 0.59; EXPRESSED IN BONE MARROW, SIGNAL = 1.2; EXPRESSED IN PLACENTA, SIGNAL = 1.5; EXPRESSED IN FETAL LIVER, SIGNAL = 1.5; EXPRESSED IN LUNG, SIGNAL = 3.3; EXPRESSED IN BRAIN, SIGNAL = 1.2; EXPRESSED IN HEART, SIGNAL = 3.1; SWISSPROT HIT: Q28640, EVALUE 1.90e+00; EST_HUMAN HIT: BG721649.1, EVALUE 0.00e+00; NT HIT: gi14786769, EVALUE 1.70e-02
ccaggcttggtcaaggccctcacctgtcgatgaccagctccagcagcacggcatgggacagctgcgtgaactcggggtcacccggaacatggtcatagtgctccagcagggccaccatgtcgaggtcacaggccatgcggtcagggaacttccaggaggggaagcgcacaggcccggcgcgggagaagacgtctacgatggcaccctgcaggtcggtgaggtctgtgcgcaggctctccatgcaggcctggctgcccagcaggtgcgccatcctcacagatcctggggt

SEQ ID NO: 15831 - DNA, 410 bp, Homo sapiens
  MAP TO CHR5.1; EXPRESSED IN FETAL LIVER, SIGNAL = 0.96; EXPRESSED IN LUNG, SIGNAL = 0.69; EXPRESSED IN HELA, SIGNAL = 1.2; EXPRESSED IN BRAIN, SIGNAL = 1.4; EXPRESSED IN BONE MARROW, SIGNAL = 1.1; EXPRESSED IN HEART, SIGNAL = 0.75; EXPRESSED IN ADULT LIVER, SIGNAL = 0.68; NT HIT: gi14727884, EVALUE 0.00e+00; SWISSPROT HIT: Q9Y5H7, EVALUE 8.00e-74; EST_HUMAN HIT: BG719192.1, EVALUE 2.00e-68
ttgtcgttctcgtccagcacgaacacctgcagcgtcacgttgctgcccagaggcggcacgcccgcgtcgcgcgcgctcacctggaactgcagcagctccacttcctcgtggtccagcggctgcagcgcgtacaccttgccgctctccgcgtgcaccgaaacgtaactcgacagcgggcgctcgcccacccgccgctccaccagcgagtaggacaccagggcgttctcctgcgcgtccgcgtcccgtgcagacaccgtgaagatgtggcagcctggcgggttgttctccttcacgaacacggtatactggggctgcgcgaacgccggagcgttgtcgttcacgtcggccacttccacagacacgctggcggtggcccacagcgaaggcgagcccccgtcccgcgcggtcac

SEQ ID NO: 15832 - DNA, 211 bp, Homo sapiens
  MAP TO CHRX.1; EXPRESSED IN BONE MARROW, SIGNAL = 0.96; EXPRESSED IN ADULT LIVER, SIGNAL = 0.6; EXPRESSED IN FETAL LIVER, SIGNAL =   1; EXPRESSED IN LUNG, SIGNAL = 0.59; EXPRESSED IN HELA, SIGNAL = 1.3; EXPRESSED IN BRAIN, SIGNAL = 0.84; NT HIT: gi11641424, EVALUE 1.00e-115; SWISSPROT HIT: Q93008, EVALUE 9.00e-36; EST_HUMAN HIT: BE833893.1, EVALUE 1.00e-115
gacatagggagaattgttctttcctcatgataatcactgtcacattcatttatatattcccttaaaacagttaatactcgaaccattcgaacagcttcctgtcttgcacaattaacactgtctttgtcaccatccaaaacacacaatgtgtcataggaagccttcagacgatcaaaacaagactgaatgaagtcttcatggatcaccacct

SEQ ID NO: 15833 - DNA, 200 bp, Homo sapiens
  MAP TO CHR3.1; EXPRESSED IN LUNG, SIGNAL = 2.9; EXPRESSED IN HELA, SIGNAL = 3.1; EXPRESSED IN BRAIN, SIGNAL = 1.7; EXPRESSED IN HEART, SIGNAL = 1.6; EXPRESSED IN ADULT LIVER, SIGNAL = 1.4; SWISSPROT HIT: P54727, EVALUE 5.00e-10; EST_HUMAN HIT: BI868477.1, EVALUE 3.00e-75; NT HIT: gi4506386, EVALUE 2.00e-75
cttgaatttttatggaatcagcctcagtttcaacagatgagacaaattattcaacagagtccttcccttcttccagtgttactacagtagatagattgagagaatcctcaattacttcagcaaattagccaacaccaggagcattttattcagatgttaaatgaaacagtttgagaagctggtggtcaaagaggaagagg

SEQ ID NO: 15834 - DNA, 487 bp, Homo sapiens
  MAP TO CHR10.1; EXPRESSED IN LUNG, SIGNAL = 0.69; EXPRESSED IN BRAIN, SIGNAL = 0.59; EXPRESSED IN HEART, SIGNAL = 0.68; EXPRESSED IN ADULT LIVER, SIGNAL = 0.57; EXPRESSED IN BONE MARROW, SIGNAL = 0.66; SWISSPROT HIT: P40809, EVALUE 2.00e-19; EST_HUMAN HIT: BG820884.1, EVALUE 0.00e+00; NT HIT: gi14768454, EVALUE 0.00e+00
caggcgctcgaccaccttgggttgacacttgatgtcctgtaacatcgtcactggttctggattgggcacagcatgggccactattgtagagccaaagacttcagccagattggcaacattcattttagtatatggactctgagccactctctgcaagtgaatcatgaggaaaaccaatgtgtccctgttggcctggggcagttcaccaacagcctggtacatggcagatatgctgttgtcttcatctgtgatttctgctgcttccataaaggctttgtttaggcgaaaggtcagaagaggttctttgaagtttcgaagaaagtctttaagaaggctacagatagcatggatatcatccactttgctgacgaggggtacagttttcactctgaggaatttctctttcagcttttactgtgctgtcacagcccaagatcctatacaggcctgtctcagtaagacctctctgctcaatctcatttacaca

SEQ ID NO: 15835 - DNA, 237 bp, Homo sapiens
  MAP TO CHR17.1; EXPRESSED IN ADULT LIVER, SIGNAL = 3.5; EXPRESSED IN FETAL LIVER, SIGNAL = 2.4; EXPRESSED IN BRAIN, SIGNAL = 1.1; EXPRESSED IN LUNG, SIGNAL = 4.3; EXPRESSED IN HEART, SIGNAL = 2.1; SWISSPROT HIT: P52631, EVALUE 4.00e-38; EST_HUMAN HIT: BE179288.1, EVALUE 1.00e-130; NT HIT: gi16164507, EVALUE 1.00e-118
catggaaaatcaacaactacctgggtcagcttcaggatgctcctggctctctggccgacaatactttccgaatgcctcctccttgggaatgtcaggatagagatagaccagtggagacaccaggatattggtagcatccatgatcttatagcccatgatgatttcagcaaatgacatgttgttcagctgctgctttgtgtatggttccacggactggatctgggtcttacctgtcac

SEQ ID NO: 15836 - DNA, 252 bp, Homo sapiens
  MAP TO AC024740.3; EXPRESSED IN FETAL LIVER, SIGNAL = 0.66; EXPRESSED IN HELA, SIGNAL = 1.9; EXPRESSED IN LUNG, SIGNAL = 1.1; EXPRESSED IN BRAIN, SIGNAL = 0.7; EXPRESSED IN HEART, SIGNAL = 0.86; SWISSPROT HIT: P33609, EVALUE 2.20e-01; EST_HUMAN HIT: BI334056.1, EVALUE 0.00e+00; NT HIT: gi8923375, EVALUE 0.00e+00
caaccttcacctcgttccatcagcgagttgagaagggatgcgttggagaagaagaacaagtagccaaaagtctgagacacgaggtcagggtgcagctcgcactggctggtcagctccaaggctgcctggaacacgcccagggtaggtctcaatcctggaggcatggcccccagctccgcgccaggccccggcagctctgcaccagctgtgaaagggttactatccaggagagcaggcagcgttgaatagaga

SEQ ID NO: 15837 - DNA, 355 bp, Homo sapiens
  MAP TO CHR8.1; EXPRESSED IN BRAIN, SIGNAL = 3.9; EXPRESSED IN HEART, SIGNAL = 3.3; EXPRESSED IN BONE MARROW, SIGNAL = 4.6; EXPRESSED IN ADULT LIVER, SIGNAL = 3.1; EXPRESSED IN PLACENTA, SIGNAL = 4.8; EXPRESSED IN FETAL LIVER, SIGNAL = 3.9; EXPRESSED IN LUNG, SIGNAL = 2.6; SWISSPROT HIT: P33991, EVALUE 2.00e-63; EST_HUMAN HIT: BI259276.1, EVALUE 0.00e+00; NT HIT: X74794.1, EVALUE 0.00e+00
agagtctgctgttccatgacttcatgcaataccgatcttgtactttcattcatcttgtcgaactcatcgatacagcagatgccgttgtcactcaggacaagagcacctgtctgcaggaccagctgccttgtctcagggtctttcattacgtacgcagtgaggccaactgcactggagcccttcccagacgtgtactggcccctggggacgaggttgtacacgtactgcagcagctgggacttgctggtaccagggtcgccacacagcaagatgttgatctcagcccgaaatttgccccttccagtgtgactaaaatccttccttgtcccgccaaagagctgaagcaaaattccct

SEQ ID NO: 15838 - DNA, 168 bp, Homo sapiens
  MAP TO CHR1.1; EXPRESSED IN FETAL LIVER, SIGNAL = 0.58; EXPRESSED IN HELA, SIGNAL = 0.38; EXPRESSED IN BRAIN, SIGNAL = 0.61; EXPRESSED IN BONE MARROW, SIGNAL = 0.74; NT HIT: gi14736704, EVALUE 3.00e-64; SWISSPROT HIT: P36558, EVALUE 4.40e+00; EST_HUMAN HIT: BG771735.1, EVALUE 5.00e-64
tttatttccctcaggtgattctagtcacaagattcctatttcaaattttgaacgtgggcataaccaagcaactgtgttacaaaacctttatagatttattcatcccaacccagggaactggccacctatctactgcaaggtaatttcaggttaagaagttcttttaag

SEQ ID NO: 15839 - DNA, 160 bp, Homo sapiens
  MAP TO CHR6.1; EXPRESSED IN PLACENTA, SIGNAL = 4.1; EXPRESSED IN LUNG, SIGNAL =   2; EXPRESSED IN HELA, SIGNAL = 1.7; EXPRESSED IN BRAIN, SIGNAL = 0.99; EXPRESSED IN HEART, SIGNAL = 1.4; NT HIT: gi14781505, EVALUE 5.00e-69; SWISSPROT HIT: Q9CX84, EVALUE 1.70e-01; EST_HUMAN HIT: W25188.1, EVALUE 2.00e-75
ggctccttaccagcagtgccaacatctgcagcatggtgatctgggcgttgcacaggtaggcaaggaagtaaatgaaggatgagactcccagccagtagccgaagcaggtgccaatggctgtgcccatcagggtgccctcccgctgtggggtgaaggctct

SEQ ID NO: 15840 - DNA, 123 bp, Homo sapiens
  MAP TO CHR10.1; EXPRESSED IN BRAIN, SIGNAL = 0.82; EXPRESSED IN HEART, SIGNAL = 0.6; EXPRESSED IN BONE MARROW, SIGNAL = 0.93; EXPRESSED IN ADULT LIVER, SIGNAL = 0.81; EXPRESSED IN FETAL LIVER, SIGNAL = 0.62; SWISSPROT HIT: Q9M8D3, EVALUE 4.60e+00; EST_HUMAN HIT: R27118.1, EVALUE 1.50e-01; NT HIT: AB026898.1, EVALUE 4.10e-01
ttcctctgaccacacaggaaccacagtgccctcctgcccctctagacagttccacattttgcctcagtcaaatttcacctttgcaagatttcctgcagaacctccctagagtcagtctttccc

SEQ ID NO: 15841 - DNA, 171 bp, Homo sapiens
  MAP TO CHR19.1; EXPRESSED IN LUNG, SIGNAL = 1.2; EXPRESSED IN HEART, SIGNAL = 1.1; EXPRESSED IN FETAL LIVER, SIGNAL = 2.2; EXPRESSED IN BRAIN, SIGNAL = 2.2; EXPRESSED IN HELA, SIGNAL = 2.1; EXPRESSED IN BONE MARROW, SIGNAL = 1.9; EXPRESSED IN ADULT LIVER, SIGNAL = 4.2; EXPRESSED IN PLACENTA, SIGNAL = 1.9; SWISSPROT HIT: P02674, EVALUE 7.60e-02; EST_HUMAN HIT: BI913453.1, EVALUE 2.00e-91; NT HIT: gi14766271, EVALUE 1.00e-91
aggctctagcagcctgggcttcacctccagcccctcccctttctcctcctcgtcgcccgaaaacgtggaggattccggcctggactctccgtcccacgcggcacctggcccctccccagattcctgggtcccccgcccaggcaccccgcagagcccgcccagctgtagggc

SEQ ID NO: 15842 - DNA, 169 bp, Homo sapiens
  MAP TO CHR17.1; EXPRESSED IN FETAL LIVER, SIGNAL = 1.1; EXPRESSED IN HELA, SIGNAL = 1.3; EXPRESSED IN BRAIN, SIGNAL = 1.3; EXPRESSED IN HEART, SIGNAL = 0.61; EXPRESSED IN ADULT LIVER, SIGNAL = 1.2; EXPRESSED IN BONE MARROW, SIGNAL = 1.3; SWISSPROT HIT: Q9Z1G4, EVALUE 8.00e-19; EST_HUMAN HIT: BF943198.1, EVALUE 2.00e-84; NT HIT: gi4885084, EVALUE 9.00e-68
ctaggccaattttgagaagattgaaaatgaactgaaggaaatcaacacaaaccaggaagctctgaagagaaacttcctggaactgaccgaattaaaatttatacttcgcaaaactcagcaattttttgatgaggtcagactattgtttcttttagtatttgagcagctg

SEQ ID NO: 15843 - DNA, 164 bp, Homo sapiens
  MAP TO CHR9.1; EXPRESSED IN ADULT LIVER, SIGNAL = 5.6; EXPRESSED IN BONE MARROW, SIGNAL = 5.1; EXPRESSED IN PLACENTA, SIGNAL = 4.9; EXPRESSED IN FETAL LIVER, SIGNAL = 4.6; EXPRESSED IN HELA, SIGNAL = 4.2; EXPRESSED IN BRAIN, SIGNAL = 4.8; EXPRESSED IN LUNG, SIGNAL = 2.7; EXPRESSED IN HEART, SIGNAL = 2.5; SWISSPROT HIT: P57783, EVALUE 8.70e-01; EST_HUMAN HIT: BI551969.1, EVALUE 1.00e-82; NT HIT: gi16161010, EVALUE 1.00e-82
tcactcacgtgctgcagcaccttgcgcggcaacttctcggagtgggcgatccattctttcattaagtctaggatgagggggatgaggctgaccacgccgccgtagtggttccgggcctcgtcacagctgaggtggttcaccacatcatgagggtatctgcagga

SEQ ID NO: 15844 - DNA, 107 bp, Homo sapiens
  MAP TO CHR17.1; EXPRESSED IN ADULT LIVER, SIGNAL = 1.2; EXPRESSED IN PLACENTA, SIGNAL =   2; EXPRESSED IN FETAL LIVER, SIGNAL = 1.7; EXPRESSED IN LUNG, SIGNAL = 0.71; EXPRESSED IN HELA, SIGNAL = 2.2; EXPRESSED IN BRAIN, SIGNAL = 1.9; EXPRESSED IN BONE MARROW, SIGNAL = 1.9; SWISSPROT HIT: P97707, EVALUE 8.00e+00; NT HIT: AL163202.2, EVALUE 5.40e+00
cccctggaaatgctcattagcttatttttacggctgcagaaacagaaatctcagagttggttactcaaggccacccagcatgaacaaggtgaccaaagaccaggcag

SEQ ID NO: 15845 - DNA, 198 bp, Homo sapiens
  MAP TO CHR7.1; EXPRESSED IN BONE MARROW, SIGNAL = 1.3; EXPRESSED IN FETAL LIVER, SIGNAL = 1.3; EXPRESSED IN HELA, SIGNAL = 1.3; EXPRESSED IN BRAIN, SIGNAL = 1.4; EXPRESSED IN LUNG, SIGNAL = 0.71; NT HIT: gi14781751, EVALUE 1.00e-104; SWISSPROT HIT: P15354, EVALUE 1.90e+00; EST_HUMAN HIT: BG528367.1, EVALUE 1.00e-102
tcttagatatgccaatgtcaagaaatgcagtaatgagggtcgtgccctgatgcaattggattttcaacagtttttaatgaaacttgaaaaactaacagatattagacccattcctgataaagaatttgtagaaacttatattaaagcttattacctaactgagaatgacatggaacggtggatcaaagagcacagggt

SEQ ID NO: 15846 - DNA, 111 bp, Homo sapiens
  MAP TO CHR17.1; EXPRESSED IN HELA, SIGNAL = 0.84; EXPRESSED IN BRAIN, SIGNAL = 0.97; EXPRESSED IN ADULT LIVER, SIGNAL = 0.99; EXPRESSED IN FETAL LIVER, SIGNAL = 0.9; EST_HUMAN HIT: AA127067.1, EVALUE 2.00e-53; SWISSPROT HIT: P51671, EVALUE 5.00e-15; NT HIT: U46572.1, EVALUE 5.00e-56
acagcttcaagaccaaactggccaaggatatctgtgccgaccccaagaagaagtgggtgcaggattccatgaagtatctggaccaaaaatctccaactccaaagccataaa

SEQ ID NO: 15847 - DNA, 132 bp, Homo sapiens
  MAP TO CHR17.1; EXPRESSED IN BRAIN, SIGNAL = 1.5; EXPRESSED IN LUNG, SIGNAL =   1; EXPRESSED IN HEART, SIGNAL = 0.97; EXPRESSED IN ADULT LIVER, SIGNAL = 1.3; EXPRESSED IN BONE MARROW, SIGNAL = 1.7; EXPRESSED IN FETAL LIVER, SIGNAL = 1.5; SWISSPROT HIT: P71880, EVALUE 2.00e+00; NT HIT: AF167552.1, EVALUE 1.70e+00
ggtgttccgatctggctgcaccacagagaaagacaatgcagggctggacccactccagagaagagctgcctcgccctccagcgtcctcagcctcggctccctgcccacagacagctggacccagcctggctc

SEQ ID NO: 15848 - DNA, 225 bp, Homo sapiens
  MAP TO CHR1.1; EXPRESSED IN PLACENTA, SIGNAL = 1.6; EXPRESSED IN FETAL LIVER, SIGNAL = 2.1; EXPRESSED IN LUNG, SIGNAL = 2.1; EXPRESSED IN HEART, SIGNAL = 2.4; EXPRESSED IN HELA, SIGNAL = 1.8; EXPRESSED IN BRAIN, SIGNAL = 2.8; EXPRESSED IN BONE MARROW, SIGNAL = 2.8; EXPRESSED IN ADULT LIVER, SIGNAL = 1.1; NT HIT: U66315.1, EVALUE 1.30e-02; EST_HUMAN HIT: BE907179.1, EVALUE 5.00e-71; SWISSPROT HIT: P13688, EVALUE 5.00e-01
gtaccttcaaatgggctctggagctgctggcgccggcggtacaggtagcaacaggaacagaggaagcagcagatggtggtggcaaccacagcaacaaagaggatcacagctgaggcgatgcctgctatggtcttggggctttagacaaagaacaggtcctctcaccttccaacactcataggacggagtcctcattatgctggctccaactcctggccagcaggg

SEQ ID NO: 15849 - DNA, 231 bp, Homo sapiens
  MAP TO CHR22.1; EXPRESSED IN BRAIN, SIGNAL = 6.2; EXPRESSED IN HEART, SIGNAL = 4.5; EXPRESSED IN ADULT LIVER, SIGNAL = 6.7; EXPRESSED IN BONE MARROW, SIGNAL = 6.1; EXPRESSED IN PLACENTA, SIGNAL = 6.3; EXPRESSED IN FETAL LIVER, SIGNAL = 5.6; EXPRESSED IN LUNG, SIGNAL = 3.6; NT HIT: gi14778219, EVALUE 1.00e-103; EST_HUMAN HIT: BG385331.1, EVALUE 1.00e-102; SWISSPROT HIT: Q15459, EVALUE 5.00e-25
ccagtgttcttactgaaacatctgtttccttttagcctccaagcccttgcctccagcccctgctccagatgagtatcttgtgtcccccattactggggagaagatccccgccagcaaaatgcaggaacacatgcgcattggacttcttgaccctcgctggctggagcagcgggatcgctccatccgtgagaagcagagcgatgatgaggtgtacgcaccaggtgaggtggg

SEQ ID NO: 15850 - DNA, 170 bp, Homo sapiens
  MAP TO CHR7.1; EXPRESSED IN ADULT LIVER, SIGNAL = 2.8; EXPRESSED IN HEART, SIGNAL = 1.6; EXPRESSED IN BONE MARROW, SIGNAL = 2.8; EXPRESSED IN PLACENTA, SIGNAL = 1.9; EXPRESSED IN FETAL LIVER, SIGNAL = 2.3; EXPRESSED IN LUNG, SIGNAL = 1.5; EXPRESSED IN BRAIN, SIGNAL = 2.6; EXPRESSED IN HELA, SIGNAL =   2; SWISSPROT HIT: P36763, EVALUE 5.70e+00; NT HIT: gi6753277, EVALUE 5.90e-01; EST_HUMAN HIT: BE080753.1, EVALUE 8.70e-01
agaaattgcaagtgaaattcaaaaggatttgcatttgctgtgtgagttggctgatgtagcaaatcacatttaatgctgacagctgttaaaaataatgataaatggacaccaaaataagcaggtaaatgaagcaagcaaaccagagtcactgagttcctaatagatgacaa

SEQ ID NO: 15851 - DNA, 168 bp, Homo sapiens
  MAP TO CHR1.1; EXPRESSED IN PLACENTA, SIGNAL =  30; EXPRESSED IN FETAL LIVER, SIGNAL =  34; EXPRESSED IN BONE MARROW, SIGNAL =  46; EXPRESSED IN ADULT LIVER, SIGNAL =  41; EXPRESSED IN LUNG, SIGNAL =  26; EXPRESSED IN BRAIN, SIGNAL =  31; EXPRESSED IN HELA, SIGNAL =  14; EXPRESSED IN HEART, SIGNAL =  30; EST_HUMAN HIT: BF974794.1, EVALUE 2.00e-72; SWISSPROT HIT: P49368, EVALUE 6.00e-25; NT HIT: gi16161683, EVALUE 6.00e-75
ttaccttttccactcttgcatatttttttatgtcaatctctttccgaccattctcctcaaactgtaccatcttgacagcatccagggcaatgttgcaagccaaagatgaccaccgactgatggctttggtagtaatagagctgttgatgatgttcagcatcatatcac

SEQ ID NO: 15852 - DNA, 156 bp, Homo sapiens
  MAP TO CHR7.1; EXPRESSED IN LUNG, SIGNAL = 3.6; EXPRESSED IN HELA, SIGNAL = 1.3; EXPRESSED IN BRAIN, SIGNAL = 1.3; EXPRESSED IN HEART, SIGNAL =   2; EXPRESSED IN ADULT LIVER, SIGNAL = 0.72; EXPRESSED IN BONE MARROW, SIGNAL = 1.2; EXPRESSED IN FETAL LIVER, SIGNAL =   1; EXPRESSED IN PLACENTA, SIGNAL = 1.5; EST_HUMAN HIT: AA954361.1, EVALUE 5.00e-73; SWISSPROT HIT: P29619, EVALUE 6.00e-04; NT HIT: gi15299185, EVALUE 3.00e-73
tactcactgtcggtgagttcccatagccgtggcggcaggtcactaaaatactcgtggctcaaggcagcctgtgccgacagtctgttctttggggaacattgtaggagcttggaggccaggtcctctgcatggttcacatagctgagcctaaaaaca

SEQ ID NO: 15853 - DNA, 207 bp, Homo sapiens
  MAP TO CHR7.1; EXPRESSED IN FETAL LIVER, SIGNAL = 0.71; EXPRESSED IN LUNG, SIGNAL = 1.2; EXPRESSED IN HELA, SIGNAL = 1.8; EXPRESSED IN BRAIN, SIGNAL = 0.52; EXPRESSED IN HEART, SIGNAL = 1.1; EXPRESSED IN BONE MARROW, SIGNAL = 0.65; EST_HUMAN HIT: BE786194.1, EVALUE 2.00e-76; SWISSPROT HIT: Q63003, EVALUE 6.40e-01; NT HIT: gi14753015, EVALUE 1.00e-76
ccgacacccacattgacacctccagtccggccagccgctccactcgttgcctttgcatctccacacatggcgtcctccgcgcagagcggcggctcctccgggggacccgcggtccccaccgtgcagcggggcatcatcaagatggtgagaacgggccccggacaccgacccctctgcctgccttcgggcgggagtcaggcattgact

SEQ ID NO: 15854 - DNA, 130 bp, Homo sapiens
  MAP TO CHR19.1; EXPRESSED IN PLACENTA, SIGNAL = 4.7; EXPRESSED IN FETAL LIVER, SIGNAL = 3.6; EXPRESSED IN LUNG, SIGNAL = 2.7; EXPRESSED IN HELA, SIGNAL = 3.8; EXPRESSED IN BRAIN, SIGNAL = 4.1; EXPRESSED IN HEART, SIGNAL = 4.1; EXPRESSED IN BONE MARROW, SIGNAL =   4; EST_HUMAN HIT: AU143000.1, EVALUE 4.00e-36; SWISSPROT HIT: O58433, EVALUE 6.00e+00; NT HIT: gi14756560, EVALUE 3.00e-67
cttctggcgcaggtttctacggctgagttcccaggcactgaccctgagaccctgcactacttccgggacctctatctcccagcctccaggaagctgttttgctccgtgggacagaacccacaggacgtgg

SEQ ID NO: 15855 - DNA, 139 bp, Homo sapiens
  MAP TO CHR15.1; EXPRESSED IN PLACENTA, SIGNAL = 3.9; EXPRESSED IN LUNG, SIGNAL = 4.2; EXPRESSED IN HELA, SIGNAL = 3.5; EXPRESSED IN BRAIN, SIGNAL = 2.7; EXPRESSED IN BONE MARROW, SIGNAL = 5.1; EST_HUMAN HIT: AA865434.1, EVALUE 2.00e-72; SWISSPROT HIT: P09632, EVALUE 2.60e+00; NT HIT: gi14756730, EVALUE 2.00e-52
catgcactaacaagaacctgcttttaatttccatgccagtttacaatccccatactgtactaggcaaggttggtggctattgaaaataccaccaggacagggatatctaaagacacatttggtagtgtgttaactatac

SEQ ID NO: 15856 - DNA, 198 bp, Homo sapiens
  MAP TO CHRX.1; EXPRESSED IN BONE MARROW, SIGNAL = 1.3; EXPRESSED IN ADULT LIVER, SIGNAL = 0.94; EXPRESSED IN HEART, SIGNAL = 0.84; EXPRESSED IN FETAL LIVER, SIGNAL = 1.3; EXPRESSED IN BRAIN, SIGNAL = 1.2; EXPRESSED IN HELA, SIGNAL = 2.2; EXPRESSED IN LUNG, SIGNAL = 1.1; NT HIT: U01337.1, EVALUE 1.00e-107; EST_HUMAN HIT: BG121806.1, EVALUE 5.00e-89; SWISSPROT HIT: P10398, EVALUE 4.00e-28
ccaccccaggctgggctcactgttggcggttggtactcatgtcaacacagactgtggggaccttggaggaacaatgctggtggaacttgtagccacaggtttggcaacggaagccatggaacagaaacttaaggcagaagtcacagaacgccaggctgaagaaggtcttccgtacctgatgccacagagcagggaagt

SEQ ID NO: 15857 - DNA, 281 bp, Homo sapiens
  MAP TO CHR1.1; EXPRESSED IN LUNG, SIGNAL = 5.1; EXPRESSED IN HELA, SIGNAL = 5.9; EXPRESSED IN BRAIN, SIGNAL = 8.5; EXPRESSED IN ADULT LIVER, SIGNAL =  11; EXPRESSED IN BONE MARROW, SIGNAL = 9.7; EXPRESSED IN HEART, SIGNAL = 5.7; EXPRESSED IN PLACENTA, SIGNAL = 7.3; EXPRESSED IN FETAL LIVER, SIGNAL = 7.8; EST_HUMAN HIT: BF438399.1, EVALUE 3.80e-01; SWISSPROT HIT: P04540, EVALUE 2.40e+00
tcaggaaactgcattcagagaatgagaagaacacccccgctggatgaattgcagccaccaccatatcaggatgacagtggttctccccatctgtcatgtacaccctcagaaattggggacagtaaatgtgaattttcccactgcagcaacagtccaagatgctcatataacaagtgcccaagtgaaggaagcacaggtcatgaaatagaaagttttcataataaaggatatgaagaagatgttccaagtgacagcactgcagtcctgagccctgaagtaag

SEQ ID NO: 15858 - DNA, 117 bp, Homo sapiens
  MAP TO CHR22.1; EXPRESSED IN PLACENTA, SIGNAL = 1.7; EXPRESSED IN FETAL LIVER, SIGNAL = 1.4; EXPRESSED IN BRAIN, SIGNAL = 1.7; EXPRESSED IN HEART, SIGNAL = 0.81; EXPRESSED IN ADULT LIVER, SIGNAL = 1.6; EXPRESSED IN BONE MARROW, SIGNAL = 1.5; SWISSPROT HIT: Q52992, EVALUE 4.60e+00; NT HIT: U63041.1, EVALUE 3.80e-01; EST_HUMAN HIT: AW193203.1, EVALUE 1.40e-01
cgaggggcccaggggactttgtctctgtagggcccagggctgcgatccggaacagtgataggggctaattgcaggaggcagccaagcgggcccggggccaagggctgtgatgaaaag

SEQ ID NO: 15859 - DNA, 222 bp, Homo sapiens
  MAP TO CHR6.1; EXPRESSED IN FETAL LIVER, SIGNAL = 0.84; EXPRESSED IN LUNG, SIGNAL = 0.61; EXPRESSED IN HELA, SIGNAL = 0.96; EXPRESSED IN BRAIN, SIGNAL = 0.91; EXPRESSED IN HEART, SIGNAL = 0.79; EXPRESSED IN ADULT LIVER, SIGNAL = 1.2; EXPRESSED IN BONE MARROW, SIGNAL =   1; NT HIT: gi12731938, EVALUE 1.00e-109; SWISSPROT HIT: O75818, EVALUE 2.00e-33; EST_HUMAN HIT: BG027374.1, EVALUE 1.00e-109
ttttaaggttcagaagaatcgacaatgatgtcatatttttccaagtaccaaattcaggagcatcagccaaaagtagcactgagcacgttgagagatctccagtgcccagtgctgcagagcagcgagctggagggaacgccagaggtgtcctgccgggctctggagctcttcgactggctcggcgccgtcttcagtaatgtcgacctgtgggtatctgaactc

SEQ ID NO: 15860 - DNA, 245 bp, Homo sapiens
  MAP TO CHR17.1; EXPRESSED IN LUNG, SIGNAL =   1; EXPRESSED IN HELA, SIGNAL = 2.3; EXPRESSED IN BRAIN, SIGNAL = 1.1; EXPRESSED IN HEART, SIGNAL = 1.2; EXPRESSED IN BONE MARROW, SIGNAL = 1.1; EXPRESSED IN FETAL LIVER, SIGNAL = 0.98; SWISSPROT HIT: O53426, EVALUE 9.40e-02; EST_HUMAN HIT: AI541133.1, EVALUE 8.00e-39; NT HIT: AF312393.1, EVALUE 0.00e+00
aactcgagccacgtccgtgcgcaccgggacagcggccagaactgctgggcgggggatcggtgagctccccagctcccgggccaaactccggagtctgatcgctgattggctggccccaccccagaaagggagggaccggggtagaaggggagatcgacgaggcggggcggcggagggggacccaagagccgagcgccccacccttcccgggatggttggaatagttggagcgggagactagggcc

SEQ ID NO: 15861 - DNA, 199 bp, Homo sapiens
  MAP TO CHR17.1; EXPRESSED IN FETAL LIVER, SIGNAL = 1.6; EXPRESSED IN LUNG, SIGNAL = 7.6; EXPRESSED IN BRAIN, SIGNAL = 1.7; EXPRESSED IN BONE MARROW, SIGNAL = 1.9; EXPRESSED IN ADULT LIVER, SIGNAL = 1.3; EST_HUMAN HIT: AW505519.1, EVALUE 5.00e-83; SWISSPROT HIT: Q9TUZ0, EVALUE 1.00e-26; NT HIT: gi14786064, EVALUE 3.00e-83
gaaatcatgtttagaatgtgattgttctgtttattgatctagaggaaagaatgttttggaatctgatgccttttaccaccagagacttctccattcggtccctagccgaccgcttgggagacttgaattaccttatctacgtgtttcctgatcggccaaaagatgaagtatactccaaatactacacaccagttccctg

SEQ ID NO: 15862 - DNA, 224 bp, Homo sapiens
  MAP TO CHR17.1; EXPRESSED IN BONE MARROW, SIGNAL = 3.3; EXPRESSED IN PLACENTA, SIGNAL = 4.4; EXPRESSED IN FETAL LIVER, SIGNAL = 3.2; EXPRESSED IN LUNG, SIGNAL = 5.1; EXPRESSED IN HELA, SIGNAL = 4.3; EXPRESSED IN BRAIN, SIGNAL = 3.4; EXPRESSED IN HEART, SIGNAL = 3.2; EST_HUMAN HIT: BF884606.1, EVALUE 1.00e-114; SWISSPROT HIT: P42229, EVALUE 2.00e-35; NT HIT: gi14786071, EVALUE 1.00e-114
tctccctctcagggcagggtgccatttgccgtgcctgacaaagtgctgtggccgcagctgtgtgaggcgctcaacatgaaattcaaggccgaagtgcagagcaaccggggcctgaccaaggagaacctcgtgttcctggcgcagaaactgttcaacaacagcagcagccacctggaggactacagtggcctgtccgtgtcctggtcccagttcaacagggtgag

SEQ ID NO: 15863 - DNA, 163 bp, Homo sapiens
  MAP TO CHR2.1; EXPRESSED IN BRAIN, SIGNAL = 0.34; EXPRESSED IN BONE MARROW, SIGNAL = 0.35; EXPRESSED IN FETAL LIVER, SIGNAL = 0.28; NT HIT: AF069757.1, EVALUE 8.80e+00; EST_HUMAN HIT: BE084039.1, EVALUE 2.00e-85; SWISSPROT HIT: P55521, EVALUE 1.50e+00
tagtgccacaccaaaaattgtttctaaagcaaagaatattgaagttgaaaataaaaataatttgtctgctgttccactgaacaacttggaacccattactaatatacagatctggttggccaatggaaaaaggattgtccagaaatttaacattactcatagg

SEQ ID NO: 15864 - DNA, 314 bp, Homo sapiens
  MAP TO CHR2.1; EXPRESSED IN ADULT LIVER, SIGNAL = 0.41; EXPRESSED IN BONE MARROW, SIGNAL = 1.1; EXPRESSED IN FETAL LIVER, SIGNAL = 1.1; EXPRESSED IN HELA, SIGNAL = 0.74; EXPRESSED IN BRAIN, SIGNAL = 1.1; NT HIT: AF279458.1, EVALUE 1.10e+00; SWISSPROT HIT: P17754, EVALUE 6.50e+00
gcagggccttactccatcagctttaagaataagcaccccatggaataaaaagaaagccatctacccagcataacctgagccttgtaacagagaggggagtgtgtgggaagaacaagaggcagatccaattaattacccttagaagcaaaggtaaaagttgaagattacgagacccatttacaggaggaaatagacccatcattgagcctagagaatgggaggattgtttagggccagaaaagcgtctcaatgttcagattccattccttttctggagctttggaaagaggaaggtcatagcttgggcttggaag

SEQ ID NO: 15865 - DNA, 218 bp, Homo sapiens
  MAP TO CHR18.1; EXPRESSED IN ADULT LIVER, SIGNAL = 1.1; EXPRESSED IN FETAL LIVER, SIGNAL = 0.85; EXPRESSED IN LUNG, SIGNAL = 4.3; EXPRESSED IN BRAIN, SIGNAL = 0.74; SWISSPROT HIT: P18490, EVALUE 4.00e+00; EST_HUMAN HIT: AI904584.1, EVALUE 1.00e-113
tgaaattacaggtgagcagaatggcaacaggaatcctggtggattgcagattggtgacctggtaaatatagatctcgacctcgaaattgtacagtctttgcagcatggtcatggaggatggactgatggaatgtttgagactttaactacaactggaactgtttgtggcattgatgaagatcatgacattgtagtacagtatccaagtggcaataggt

SEQ ID NO: 15866 - DNA, 203 bp, Homo sapiens
  MAP TO CHR20.1; EXPRESSED IN BRAIN, SIGNAL = 1.3; EXPRESSED IN HEART, SIGNAL = 1.4; EXPRESSED IN BONE MARROW, SIGNAL = 1.5; EXPRESSED IN PLACENTA, SIGNAL = 1.2; EXPRESSED IN FETAL LIVER, SIGNAL = 1.8; EXPRESSED IN LUNG, SIGNAL = 1.1; SWISSPROT HIT: P75750, EVALUE 4.20e+00; NT HIT: gi14786661, EVALUE 1.00e-106; EST_HUMAN HIT: BG257453.1, EVALUE 1.00e-103
tcttacccccggaggctgggcctgcaggacctctgctgcctcctcctcactcagactcagctgcagccatatggggtgggtgtggaggagccggtccaagatgctgagcctgttggagaggctgtcatagcctgagtcccgggcacaggtcttcacgtcctcttcctcggaatagccaccatccttgtgtcttaccatgctag

SEQ ID NO: 15867 - DNA, 197 bp, Homo sapiens
  MAP TO CHR1.1; EXPRESSED IN FETAL LIVER, SIGNAL = 1.2; EXPRESSED IN LUNG, SIGNAL = 1.2; EXPRESSED IN BRAIN, SIGNAL = 0.89; EXPRESSED IN HEART, SIGNAL = 0.61; EST_HUMAN HIT: AW268349.1, EVALUE 1.00e-106; SWISSPROT HIT: Q21988, EVALUE 4.00e-05; NT HIT: AB011173.1, EVALUE 1.00e-106
tagccgattccacgactcttctttgcgggagaacatacgatccgtaactacccagccacagtgcatggtgctctgctgagtgggctgcgagaagcgggaagaattgcagaccagtttttgggggccatgtatacgctgcctcgccaggccacaccaggtgttcctgcacagcagtccccaagcatgtgagacagatg

SEQ ID NO: 15868 - DNA, 115 bp, Homo sapiens
  MAP TO CHR2.1; EXPRESSED IN FETAL LIVER, SIGNAL = 4.7; EXPRESSED IN LUNG, SIGNAL = 8.4; EXPRESSED IN HELA, SIGNAL =   5; EXPRESSED IN BRAIN, SIGNAL = 4.3; EXPRESSED IN HEART, SIGNAL = 4.7; EXPRESSED IN BONE MARROW, SIGNAL = 4.1; EXPRESSED IN ADULT LIVER, SIGNAL = 4.6; EST_HUMAN HIT: T97278.1, EVALUE 3.00e-21; SWISSPROT HIT: P47838, EVALUE 4.70e-02; NT HIT: Z54209.1, EVALUE 5.00e-25
tctcttggcaatctgttcctggagtttgtctttggcctccttcattctcttggccaaaagttcagcgtattttgcagcctcttcctcatttttcttagtacactgtttcttcaga

SEQ ID NO: 15869 - DNA, 137 bp, Homo sapiens
  MAP TO CHR10.1; EXPRESSED IN FETAL LIVER, SIGNAL = 0.67; EXPRESSED IN LUNG, SIGNAL = 0.86; EXPRESSED IN BRAIN, SIGNAL = 0.59; EXPRESSED IN HEART, SIGNAL = 0.94; EXPRESSED IN BONE MARROW, SIGNAL = 0.52; EST_HUMAN HIT: AW827619.1, EVALUE 6.80e-01; SWISSPROT HIT: P41739, EVALUE 1.80e-01; NT HIT: gi6754709, EVALUE 1.20e-01
tgtttgtacagctttgggcaagtgacaggtcaacctccagttgttgacagggagaggttttgtgagccaaacacctttatcatgaagtattatcttgtaaaaatatttactagggtgtaagtgcagaacattgtgct

SEQ ID NO: 15870 - DNA, 204 bp, Homo sapiens
  MAP TO CHR11.1; EXPRESSED IN HELA, SIGNAL = 2.1; EXPRESSED IN BRAIN, SIGNAL = 3.4; EXPRESSED IN HEART, SIGNAL = 2.3; EXPRESSED IN ADULT LIVER, SIGNAL = 3.6; EXPRESSED IN BONE MARROW, SIGNAL = 3.4; EXPRESSED IN PLACENTA, SIGNAL = 2.4; EXPRESSED IN FETAL LIVER, SIGNAL = 2.8; EXPRESSED IN LUNG, SIGNAL = 2.1; EST_HUMAN HIT: BI763154.1, EVALUE 1.00e-100; SWISSPROT HIT: P37274, EVALUE 3.20e+00; NT HIT: gi14772151, EVALUE 1.00e-100
caaaggggagaggtactcaccagagaactggtatctaggattcaggacagctgggagcacaaagcgcagagccccatctgcttccagaggcagctcctgcacatacttcagggtgactgccgccttcgacccaggttggaggttacccacattgcaagagaagacatccctggagctgctgtccccctccaataagaaggcctg

SEQ ID NO: 15871 - DNA, 169 bp, Homo sapiens
  MAP TO CHRX.1; EXPRESSED IN LUNG, SIGNAL = 1.4; EXPRESSED IN HELA, SIGNAL = 1.3; EXPRESSED IN BRAIN, SIGNAL = 1.1; EXPRESSED IN HEART, SIGNAL =   1; EXPRESSED IN ADULT LIVER, SIGNAL = 0.96; EXPRESSED IN BONE MARROW, SIGNAL = 0.98; EST_HUMAN HIT: AV645406.1, EVALUE 4.00e-86; SWISSPROT HIT: O60488, EVALUE 4.00e-25; NT HIT: gi14767060, EVALUE 3.00e-86
cattttatttgcccccatacattcgttcaatgtctttgaggtaatggttcctcagctccttccttttcagtttgaaagcatcagttaccaaaccagtttcaggggtccatggctctgggcttaatcgaaccttgattggaatttcaaatcgctccaatttcactgaaat

SEQ ID NO: 15872 - DNA, 254 bp, Homo sapiens
  MAP TO CHR11.1; EXPRESSED IN FETAL LIVER, SIGNAL = 2.9; EXPRESSED IN HELA, SIGNAL = 2.7; EXPRESSED IN BRAIN, SIGNAL = 3.5; EXPRESSED IN LUNG, SIGNAL = 3.4; EXPRESSED IN HEART, SIGNAL = 3.2; EXPRESSED IN ADULT LIVER, SIGNAL = 1.2; EXPRESSED IN BONE MARROW, SIGNAL = 3.4; NT HIT: Z69780.1, EVALUE 1.00e-125; EST_HUMAN HIT: BF373000.1, EVALUE 0.00e+00; SWISSPROT HIT: P41511, EVALUE 7.40e+00
tgggatgccccttgggggattcttgggaatgacccatcacaattcctcaatctgcacttttgtgcggagattcccttggtcacttttgaaatgaactcagatgtgtttggagatagctgtgccgtttttgccttctttccctcttgtagggaaaccttcgcttattcccccaagttgctggcaggtgtgctgaaaatttggcaatggactcaaggctgagctagaagaggaatttctcatttttgtggttgaca

SEQ ID NO: 15873 - DNA, 260 bp, Homo sapiens
  MAP TO CHR14.1; EXPRESSED IN PLACENTA, SIGNAL =  42; EXPRESSED IN LUNG, SIGNAL =  25; EXPRESSED IN HELA, SIGNAL =  34; EXPRESSED IN BRAIN, SIGNAL = 3.9; EXPRESSED IN ADULT LIVER, SIGNAL =  43; SWISSPROT HIT: P12970, EVALUE 5.00e-25; NT HIT: gi14784354, EVALUE 0.00e+00; EST_HUMAN HIT: AI333494.1, EVALUE 0.00e+00
gtccacaggaagacctgcaccactgtcgccttcacacaggtgaactcagaagacaaaggcgctttggctaagctggtggaagctatcaggaccaattacaatgacagatacgatgagatccgccgtcactggggtggcaatgtcctgggtcctaagtctgtggctcgtatcgccaagcgcaaaaaggcaaaggctaaagaacttgccactaaactgggttaaatgtacactgttgagttttctgtacataaaaataatta

SEQ ID NO: 15874 - DNA, 145 bp, Homo sapiens
  MAP TO CHR16.1; EXPRESSED IN HELA, SIGNAL = 1.5; EXPRESSED IN LUNG, SIGNAL = 0.57; EXPRESSED IN BRAIN, SIGNAL = 1.2; EXPRESSED IN BONE MARROW, SIGNAL = 1.3; EXPRESSED IN HEART, SIGNAL = 0.6; EXPRESSED IN PLACENTA, SIGNAL = 1.5; EXPRESSED IN FETAL LIVER, SIGNAL = 2.1; SWISSPROT HIT: P17735, EVALUE 9.00e-22; NT HIT: X77471.1, EVALUE 3.00e-76; EST_HUMAN HIT: AW340317.1, EVALUE 5.00e-76
cagccagagaaatcttgggaaattgacctgaaacaactggaatatctaattgatgaaaagacagcttgtctcattgtcaataatccatcaaacccctgtgggtcagtgttcagcaaacgtcatcttcagaagattctggcaggta

SEQ ID NO: 15875 - DNA, 227 bp, Homo sapiens
  MAP TO CHR18.1; EXPRESSED IN BONE MARROW, SIGNAL = 2.4; EXPRESSED IN PLACENTA, SIGNAL = 1.3; EXPRESSED IN FETAL LIVER, SIGNAL = 1.9; EXPRESSED IN LUNG, SIGNAL = 0.9; EXPRESSED IN HELA, SIGNAL =   2; EXPRESSED IN BRAIN, SIGNAL =   2; SWISSPROT HIT: O14248, EVALUE 7.70e-02; NT HIT: gi14756107, EVALUE 1.00e-116; EST_HUMAN HIT: BF842027.1, EVALUE 1.00e-104
agatgctcaccttctcctgccgccattgcagggtggtgaggttgaggacccagaaatcacgggtgacgcctccagcggtaagtccccccagcagatacatggcaccacggccagcgggcacatatgcggctgcatggaaggagcggggcgatgggcctgggcccccgtcctcggctcccgccagcatctgtgtccaccgccgctcactcactgagtacctggggcca

SEQ ID NO: 15876 - DNA, 159 bp, Homo sapiens
  MAP TO CHR1.1; EXPRESSED IN LUNG, SIGNAL = 1.8; EXPRESSED IN BRAIN, SIGNAL =   4; EXPRESSED IN HEART, SIGNAL = 2.5; EXPRESSED IN ADULT LIVER, SIGNAL = 3.3; EXPRESSED IN BONE MARROW, SIGNAL = 3.9; EXPRESSED IN PLACENTA, SIGNAL = 3.3; EXPRESSED IN FETAL LIVER, SIGNAL = 3.1; EST_HUMAN HIT: AW995845.1, EVALUE 2.00e-14; SWISSPROT HIT: P20107, EVALUE 9.00e-03; NT HIT: gi12963578, EVALUE 7.00e-53
cacttaccttacaactataagaatggctataagaattgaacagataggatctgctatcatcagaccaaaattttgcatcatgatggcagaagcaattacaccaatacttccaagtgtatctgctaggatatgtaaaaatacacctagaaataaaccata

SEQ ID NO: 15877 - DNA, 255 bp, Homo sapiens
  MAP TO CHR19.1; EXPRESSED IN BRAIN, SIGNAL = 0.38; EXPRESSED IN BONE MARROW, SIGNAL = 0.39; EST_HUMAN HIT: AI091320.1, EVALUE 0.00e+00; SWISSPROT HIT: Q60698, EVALUE 2.90e-01; NT HIT: gi16176275, EVALUE 1.00e-118
gtgccctcgccctgcagacctacctttgtcactgtcagggtctgagtcgctgaggggcttcaggggcgaatgcaggtcctggaagtagcggtggccagcttcgcactgccacacggccgtggtgtacaggccaaaagtggggtctagctccgccaggtgcggctcgtacgggcagcggtgcttgtggtcctcgtaccagatcaccacgttcttcaggcagttcacgttgcgtcgccgccctatggacacagggcc

SEQ ID NO: 15878 - DNA, 242 bp, Homo sapiens
  MAP TO CHR17.1; EXPRESSED IN FETAL LIVER, SIGNAL = 2.1; EXPRESSED IN PLACENTA, SIGNAL = 2.2; EXPRESSED IN LUNG, SIGNAL = 1.2; EXPRESSED IN HELA, SIGNAL = 2.8; EXPRESSED IN BRAIN, SIGNAL = 2.2; EXPRESSED IN HEART, SIGNAL = 1.4; EXPRESSED IN ADULT LIVER, SIGNAL = 2.6; EXPRESSED IN BONE MARROW, SIGNAL =   2; EST_HUMAN HIT: AL045310.1, EVALUE 1.00e-46; SWISSPROT HIT: Q9Z2S9, EVALUE 4.00e-11; NT HIT: gi15313679, EVALUE 4.00e-46
tggagagagactgcccctggctgctgtcctctcctcctccccccgaacccgagtacgggaccaggcagctcaacggacatgcgcagggctgctgagttactatacctgggcgacacccgtcacagttaaagctaccccctcggccgtctctacgtcctcgcagcggggctgcaacgtcataatctctagggaaatcctgccaagaaacgcaaaacaggggcatgggtctgggggcgcagggc

SEQ ID NO: 15879 - DNA, 222 bp, Homo sapiens
  MAP TO CHR5.1; EXPRESSED IN LUNG, SIGNAL = 2.6; EXPRESSED IN PLACENTA, SIGNAL = 5.3; EXPRESSED IN FETAL LIVER, SIGNAL =   5; EXPRESSED IN BRAIN, SIGNAL = 4.2; EXPRESSED IN HELA, SIGNAL = 5.6; EXPRESSED IN HEART, SIGNAL = 2.4; EXPRESSED IN BONE MARROW, SIGNAL = 4.8; EXPRESSED IN ADULT LIVER, SIGNAL = 6.1; EST_HUMAN HIT: BI464352.1, EVALUE 1.00e-117; SWISSPROT HIT: Q9UKU0, EVALUE 9.00e-32; NT HIT: gi16171766, EVALUE 1.00e-117
cctgctcacctctacttcttctgactgcatcaggaggttgcatggcggctgcaaggcctttggccggtgagtgaaccagtaggcaaggatggcagccagggcacccatactcacgagggtggtggccgagaggctgcggaaaaactgtcccaagtcacctagctcaggcagtcgcagtatcctcaggatctcctgtgtctgcatcttctccagaagtgagag

SEQ ID NO: 15880 - DNA, 222 bp, Homo sapiens
  MAP TO CHR19.1; EXPRESSED IN PLACENTA, SIGNAL = 2.6; EXPRESSED IN FETAL LIVER, SIGNAL = 1.4; EXPRESSED IN HELA, SIGNAL = 1.8; EXPRESSED IN LUNG, SIGNAL = 0.65; EXPRESSED IN BRAIN, SIGNAL = 1.9; EXPRESSED IN BONE MARROW, SIGNAL = 1.5; EXPRESSED IN HEART, SIGNAL = 0.6; NT HIT: AF038540.1, EVALUE 1.00e-115; EST_HUMAN HIT: BF744794.1, EVALUE 1.00e-115; SWISSPROT HIT: O75298, EVALUE 1.00e-29
ttctcactggaaagggttggctccatccccccggtgcacggcctgcagcactttgcggtaaaccctgagagagatggtgccgcagagcagcaacagagccaagtgcgcggccacggacacgatgctaaagtgcaggaggcagaggagggagaccatcaggcctgtgaagaccactcctgacgtcctcgtgtccttccagtacagcaggtccgccactgtgga

SEQ ID NO: 15881 - DNA, 196 bp, Homo sapiens
  MAP TO CHR19.1; EXPRESSED IN ADULT LIVER, SIGNAL = 0.95; EXPRESSED IN BONE MARROW, SIGNAL = 0.98; EXPRESSED IN FETAL LIVER, SIGNAL =   1; EXPRESSED IN BRAIN, SIGNAL =   1; EXPRESSED IN LUNG, SIGNAL = 0.75; SWISSPROT HIT: O15393, EVALUE 4.30e+00; NT HIT: gi14759189, EVALUE 8.00e-90; EST_HUMAN HIT: BE378723.1, EVALUE 1.00e-89
aaaacaccgaattgctcataaaccgcattccaaaccaaaaacttcagatatttttgaagcagatattgcaaatgatgtgaaatccaaggatttgctagctgataaagaactgtgggctcgacttgaagaactagagagacaggaagaattgctgggtgaacttgataggtacttgatgacaaattatctttccaag

SEQ ID NO: 15882 - DNA, 152 bp, Homo sapiens
  MAP TO CHR16.1; EXPRESSED IN HELA, SIGNAL = 8.7; EXPRESSED IN LUNG, SIGNAL = 1.4; EXPRESSED IN BRAIN, SIGNAL = 3.8; EXPRESSED IN BONE MARROW, SIGNAL = 1.5; EXPRESSED IN PLACENTA, SIGNAL = 2.6; SWISSPROT HIT: P98161, EVALUE 7.00e-26; NT HIT: gi14776854, EVALUE 2.00e-80; EST_HUMAN HIT: BG675854.1, EVALUE 3.00e-80
gtggctgagctgcagcgtggcttctttgacaagcacatctggctctccatatgggaccggccgcctcgtagccgtttcactcgcatccagagggccacctgctgcgttctcctcatctgcctcttcctgggcgccaacgccgtgtggtacgg

SEQ ID NO: 15883 - DNA, 187 bp, Homo sapiens
  MAP TO CHR9.1; EXPRESSED IN HEART, SIGNAL = 3.5; EXPRESSED IN ADULT LIVER, SIGNAL = 2.8; EXPRESSED IN BONE MARROW, SIGNAL = 4.6; EXPRESSED IN PLACENTA, SIGNAL = 2.7; EXPRESSED IN FETAL LIVER, SIGNAL =   3; EXPRESSED IN HELA, SIGNAL = 3.5; EXPRESSED IN BRAIN, SIGNAL = 3.7; EXPRESSED IN LUNG, SIGNAL = 3.3; EST_HUMAN HIT: AI992171.1, EVALUE 1.00e-100; SWISSPROT HIT: P52623, EVALUE 4.00e-26; NT HIT: gi14783235, EVALUE 1.00e-100
cagttgccatcaacctgatcgtgcagcacatccaggacattctgaatggtgacatctgcaaatggcaccgaggagggtccaatgggcggagctacaagcggaccttttctgagccaggggaccaccctgggatgctgacctctggcaaacggtcacatttggagtccagcagcagaccccactgagg

SEQ ID NO: 15884 - DNA, 321 bp, Homo sapiens
  MAP TO CHR7.1; EXPRESSED IN HEART, SIGNAL =   1; EXPRESSED IN BONE MARROW, SIGNAL = 1.4; EXPRESSED IN FETAL LIVER, SIGNAL = 1.1; EXPRESSED IN LUNG, SIGNAL = 0.75; EXPRESSED IN HELA, SIGNAL = 2.3; EXPRESSED IN BRAIN, SIGNAL = 1.4; EST_HUMAN HIT: BG257570.1, EVALUE 0.00e+00; SWISSPROT HIT: O15084, EVALUE 1.50e-01; NT HIT: gi14781728, EVALUE 0.00e+00
cctttctttccattttaggacttttcttggtagagatggaaatccaaataaacggaatgtgcacaatgaaacatctatgcatttgttgtgtatgggacctcaaattatgatatctgaaggagcccttcatcctcgcttggcacgccccacagaagatgatttcagaagagcagattgtctgcagatgatcttaaaatggaaaggagcaaaacttgaccagggtgaatatgagagagcagctattgatgctgttgataacaaaaaaaacacacccttgcactatgctgctgcctcagggatgaaagcctgtgtagaggtaaa

SEQ ID NO: 15885 - DNA, 251 bp, Homo sapiens
  MAP TO CHR7.1; EXPRESSED IN FETAL LIVER, SIGNAL = 0.95; EXPRESSED IN LUNG, SIGNAL = 1.1; EXPRESSED IN HELA, SIGNAL = 0.93; EXPRESSED IN BRAIN, SIGNAL = 0.89; EXPRESSED IN HEART, SIGNAL =   1; EXPRESSED IN BONE MARROW, SIGNAL = 0.79; EST_HUMAN HIT: BG217778.1, EVALUE 1.00e-108; SWISSPROT HIT: Q00690, EVALUE 2.40e+00; NT HIT: gi13631241, EVALUE 1.00e-130
cactcacctggattgtgagctgtcaaggaaagatgtaattagctgacgccgcccatctttgttgaaaaccagggccttaccactggccaagacaccacaaccaaagctgacttcagcaccacggatagagtaaaagttatggtaagaggagagcctggaactgccaaagctttcagaaataaacattgggaatgtctgggatgccatctcacaagctgggccagaaaatccagggtcacacctgaaagaaa

SEQ ID NO: 15886 - DNA, 204 bp, Homo sapiens
  MAP TO CHR11.1; EXPRESSED IN PLACENTA, SIGNAL = 2.2; EXPRESSED IN FETAL LIVER, SIGNAL = 1.8; EXPRESSED IN BRAIN, SIGNAL =   2; EXPRESSED IN LUNG, SIGNAL = 2.7; EXPRESSED IN HEART, SIGNAL = 3.2; EXPRESSED IN BONE MARROW, SIGNAL = 2.3; EST_HUMAN HIT: AV752940.1, EVALUE 4.00e-96; SWISSPROT HIT: Q04609, EVALUE 1.00e-25; NT HIT: AJ012370.1, EVALUE 1.00e-101
ttaccttttgctggatagcctggagtgagtgggtcaccagcaccattcaaatttaacacatttcctctctgggctgcagttccaggaagattccatcctttgggatatggctgtacctcaggagcaaagtagtcagctggatctgagtacaagatgattcctatggctcctgctaacatggcatttttaacctgcaggggcaat

SEQ ID NO: 15887 - DNA, 131 bp, Homo sapiens
  MAP TO CHR19.1; EXPRESSED IN LUNG, SIGNAL = 1.2; EXPRESSED IN PLACENTA, SIGNAL = 1.5; EXPRESSED IN BRAIN, SIGNAL = 2.3; EXPRESSED IN HELA, SIGNAL = 2.2; EXPRESSED IN BONE MARROW, SIGNAL = 1.3; EXPRESSED IN HEART, SIGNAL = 1.7; EXPRESSED IN ADULT LIVER, SIGNAL = 3.4; EST_HUMAN HIT: AV698460.1, EVALUE 6.50e-01; SWISSPROT HIT: P44927, EVALUE 7.80e+00; NT HIT: AL161491.2, EVALUE 1.70e+00
tgcacatgtggattaaattagagcaatatgtttttcaaacagcatcttggctgaaaagtcaagcagataaatggaaacaaacccagctttatgtgactggaaaggggctggtgggagggccgcttctgcct

SEQ ID NO: 15888 - DNA, 219 bp, Homo sapiens
  MAP TO CHR7.1; EXPRESSED IN FETAL LIVER, SIGNAL = 1.4; EXPRESSED IN HELA, SIGNAL = 1.3; EXPRESSED IN BRAIN, SIGNAL = 1.5; EXPRESSED IN HEART, SIGNAL = 0.93; EXPRESSED IN BONE MARROW, SIGNAL = 1.6; EST_HUMAN HIT: BF874290.1, EVALUE 2.90e-01
aagaactagcagacatcagatttgtcaaagtcacaactcctttagaatttccaggagaacaccaggatcaaagaaaagaaatagataagataaagaattatcatctatttgtaataggagtttcccatttaagttttacttgttactatcattttagaacaagtgaaaactatgcttgttaggaatctttacctgacactaatggaacctcttttgaca

SEQ ID NO: 15889 - DNA, 236 bp, Homo sapiens
  MAP TO CHR14.1; EXPRESSED IN FETAL LIVER, SIGNAL = 1.1; EXPRESSED IN BRAIN, SIGNAL = 0.8; EXPRESSED IN HEART, SIGNAL = 0.82; EXPRESSED IN BONE MARROW, SIGNAL = 0.96; NT HIT: gi14747074, EVALUE 1.00e-126; EST_HUMAN HIT: AU120412.1, EVALUE 1.00e-123; SWISSPROT HIT: Q9H239, EVALUE 6.40e+00
aggagaaggaagaagaaccagttataaaaatcatggttgatgatgcaattgtgataagagacaattatttcagtctgcccgttaataagaccgatacgagcaaagcccccttacactttcccattcctgtgattcgctatgtggtgaaggaggtctctcttgtctggcatctttatggaggaaaggattttggaatagtccctcccacttctccggctaaaagttatatgtaagtt

SEQ ID NO: 15890 - DNA, 192 bp, Homo sapiens
  MAP TO CHR20.1; EXPRESSED IN ADULT LIVER, SIGNAL = 2.9; EXPRESSED IN PLACENTA, SIGNAL =   4; EXPRESSED IN HELA, SIGNAL = 5.1; EXPRESSED IN FETAL LIVER, SIGNAL = 3.8; EXPRESSED IN LUNG, SIGNAL = 3.7; EXPRESSED IN BRAIN, SIGNAL = 3.6; EXPRESSED IN HEART, SIGNAL = 2.6; EXPRESSED IN BONE MARROW, SIGNAL = 3.1; EST_HUMAN HIT: BF328563.1, EVALUE 1.00e-21; SWISSPROT HIT: P45543, EVALUE 4.90e-01
atttcctgtctgggacattctgtgacacatgtccaaatggaaaaatcattctccattgagctagccaaatatcttcaataaataatgcaaaaattattaagacattttccagaggaccacaccatttcctgtcttgacaatggagctggatttgacatcagctaattcaagaggttagaaataaaagctgtg

SEQ ID NO: 15891 - DNA, 180 bp, Homo sapiens
  MAP TO CHR17.1; EXPRESSED IN ADULT LIVER, SIGNAL = 2.8; EXPRESSED IN BONE MARROW, SIGNAL = 2.1; EXPRESSED IN PLACENTA, SIGNAL = 2.1; EXPRESSED IN FETAL LIVER, SIGNAL = 2.5; EXPRESSED IN LUNG, SIGNAL = 1.3; EXPRESSED IN HELA, SIGNAL = 1.7; EXPRESSED IN BRAIN, SIGNAL = 2.2; EXPRESSED IN HEART, SIGNAL = 1.5; SWISSPROT HIT: P95458, EVALUE 4.30e+00; EST_HUMAN HIT: X98428.1, EVALUE 9.30e-01
ctaagtctcaggaaaccctgaactatttctcctggaaattaaactgagatttgaaactaatgaggggccaaagtatagaagagtgttggatagcatgtgcagctaattatttcattcagggagccaaagggaccttgggacatttccatacagcctataaactagagaaattaatcctaa

SEQ ID NO: 15892 - DNA, 118 bp, Homo sapiens
  MAP TO CHR20.1; EXPRESSED IN LUNG, SIGNAL = 2.2; EXPRESSED IN BRAIN, SIGNAL = 3.6; EXPRESSED IN PLACENTA, SIGNAL = 3.4; EXPRESSED IN FETAL LIVER, SIGNAL =   3; EXPRESSED IN HELA, SIGNAL = 2.8; EXPRESSED IN HEART, SIGNAL = 1.7; EXPRESSED IN BONE MARROW, SIGNAL = 3.7; EXPRESSED IN ADULT LIVER, SIGNAL = 2.8; EST_HUMAN HIT: BF769388.1, EVALUE 5.00e-60; NT HIT: gi14770640, EVALUE 3.00e-60
ggagggacatggcaggtgcccaaggctgcccttggactgtcgtcatcttgtaaacaagctagtgtgagttctcatcagatagaacgagtaaaaagaccgcagtatggaggctgggccg

SEQ ID NO: 15893 - DNA, 182 bp, Homo sapiens
  MAP TO CHR6.1; EXPRESSED IN BONE MARROW, SIGNAL = 2.3; EXPRESSED IN ADULT LIVER, SIGNAL = 2.7; EXPRESSED IN LUNG, SIGNAL = 1.2; EXPRESSED IN FETAL LIVER, SIGNAL = 2.1; EXPRESSED IN PLACENTA, SIGNAL = 2.5; EXPRESSED IN BRAIN, SIGNAL = 2.8; EXPRESSED IN HELA, SIGNAL = 2.6; EXPRESSED IN HEART, SIGNAL = 1.6; SWISSPROT HIT: O00294, EVALUE 4.00e-29; EST_HUMAN HIT: BE780807.1, EVALUE 3.00e-93; NT HIT: AF034920.1, EVALUE 3.00e-98
accttcttctccgtgtccaggtgcaggaagtaggagggatacatgcctcgatccatgccctttttgtcccgggtcagccggcagcgcaccgtgcggccctggggggcaggccggagcacaaactcccggggttcgtccacctccacggggggagacggggccctctcctccttctgggtggg

SEQ ID NO: 15894 - DNA, 200 bp, Homo sapiens
  MAP TO CHR5.1; EXPRESSED IN HELA, SIGNAL = 1.5; EXPRESSED IN LUNG, SIGNAL = 0.87; EXPRESSED IN BONE MARROW, SIGNAL = 1.6; EXPRESSED IN HEART, SIGNAL = 0.87; EXPRESSED IN ADULT LIVER, SIGNAL = 1.7; EXPRESSED IN PLACENTA, SIGNAL = 1.2; EXPRESSED IN BRAIN, SIGNAL = 1.7; SWISSPROT HIT: P16591, EVALUE 2.00e-27; EST_HUMAN HIT: BE964530.2, EVALUE 2.00e-08; NT HIT: gi4885230, EVALUE 7.00e-72
gactggtaccatggtgcaattcccagaatagaagctcaagaactgttaaaaaaacaaggagactttttggtgcgagagagtcatgggaaacctggtgaatatgtcctttctgtatattctgatggacagaggagacattttatcatacaatatgttgatgtacgtttccagtttagttcatatgtatattttgatgtagt

SEQ ID NO: 15895 - DNA, 360 bp, Homo sapiens
  MAP TO CHR17.1; EXPRESSED IN BRAIN, SIGNAL = 0.6; EXPRESSED IN HELA, SIGNAL = 0.75; EXPRESSED IN BONE MARROW, SIGNAL = 0.65; SWISSPROT HIT: P02814, EVALUE 4.20e-01; EST_HUMAN HIT: BF309766.1, EVALUE 2.00e-25; NT HIT: gi16164704, EVALUE 1.00e-25
ttcaggatcatttcttctttcttcaaaatgaaagtaaaacatgctgggaataatttcataattacaaaactgccctcccaattggcccctgcctctaccccctgacctcaccacccaccagggaggtgggtcttattctgggcatcgtgccaagttcttagcggggccctctagaatctctaaagcaaatcaggctgaagaggggaaaaccagcagggggaggcagcattcccggtgcccagtatggtctaggaggcattgaaattccagggccgaagtcctgagacaaagatcataatgagacaggaaggtggcaaaggaaggagcccatttgcatgacaataattgagccaagaatag

SEQ ID NO: 15896 - DNA, 230 bp, Homo sapiens
  MAP TO CHR19.1; EXPRESSED IN PLACENTA, SIGNAL =   6; EXPRESSED IN FETAL LIVER, SIGNAL = 7.1; EXPRESSED IN LUNG, SIGNAL = 3.2; EXPRESSED IN HELA, SIGNAL = 6.3; EXPRESSED IN BRAIN, SIGNAL = 5.1; EXPRESSED IN HEART, SIGNAL = 4.2; EXPRESSED IN ADULT LIVER, SIGNAL = 7.2; EXPRESSED IN BONE MARROW, SIGNAL = 5.2; NT HIT: AF309082.1, EVALUE 1.00e-123; SWISSPROT HIT: Q62101, EVALUE 2.00e-22; EST_HUMAN HIT: BE884606.1, EVALUE 1.00e-123
ctaacctttgcattgcaggccctgccggaagaggcccttgaggagtttcttgcaagcctggcaaacggtgggccgtgtatagctgtggatgaggaaggtgtgcggcaccttgaccttggagagcagcatcttgtccagctcaatggggcggcccgtatacgatgaggcagaagaggaggaagaggatgacgggggacggcgaggcaggagttcggtggtgctacggctct

SEQ ID NO: 15897 - DNA, 228 bp, Homo sapiens
  MAP TO CHR1.1; EXPRESSED IN BONE MARROW, SIGNAL = 0.52; EXPRESSED IN FETAL LIVER, SIGNAL = 0.3; EXPRESSED IN BRAIN, SIGNAL = 0.47; EST_HUMAN HIT: AI419844.1, EVALUE 6.00e-95; NT HIT: gi13629279, EVALUE 1.00e-125; SWISSPROT HIT: Q14209, EVALUE 1.00e-38
tcaattaatcaacaggtccccaaggtcgtaggagtcgaagagatcgctgatgccctcacccgcctccaagccccacaggtagtcgtcctggtccaaggatggggagaagctgatcagaggggagctgcacgccagggtcggggacaggaactggtcctcagtctgctgcaggagtgggtgcggcagctccagcaggctgtcagtagcctccaaggggaccagggatgg

SEQ ID NO: 15898 - DNA, 203 bp, Homo sapiens
  MAP TO CHR7.1; EXPRESSED IN LUNG, SIGNAL = 0.95; EXPRESSED IN HELA, SIGNAL = 1.4; EXPRESSED IN BRAIN, SIGNAL = 1.2; EXPRESSED IN HEART, SIGNAL = 0.63; EXPRESSED IN ADULT LIVER, SIGNAL = 1.2; EXPRESSED IN BONE MARROW, SIGNAL = 1.1; SWISSPROT HIT: P17624, EVALUE 1.00e-04; EST_HUMAN HIT: AL602710.1, EVALUE 1.00e-102; NT HIT: gi16161124, EVALUE 1.00e-103
tgctcgtaccagctcatggctctgtggcttgccctgcagcttctggtggtagtcaaaggtaagcctgtccaacaccgcctgttcctcctcatccacggtggccatggagcgctccttgttgatcttgtcaatgtcgatgggctcttctccctccaggatggcgttccaccaatactcgcccaccttgctcaggttcacctggg

SEQ ID NO: 15899 - DNA, 131 bp, Homo sapiens
  MAP TO CHR6.1; EXPRESSED IN FETAL LIVER, SIGNAL = 0.82; EXPRESSED IN HELA, SIGNAL = 1.2; EXPRESSED IN BRAIN, SIGNAL = 1.2; EXPRESSED IN BONE MARROW, SIGNAL = 1.1; EXPRESSED IN HEART, SIGNAL = 0.5; SWISSPROT HIT: P15787, EVALUE 9.00e-01; EST_HUMAN HIT: BF744369.1, EVALUE 4.00e-64; NT HIT: AF387365.1, EVALUE 6.80e+00
caggtgtgcattgagacgtacataagcagctgtcaccagcgtagcataaacactgctgtgcgggcaactctcagtcaaatgctgagtgacttgactttacagttacgacagaggcaggagaatacggtgag

SEQ ID NO: 15900 - DNA, 149 bp, Homo sapiens
  MAP TO CHR7.1; EXPRESSED IN HEART, SIGNAL =   1; EXPRESSED IN BONE MARROW, SIGNAL = 0.8; EXPRESSED IN FETAL LIVER, SIGNAL = 0.79; EXPRESSED IN LUNG, SIGNAL = 0.96; EXPRESSED IN BRAIN, SIGNAL = 0.77; SWISSPROT HIT: Q9Y6U3, EVALUE 3.00e-21; EST_HUMAN HIT: AI222285.1, EVALUE 4.00e-67; NT HIT: gi16162328, EVALUE 3.00e-67
tttaccacttgctggaatcccagcccaggaaccagcctgtgaatgtgggtggctcatggccctgttttatgatgacaattggtgtcctcttgtctcttccagaagggtctgtctcaaggtacattttggctaaaaaaagttgtaaagac

SEQ ID NO: 15901 - DNA, 126 bp, Homo sapiens
  MAP TO CHR5.1; EXPRESSED IN BONE MARROW, SIGNAL = 0.89; EXPRESSED IN FETAL LIVER, SIGNAL = 0.66; EXPRESSED IN HELA, SIGNAL = 0.73; EXPRESSED IN BRAIN, SIGNAL = 0.82; SWISSPROT HIT: P38769, EVALUE 9.00e-01; EST_HUMAN HIT: BF379623.1, EVALUE 6.20e-01
gaggtattcctttaaagatttgctttcaatgatgtgacagtaaatggttatgttgcagtatgaaatcaggacagcagttatgtaaaggaggcaaaacttatttcattaaaatgcatggagggagaa

SEQ ID NO: 15902 - DNA, 112 bp, Homo sapiens
  MAP TO AC026530.3; EXPRESSED IN BRAIN, SIGNAL = 0.41; EXPRESSED IN HEART, SIGNAL = 0.52; EXPRESSED IN BONE MARROW, SIGNAL = 0.41; NT HIT: AP003136.2, EVALUE 1.40e+00
ttcagatatttagtacacagtgaatagagttagccttctaaataattatattgcaaatttaagaaattatgaacttaaagagtgtactgaactctaacgagatcattaatat

SEQ ID NO: 15903 - DNA, 194 bp, Homo sapiens
  MAP TO CHR17.1; EXPRESSED IN HELA, SIGNAL = 0.8; EXPRESSED IN FETAL LIVER, SIGNAL = 0.94; EXPRESSED IN BRAIN, SIGNAL = 0.78; EXPRESSED IN ADULT LIVER, SIGNAL = 1.6; EXPRESSED IN BONE MARROW, SIGNAL = 0.84; SWISSPROT HIT: P20703, EVALUE 1.10e-02; EST_HUMAN HIT: BI908618.1, EVALUE 8.00e-94; NT HIT: gi13652313, EVALUE 6.00e-94
cagaccactcaccctgttgaccaatacaaccaccttggctccatccacagtctctaggtgccgcttggccacataagcagccgcccgggtcttcccggcacccgtgggcagccagatgatgatattcttgccctccagggcaggcatgatcacctcccattggtaggaccgaagctccattctgggaatggcag

SEQ ID NO: 15904 - DNA, 285 bp, Homo sapiens
  MAP TO CHRX.1; EXPRESSED IN BRAIN, SIGNAL = 0.82; EXPRESSED IN ADULT LIVER, SIGNAL = 0.7; EXPRESSED IN PLACENTA, SIGNAL = 1.2; EXPRESSED IN FETAL LIVER, SIGNAL = 1.9; EXPRESSED IN LUNG, SIGNAL = 1.6; NT HIT: gi15308864, EVALUE 0.00e+00; SWISSPROT HIT: Q15233, EVALUE 1.00e-48; EST_HUMAN HIT: BI257770.1, EVALUE 0.00e+00
cgaaccctagcggagattgccaaagtggagctggacaatatgccactccgtggaaagcagctgcgtgtgcgctttgcctgccatagtgcatcccttacagttcgaaaccttcctcagtatgtgtccaacgaactgctggaagaagccttttctgtgtttggccaggtagagagggctgtagtcattgtggatgatcgaggaaggccctcaggaaaaggcattgttgagttctcagggaagccagctgctcggaaagctctggacagatgcagtgaaggctccttc

SEQ ID NO: 15905 - DNA, 217 bp, Homo sapiens
  MAP TO CHR17.1; EXPRESSED IN HEART, SIGNAL = 9.5; EXPRESSED IN BONE MARROW, SIGNAL = 9.2; EXPRESSED IN ADULT LIVER, SIGNAL = 4.3; EXPRESSED IN PLACENTA, SIGNAL = 9.6; EXPRESSED IN FETAL LIVER, SIGNAL = 8.3; EXPRESSED IN LUNG, SIGNAL =  12; EXPRESSED IN HELA, SIGNAL = 8.9; EXPRESSED IN BRAIN, SIGNAL = 8.5; SWISSPROT HIT: Q01560, EVALUE 8.80e-02; EST_HUMAN HIT: AI972669.1, EVALUE 7.30e-02; NT HIT: Y11740.1, EVALUE 1.00e-119
cagggctgctaggaagggcctgtggtcctgtggcatttatggggcatgtgacctgcctgcctggcctggggagacagccccgcctcagccctcgggcagggggccggtccaggcatgtgggagtatttatacctcgatggaggctcctggggagctgcaggctgaatgactccccgaagcggtgatggtggccatgacccagagcccactgtgagtg

SEQ ID NO: 15906 - DNA, 285 bp, Homo sapiens
  MAP TO CHR17.1; EXPRESSED IN HELA, SIGNAL = 1.3; EXPRESSED IN BRAIN, SIGNAL =   1; EXPRESSED IN LUNG, SIGNAL = 1.4; EXPRESSED IN HEART, SIGNAL = 1.2; EXPRESSED IN ADULT LIVER, SIGNAL = 0.68; EXPRESSED IN BONE MARROW, SIGNAL =   1; EXPRESSED IN FETAL LIVER, SIGNAL = 0.99; SWISSPROT HIT: O75616, EVALUE 3.00e-44; EST_HUMAN HIT: BE547015.1, EVALUE 0.00e+00; NT HIT: AB049388.1, EVALUE 0.00e+00
tatggccaagactaactgacctttagtgttttcacgtcctcctggcttagggctgacaacatgaagatctccttgaagtggggccagccaatcctctgaggatttcccacagattgtgtgtttgggtccttaactgctgggctggggcaatgggtgccagggtgtgagtggaaggcctgcctcatcttgagctttttgccattgaccacaccttcagtgagggctgccgtgagctccaggagaactgacttctgcttcaaacaatctacctggacatgggggatg

SEQ ID NO: 15907 - DNA, 154 bp, Homo sapiens
  MAP TO CHR3.1; EXPRESSED IN FETAL LIVER, SIGNAL = 4.9; EXPRESSED IN LUNG, SIGNAL =   4; EXPRESSED IN HELA, SIGNAL =   3; EXPRESSED IN BRAIN, SIGNAL = 4.8; EXPRESSED IN HEART, SIGNAL =   5; EXPRESSED IN ADULT LIVER, SIGNAL = 6.5; EXPRESSED IN PLACENTA, SIGNAL = 3.3; SWISSPROT HIT: Q9NLA6, EVALUE 4.40e+00; EST_HUMAN HIT: AW891351.1, EVALUE 7.80e-01; NT HIT: L47841.1, EVALUE 5.30e-01
ctcaccgtcatactgacactgagaatctggaggcactggatgggatcagtcagcacccacgtcatgagcaggatcacatcagccatcaacagggctgccaccaaccccagcaactgcaggtctttgataatctgcaaaagagtcaaggtcaaaa

SEQ ID NO: 15908 - DNA, 130 bp, Homo sapiens
  MAP TO CHR20.1; EXPRESSED IN FETAL LIVER, SIGNAL = 1.7; EXPRESSED IN HELA, SIGNAL = 2.5; EXPRESSED IN LUNG, SIGNAL = 1.1; EXPRESSED IN BRAIN, SIGNAL = 2.5; EXPRESSED IN HEART, SIGNAL = 2.9; EXPRESSED IN ADULT LIVER, SIGNAL = 1.8; SWISSPROT HIT: O75363, EVALUE 5.00e-07; EST_HUMAN HIT: AW140043.1, EVALUE 5.00e-57; NT HIT: AF041260.1, EVALUE 9.00e-55
gtggcaggagaacctggtgggaaccgtgctgatttgtttacttggatttgccaactggtccgatggatactgggtctgtttgcacttgagcatccaacatccgctttggtccctggagaaaaacagaaag

SEQ ID NO: 15909 - DNA, 230 bp, Homo sapiens
  MAP TO CHR7.1; EXPRESSED IN BONE MARROW, SIGNAL = 2.7; EXPRESSED IN ADULT LIVER, SIGNAL = 3.6; EXPRESSED IN PLACENTA, SIGNAL = 4.9; EXPRESSED IN BRAIN, SIGNAL = 2.5; EXPRESSED IN HEART, SIGNAL = 3.3; EXPRESSED IN LUNG, SIGNAL = 3.8; EXPRESSED IN FETAL LIVER, SIGNAL = 3.5; EXPRESSED IN HELA, SIGNAL = 2.9; SWISSPROT HIT: P07942, EVALUE 1.00e-31; EST_HUMAN HIT: AL543775.1, EVALUE 1.00e-126; NT HIT: M61947.1, EVALUE 1.00e-122
agataccttgctcttttagcttcttctaacaacatctcagctctggcaatgtcagcagcactatgctgaagaataacctctacttgagaaaggctttcaactcgttcacgtatatcttctgtcaagttctgtaactgctgtggggtgctaggcatctccattttcaatacttcattagcaactgcttcaatgctgtccaaatcagcactatcctctgtgaaaagcaaaga

SEQ ID NO: 15910 - DNA, 187 bp, Homo sapiens
  MAP TO CHR17.1; EXPRESSED IN BONE MARROW, SIGNAL =   1; EXPRESSED IN HELA, SIGNAL = 0.63; EXPRESSED IN BRAIN, SIGNAL =   1; EXPRESSED IN HEART, SIGNAL = 0.89; SWISSPROT HIT: Q01064, EVALUE 4.30e+00; EST_HUMAN HIT: BE843844.1, EVALUE 2.00e-82; NT HIT: gi14773065, EVALUE 4.00e-98
ctcacctgggccattccaagcatgaaggcaaagggactaagcaagcttaaaatccactccaaggatgcaggaaggtgtctgtacagtgatgtgaaccccagacacccccaaaagacagtgaggaggaacacgaccaggccggtgaggaaagatttctttaccaagatgctcattaagaaagccaaag

SEQ ID NO: 15911 - DNA, 233 bp, Homo sapiens
  MAP TO CHR4.1; EXPRESSED IN BRAIN, SIGNAL = 0.44; EXPRESSED IN BONE MARROW, SIGNAL = 0.43; EXPRESSED IN FETAL LIVER, SIGNAL = 0.36; NT HIT: U33164.1, EVALUE 1.00e-119; SWISSPROT HIT: P32298, EVALUE 2.00e-30; EST_HUMAN HIT: AA905915.1, EVALUE 6.00e-86
accatcctgcagatagatttggcatcctctgaaaacttctcagaatactcctcggtatcattcttgattctttgatcgacctcctcccatttgactttctctttgtattttttgaatggagaatgtccctgaatcatttcatagatcagacagccaagtccccaccaatcgggactaaacgtatacttttcattattgacaacttcaggtgctacataacaaatacaggaaat

SEQ ID NO: 15912 - DNA, 140 bp, Homo sapiens
  MAP TO CHR2.1; EXPRESSED IN FETAL LIVER, SIGNAL = 0.52; EXPRESSED IN BRAIN, SIGNAL = 0.82; EXPRESSED IN BONE MARROW, SIGNAL = 0.84; SWISSPROT HIT: Q15032, EVALUE 8.00e-25; EST_HUMAN HIT: AU123526.1, EVALUE 4.00e-73; NT HIT: gi14724601, EVALUE 3.00e-73
tgctaaattctacacacttctgtcctctctggtgatcacagtaatatttgttttgtttccactgcgggggtgagtgggcacaagattgtggattgtttggtacactgagctgcatcatcaccatccccccaccaggtggc

SEQ ID NO: 15913 - DNA, 171 bp, Homo sapiens
  MAP TO CHR5.1; EXPRESSED IN HEART, SIGNAL = 1.8; EXPRESSED IN FETAL LIVER, SIGNAL = 3.3; EXPRESSED IN BONE MARROW, SIGNAL = 3.5; EXPRESSED IN ADULT LIVER, SIGNAL = 2.7; EXPRESSED IN PLACENTA, SIGNAL = 3.8; EXPRESSED IN LUNG, SIGNAL = 1.6; EXPRESSED IN BRAIN, SIGNAL = 3.6; EXPRESSED IN HELA, SIGNAL = 4.5; SWISSPROT HIT: P11746, EVALUE 2.50e+00; EST_HUMAN HIT: BF904845.1, EVALUE 1.00e-83; NT HIT: AJ309484.1, EVALUE 4.00e-85
ttttcccccccagaggaacaaaggaacagcatcatcaactccagtttggaatctgtctcatcaaatccaaacagcatccttaattccagcagcagcttacagcccaacatgaactccagtgacccagacctggctgtggtcaaacccacccggcccaactcactgtaagta

SEQ ID NO: 15914 - DNA, 462 bp, Homo sapiens
  MAP TO CHR5.1; EXPRESSED IN HELA, SIGNAL = 1.5; EXPRESSED IN BRAIN, SIGNAL = 1.6; EXPRESSED IN BONE MARROW, SIGNAL = 1.6; EXPRESSED IN HEART, SIGNAL = 1.3; EXPRESSED IN PLACENTA, SIGNAL = 1.7; SWISSPROT HIT: Q9Y5H6, EVALUE 5.00e-84; EST_HUMAN HIT: BG719192.1, EVALUE 0.00e+00; NT HIT: gi14861872, EVALUE 0.00e+00
acctggaactgcagcagctctagctcctcgtggtccagcggctgcagcgcgtacaccttgccgctctccgtgtgcaccgaaatgtagctcgacagcgagcgctcgcccacccgccgctccacaagcgagtaggacaccagcgcgttctcctgcgcgtccgcgtctcgcgcagacaccgtgaagatgtggcagcccggcgggttgttctccttcacgaacaccgtgtactcgggctgcgcgaacgccggagcattgtcgttcacgtcggccacctccacagacaagctggcggtggcccacagcgaaggcgagcccccgtcccgcgcggttaccaccaactcataggccgacactctctcgcggtccagggcgctgtccagcaccaacgagtagtaattcttgaaggtggacaccagcttgaaggggacatggggcatcagggagcaggtcacctgcccgttg

SEQ ID NO: 15915 - DNA, 160 bp, Homo sapiens
  MAP TO CHR7.1; EXPRESSED IN FETAL LIVER, SIGNAL = 0.28; EXPRESSED IN BRAIN, SIGNAL = 0.38; EXPRESSED IN HEART, SIGNAL = 0.48; EXPRESSED IN BONE MARROW, SIGNAL = 0.39; SWISSPROT HIT: P08432, EVALUE 7.60e+00; EST_HUMAN HIT: BG698689.1, EVALUE 2.10e-01
gaatttctttatgtgtttattactgctttgatgtacaccataaatttctgcttaaaggtcacaagattgtgataacaaatcaaaaaccaggttgtgataatatgttgacggtgtaggaacactgtgtaaagaactggagaataataaacattaaggccag

SEQ ID NO: 15916 - DNA, 230 bp, Homo sapiens
  MAP TO CHR5.1; EXPRESSED IN BONE MARROW, SIGNAL = 1.8; EXPRESSED IN HEART, SIGNAL = 1.5; EXPRESSED IN ADULT LIVER, SIGNAL = 3.5; EXPRESSED IN FETAL LIVER, SIGNAL = 2.2; EXPRESSED IN LUNG, SIGNAL = 1.3; EXPRESSED IN BRAIN, SIGNAL =   2; SWISSPROT HIT: P51826, EVALUE 5.00e-08; NT HIT: gi7656878, EVALUE 1.00e-122; EST_HUMAN HIT: AI807417.1, EVALUE 1.00e-122
tgtgtagcaaagctgtggggatgccttcccctgtttctccaaagctgtcaccaggcaattcaggaaattattcatctggggccagtagtgcttctgcaagtggttcttcagtgaccattccacagaagatccaccagatggcagccagctatgttcaggtcacatccaacttcctctatgccaccgaaatttgggaccaagctgaacagctttccaaagagcaaaaaggt

SEQ ID NO: 15917 - DNA, 178 bp, Homo sapiens
  MAP TO CHR7.1; EXPRESSED IN FETAL LIVER, SIGNAL = 0.53; EXPRESSED IN HELA, SIGNAL = 0.39; EXPRESSED IN BRAIN, SIGNAL = 0.54; EXPRESSED IN BONE MARROW, SIGNAL = 0.61; SWISSPROT HIT: Q64347, EVALUE 1.50e+00; EST_HUMAN HIT: BI759740.1, EVALUE 4.00e-83
gcctcttccaataaagtctcaccttttttacataatcaggcacctcttctaatgtttggaatgaagtttcactgggtttcatcgtgtaaaacaacatgcgaaatccctgggaaactgaaacatcctgctgggcttctgggttcttcatttctgcccttgtctgattcccagctggaga

SEQ ID NO: 15918 - DNA, 174 bp, Homo sapiens
  MAP TO CHR17.1; EXPRESSED IN FETAL LIVER, SIGNAL = 0.58; EXPRESSED IN HELA, SIGNAL = 0.4; EXPRESSED IN BRAIN, SIGNAL = 0.72; NT HIT: D82351.1, EVALUE 2.40e+00; SWISSPROT HIT: Q05922, EVALUE 2.00e-03; EST_HUMAN HIT: AW380512.1, EVALUE 9.00e-72
tactcactttgctttagagatgaatttgtaagtgtcattccagtacgccaggagatccgttgcctcttcatcatatacccgaatgttatgatactcaaagactcctgggaagaagttatctatctctcgagtgacattcaagatataccgtaccctgcaaggaaaccaagggag

SEQ ID NO: 15919 - DNA, 171 bp, Homo sapiens
  MAP TO CHR17.1; EXPRESSED IN HEART, SIGNAL = 1.5; EXPRESSED IN PLACENTA, SIGNAL = 3.6; EXPRESSED IN LUNG, SIGNAL = 2.7; EXPRESSED IN FETAL LIVER, SIGNAL = 1.2; EXPRESSED IN BRAIN, SIGNAL = 1.2; EXPRESSED IN HELA, SIGNAL = 1.6; EXPRESSED IN BONE MARROW, SIGNAL = 1.1; EXPRESSED IN ADULT LIVER, SIGNAL = 0.76; SWISSPROT HIT: P13598, EVALUE 4.00e-13; NT HIT: M32334.1, EVALUE 1.00e-91; EST_HUMAN HIT: AI129461.1, EVALUE 2.00e-91
cctccccagagcctgtgtcggacagccagatggtcatcatagtcacggtggtgtcggtgttgctgtccctgttcgtgacatctgtcctgctctgcttcatcttcggccagcacttgcgccagcagcggatgggcacctacggggtgcgagcggcttggaggaggctgcccc

SEQ ID NO: 15920 - DNA, 243 bp, Homo sapiens
  MAP TO CHR11.1; EXPRESSED IN FETAL LIVER, SIGNAL = 0.79; EXPRESSED IN BRAIN, SIGNAL = 0.86; EXPRESSED IN ADULT LIVER, SIGNAL = 1.4; EXPRESSED IN BONE MARROW, SIGNAL = 0.84; SWISSPROT HIT: Q15620, EVALUE 4.00e-23; NT HIT: AF282276.1, EVALUE 4.00e-12; EST_HUMAN HIT: AI239808.1, EVALUE 1.00e-03
aaatggctctttcgtgactgaattcattctggcgggattaacacatcagccagatctccagtcccctctgttcttcctgtttctagtaatctatgtggtcactctgttgggaaacttgggcttggtaactctaattgggctgaactcacaccttcatacccccatgtacttcttcctctttaacttgtccttcatagatctctgttattcttctgtgtttacacccaaaatgctaatgaactt

SEQ ID NO: 15921 - DNA, 122 bp, Homo sapiens
  MAP TO CHR6.1; EXPRESSED IN PLACENTA, SIGNAL = 4.7; EXPRESSED IN LUNG, SIGNAL =   1; EXPRESSED IN HELA, SIGNAL =   6; EXPRESSED IN BRAIN, SIGNAL = 2.4; EXPRESSED IN HEART, SIGNAL = 1.8; EXPRESSED IN BONE MARROW, SIGNAL = 2.4; EXPRESSED IN ADULT LIVER, SIGNAL = 5.6; SWISSPROT HIT: Q9N0N3, EVALUE 1.00e-14; EST_HUMAN HIT: BI049649.1, EVALUE 8.00e-59; NT HIT: X77343.2, EVALUE 1.00e-62
actagtgatgtgagcagggtaacgttggcagctttacgtctccctgcaggcagatttaatcctattttgtccagtttttctcttaaagatcttcctccatttttagacttcgccctgtttca

SEQ ID NO: 15922 - DNA, 147 bp, Homo sapiens
  MAP TO CHR19.1; EXPRESSED IN FETAL LIVER, SIGNAL = 1.4; EXPRESSED IN LUNG, SIGNAL = 1.2; EXPRESSED IN HELA, SIGNAL = 2.3; EXPRESSED IN BRAIN, SIGNAL = 1.6; EXPRESSED IN HEART, SIGNAL = 1.1; EXPRESSED IN BONE MARROW, SIGNAL = 2.1; EXPRESSED IN PLACENTA, SIGNAL = 1.9; NT HIT: gi14761769, EVALUE 2.00e-74; SWISSPROT HIT: O43823, EVALUE 5.00e-22; EST_HUMAN HIT: BG111461.1, EVALUE 4.00e-70
ctttacctggaggaactccacggtcttgtcgggcagcttggtgcttatgaaccgcagggtctctttgtgaaatttgctttgcagatgcttctggatctcttcgtcatcaaagctacggaacttgcatacagaacaggcaaactgaat

SEQ ID NO: 15923 - DNA, 198 bp, Homo sapiens
  MAP TO CHR22.1; EXPRESSED IN BRAIN, SIGNAL = 0.52; EXPRESSED IN HELA, SIGNAL = 1.2; EXPRESSED IN LUNG, SIGNAL = 0.6; EXPRESSED IN BONE MARROW, SIGNAL = 0.48; EXPRESSED IN ADULT LIVER, SIGNAL = 0.86; EXPRESSED IN FETAL LIVER, SIGNAL = 0.61; NT HIT: gi12742814, EVALUE 1.00e-107; SWISSPROT HIT: Q15040, EVALUE 2.00e-35; EST_HUMAN HIT: AL039248.1, EVALUE 1.00e-107
cctgagctcgctctcgcctccaatccactcgggcatcttgagtttggagtcgaggttgtagtaggcccctcccacctctcgaacacagatccagtgctgccttttgaggggcagtttcagtggaccccagcataggctggagggcagattcatgatgaagcccatgacgttagtgagggcaatgacaccgacatccct

SEQ ID NO: 15924 - DNA, 119 bp, Homo sapiens
  MAP TO CHR6.1; EXPRESSED IN ADULT LIVER, SIGNAL = 3.2; EXPRESSED IN HEART, SIGNAL = 1.7; EXPRESSED IN PLACENTA, SIGNAL = 1.8; EXPRESSED IN FETAL LIVER, SIGNAL = 2.1; EXPRESSED IN HELA, SIGNAL = 1.9; EXPRESSED IN LUNG, SIGNAL = 1.8; EXPRESSED IN BRAIN, SIGNAL = 2.4; NT HIT: Z99120.1, EVALUE 3.90e-01; SWISSPROT HIT: P16654, EVALUE 9.10e-01; EST_HUMAN HIT: BG706117.1, EVALUE 2.30e+00
ataggaaggctgtggagtgagataaagcaggattgcaccatggaggacaaacatctcggcatccagtacacttcaaaatgtttctttttttttgttttcaagactggctgctatttcct

SEQ ID NO: 15925 - DNA, 337 bp, Homo sapiens
  MAP TO CHR4.1; EXPRESSED IN BRAIN, SIGNAL = 0.67; EXPRESSED IN BONE MARROW, SIGNAL = 0.67; EXPRESSED IN FETAL LIVER, SIGNAL = 0.52; SWISSPROT HIT: Q12714, EVALUE 7.30e+00; NT HIT: AY052369.1, EVALUE 4.90e+00
tttattctttcttaagatcctcttatataaccgatttgttgtgcaatcgagcagttggcagttcaaggaagctggctcgtaccttagataagaagttgaattattccagaggacatttggaggcaggcaggctgggacacgccgagaagtgatctgggcctcctacacaggacatggtattttagctgtgaagttccctatatgtaagccacatgagtcccccatttcctgagcatctgtatttggtgagcactggaaacctcttgctttcccactgaaggccccttgtttcctcttgctagagtcaaaaacatgacccagttacaacagaggcaca

SEQ ID NO: 15926 - DNA, 159 bp, Homo sapiens
  MAP TO CHR11.1; EXPRESSED IN ADULT LIVER, SIGNAL = 4.7; EXPRESSED IN FETAL LIVER, SIGNAL = 5.3; EXPRESSED IN LUNG, SIGNAL = 5.1; EXPRESSED IN HELA, SIGNAL = 7.2; EXPRESSED IN HEART, SIGNAL = 4.4; EXPRESSED IN BONE MARROW, SIGNAL =   6; EXPRESSED IN PLACENTA, SIGNAL = 5.3; EXPRESSED IN BRAIN, SIGNAL = 7.6; EST_HUMAN HIT: BE274041.1, EVALUE 5.00e-76; SWISSPROT HIT: P49589, EVALUE 1.00e-23; NT HIT: L06845.1, EVALUE 4.00e-76
cacttacattcagagcttccatgtctctgtggaagtccccctcccagaacttgggcagcttggagaagatggaattgtcagtgacatcacagccaagtgtagaatccagccagtcagagagcaaatccttggcttcttccagcaacacctgaagagaaa

SEQ ID NO: 15927 - DNA, 270 bp, Homo sapiens
  MAP TO CHRX.1; EXPRESSED IN BRAIN, SIGNAL = 4.2; EXPRESSED IN HEART, SIGNAL = 3.8; EXPRESSED IN ADULT LIVER, SIGNAL = 5.2; EXPRESSED IN BONE MARROW, SIGNAL = 4.4; EXPRESSED IN PLACENTA, SIGNAL = 4.8; EXPRESSED IN FETAL LIVER, SIGNAL = 3.9; EXPRESSED IN LUNG, SIGNAL = 3.2; EST_HUMAN HIT: AL523719.1, EVALUE 0.00e+00; SWISSPROT HIT: P50402, EVALUE 6.00e-30; NT HIT: D64111.1, EVALUE 0.00e+00
tcttttgcctcagggaacgccccatgtacggccgggacagtgcctaccagagcatcacgcactaccgccctgtttcagcctccaggagctccctggacctgtcctattatcctacttcctcctccacctcttttatgtcctcctcatcatcttcctcttcatggctcacccgccgtgccatccggcctgaaaaccgtgctcctggggctgggctgggccaggatcgccaggtcccgctctggggccagctgctgcttttcctggtctttg

SEQ ID NO: 15928 - DNA, 211 bp, Homo sapiens
  MAP TO CHR19.1; EXPRESSED IN BRAIN, SIGNAL = 1.7; EXPRESSED IN HELA, SIGNAL = 1.7; EXPRESSED IN BONE MARROW, SIGNAL = 1.7; EXPRESSED IN HEART, SIGNAL = 1.3; EXPRESSED IN PLACENTA, SIGNAL = 1.6; EXPRESSED IN FETAL LIVER, SIGNAL = 1.3; EXPRESSED IN LUNG, SIGNAL = 1.2; NT HIT: U56088.1, EVALUE 1.90e-01; EST_HUMAN HIT: BI520117.1, EVALUE 1.00e-104; SWISSPROT HIT: P15094, EVALUE 3.20e-02
gggactcacccatgtagttgacaggcagcaatccagtcacgcatgacaaccaggaaagtgtccaagtccacagtggccttagggccctccccattggggtccaggctgttggccaatgtttggaggcgtgcatcctgggggccctggcctgtcacagcctccaggtaggccagcacctgggccacagccacagtgcctgtgacagagcatg

SEQ ID NO: 15929 - DNA, 183 bp, Homo sapiens
  MAP TO CHR4.1; EXPRESSED IN BONE MARROW, SIGNAL = 0.86; EXPRESSED IN FETAL LIVER, SIGNAL = 0.81; EXPRESSED IN BRAIN, SIGNAL = 0.86; EST_HUMAN HIT: BF939293.1, EVALUE 2.40e-01; SWISSPROT HIT: Q15542, EVALUE 2.90e-01
cagatgaataactcaaaccatttccaaaatgctcttttaatatacaagtttctttagaaagactttcttacttgttaaaatgtcacctttaccttgaagggacagatgaagtgtgcttattttttcaaaaatatctgcttggtagcatttgttatcatagtaaaagtctgaaaatacaaaaca

SEQ ID NO: 15930 - DNA, 175 bp, Homo sapiens
  MAP TO CHR7.1; EXPRESSED IN FETAL LIVER, SIGNAL = 0.76; EXPRESSED IN BRAIN, SIGNAL = 0.72; EXPRESSED IN HEART, SIGNAL = 0.84; EXPRESSED IN BONE MARROW, SIGNAL = 0.74; NT HIT: AF181877.1, EVALUE 9.50e+00; SWISSPROT HIT: P76594, EVALUE 1.90e+00
ctcatgaatgcagtggacacagatgtgatgaagcttcagactgtttcattacggccagtttgcctggtttcacattaaagaaggagctgggaagtggcagtccctgaagatcacaaagcagcgaccatgaaacaggctaaatgagacacctctgatttttcaggcatgactgaga

SEQ ID NO: 15931 - DNA, 179 bp, Homo sapiens
  MAP TO CHR3.1; EXPRESSED IN FETAL LIVER, SIGNAL = 0.67; EXPRESSED IN HELA, SIGNAL = 0.85; EXPRESSED IN BRAIN, SIGNAL = 0.52; EXPRESSED IN ADULT LIVER, SIGNAL =   1; EXPRESSED IN BONE MARROW, SIGNAL = 0.44; NT HIT: gi14768472, EVALUE 2.00e-84; EST_HUMAN HIT: BG118573.1, EVALUE 6.00e-76; SWISSPROT HIT: Q61085, EVALUE 2.00e-08
tcccttctatttcaggtgggagaggtctaccaacagctacacgcagccatgagccaggcgccggtgaaagagaacatcccctactcctgggccagcttagcctgcgtgaaggcccaccactacgcggccctggcccactacttcactgccatcctcctcatcgaccaccagggtaaggc

SEQ ID NO: 15932 - DNA, 307 bp, Homo sapiens
  MAP TO CHR5.1; EXPRESSED IN FETAL LIVER, SIGNAL = 0.83; EXPRESSED IN HELA, SIGNAL = 0.89; EXPRESSED IN BRAIN, SIGNAL = 0.97; EXPRESSED IN HEART, SIGNAL = 0.7; EXPRESSED IN BONE MARROW, SIGNAL = 0.99; NT HIT: gi16171606, EVALUE 0.00e+00; EST_HUMAN HIT: BF984088.1, EVALUE 2.00e-21; SWISSPROT HIT: O29325, EVALUE 3.70e+00
aggtccatggaagaaatctcttgtccattgactatgatcgaaatattcggactgaaaagatctatgatgaccaccggaagttcaccctgaggatcatttatgaccaggtgggccgccccttcctctggctgcccagcagcgggctggcagctgtcaacgtgtcatacttcttcaatgggcgcctggctgggcttcagcgtggggccatgagcgagaggacagacatcgacaagcaaggccgcatcgtgtcccgcatgttcgctgacgggaaagtgtggagctactcctaccttgacaaggtaggtga

SEQ ID NO: 15933 - DNA, 176 bp, Homo sapiens
  MAP TO CHR7.1; EXPRESSED IN BONE MARROW, SIGNAL = 2.8; EXPRESSED IN ADULT LIVER, SIGNAL = 1.9; EXPRESSED IN PLACENTA, SIGNAL = 3.1; EXPRESSED IN HELA, SIGNAL = 3.4; EXPRESSED IN FETAL LIVER, SIGNAL = 2.5; EXPRESSED IN LUNG, SIGNAL =   2; EXPRESSED IN BRAIN, SIGNAL = 3.2; EXPRESSED IN HEART, SIGNAL =   2; SWISSPROT HIT: Q01023, EVALUE 5.70e+00; EST_HUMAN HIT: AL583362.1, EVALUE 3.60e+00
tgagtgaagtaaatgaaatcttgtatgtgaaagagcttggtaattataaaacacctcataaaggtgaggtgtttgggaggataaaagtgacgttctggttcattcaagaattgaaagtaaatgcattaagatattgcacaaaagtgtgagcctctttaaatatgtagaaataggga

SEQ ID NO: 15934 - DNA, 145 bp, Homo sapiens
  MAP TO CHR19.1; EXPRESSED IN HELA, SIGNAL = 1.6; EXPRESSED IN ADULT LIVER, SIGNAL = 2.3; EXPRESSED IN BONE MARROW, SIGNAL = 1.3; EXPRESSED IN HEART, SIGNAL = 0.97; EXPRESSED IN FETAL LIVER, SIGNAL = 1.2; EXPRESSED IN LUNG, SIGNAL = 1.4; EXPRESSED IN PLACENTA, SIGNAL = 1.7; EXPRESSED IN BRAIN, SIGNAL = 1.1; SWISSPROT HIT: O96013, EVALUE 8.00e-21; NT HIT: gi15308740, EVALUE 3.00e-76; EST_HUMAN HIT: BG766635.1, EVALUE 5.00e-76
ctgaagggcttcctggaccgcctgctggtgcgagaccctgcccagcgggccacggcagccgagctgctgaagcacccattcctggccaaggcagggccgcctgccagcatcgtgcccctcatgcgccagaaccgcaccagatgag

SEQ ID NO: 15935 - DNA, 198 bp, Homo sapiens
  MAP TO CHR17.1; EXPRESSED IN ADULT LIVER, SIGNAL = 0.61; EXPRESSED IN BONE MARROW, SIGNAL = 0.83; EXPRESSED IN HELA, SIGNAL = 1.1; EXPRESSED IN BRAIN, SIGNAL = 0.9; EXPRESSED IN LUNG, SIGNAL =   1; EXPRESSED IN HEART, SIGNAL = 1.1; SWISSPROT HIT: P15596, EVALUE 9.50e+00; NT HIT: J05245.1, EVALUE 1.80e-01
caccatctgcttagtgaggccctctgtttaaattctctacttgtctcggcttccacaaaataattagcatctattcgttcctagagcttgcttggcgacattagtcattgtaggagctttcagtgcggcttgcagaaatttccatttgatgcaaagttgaaaatggcttaagtgggactccacgggccccacttactt

SEQ ID NO: 15936 - DNA, 188 bp, Homo sapiens
  MAP TO CHR5.1; EXPRESSED IN FETAL LIVER, SIGNAL = 1.2; EXPRESSED IN LUNG, SIGNAL = 1.6; EXPRESSED IN HELA, SIGNAL = 1.8; EXPRESSED IN BRAIN, SIGNAL = 1.3; EXPRESSED IN HEART, SIGNAL = 1.3; EXPRESSED IN BONE MARROW, SIGNAL = 0.98; EXPRESSED IN ADULT LIVER, SIGNAL = 1.4; EST_HUMAN HIT: BF852890.1, EVALUE 2.00e-88; SWISSPROT HIT: O15379, EVALUE 1.00e-08; NT HIT: AF059650.1, EVALUE 1.00e-102
tgggtggcccctttcctgggctacatgctcgctcaaccccctttttccttttgttccctgtctccccatccccttggggtgccaggtgcccatctttggccctctcccaggttacaagcaccttttccagccggttatcaaccaggtagtggacttctaccaacccacgtgcattgtgctccaggtaa

SEQ ID NO: 15937 - DNA, 276 bp, Homo sapiens
  MAP TO CHR19.1; EXPRESSED IN BRAIN, SIGNAL = 1.3; EXPRESSED IN HEART, SIGNAL = 1.4; EXPRESSED IN BONE MARROW, SIGNAL = 1.5; EXPRESSED IN ADULT LIVER, SIGNAL = 1.6; EXPRESSED IN PLACENTA, SIGNAL = 1.8; EXPRESSED IN FETAL LIVER, SIGNAL = 1.2; EXPRESSED IN LUNG, SIGNAL = 1.4; EST_HUMAN HIT: AA478179.1, EVALUE 0.00e+00; SWISSPROT HIT: Q62101, EVALUE 8.00e-43; NT HIT: gi14758801, EVALUE 0.00e+00
tgcaggtgaagctgtgtgactttggctttgctcgcatcatcggcgagaagtcgttccgccgctcagtggtgggcacgccggcctacctggcacccgaggtgctgctcaaccagggctacaaccgctcgctggacatgtggtcagtgggcgtgatcatgtacgtcagcctcagcggcaccttccctttcaacgaggatgaggacatcaatgaccagatccagaacgccgccttcatgtacccggccagcccctggagccacatctcagctggaggtg

SEQ ID NO: 15938 - DNA, 434 bp, Homo sapiens
  MAP TO CHR19.1; EXPRESSED IN HEART, SIGNAL = 0.65; EXPRESSED IN BONE MARROW, SIGNAL = 0.84; EXPRESSED IN FETAL LIVER, SIGNAL = 1.1; EXPRESSED IN LUNG, SIGNAL = 0.66; EXPRESSED IN BRAIN, SIGNAL = 1.1; NT HIT: gi14768832, EVALUE 0.00e+00; EST_HUMAN HIT: BE081747.1, EVALUE 7.00e-87; SWISSPROT HIT: P52742, EVALUE 9.00e-25
tggattttctggtgctcaatcagggcagaactatgaaggaaggtttccttacacaccctgcactcgtagaatttgtctttgccatatattttctgaagctcactaaaggtggggctaggcatgaaggcttcctcacattcctgattcttacattccacaagataacctctagcatgaatcttccgatgttcagccaaggcggcactcttattgaaggtctctccacagtccttacattcaaaacgtttccctccaacctgacttttctgaacttcactgacagccacactgtggataaaggactcaccatactcatagaggttctctctagtatgcatgatctggtgctcaacaaattctgagatgacactgaacgacctcccacactcatcacatacatatggcattgccccaaaatcaattggctgtgactc

SEQ ID NO: 15939 - DNA, 272 bp, Homo sapiens
  MAP TO CHR12.1; EXPRESSED IN LUNG, SIGNAL = 0.99; EXPRESSED IN BRAIN, SIGNAL = 1.3; EXPRESSED IN ADULT LIVER, SIGNAL = 1.7; EXPRESSED IN BONE MARROW, SIGNAL = 1.5; EXPRESSED IN FETAL LIVER, SIGNAL = 1.4; EXPRESSED IN PLACENTA, SIGNAL =   2; EXPRESSED IN HELA, SIGNAL = 1.6; EXPRESSED IN HEART, SIGNAL = 1.3; NT HIT: gi14761659, EVALUE 0.00e+00; EST_HUMAN HIT: BF739070.1, EVALUE 1.00e-100; SWISSPROT HIT: P18431, EVALUE 1.30e-02
ggaggaaggggctccatcaggatgggagaagccggccccactggggagcctggagatgggggaaggatcataggggggacaggctcagggtcagtgcagttagcttctggtggagggctgatgggtgtctccaggatgggggcagccaacggtgactcagggtcactgtcccctttggcaccaaaggggtactctaactcccccaaaggagacagggccggtggggccgcagctgtgatgatgggtgagagtggaggaggaaggggatctgg

SEQ ID NO: 15940 - DNA, 161 bp, Homo sapiens
  MAP TO CHR11.1; EXPRESSED IN BRAIN, SIGNAL = 1.1; EXPRESSED IN HEART, SIGNAL = 0.69; EXPRESSED IN BONE MARROW, SIGNAL = 1.2; EXPRESSED IN FETAL LIVER, SIGNAL = 1.1; EXPRESSED IN HELA, SIGNAL = 1.4; EXPRESSED IN LUNG, SIGNAL = 0.83; NT HIT: gi14767133, EVALUE 2.00e-81; EST_HUMAN HIT: BI823322.1, EVALUE 1.00e-82; SWISSPROT HIT: P52276, EVALUE 6.00e-13
aaaaacaggtatctggaccttcgtcgatttggatctgtgccacatggaggttttgggatgggatttgaacgctacctgcagtgcatcttgggtgttgacaatatcaaagatgttatccctttcccaaggtttcctcattcatgccttttatagctggaaga

SEQ ID NO: 15941 - DNA, 186 bp, Homo sapiens
  MAP TO CHR5.1; EXPRESSED IN LUNG, SIGNAL = 2.1; EXPRESSED IN HELA, SIGNAL = 1.5; EXPRESSED IN BRAIN, SIGNAL = 2.7; EXPRESSED IN HEART, SIGNAL = 1.6; EXPRESSED IN ADULT LIVER, SIGNAL = 1.4; EXPRESSED IN BONE MARROW, SIGNAL = 3.3; EXPRESSED IN PLACENTA, SIGNAL = 2.3; EXPRESSED IN FETAL LIVER, SIGNAL = 2.2; NT HIT: gi15295799, EVALUE 1.00e-100; EST_HUMAN HIT: AU131635.1, EVALUE 1.00e-100; SWISSPROT HIT: Q9Y5E4, EVALUE 3.00e-28
agtggccagttcccccaccccaagacccaggtcttttgccaggttggccacagaatagccactttctgtttcttctggtatggaatacctaactgcctcagagccagcctcccacaaaagcaacaatatagcaagaaacataacttgccttttctgtggcgtttttgctagcgcagtctccattgt

SEQ ID NO: 15942 - DNA, 229 bp, Homo sapiens
  MAP TO CHR17.1; EXPRESSED IN HEART, SIGNAL = 0.69; EXPRESSED IN ADULT LIVER, SIGNAL = 1.1; EXPRESSED IN FETAL LIVER, SIGNAL = 0.99; EXPRESSED IN LUNG, SIGNAL = 0.62; EXPRESSED IN HELA, SIGNAL = 1.2; EXPRESSED IN BRAIN, SIGNAL = 0.86; SWISSPROT HIT: P45018, EVALUE 8.10e-01; NT HIT: AP002995.2, EVALUE 5.30e-02; EST_HUMAN HIT: BI520366.1, EVALUE 1.00e-125
caggttgtgtaccagccgcaggaggcggagccgaccacgtccaagtcagagaagctggacccgcggcctttcctgagggtgctggagtccattgaccacaagtacccgcctgaggagcggggtgacctcctcgtcttcctcagcggcatggcggagatcagcgccgtgctggaggctgcccagacctatgccagccacacccagcgctgggtggtactgccactgcaca

SEQ ID NO: 15943 - DNA, 234 bp, Homo sapiens
  MAP TO CHR14.1; EXPRESSED IN HEART, SIGNAL = 0.77; EXPRESSED IN HELA, SIGNAL = 0.83; EXPRESSED IN FETAL LIVER, SIGNAL = 0.58; EXPRESSED IN BRAIN, SIGNAL = 0.92; EXPRESSED IN LUNG, SIGNAL = 0.73; SWISSPROT HIT: O53320, EVALUE 2.40e-01; EST_HUMAN HIT: BI791809.1, EVALUE 1.00e-127; NT HIT: gi14747105, EVALUE 1.00e-128
ttgcagctgcccatgatggggggagctttcatggactcgcccaacgaggacttcagcaccgagtactccctgtttaactcctctgccaatgtccacgcggctgccaatggccagggccagccggaagatcctcctcggtcctccaacgacgccgtcttgctatggattgccatcatagctacgctggggaacatcgtggtggtgggcgtggtgtatgccttcaccttctgagga

SEQ ID NO: 15944 - DNA, 153 bp, Homo sapiens
  MAP TO CHR7.1; EXPRESSED IN HELA, SIGNAL = 0.86; EXPRESSED IN BRAIN, SIGNAL = 0.99; EXPRESSED IN BONE MARROW, SIGNAL = 1.1; EXPRESSED IN HEART, SIGNAL = 0.54; EXPRESSED IN FETAL LIVER, SIGNAL = 0.82; NT HIT: gi14786939, EVALUE 5.20e-01; SWISSPROT HIT: P36719, EVALUE 5.80e+00
tcccattaattttgtcctggcttaggtttgttttccttctggtaatacaagtcttgaataaattcatttgttgcttatgggcaaaagcaaatctaacacagccaaagacatcttcagaccttaagaatgttggttcacctgtaaaatttgcat

SEQ ID NO: 15945 - DNA, 242 bp, Homo sapiens
  MAP TO CHR4.1; EXPRESSED IN ADULT LIVER, SIGNAL = 2.7; EXPRESSED IN BONE MARROW, SIGNAL = 2.2; EXPRESSED IN PLACENTA, SIGNAL =   2; EXPRESSED IN FETAL LIVER, SIGNAL = 2.7; EXPRESSED IN LUNG, SIGNAL = 3.1; EXPRESSED IN HELA, SIGNAL = 1.7; EXPRESSED IN BRAIN, SIGNAL = 2.2; EXPRESSED IN HEART, SIGNAL =   3; NT HIT: U16289.1, EVALUE 0.00e+00; EST_HUMAN HIT: BF672864.1, EVALUE 6.00e-92; SWISSPROT HIT: P40394, EVALUE 5.00e-39
ttcttaccttgccagttttaacagcagcgccatatccagtggaaaacccacagccaattaaacagactttctcaggaggagctgcatcatcaatcttagcaacagaagattcatccaccactgtgtactcggtaaatgtactggtgttcatgaagtggtggactggtttgcccttgcatgtaaatctggtggtgccatcagccagtactccacgaccagtaatactgtttgatacatcaaat

SEQ ID NO: 15946 - DNA, 215 bp, Homo sapiens
  MAP TO CHR11.1; EXPRESSED IN FETAL LIVER, SIGNAL = 0.88; EXPRESSED IN HELA, SIGNAL = 0.86; EXPRESSED IN BRAIN, SIGNAL = 0.96; EXPRESSED IN LUNG, SIGNAL = 0.57; EXPRESSED IN HEART, SIGNAL = 0.93; EXPRESSED IN ADULT LIVER, SIGNAL = 1.2; EST_HUMAN HIT: BF957112.1, EVALUE 1.00e-92; NT HIT: AB040926.1, EVALUE 9.00e-13; SWISSPROT HIT: Q07441, EVALUE 3.80e+00
atttttcttttatctttgagaggaaggaaccacttactggttgatcaatgttttcttctttaatcacagatgatgtacagacaccagcataatttgctgatgtaatttccttatccaaggcagtgctatgaaaggccacaagtgcttttatatttttcatgtaatgccacttttgattggcagctccattgttgtacggcttatatttctgaaaa

SEQ ID NO: 15947 - DNA, 176 bp, Homo sapiens
  MAP TO CHR17.1; EXPRESSED IN ADULT LIVER, SIGNAL = 2.1; EXPRESSED IN LUNG, SIGNAL = 2.5; EXPRESSED IN HEART, SIGNAL = 1.4; EXPRESSED IN PLACENTA, SIGNAL = 4.1; EXPRESSED IN FETAL LIVER, SIGNAL = 3.5; EXPRESSED IN BRAIN, SIGNAL = 3.3; EXPRESSED IN HELA, SIGNAL = 4.7; EXPRESSED IN BONE MARROW, SIGNAL = 3.6; EST_HUMAN HIT: BE295052.1, EVALUE 2.00e-82; NT HIT: gi16164507, EVALUE 1.00e-82; SWISSPROT HIT: P52631, EVALUE 6.00e-21
aagaaggacttaccaatcttgactctcaatccaaggggccagaaactgccgcagctccattgggaagctgtcactgtagagctgatggagctgctccaggtaccgtgtgtcaagctgctgtagctgattccattgggccatcctgctaaaatcaggggtcccaactgtaaaccaaa

SEQ ID NO: 15948 - DNA, 127 bp, Homo sapiens
  MAP TO CHR5.1; EXPRESSED IN BONE MARROW, SIGNAL = 1.4; EXPRESSED IN ADULT LIVER, SIGNAL = 2.1; EXPRESSED IN HEART, SIGNAL = 0.98; EXPRESSED IN FETAL LIVER, SIGNAL = 1.1; EXPRESSED IN LUNG, SIGNAL = 0.85; EXPRESSED IN PLACENTA, SIGNAL = 1.5; EXPRESSED IN BRAIN, SIGNAL = 1.7; EXPRESSED IN HELA, SIGNAL = 1.2; EST_HUMAN HIT: BF946856.1, EVALUE 5.00e-14; NT HIT: U48474.1, EVALUE 2.00e-65; SWISSPROT HIT: P16960, EVALUE 2.00e-16
cacaggaacatcatgaacaacaaagtcttctaccaacacccgaacctgatgagggcgctgggcatgcacgagacggtcatggaggtcatggtcaacgtcctcgggggcggcgagtccaaggtgaggg

SEQ ID NO: 15949 - DNA, 497 bp, Homo sapiens
  MAP TO CHR12.1; EXPRESSED IN BONE MARROW, SIGNAL = 0.95; EXPRESSED IN PLACENTA, SIGNAL = 1.2; EXPRESSED IN FETAL LIVER, SIGNAL =   1; EXPRESSED IN LUNG, SIGNAL = 0.96; EXPRESSED IN HELA, SIGNAL = 1.3; EXPRESSED IN BRAIN, SIGNAL = 0.79; EXPRESSED IN HEART, SIGNAL = 0.97; SWISSPROT HIT: O08753, EVALUE 8.00e-02; EST_HUMAN HIT: AL046060.1, EVALUE 0.00e+00; NT HIT: gi6912453, EVALUE 0.00e+00
cttgagccaagatctcatccaagaggcttggaaccaaggaggggggtgttttatgattcagggaagcttggagagcttgggtgaggcgctcagcggcttcaggacagcccttcagcacgacctgcagcagatccagaccctgggcttggtggcccatggccagcctcacccctgccgtgaccaatacccagcgcagacagactgctgtgaggacagggctggcgcagagcgagcagtcacaggtgggtgaatgggacaggaagttgggtatgggctggggcttggttttcaagactggggaggagtttgtagaaggtgctatggggccaggctccttggcacagtggccaccagctctagagcagggcctcttaggaagagctcctcctctgggagctgtggaggacaggggacctgggcctgctgcttccccttctgcaggtggaccttcttcacagagtccaggtgctgagtcaccccaccaaactctggggaga

SEQ ID NO: 15950 - DNA, 485 bp, Homo sapiens
  MAP TO CHR10.1; EXPRESSED IN HEART, SIGNAL = 1.2; EXPRESSED IN BONE MARROW, SIGNAL = 1.2; EXPRESSED IN ADULT LIVER, SIGNAL = 1.1; EXPRESSED IN PLACENTA, SIGNAL = 2.2; EXPRESSED IN FETAL LIVER, SIGNAL = 1.2; EXPRESSED IN BRAIN, SIGNAL = 1.2; NT HIT: AL163209.2, EVALUE 0.00e+00; SWISSPROT HIT: P31630, EVALUE 3.40e+00; EST_HUMAN HIT: BE463763.1, EVALUE 3.00e-89
ggctctgccatcttctgcagataactactctccttttgagagacagctcttggtctgttactgggctttggtggaaactgaacatttgcccataggtcaccaagtcaccatgtgacctgaactgcctatcatgaactgggtgctttctgacccatctagccataaagtgggtcatgcacagcaacattttatcatcaaatggaagtggtatatatgtgatcaggttcaagcaggtcttgaaggcacaagttacatgaggaagtggctcaaatgcccatagtttccactcctgccaccctgccttctccagcctgcaccaatggcctcatggggagttccctatgatcagttgacagaggaagagaagaccaaggcctggttcagagatggctctgcatgatatgcaggcaccacccaaaagtggacagctgcagcactacagcccctttctaggacatacctgaaggacagcggtgaagggaaat

SEQ ID NO: 15951 - DNA, 202 bp, Homo sapiens
  MAP TO CHR7.1; EXPRESSED IN LUNG, SIGNAL = 0.76; EXPRESSED IN HELA, SIGNAL = 0.43; EXPRESSED IN BRAIN, SIGNAL = 0.81; EXPRESSED IN BONE MARROW, SIGNAL = 0.97; EST_HUMAN HIT: BI915528.1, EVALUE 3.00e-81; NT HIT: D90322.1, EVALUE 1.00e-110; SWISSPROT HIT: Q08048, EVALUE 7.00e-26
attcaggtttatttaccttctgaacactgaggaatgtcacagacttcgtagcgtacctctggattgcttgtgaaacaccagggtcccccttcttcccctcgaggatttcgacagtagttttcctgtaggtctttaccccgatagctcgaaggcaaaaagctagttttaaaatgataatcattacagtataagagcatgcaac

SEQ ID NO: 15952 - DNA, 118 bp, Homo sapiens
  MAP TO CHR9.1; EXPRESSED IN BRAIN, SIGNAL = 0.78; EXPRESSED IN BONE MARROW, SIGNAL = 0.9; EXPRESSED IN FETAL LIVER, SIGNAL = 0.82; EXPRESSED IN HELA, SIGNAL = 0.79; EST_HUMAN HIT: BF940723.1, EVALUE 3.00e-58; NT HIT: gi11429600, EVALUE 2.00e-58; SWISSPROT HIT: P52735, EVALUE 2.00e-17
tgtgtttgaagaacatacgcaccttcctgaaagtctgccacgataaatttggattaaggaacagcgagctgtttgacccctttgacctcttcgatgtgcgagactttggaaaggtgag

SEQ ID NO: 15953 - DNA, 172 bp, Homo sapiens
  MAP TO CHR5.1; EXPRESSED IN HELA, SIGNAL = 2.5; EXPRESSED IN BRAIN, SIGNAL = 2.2; EXPRESSED IN HEART, SIGNAL = 1.7; EXPRESSED IN BONE MARROW, SIGNAL = 2.3; EXPRESSED IN ADULT LIVER, SIGNAL = 1.7; EXPRESSED IN PLACENTA, SIGNAL =   2; EXPRESSED IN FETAL LIVER, SIGNAL = 2.3; EXPRESSED IN LUNG, SIGNAL = 2.3; SWISSPROT HIT: Q9Z0S8, EVALUE 6.00e-04; EST_HUMAN HIT: AI434423.1, EVALUE 1.00e-24; NT HIT: gi15295718, EVALUE 2.00e-87
gccttacctgcagtctgtattccatgcggttgaggatgactgctgtgatctgttggtccatgaagatgaggatagacagcagcagggcaggcagggcagctgccacactccaccaccaggggttggctccaaaaggtgacaccagccagccacgcccagggagtgtgggctg

SEQ ID NO: 15954 - DNA, 206 bp, Homo sapiens
  MAP TO CHR4.1; EXPRESSED IN BRAIN, SIGNAL = 0.45; EXPRESSED IN HELA, SIGNAL = 0.45; EXPRESSED IN BONE MARROW, SIGNAL = 0.49; EXPRESSED IN HEART, SIGNAL = 0.79; EXPRESSED IN ADULT LIVER, SIGNAL = 0.39; EXPRESSED IN FETAL LIVER, SIGNAL = 0.6; EXPRESSED IN LUNG, SIGNAL = 0.77; SWISSPROT HIT: P96463, EVALUE 5.50e+00; NT HIT: gi15893298, EVALUE 1.80e-01
tcatctcccttgttttcttggaaaaggtcaaagccatcaagacgacatgctcagccagagtcagggagagtcatcatttcacaaccgtgaagtggaactcacacagcaaatgaggctaatcattcagcaagtacaaggaaaagagattatgagatcataattttctcaccaattgagaatcactgtgcataaaaataggaattact

SEQ ID NO: 15955 - DNA, 171 bp, Homo sapiens
  MAP TO CHR11.1; EXPRESSED IN PLACENTA, SIGNAL = 4.2; EXPRESSED IN FETAL LIVER, SIGNAL = 2.2; EXPRESSED IN BRAIN, SIGNAL = 2.2; EXPRESSED IN HEART, SIGNAL = 1.5; EXPRESSED IN BONE MARROW, SIGNAL = 2.3; EXPRESSED IN ADULT LIVER, SIGNAL = 1.4; SWISSPROT HIT: P11150, EVALUE 2.50e+00; EST_HUMAN HIT: BG752843.1, EVALUE 1.00e-80; NT HIT: gi14783739, EVALUE 6.00e-81
tctggccctggctcactgcggtcgtgcgtgaaggtggtccagtcctcctgggagtcccgctgtctccgcagcagcaccagccgcccaccctccacatccacgctcagcgtgaacttctgtgacttcccaatcttggtcaggtcacccagggtcacatctagcttcacctgt

SEQ ID NO: 15956 - DNA, 171 bp, Homo sapiens
  MAP TO CHR19.1; EXPRESSED IN ADULT LIVER, SIGNAL =   3; EXPRESSED IN HEART, SIGNAL = 2.4; EXPRESSED IN FETAL LIVER, SIGNAL = 1.6; EXPRESSED IN LUNG, SIGNAL = 1.7; EXPRESSED IN PLACENTA, SIGNAL = 1.3; EXPRESSED IN HELA, SIGNAL = 1.4; EXPRESSED IN BRAIN, SIGNAL = 1.5; EXPRESSED IN BONE MARROW, SIGNAL = 1.6; NT HIT: S38320.1, EVALUE 1.00e-91; SWISSPROT HIT: P12694, EVALUE 1.00e-27; EST_HUMAN HIT: BE785727.1, EVALUE 3.00e-87
aggtgtgctgatgtatcgggactaccccctggaactattcatggcccagtgctatggcaacatcagtgacttgggcaaggggcgccagatgcctgtccactacggctgcaaggaacgccacttcgtcactatctcctctccactggccacgcagatccctcagggtgagga

SEQ ID NO: 15957 - DNA, 322 bp, Homo sapiens
  MAP TO CHR6.1; EXPRESSED IN ADULT LIVER, SIGNAL = 1.6; EXPRESSED IN BONE MARROW, SIGNAL = 0.98; EXPRESSED IN FETAL LIVER, SIGNAL =   1; EXPRESSED IN HELA, SIGNAL = 1.4; EXPRESSED IN BRAIN, SIGNAL = 0.81; EXPRESSED IN LUNG, SIGNAL =   1; EXPRESSED IN HEART, SIGNAL = 1.2; NT HIT: gi16174351, EVALUE 0.00e+00; SWISSPROT HIT: P18892, EVALUE 6.00e-33; EST_HUMAN HIT: BI754184.1, EVALUE 0.00e+00
cagctgatgtggtcctggatccagacaccgctcatcccgagctcttcctgtcagaggaccggagaagtgtgaggcggggcccctacaggcagagagtgcctgacaacccagagagattcgacagtcagccttgtgtcctgggatgggagagcttcgcctcagggaaacattactgggaggtggaggtggaaaacgtgatggtgtggactgtgggggtctgcagacacagtgttgagaggaaaggggaggtcctgctgattcctcagaatggcttctggaccctggagatgtttggaaaccaataccgggccctgtcctcccc

SEQ ID NO: 15958 - DNA, 440 bp, Homo sapiens
  MAP TO CHR11.1; EXPRESSED IN BONE MARROW, SIGNAL = 1.5; EXPRESSED IN ADULT LIVER, SIGNAL =   1; EXPRESSED IN PLACENTA, SIGNAL = 1.5; EXPRESSED IN HELA, SIGNAL = 1.4; EXPRESSED IN FETAL LIVER, SIGNAL = 1.6; EXPRESSED IN BRAIN, SIGNAL = 1.4; EXPRESSED IN LUNG, SIGNAL = 0.63; NT HIT: gi14783788, EVALUE 6.50e+00; SWISSPROT HIT: P28684, EVALUE 9.90e-01; EST_HUMAN HIT: BI836250.1, EVALUE 0.00e+00
tcagttggccttggtcagtctgtagtgttccacaggctcccggctttcgacagctgacaaggcgacgagcatctgggccgcatagtaggtggacatgataagcgcccgagagtagggcacaggaaaacagaatttgttgagggcgatggtcaggtctgagatgataaagaagagtgcaccactgccagctgccagctctgtccagcgccagtctgccccggccagccgcagccctgccatagctcgccagcccatgaagccgataagggccacatagacccccaccaggtaggtgaaggcacctgagaggcatgggtagaggagggcatagcacaggcccgacagcgctgccatcaccagacctgtccgaagagccagtggctgcatgccaaaggccgaggcgtagaacatgtgggtcacagcaaacatcagcagacctg

SEQ ID NO: 15959 - DNA, 215 bp, Homo sapiens
  MAP TO CHR12.1; EXPRESSED IN PLACENTA, SIGNAL =   2; EXPRESSED IN FETAL LIVER, SIGNAL = 1.7; EXPRESSED IN LUNG, SIGNAL = 2.3; EXPRESSED IN HELA, SIGNAL = 1.9; EXPRESSED IN BRAIN, SIGNAL = 2.6; EXPRESSED IN HEART, SIGNAL = 1.5; EXPRESSED IN BONE MARROW, SIGNAL = 1.6; EST_HUMAN HIT: BI824676.1, EVALUE 1.00e-109; NT HIT: X82818.1, EVALUE 1.00e-118; SWISSPROT HIT: P29350, EVALUE 2.00e-34
tggtgccctgcagggtgggggatcaggtgacccatattcggatccagaactcaggggatttctatgacctgtatggaggggagaagtttgcgactctgacagagctggtggagtactacactcagcagcagggtgtcctgcaggaccgcgacggcaccatcatccacctcaagtacccgctgaactgctccgatcccactagtgagaggtgaggg

SEQ ID NO: 15960 - DNA, 136 bp, Homo sapiens
  MAP TO CHR17.1; EXPRESSED IN LUNG, SIGNAL = 0.76; EXPRESSED IN HELA, SIGNAL = 0.88; EXPRESSED IN BRAIN, SIGNAL = 0.61; EXPRESSED IN HEART, SIGNAL = 0.88; EXPRESSED IN ADULT LIVER, SIGNAL = 1.3; EXPRESSED IN BONE MARROW, SIGNAL = 0.6; EST_HUMAN HIT: BF726685.1, EVALUE 1.00e-70; NT HIT: gi14773945, EVALUE 7.00e-71; SWISSPROT HIT: P52867, EVALUE 4.50e+00
tacctgacccatagcgcacgtcgtgtgagtgcagtcggacgttgtggcgcgtattgagtagcttcaccacggagccgcaagtaacgacacccaggctggacgctcccacagcgctccacaaaccccccaacaacag

SEQ ID NO: 15961 - DNA, 142 bp, Homo sapiens
  MAP TO CHR2.1; EXPRESSED IN BONE MARROW, SIGNAL = 0.55; EXPRESSED IN FETAL LIVER, SIGNAL = 0.64; EXPRESSED IN LUNG, SIGNAL = 0.84; EXPRESSED IN HELA, SIGNAL = 0.53; EXPRESSED IN BRAIN, SIGNAL = 0.41; EXPRESSED IN HEART, SIGNAL = 0.88; SWISSPROT HIT: P22064, EVALUE 4.00e-23; EST_HUMAN HIT: AU137584.1, EVALUE 1.00e-67; NT HIT: gi4557730, EVALUE 7.00e-68
tagatgcagatgaatgcctactttttggacaagaaatctgcaaaaatggtttctgtttgaacactcggcctgggtatgaatgctactgtaagcaagggacgtactatgatcctgtgaaactgcagtgctttggtaagcttta

SEQ ID NO: 15962 - DNA, 203 bp, Homo sapiens
  MAP TO CHR20.1; EXPRESSED IN BONE MARROW, SIGNAL = 0.55; EXPRESSED IN BRAIN, SIGNAL = 0.57; EXPRESSED IN HEART, SIGNAL = 0.65; SWISSPROT HIT: P29994, EVALUE 1.10e+00; EST_HUMAN HIT: BE967765.1, EVALUE 1.10e+00
atttcctttggagggcaaaggatgttgaaggctctttggtcttcagggagcctcagccaatgttgcaaacccctgcgatgagtcctacacaaaactcatgtcagcctgttcccaggaggatgggctggctgacaggcagccaagggtgagatgccgtgggaaggagatcctgactgagggctggaggaatgtgggaagcacca

SEQ ID NO: 15963 - DNA, 425 bp, Homo sapiens
  MAP TO CHR17.1; EXPRESSED IN LUNG, SIGNAL = 0.79; EXPRESSED IN BRAIN, SIGNAL = 0.82; EXPRESSED IN PLACENTA, SIGNAL = 1.3; EXPRESSED IN FETAL LIVER, SIGNAL = 0.76; EXPRESSED IN HELA, SIGNAL = 1.9; EXPRESSED IN HEART, SIGNAL = 0.61; EXPRESSED IN BONE MARROW, SIGNAL = 0.85; EXPRESSED IN ADULT LIVER, SIGNAL = 0.98; SWISSPROT HIT: Q14258, EVALUE 4.00e-85; EST_HUMAN HIT: AW499619.1, EVALUE 1.00e-48; NT HIT: gi15208652, EVALUE 0.00e+00
ggagcagatggagagtgtggcaccagcagaaaatacccagaaagccgggtacaaagcctcagtaaagtccaccctgaacttatacatcaggtggaccttgtcggcaacagcgaagaagatgacaaagccgtggtcacagttgagaagcacgcccacccgcgtggccttggtggagggcagggttttctccacgttattgtgccaggcagagatcttggtgttgaaccactccacgcaccaggaggcgctgttgcggccgagcctgctttctgggccctgccggttcatgcttccgtagcagatgcctaccccacagaagttgttcttctgcagctccacctcccagtagtggatccccttcttgtagcagtgcaggcccagcacctgagagcagtatgtgaacctctggggatgcggccggtagt

SEQ ID NO: 15964 - DNA, 184 bp, Homo sapiens
  MAP TO CHR17.1; EXPRESSED IN FETAL LIVER, SIGNAL = 0.84; EXPRESSED IN LUNG, SIGNAL = 0.81; EXPRESSED IN BRAIN, SIGNAL = 0.64; EXPRESSED IN HEART, SIGNAL = 0.71; EXPRESSED IN BONE MARROW, SIGNAL = 0.78; NT HIT: gi14773965, EVALUE 1.00e-94; SWISSPROT HIT: P51534, EVALUE 6.50e-01; EST_HUMAN HIT: BG746922.1, EVALUE 2.00e-94
cttcttaccccactgtgagatgtgtcagtctgtgtgctactgtcctgggtttctgggtgagggacagccagctggctcttccagtcccgaagctggcgggagagaacctccagaatgacaagagagctcagcaggttatcttccaagtcatgtcgagacaaggcagtcagatctggaggccggc

SEQ ID NO: 15965 - DNA, 130 bp, Homo sapiens
  MAP TO CHR4.1; EXPRESSED IN HEART, SIGNAL = 8.4; EXPRESSED IN BONE MARROW, SIGNAL =  20; EXPRESSED IN ADULT LIVER, SIGNAL =  11; EXPRESSED IN FETAL LIVER, SIGNAL =  15; EXPRESSED IN LUNG, SIGNAL = 8.3; EXPRESSED IN BRAIN, SIGNAL =  15; EXPRESSED IN PLACENTA, SIGNAL = 8.2; EXPRESSED IN HELA, SIGNAL = 7.3; EST_HUMAN HIT: AI289485.1, EVALUE 6.40e-01; SWISSPROT HIT: P36774, EVALUE 6.00e+00
attcaagggttgagctactaaattggtaataataggtcctgaacaaaatctaatgatacaacccagtttctctgcccattttctagatttcccctttaggccttcagcagtgggaattaattttgttttt

SEQ ID NO: 15966 - DNA, 186 bp, Homo sapiens
  MAP TO CHRX.1; EXPRESSED IN HELA, SIGNAL = 0.78; EXPRESSED IN BRAIN, SIGNAL = 0.78; EXPRESSED IN HEART, SIGNAL = 0.8; EXPRESSED IN ADULT LIVER, SIGNAL = 1.2; EXPRESSED IN FETAL LIVER, SIGNAL = 0.84; EST_HUMAN HIT: BE613247.1, EVALUE 9.60e-01; NT HIT: AF355461.1, EVALUE 2.60e+00; SWISSPROT HIT: P45699, EVALUE 7.40e+00
tgctgactgctaactgatgctggtgttgcctagtagcctgggcctatacacactgtcagttctgtcaacagaggctgcgaaaattctaccagagattatgtctgcacaaaaataagcctctggcataaattgcgatagctgccactagagaattcacctgcaggaaagggacctcaggcatattac

SEQ ID NO: 15967 - DNA, 207 bp, Homo sapiens
  MAP TO AC068936.2; EXPRESSED IN PLACENTA, SIGNAL = 2.4; EXPRESSED IN FETAL LIVER, SIGNAL = 3.2; EXPRESSED IN BRAIN, SIGNAL = 2.1; EXPRESSED IN LUNG, SIGNAL = 1.7; EXPRESSED IN BONE MARROW, SIGNAL = 2.6; EXPRESSED IN HEART, SIGNAL = 2.1; EXPRESSED IN ADULT LIVER, SIGNAL = 2.5; SWISSPROT HIT: P34369, EVALUE 7.00e-34; EST_HUMAN HIT: BG910731.1, EVALUE 1.00e-109; NT HIT: AF092565.1, EVALUE 1.00e-109
accttccagggaatgttggctttccagcagcgccaggcttcactgaggtgctgcaggattgtccgggccttgttctgcttgatcccctcaggcatcatgtccagaatatcatgcatcacagctgcccgcagctcaaggtcaaaatgtgactccactcgctgctttgttactgtctttgccaccccctttgagtgtcgacctggaagt

SEQ ID NO: 15968 - DNA, 153 bp, Homo sapiens
  MAP TO CHR7.1; EXPRESSED IN FETAL LIVER, SIGNAL = 3.2; EXPRESSED IN HELA, SIGNAL = 3.5; EXPRESSED IN BRAIN, SIGNAL =   3; EXPRESSED IN LUNG, SIGNAL = 1.5; EXPRESSED IN HEART, SIGNAL = 1.7; EXPRESSED IN BONE MARROW, SIGNAL =   3; EXPRESSED IN ADULT LIVER, SIGNAL = 2.2; EXPRESSED IN PLACENTA, SIGNAL = 3.6; SWISSPROT HIT: P07149, EVALUE 1.00e+01; NT HIT: M86396.1, EVALUE 8.20e+00
aagacgctatcatagtttgtctttgctttatatttccaccttgaggcaaaattttccatttctgccctgtcacaaaacaaacaggatgcaccatggcttaagctagatcacttatgtaacggattccatgctctgccacgttcttgacagtta

SEQ ID NO: 15969 - DNA, 398 bp, Homo sapiens
  MAP TO CHR19.1; EXPRESSED IN PLACENTA, SIGNAL = 3.2; EXPRESSED IN HELA, SIGNAL = 2.5; EXPRESSED IN FETAL LIVER, SIGNAL = 4.3; EXPRESSED IN LUNG, SIGNAL = 4.6; EXPRESSED IN BRAIN, SIGNAL = 4.1; EXPRESSED IN ADULT LIVER, SIGNAL = 6.6; EXPRESSED IN BONE MARROW, SIGNAL = 4.2; EXPRESSED IN HEART, SIGNAL =   5; SWISSPROT HIT: Q60900, EVALUE 1.00e-51; EST_HUMAN HIT: BG683628.1, EVALUE 0.00e+00; NT HIT: gi14759976, EVALUE 0.00e+00
gctcacgccttgtgctgtttgctggtcttgaaggagacctgcagcacgcgctcgcccaggcgatagccgttcaggctggcgatggccatggccgcctcgtcatagttggtcatggtcacgaagccgaaacccttgcacttgttggtggtgaaatcacggatgaccttgacgttggtgactgccccaaaaggcccgaacagctgccacagcacgctctcgtctgcctccggtgacaggttgtacacgaagatgcaccagccggcgcccgccgcgccccccgacaggcccacgcccgccaggccgctcataccatcgatggcgatcggcgagaacctggcgatgagcgacaggggactactttgggggtcacgcgggctctgccctgaccccccgcatgc

SEQ ID NO: 15970 - DNA, 170 bp, Homo sapiens
  MAP TO CHR8.1; EXPRESSED IN FETAL LIVER, SIGNAL = 0.4; EXPRESSED IN BRAIN, SIGNAL = 0.38; EXPRESSED IN LUNG, SIGNAL = 0.68; EXPRESSED IN BONE MARROW, SIGNAL = 0.35; SWISSPROT HIT: Q92636, EVALUE 8.00e-27; EST_HUMAN HIT: BG479036.1, EVALUE 1.00e-89; NT HIT: gi15321510, EVALUE 7.00e-90
acctggggaatctgccatagaagcattataactggaggtctgggacaaacttttaaactttggggtgatccttcgaggatgtggtgtcacaaatagttgttttggtgtctgcccaaattccaagatttgcgtaagcatggctaccttctcatcaggatcctggatgcttt

SEQ ID NO: 15971 - DNA, 314 bp, Homo sapiens
  MAP TO CHR17.1; EXPRESSED IN BRAIN, SIGNAL = 1.3; EXPRESSED IN HEART, SIGNAL = 1.3; EXPRESSED IN BONE MARROW, SIGNAL = 1.1; EXPRESSED IN FETAL LIVER, SIGNAL = 1.2; EXPRESSED IN LUNG, SIGNAL = 1.9; NT HIT: gi14773945, EVALUE 0.00e+00; SWISSPROT HIT: O42933, EVALUE 2.90e+00; EST_HUMAN HIT: BG337314.1, EVALUE 0.00e+00
acagtggctcagagcctctagattcacagctctgcatggtgggcttctgccttcaacaactcactgggcttcatgaagatgccttccatggctttccagtagttgttctgacttggctgggccatgccatgcacctctttttgcccactgataggtcgaccatattgttctcctgtgacagacagcagtacctcagtggaagagtgtttgaaccgcacctcaccatctctcacccagtagggtccattacagagcactgtccagtcatccagataatcaccttcaccttcctcaccaaaagcactcacttccta

SEQ ID NO: 15972 - DNA, 255 bp, Homo sapiens
  MAP TO CHR2.1; EXPRESSED IN BRAIN, SIGNAL = 0.78; EXPRESSED IN LUNG, SIGNAL =   1; EXPRESSED IN BONE MARROW, SIGNAL = 0.92; EXPRESSED IN HELA, SIGNAL = 0.9; NT HIT: gi15297995, EVALUE 0.00e+00; SWISSPROT HIT: P58215, EVALUE 2.00e-45; EST_HUMAN HIT: BG820692.1, EVALUE 6.00e-43
ccctctcacccatggcactcgtgccacacccaggagtggcgcccagccttgggcctgaagtcagctcgtcccaggttgtggatctgggaggagaatcggagcagacgccggtgaccatagggccagttggctgagcgggctgagctggccaggcagttctcttccgcagcacagtacaacatatgcaggggccggtcttcgatgtaggcggtctcctgcaccagtgctgagtgcagcaacagatctgatgcagct

SEQ ID NO: 15973 - DNA, 206 bp, Homo sapiens
  MAP TO CHR19.1; EXPRESSED IN HELA, SIGNAL = 1.1; EXPRESSED IN BRAIN, SIGNAL = 1.2; EXPRESSED IN HEART, SIGNAL =   1; EXPRESSED IN BONE MARROW, SIGNAL = 1.2; EXPRESSED IN LUNG, SIGNAL = 0.85; EST_HUMAN HIT: AI807507.1, EVALUE 1.00e-107; NT HIT: gi6755665, EVALUE 2.00e-13; SWISSPROT HIT: Q9WTV7, EVALUE 5.00e-11
cggtgaagacgtctacctgccagaaggcccaggtccgcaccttcacgtggcacaacgacctgtgtgccatctgcctggatgagtatgaggagggcgaccaactcaagatcctgccctgctcccacacctaccactgcaaatgcattgacccctggttctcccaagccccccggcgctcctgccccgtgtgcaaacagtcggtggcc

SEQ ID NO: 15974 - DNA, 120 bp, Homo sapiens
  MAP TO CHRX.1; EXPRESSED IN FETAL LIVER, SIGNAL = 2.2; EXPRESSED IN LUNG, SIGNAL = 1.3; EXPRESSED IN HELA, SIGNAL = 1.8; EXPRESSED IN BRAIN, SIGNAL = 2.3; EXPRESSED IN ADULT LIVER, SIGNAL = 1.6; EXPRESSED IN BONE MARROW, SIGNAL =   2; EXPRESSED IN HEART, SIGNAL = 1.2; EXPRESSED IN PLACENTA, SIGNAL = 1.4; EST_HUMAN HIT: AA919020.1, EVALUE 7.00e-56; NT HIT: X91817.1, EVALUE 8.00e-58; SWISSPROT HIT: P51854, EVALUE 4.00e-14
ttctgcagatatttttatccgtgtcatcgacctgtttaccattaaacctctggatgtcgccaccatcgtctccagtgcaaaagccacagagggccggatcattacagtggaggatcacta

SEQ ID NO: 15975 - DNA, 180 bp, Homo sapiens
  MAP TO CHR3.1; EXPRESSED IN ADULT LIVER, SIGNAL = 3.7; EXPRESSED IN BONE MARROW, SIGNAL = 4.6; EXPRESSED IN FETAL LIVER, SIGNAL = 3.8; EXPRESSED IN HELA, SIGNAL = 5.1; EXPRESSED IN BRAIN, SIGNAL = 4.6; EXPRESSED IN LUNG, SIGNAL = 1.7; EXPRESSED IN HEART, SIGNAL =   2; SWISSPROT HIT: Q19720, EVALUE 1.10e+00; EST_HUMAN HIT: BI769966.1, EVALUE 4.00e-74; NT HIT: gi14763088, EVALUE 4.00e-79
tacctttctggtttttatactgcctgggtgctgtccagccatagagtccgtctccaggctcctcgtccttcagaacagtgtcatacttggatagagtttctgtggcatagatatcatcatcttcctcttccagggcacctacaccaaaagcctttaaaaaaacaaggtttcaaactgagc

SEQ ID NO: 15976 - DNA, 223 bp, Homo sapiens
  MAP TO CHR7.1; EXPRESSED IN BONE MARROW, SIGNAL = 0.58; EXPRESSED IN FETAL LIVER, SIGNAL = 0.73; EXPRESSED IN LUNG, SIGNAL = 0.59; EXPRESSED IN HELA, SIGNAL = 0.84; EXPRESSED IN BRAIN, SIGNAL = 0.55; EXPRESSED IN HEART, SIGNAL = 0.63; SWISSPROT HIT: Q99835, EVALUE 2.00e-39; EST_HUMAN HIT: BE784306.1, EVALUE 1.00e-113; NT HIT: AF114820.1, EVALUE 1.00e-122
cacagagcactcaccgtgcagccttcagggaagcggtcaggagtgcagcgcaggaagtcaggccagccccgctccctctccacgatggcacaggggcctcgggtggcctggcagagggtacggctgggcagctccacccggtcattctcacacttgggcatgtatacggcacacagcaggggctggatcactgcccagcagcggggggcattccggaggcctg

SEQ ID NO: 15977 - DNA, 204 bp, Homo sapiens
  MAP TO CHR12.1; EXPRESSED IN FETAL LIVER, SIGNAL = 1.4; EXPRESSED IN BRAIN, SIGNAL = 1.6; EXPRESSED IN LUNG, SIGNAL = 0.72; EXPRESSED IN HEART, SIGNAL = 0.75; EXPRESSED IN ADULT LIVER, SIGNAL = 1.4; EXPRESSED IN BONE MARROW, SIGNAL = 1.6; EXPRESSED IN PLACENTA, SIGNAL = 1.7; SWISSPROT HIT: P56399, EVALUE 3.00e-24; EST_HUMAN HIT: BF314139.1, EVALUE 2.00e-82; NT HIT: gi14784165, EVALUE 1.00e-82
tgttccctggctgcccagacctccctaccctgcctctttcccatagaggaattgccggagctctgaaaatcctaatgaagtgttccgcttcttggtggaggaaaagatcaagtgcctggccacagagaaggtgaagtacacccagcgagttgactacatcatgcagctgcctgtgcccatggatgcagcccttaacaaaggtag

SEQ ID NO: 15978 - DNA, 179 bp, Homo sapiens
  MAP TO CHR5.1; EXPRESSED IN HELA, SIGNAL = 1.5; EXPRESSED IN BRAIN, SIGNAL = 1.7; EXPRESSED IN HEART, SIGNAL = 1.7; EXPRESSED IN BONE MARROW, SIGNAL = 1.5; EXPRESSED IN PLACENTA, SIGNAL = 1.5; EXPRESSED IN LUNG, SIGNAL = 1.9; SWISSPROT HIT: P21817, EVALUE 4.00e-30; NT HIT: U48468.1, EVALUE 2.00e-96
cagcctcaagtgtagcaactgctacatggtgtggggcggagactttgtgagtcccgggcagcagggccggatcagccacacggaccttgtcattgggtgcctggtggacttggccactggcttaatgacctttacagccaatggcaaagagagcaacacctttttccaggtgagtccag

SEQ ID NO: 15979 - DNA, 162 bp, Homo sapiens
  MAP TO CHR19.1; EXPRESSED IN PLACENTA, SIGNAL = 1.5; EXPRESSED IN FETAL LIVER, SIGNAL = 0.69; EXPRESSED IN HELA, SIGNAL = 0.71; EXPRESSED IN BRAIN, SIGNAL = 0.95; EXPRESSED IN LUNG, SIGNAL = 0.73; EXPRESSED IN BONE MARROW, SIGNAL = 0.83; EXPRESSED IN ADULT LIVER, SIGNAL = 0.9; NT HIT: AF058887.1, EVALUE 3.00e-86; SWISSPROT HIT: Q61982, EVALUE 3.00e-23; EST_HUMAN HIT: BG004643.1, EVALUE 3.00e-71
ccctgcactcactggggtcacagtcattgatgtcctgatcgcaggaagggccagtgtaccctccatggcaggtgcagctgaaactccctgccaggttggtgcagataccatgagggccacagggtgcggggccagcacactcgtccacatcctgctggcatc

SEQ ID NO: 15980 - DNA, 173 bp, Homo sapiens
  MAP TO CHR1.1; EXPRESSED IN HEART, SIGNAL = 0.77; EXPRESSED IN BONE MARROW, SIGNAL = 0.51; EXPRESSED IN ADULT LIVER, SIGNAL = 0.53; EXPRESSED IN FETAL LIVER, SIGNAL = 0.52; EXPRESSED IN LUNG, SIGNAL = 0.61; EXPRESSED IN BRAIN, SIGNAL = 0.39; NT HIT: gi14754442, EVALUE 9.40e+00; SWISSPROT HIT: P37716, EVALUE 5.70e+00; EST_HUMAN HIT: AW861446.1, EVALUE 8.90e-01
tcctcttctgttttcagttactcctcgttaaaatttcaaacagcatttttatttctgtggttccagattctaatcagacttctgccaatctctaaaaggctgtgcatctcctgttgctggcatgttttcttgactttatctgaattacatgagttatggccatgctgacattt

SEQ ID NO: 15981 - DNA, 191 bp, Homo sapiens
  MAP TO CHR7.1; EXPRESSED IN HELA, SIGNAL = 0.93; EXPRESSED IN BRAIN, SIGNAL = 0.86; EXPRESSED IN LUNG, SIGNAL = 0.99; EXPRESSED IN BONE MARROW, SIGNAL = 0.96; EXPRESSED IN HEART, SIGNAL = 0.91; EXPRESSED IN ADULT LIVER, SIGNAL = 0.51; EST_HUMAN HIT: BF801908.1, EVALUE 2.00e-79; NT HIT: gi14753242, EVALUE 1.00e-79; SWISSPROT HIT: Q15397, EVALUE 9.60e+00
taacacaagtgtgtcctgcttttttatttcagtacctactagaaatgaaaagcttaatcctacccccagaacatatcctgaagagaggagacagtgaagcaatagcatatgcattctttcatcttgcacactggaagagagtggaaggggctttgaatcttttgcattgtacgtgggaaggcagtaagtaa

SEQ ID NO: 15982 - DNA, 292 bp, Homo sapiens
  MAP TO CHR7.1; EXPRESSED IN HEART, SIGNAL = 1.2; EXPRESSED IN HELA, SIGNAL = 1.1; EXPRESSED IN BRAIN, SIGNAL = 0.98; EXPRESSED IN LUNG, SIGNAL =   1; SWISSPROT HIT: O50607, EVALUE 9.80e+00; EST_HUMAN HIT: BF206698.1, EVALUE 2.50e-02; NT HIT: AB058700.1, EVALUE 1.70e-02
aagatctgatgatttaattacatcttaaatcttatggttcaagtgtactttctggagagatttcaaagaaataagaaggacagtttgattttttaaaaggtggtcatagggactgtattgtgaaaagataattaaggagagagacaggagaagtgcttcactgaagaaaaagggacagagtggggattagtgcagagatggagcactctaacagtctaggcagcaggataatgacctccttattggtcttcccgcctcagcctctgtagcctcaattctctcacaggtgtca

SEQ ID NO: 15983 - DNA, 113 bp, Homo sapiens
  MAP TO CHR7.1; EXPRESSED IN FETAL LIVER, SIGNAL = 0.41; EXPRESSED IN BRAIN, SIGNAL = 0.58; EST_HUMAN HIT: AW998028.1, EVALUE 8.50e+00; NT HIT: AF334803.1, EVALUE 3.70e-01
tacactgtcatttccactgaaaacctgtaattactttccacaagcaacacttcatcctgccaagctgattaaaggcaatacgcacaggaaggcaaagagtagcagcgctcaga

SEQ ID NO: 15984 - DNA, 151 bp, Homo sapiens
  MAP TO CHR19.1; EXPRESSED IN ADULT LIVER, SIGNAL = 4.6; EXPRESSED IN LUNG, SIGNAL =   2; EXPRESSED IN PLACENTA, SIGNAL = 4.7; EXPRESSED IN FETAL LIVER, SIGNAL = 3.9; EXPRESSED IN BRAIN, SIGNAL = 4.5; EXPRESSED IN HELA, SIGNAL = 4.8; EXPRESSED IN HEART, SIGNAL =   2; EXPRESSED IN BONE MARROW, SIGNAL =   5; SWISSPROT HIT: P51858, EVALUE 4.00e-15; EST_HUMAN HIT: BI826389.1, EVALUE 2.00e-72; NT HIT: gi14249157, EVALUE 1.00e-72
ctccagagccttcctgggacccaaggacctgttcccctacgacaaatgtaaagacaagtacgggaagcccaacaagaggaaaggcttcaatgaagggctgtgggagatccagaacaacccccacgccagctacagcgcccctccggtgagt

SEQ ID NO: 15985 - DNA, 176 bp, Homo sapiens
  MAP TO CHR17.1; EXPRESSED IN FETAL LIVER, SIGNAL = 1.4; EXPRESSED IN PLACENTA, SIGNAL = 2.2; EXPRESSED IN LUNG, SIGNAL = 1.4; EXPRESSED IN BRAIN, SIGNAL = 1.5; EXPRESSED IN HEART, SIGNAL = 2.1; EXPRESSED IN ADULT LIVER, SIGNAL =   2; EXPRESSED IN BONE MARROW, SIGNAL = 1.6; SWISSPROT HIT: Q04463, EVALUE 1.90e+00; EST_HUMAN HIT: AI752157.1, EVALUE 8.00e-32; NT HIT: D43947.2, EVALUE 1.00e-88
cacctacctgtagtgtgaaggagtccagaacaagtgcctcaccccaaacatgcatattgggtgggtgtggcgcccgctgaatgtgggagtcactgcccacacgccagcagaggtggtccacagttaggacgccccgctgatggatgctttgtggcctgaggtgctggtaatctgaa

SEQ ID NO: 15986 - DNA, 126 bp, Homo sapiens
  MAP TO CHR2.1; EXPRESSED IN BRAIN, SIGNAL = 0.44; EXPRESSED IN BONE MARROW, SIGNAL = 0.58; EXPRESSED IN ADULT LIVER, SIGNAL = 0.96; NT HIT: U39487.1, EVALUE 6.00e-65; SWISSPROT HIT: P47989, EVALUE 7.00e-20; EST_HUMAN HIT: AI858854.1, EVALUE 6.20e-01
tcttccgagcatgatactgagagcttgctaggcattcttcccagcatctgggcaaggtgaaaccctcaagcttctggttgaagtgtgtcaggtccccttctttgtacaggttttttctccgcacct

SEQ ID NO: 15987 - DNA, 168 bp, Homo sapiens
  MAP TO CHR9.1; EXPRESSED IN HELA, SIGNAL = 1.2; EXPRESSED IN BRAIN, SIGNAL =   1; EXPRESSED IN LUNG, SIGNAL = 0.89; EXPRESSED IN ADULT LIVER, SIGNAL = 1.4; EXPRESSED IN BONE MARROW, SIGNAL = 1.2; EXPRESSED IN FETAL LIVER, SIGNAL =   1; NT HIT: gi15298907, EVALUE 4.00e-45; SWISSPROT HIT: P03455, EVALUE 4.40e+00; EST_HUMAN HIT: AL598661.1, EVALUE 7.00e-54
tgggacaagggagagggtgggcccgggcgttgcgggggcggggctcagactgaaggggcgaggtttgcaggcggaggctacagctagggctgctcagtaactgccccaaccactaccacgtccccaagtgcaacgggacccacggaactacaggtgtggggcagggtg

SEQ ID NO: 15988 - DNA, 163 bp, Homo sapiens
  MAP TO CHR12.1; EXPRESSED IN BRAIN, SIGNAL =  12; EXPRESSED IN LUNG, SIGNAL = 9.8; EXPRESSED IN HEART, SIGNAL =  16; EXPRESSED IN ADULT LIVER, SIGNAL =  22; EST_HUMAN HIT: AW576086.1, EVALUE 3.00e-65; NT HIT: AF261085.1, EVALUE 5.00e-63; SWISSPROT HIT: P04406, EVALUE 3.00e-19
ccactcttcaacctttgatgctggggatggcattgacctcaacgaccactttgtcaagctcatttcctggtatgacaatgaatttggctacagcaacagggtggtggacctcatggcccacatgacttccaaggagtaagacccctggactaccaaccccagc

SEQ ID NO: 15989 - DNA, 498 bp, Homo sapiens
  MAP TO CHR17.1; EXPRESSED IN BRAIN, SIGNAL = 0.34; SWISSPROT HIT: Q9UH77, EVALUE 2.00e-26; EST_HUMAN HIT: BI826055.1, EVALUE 0.00e+00; NT HIT: gi13385187, EVALUE 0.00e+00
tgaccttaggaagcaaaattgaaatgtgctgctttctattttgggggtcatgagaaatccactttaaaatggcctcaaatacagcatcttcctgtttgacattgagctcatctttctcaatgatatccttaagttcagtgaccgagagctctaaaaattctgccgagactttcaccatctcctcaaagttgtgcagtatgaacatgtaggccttctgcctcagctcaggacagtagtagtagtccgtgaacttacagatgccgatacaattatccaagcacagctctgacttgaggaactcgcagcaacccctgacgatacccatgatgttaaactggtctgcagcagcaagcagtttctccacattgtccggtgtgataggcacggtccgggtgtatgcatactcaatgattagcttcatcatgtcgggagaaatgccagggatgttgtataccttcttttcagtgttgttccagccacttgtaaacaaagctctgg

SEQ ID NO: 15990 - DNA, 143 bp, Homo sapiens
  MAP TO CHR13.1; EXPRESSED IN BONE MARROW, SIGNAL = 0.54; EXPRESSED IN FETAL LIVER, SIGNAL = 0.41; EXPRESSED IN BRAIN, SIGNAL = 0.52; EXPRESSED IN HEART, SIGNAL = 0.43; SWISSPROT HIT: Q01815, EVALUE 2.00e-03; EST_HUMAN HIT: AI248211.1, EVALUE 1.80e-01; NT HIT: AF078779.1, EVALUE 1.00e-54
cttacaagatatataaatatgtccattactccaccgaagtccctgatgacagcagttggagtgaaaaataagccatctgccataatcttcagattaagctcaatgctcatgaatatcacaaacacatactcagcaatctgaaa

SEQ ID NO: 15991 - DNA, 219 bp, Homo sapiens
  MAP TO CHR7.1; EXPRESSED IN ADULT LIVER, SIGNAL = 1.1; EXPRESSED IN BONE MARROW, SIGNAL = 1.4; EXPRESSED IN BRAIN, SIGNAL = 1.6; EXPRESSED IN LUNG, SIGNAL = 1.5; EXPRESSED IN HEART, SIGNAL = 1.6; NT HIT: M29432.1, EVALUE 1.00e-120; SWISSPROT HIT: P08183, EVALUE 8.00e-33; EST_HUMAN HIT: BG567305.1, EVALUE 1.10e+00
acaacttacatgaggcagtttcatgataaagtcataggcattggcttccttgacagctttctcaatctcatccatggtgacattttcacggccatagcgaatgttttcagctatcgtggtggcaaacaatacaggttcctgactcaccacaccaatgatttcccgtagaaaccttacatttatggtcctaatatcctgtccatcaacactgacctggaa

SEQ ID NO: 15992 - DNA, 169 bp, Homo sapiens
  MAP TO CHR19.1; EXPRESSED IN FETAL LIVER, SIGNAL =   3; EXPRESSED IN LUNG, SIGNAL = 4.3; EXPRESSED IN HELA, SIGNAL = 4.1; EXPRESSED IN BRAIN, SIGNAL = 2.4; EXPRESSED IN HEART, SIGNAL =   3; EXPRESSED IN BONE MARROW, SIGNAL = 2.2; EXPRESSED IN ADULT LIVER, SIGNAL = 1.3; NT HIT: gi14767694, EVALUE 7.00e-87; SWISSPROT HIT: P98187, EVALUE 3.00e-21; EST_HUMAN HIT: AI761193.1, EVALUE 2.00e-82
aacctaccttgctcagcagaagcacatcaatgaaatccaaagtcttggacttggctttgtctttgaaaaaatcatcaataccctgagtggggagggtgcgacgccgctcccggatgacagcgtctgtgaagtcatgcaccaggcggcaggccctgtggaagcgccgccc

SEQ ID NO: 15993 - DNA, 219 bp, Homo sapiens
  MAP TO CHRX.1; EXPRESSED IN BRAIN, SIGNAL = 0.83; EXPRESSED IN HEART, SIGNAL = 0.65; NT HIT: AF195953.1, EVALUE 1.00e-120; SWISSPROT HIT: Q9PRA6, EVALUE 1.40e+00; EST_HUMAN HIT: BF991050.1, EVALUE 2.00e-05
ttcttccacagttcacacaagattcaggtgtggggaaataagagtgtgagaaaaactcattacaaaagaaatgtaatccccctacctgacacctgttttcaaagcactttctttcacttacatcctcgttattcaaagcaggacaagcagcaaggatgtcacctgggagcttgtgagaaatgcagacccaccccaggctggctggctccaaatctgcat

SEQ ID NO: 15994 - DNA, 211 bp, Homo sapiens
  MAP TO CHR19.1; EXPRESSED IN LUNG, SIGNAL = 3.8; EXPRESSED IN BRAIN, SIGNAL = 9.6; EXPRESSED IN PLACENTA, SIGNAL =  11; EXPRESSED IN FETAL LIVER, SIGNAL =   8; EXPRESSED IN HELA, SIGNAL =   9; EXPRESSED IN HEART, SIGNAL = 4.6; EXPRESSED IN BONE MARROW, SIGNAL = 9.6; EXPRESSED IN ADULT LIVER, SIGNAL = 7.4; EST_HUMAN HIT: AI733586.1, EVALUE 1.00e-115; NT HIT: gi13376708, EVALUE 1.00e-110; SWISSPROT HIT: Q61473, EVALUE 1.40e+00
cccactcaccgtggggctcccgtgcggcaggtacaccgggtagtcgcgagcggtctgcggcggcagggaccccaccagccaggggagcagcacggcctcgggcgtccccagccgccaccaaccctctgttgctgccaccacccggccggacaccaccagactgacgaaggtcgtgcccgcggcctcagcgaacccggagagggcttcctgg

SEQ ID NO: 15995 - DNA, 261 bp, Homo sapiens
  MAP TO CHR12.1; EXPRESSED IN PLACENTA, SIGNAL = 3.8; EXPRESSED IN LUNG, SIGNAL = 3.2; EXPRESSED IN HELA, SIGNAL = 3.2; EXPRESSED IN BRAIN, SIGNAL = 5.1; EXPRESSED IN BONE MARROW, SIGNAL = 4.1; EXPRESSED IN HEART, SIGNAL = 3.7; EXPRESSED IN ADULT LIVER, SIGNAL = 6.9; EST_HUMAN HIT: BG696181.1, EVALUE 1.40e+00; NT HIT: M14506.1, EVALUE 1.50e-02; SWISSPROT HIT: P21519, EVALUE 6.90e-01
agaggggaggggcccctgggctctgttcctcgacagccgcctattcccactccctgagcacagtgtctgactccgcctgcgctttgtggttgcggggtagggggactttttccatcctttgtgtcttgagcggttttttccttgctttgcgcttccctactgtctctccatattcctttttgtagctaatactcccacaggcctcccacggcagctccaaaatgcagcctcccgagtttcttgttgacagaggctttgagc

SEQ ID NO: 15996 - DNA, 186 bp, Homo sapiens
  MAP TO CHR13.1; EXPRESSED IN HELA, SIGNAL = 0.69; EXPRESSED IN BRAIN, SIGNAL = 0.89; EXPRESSED IN BONE MARROW, SIGNAL = 0.67; EXPRESSED IN ADULT LIVER, SIGNAL = 0.73; SWISSPROT HIT: P51587, EVALUE 2.00e-30; EST_HUMAN HIT: AA938167.1, EVALUE 7.00e-51; NT HIT: X95161.1, EVALUE 1.00e-100
cctcagatgttattttccaagcaggattttaattcaaaccataatttaacacctagccaaaaggcagaaattacagaactttctactatattagaagaatcaggaagtcagtttgaatttactcagtttagaaaaccaagctacatattgcagaagagtacatttgaagtgcctgaaaaccagatg

SEQ ID NO: 15997 - DNA, 246 bp, Homo sapiens
  MAP TO CHR10.1; EXPRESSED IN HEART, SIGNAL = 1.6; EXPRESSED IN ADULT LIVER, SIGNAL =   4; EXPRESSED IN BONE MARROW, SIGNAL = 3.9; EXPRESSED IN PLACENTA, SIGNAL = 5.1; EXPRESSED IN FETAL LIVER, SIGNAL = 3.9; EXPRESSED IN HELA, SIGNAL = 5.8; EXPRESSED IN BRAIN, SIGNAL = 4.1; EXPRESSED IN LUNG, SIGNAL = 1.3; SWISSPROT HIT: Q90722, EVALUE 3.00e-25; EST_HUMAN HIT: BE741672.1, EVALUE 2.10e-02; NT HIT: U47009.1, EVALUE 0.00e+00
ccttaccgaaggggtcgccgtcctctgccatggcgttgatgcgcttgttggccaggacctgcacgtgcttcccgctggtgcggctgtagagttggtaggtccggatgaggcggcggctgagctgatccgtcaccaggctctgctccctcacatgctgtgtaaaattaggtgaggactgaacagttacctttaggaaattgaaaaatacacaatacaccattataatgctactccgcccaggggccc

SEQ ID NO: 15998 - DNA, 177 bp, Homo sapiens
  MAP TO CHR4.1; EXPRESSED IN FETAL LIVER, SIGNAL = 0.72; EXPRESSED IN LUNG, SIGNAL = 0.88; EXPRESSED IN HELA, SIGNAL = 0.83; EXPRESSED IN BRAIN, SIGNAL = 0.88; EXPRESSED IN HEART, SIGNAL = 0.85; EXPRESSED IN ADULT LIVER, SIGNAL = 0.47; EXPRESSED IN BONE MARROW, SIGNAL = 0.8; SWISSPROT HIT: P42681, EVALUE 3.00e-28; EST_HUMAN HIT: BG753882.1, EVALUE 3.00e-93; NT HIT: gi4507742, EVALUE 2.00e-93
tacatcatcactttggcctcttcaatgaaatcctcttcagacatggagccttcattgatggccttgatagctacctggatatgtgaccgccattcacctaaatggaccactccaaactgaccgcttccaatctcctttataaaagccaactcagatggatctatctcccacttttct

SEQ ID NO: 15999 - DNA, 168 bp, Homo sapiens
  MAP TO CHR2.1; EXPRESSED IN HEART, SIGNAL = 1.9; EXPRESSED IN BONE MARROW, SIGNAL = 3.4; EXPRESSED IN ADULT LIVER, SIGNAL = 2.9; EXPRESSED IN PLACENTA, SIGNAL = 3.2; EXPRESSED IN FETAL LIVER, SIGNAL = 3.8; EXPRESSED IN HELA, SIGNAL = 3.8; EXPRESSED IN BRAIN, SIGNAL = 3.5; EXPRESSED IN LUNG, SIGNAL = 1.7; NT HIT: D11456.2, EVALUE 3.00e-67; SWISSPROT HIT: P47989, EVALUE 3.00e-20; EST_HUMAN HIT: AI439575.1, EVALUE 8.60e-01
tgccattccacctcctaggctgtgcctgaaggcccataccttggaaggcattctcaatctcctccatggtgggctcgggctgattccggagcagtgtgtacatactcatgacgatgccaggggtgcagaacccgcactgggagccgtggcttttggcaattctctcct

SEQ ID NO: 16000 - DNA, 235 bp, Homo sapiens
  MAP TO CHR2.1; EXPRESSED IN HEART, SIGNAL = 2.9; EXPRESSED IN BONE MARROW, SIGNAL = 3.1; EXPRESSED IN ADULT LIVER, SIGNAL = 0.68; EXPRESSED IN PLACENTA, SIGNAL = 2.5; EXPRESSED IN LUNG, SIGNAL = 2.9; EXPRESSED IN HELA, SIGNAL = 2.8; EXPRESSED IN BRAIN, SIGNAL = 2.7; SWISSPROT HIT: P25215, EVALUE 6.20e+00; EST_HUMAN HIT: AA707261.1, EVALUE 2.00e-02; NT HIT: AF370335.1, EVALUE 1.40e-02
ccaggttcatctgaaactaattattatattgggaggaataaactgatcttgtaaagagcagaagattgttgacattactctcctgctgagcagacaaaacatggatgccagatttgactagaactgggagagagagagttcagggtggattgagcacacagattgaggggtttggaagggataggaagttgggaaatggaagaaagcatcataataatgtgggtgatgagagatt

SEQ ID NO: 16001 - DNA, 158 bp, Homo sapiens
  MAP TO CHR19.1; EXPRESSED IN FETAL LIVER, SIGNAL = 0.58; EXPRESSED IN BRAIN, SIGNAL =   1; EXPRESSED IN HEART, SIGNAL = 0.58; EXPRESSED IN BONE MARROW, SIGNAL = 0.61; NT HIT: gi14758960, EVALUE 1.00e-81; SWISSPROT HIT: Q20799, EVALUE 3.00e-13; EST_HUMAN HIT: BI196245.1, EVALUE 9.00e-81
ctcaccttgtgcctgcatgcgggtccggaccagggccagcgggtaactggctatctggccgcaggtgctggatatggtaccgcaggccaggagcacgaggatgcctgggtctgccgagtcgtggctgtactgctgaagccaccagttcttcagagtct

SEQ ID NO: 16002 - DNA, 137 bp, Homo sapiens
  MAP TO CHR6.1; EXPRESSED IN LUNG, SIGNAL =  78; EXPRESSED IN BRAIN, SIGNAL = 9.5; EXPRESSED IN HEART, SIGNAL =  11; EXPRESSED IN PLACENTA, SIGNAL =  50; NT HIT: AJ304496.1, EVALUE 2.00e-71; SWISSPROT HIT: P30507, EVALUE 3.00e-22; EST_HUMAN HIT: AV696034.1, EVALUE 1.00e-67
tccttaccccatctcagggtgaggggctctggcagcccctcgtgctgcacatggcacgtgtatctctgctcttctccagaaggcaccaccacagctgcccacttctggaaggttccatctcctgctggcctggtctc

SEQ ID NO: 16003 - DNA, 184 bp, Homo sapiens
  MAP TO CHR19.1; EXPRESSED IN HEART, SIGNAL = 0.67; EXPRESSED IN ADULT LIVER, SIGNAL = 1.3; EXPRESSED IN BONE MARROW, SIGNAL = 1.5; EXPRESSED IN LUNG, SIGNAL = 0.64; EXPRESSED IN HELA, SIGNAL = 1.1; EXPRESSED IN BRAIN, SIGNAL = 2.1; SWISSPROT HIT: P48165, EVALUE 1.50e+00; EST_HUMAN HIT: AW295316.1, EVALUE 1.00e-92; NT HIT: AF324891.1, EVALUE 3.00e-09
aagagactgagaaatatttatttttaactttatttttattgttgacactattacagatagaatgaccacaaccatattaacaaaccaaaaacctgtgcacagaaacaagatgaagaaaatatatcaagatgttaaccacactctttggatggtgaaaacatgggtgagtttctcttctacattt

SEQ ID NO: 16004 - DNA, 138 bp, Homo sapiens
  MAP TO CHR2.1; EXPRESSED IN HELA, SIGNAL = 1.4; EXPRESSED IN FETAL LIVER, SIGNAL = 1.7; EXPRESSED IN LUNG, SIGNAL = 2.1; EXPRESSED IN BRAIN, SIGNAL = 1.4; EXPRESSED IN HEART, SIGNAL =   2; EXPRESSED IN BONE MARROW, SIGNAL = 1.4; EXPRESSED IN ADULT LIVER, SIGNAL = 2.2; EXPRESSED IN PLACENTA, SIGNAL = 1.2; SWISSPROT HIT: P47989, EVALUE 6.00e-09; EST_HUMAN HIT: BG875638.1, EVALUE 6.00e-23; NT HIT: gi9257259, EVALUE 4.00e-69
cttacatagacggcctgtccattgaggtcagcgctgacagaggcagccgtgggagaggtgttgggcacagtgttagtgcttgtctcgctgatataaatcttagaggtggggattttcagagctctactggccacctgc

SEQ ID NO: 16005 - DNA, 251 bp, Homo sapiens
  MAP TO CHR1.1; EXPRESSED IN BRAIN, SIGNAL = 2.1; EXPRESSED IN LUNG, SIGNAL = 3.3; EXPRESSED IN HELA, SIGNAL = 1.4; EXPRESSED IN HEART, SIGNAL = 2.8; EXPRESSED IN BONE MARROW, SIGNAL = 2.4; EXPRESSED IN ADULT LIVER, SIGNAL = 2.2; EXPRESSED IN FETAL LIVER, SIGNAL = 2.4; EXPRESSED IN PLACENTA, SIGNAL = 1.6; SWISSPROT HIT: P35408, EVALUE 9.40e+00; EST_HUMAN HIT: BI018254.1, EVALUE 3.40e-01
ggcagctttatttttctcaagggtatagcactgaatgttatttattgttctgactctgaatttcgtgctgtctttttttctgtttcctgctgacaggtgatttgctcttgaacaattaacagagtgaaggctgtgttccatctcctcacagtctcccgctgggcatccttgggagcacaggaggagaaaggctttcttcttgatcctattactgctgcccagcatcaagaaggattaattaacccaccagg

SEQ ID NO: 16006 - DNA, 214 bp, Homo sapiens
  MAP TO CHR7.1; EXPRESSED IN ADULT LIVER, SIGNAL = 0.51; EXPRESSED IN BONE MARROW, SIGNAL = 0.61; EXPRESSED IN FETAL LIVER, SIGNAL = 0.46; EXPRESSED IN HELA, SIGNAL = 0.55; EXPRESSED IN BRAIN, SIGNAL = 0.54; SWISSPROT HIT: O00222, EVALUE 2.00e-35; EST_HUMAN HIT: BG984062.1, EVALUE 4.40e+00; NT HIT: gi14753093, EVALUE 1.00e-112
agggctggagcgaattgctcgggattcatcttatgaacaggaaggaaaggtccaatttgtaattgatgctgtatattccatggcttacgccctgcacaatatgcacaaagatctctgccctggatacattggcctttgtccacgaatgagtaccattgatgggaaagagctacttggttatattcgggctgtaaattttaatggtaagttacaa

SEQ ID NO: 16007 - DNA, 136 bp, Homo sapiens
  MAP TO CHR5.1; EXPRESSED IN ADULT LIVER, SIGNAL = 5.6; EXPRESSED IN PLACENTA, SIGNAL =  12; EXPRESSED IN FETAL LIVER, SIGNAL = 8.3; EXPRESSED IN HELA, SIGNAL =   8; EXPRESSED IN BRAIN, SIGNAL = 6.6; EXPRESSED IN LUNG, SIGNAL =   3; EXPRESSED IN HEART, SIGNAL = 5.2; EXPRESSED IN BONE MARROW, SIGNAL = 8.1; SWISSPROT HIT: P21817, EVALUE 9.00e-14; EST_HUMAN HIT: R62925.1, EVALUE 6.70e-01; NT HIT: U48453.1, EVALUE 7.00e-71
caggcttcgtgacgggaggtcacgtcctccgcctctttcatggacatatggatgagtgtctgaccatttcccctgctgacagtgatgaccagcgcaggtctgggctgtggacgagagggcctggggtctaggggtg

SEQ ID NO: 16008 - DNA, 204 bp, Homo sapiens
  MAP TO CHR22.1; EXPRESSED IN LUNG, SIGNAL = 1.3; EXPRESSED IN HELA, SIGNAL = 0.76; EXPRESSED IN BRAIN, SIGNAL = 0.69; EXPRESSED IN BONE MARROW, SIGNAL = 0.63; EXPRESSED IN HEART, SIGNAL = 1.1; EXPRESSED IN ADULT LIVER, SIGNAL = 0.74; NT HIT: gi6912457, EVALUE 1.00e-107; SWISSPROT HIT: Q9Y6J0, EVALUE 2.00e-32; EST_HUMAN HIT: BG991922.1, EVALUE 3.00e-69
acctgcagaagaagcagctgggctggcctctcaggaatggaagtcataaactccaggtgtttggcccggtcaaacccactggtgcacaaagtggggcggagcagatgcacaacagccttgtagtcgcctgcttcatacagccgctgaatctcctccagggactggcaccgctccagcgacttcaggttcttatcaatctgaaaa

SEQ ID NO: 16009 - DNA, 202 bp, Homo sapiens
  MAP TO CHR17.1; EXPRESSED IN ADULT LIVER, SIGNAL = 1.8; EXPRESSED IN FETAL LIVER, SIGNAL = 1.7; EXPRESSED IN LUNG, SIGNAL = 3.8; EXPRESSED IN HELA, SIGNAL = 0.7; EXPRESSED IN BRAIN, SIGNAL = 0.75; EXPRESSED IN HEART, SIGNAL = 1.4; EXPRESSED IN BONE MARROW, SIGNAL = 0.68; NT HIT: AF118569.1, EVALUE 1.00e-110; EST_HUMAN HIT: BI821905.1, EVALUE 1.00e-104; SWISSPROT HIT: P12821, EVALUE 3.00e-35
cttcacagacacgggggcctactggcgctcctggtacaactcccccaccttcgaggacgatctggaacacctctaccaacagctagagcccctctacctgaacctccatgccttcgtccgccgcgcactgcatcgccgatacggagacagatacatcaacctcaggggacccatccctgctcatctgctgggtaaggacctg

SEQ ID NO: 16010 - DNA, 233 bp, Homo sapiens
  MAP TO CHR7.1; EXPRESSED IN BRAIN, SIGNAL = 0.31; EXPRESSED IN HEART, SIGNAL = 0.47; EXPRESSED IN FETAL LIVER, SIGNAL = 0.27; EST_HUMAN HIT: BF979286.1, EVALUE 3.10e-01; NT HIT: gi14739702, EVALUE 1.00e-111; SWISSPROT HIT: P21439, EVALUE 1.00e-33
ctttacctgtggtaatttcatgataaactcataggcgttggcctctttgacagctttctttatctcatccatggttacatttccacggccataacaaatattttcagcaattgtggtggaaaacagcaccggctcctgactcaccacaccaatgatttccctcagatagtttacattaaagttcctaatatcctgcccatcaatgttaatctgaaagaaagaaatatttccta

SEQ ID NO: 16011 - DNA, 157 bp, Homo sapiens
  MAP TO CHR19.1; EXPRESSED IN LUNG, SIGNAL = 6.3; EXPRESSED IN HELA, SIGNAL = 5.9; EXPRESSED IN BRAIN, SIGNAL = 4.9; EXPRESSED IN BONE MARROW, SIGNAL = 4.8; EXPRESSED IN ADULT LIVER, SIGNAL =   3; EXPRESSED IN FETAL LIVER, SIGNAL = 5.1; EXPRESSED IN HEART, SIGNAL = 5.4; EXPRESSED IN PLACENTA, SIGNAL = 5.7; SWISSPROT HIT: P04280, EVALUE 3.00e-01; EST_HUMAN HIT: AI125172.1, EVALUE 1.30e-02; NT HIT: AF240786.1, EVALUE 9.00e-03
ggagggcggggaccagacctgccccgtctcgccccgggctccgcgagcgatccccgcctccgccgggggcatgggaaggaaagggaagggagggggatgaggccgccggacgctggggtttccccagccaccctgagaggaactgggactttggggt

SEQ ID NO: 16012 - DNA, 216 bp, Homo sapiens
  MAP TO CHR7.1; EXPRESSED IN FETAL LIVER, SIGNAL = 0.68; EXPRESSED IN HELA, SIGNAL = 0.52; EXPRESSED IN BRAIN, SIGNAL = 0.76; EXPRESSED IN ADULT LIVER, SIGNAL = 0.46; EXPRESSED IN BONE MARROW, SIGNAL = 0.74; SWISSPROT HIT: P34472, EVALUE 8.60e+00; EST_HUMAN HIT: D61615.1, EVALUE 7.20e-02
ctgcctggctctctttcccttctggaattccaaatgtgccagactgcagcatcttcttctcatcaaagtataaaacattcccggacaggtaaaatagtccctgtcacatgacttttaccttagatatttgtatttcctatgtaattttaatgtacctataaatcaaaagcatctactagaagcgaaaagtggacctgggttttgctgatattttgt

SEQ ID NO: 16013 - DNA, 200 bp, Homo sapiens
  MAP TO CHR13.1; EXPRESSED IN FETAL LIVER, SIGNAL = 1.1; EXPRESSED IN LUNG, SIGNAL = 0.89; EXPRESSED IN HELA, SIGNAL = 1.4; EXPRESSED IN BRAIN, SIGNAL = 0.87; EXPRESSED IN HEART, SIGNAL = 0.99; EXPRESSED IN BONE MARROW, SIGNAL = 0.85; SWISSPROT HIT: P21865, EVALUE 2.50e+00; NT HIT: gi14757710, EVALUE 3.00e-86; EST_HUMAN HIT: BI461342.1, EVALUE 5.00e-83
cttttgtaaattataatccacatgacaaacatacctaaatccacgagaatcgcatgctgctgagcagtgagctgcttcaaaagttccttataggatatgtcaggaggctgttgtttattaggcaatctgtgtctgagtcggtactgtaaagccagaaactgccaaatttctcctcgtcgacttttgggaactcctacaat

SEQ ID NO: 16014 - DNA, 304 bp, Homo sapiens
  MAP TO CHR6.1; EXPRESSED IN BONE MARROW, SIGNAL = 2.8; EXPRESSED IN ADULT LIVER, SIGNAL = 3.4; EXPRESSED IN PLACENTA, SIGNAL = 4.5; EXPRESSED IN FETAL LIVER, SIGNAL = 3.5; EXPRESSED IN HELA, SIGNAL =   4; EXPRESSED IN LUNG, SIGNAL = 4.8; EXPRESSED IN BRAIN, SIGNAL = 3.2; EXPRESSED IN HEART, SIGNAL = 4.9; SWISSPROT HIT: P22105, EVALUE 2.00e-55; NT HIT: gi15208634, EVALUE 0.00e+00; EST_HUMAN HIT: BF848660.1, EVALUE 2.00e-33
ttcctagtgcctcagagtgacccaagtccagggactccaccccacctgggaaacctgtgggtgacagaccctaccccagattcactgcacctctcctggactgtccctgagggccagtttgacaccttcatggtccagtacagggacagggatggacggccccaggtggtacctgtggaagggcccgagcgttcatttgttgtctcctcactggaccctgaccacaagtacagattcactctgtttggaattgcgaacaagaagcggtatggccccctcacggccgatggcaccactggtgagt

SEQ ID NO: 16015 - DNA, 320 bp, Homo sapiens
  MAP TO CHR19.1; EXPRESSED IN BONE MARROW, SIGNAL = 0.69; EXPRESSED IN ADULT LIVER, SIGNAL = 0.5; EXPRESSED IN FETAL LIVER, SIGNAL = 1.1; EXPRESSED IN LUNG, SIGNAL = 1.2; EXPRESSED IN HELA, SIGNAL = 0.87; EXPRESSED IN BRAIN, SIGNAL = 0.91; SWISSPROT HIT: P55526, EVALUE 2.20e-01; EST_HUMAN HIT: BF940405.1, EVALUE 0.00e+00
ccgtgtggcccagaggcacggtccagagcaccacattcgggcgctctggggctgggaagggagtgggtgctgtggggaccgaagcaggcgcagcgcctgggtcgccaggatccaatccaagcagcatgtccaccacaaggcccacgtcagccttgccagccacggccaggtctagccgtgcgctgcccaggcgctccaggcctgagcgcacccacgacagcgcagcctcaaggccgccggtctcaaaggcctcacgcacagcctctagctctgctgcacccaacacctcgaagccatcctgcgccggtggcaggagcctg

SEQ ID NO: 16016 - DNA, 179 bp, Homo sapiens
  MAP TO CHR3.1; EXPRESSED IN ADULT LIVER, SIGNAL = 1.4; EXPRESSED IN LUNG, SIGNAL = 1.7; EXPRESSED IN BRAIN, SIGNAL = 0.64; EXPRESSED IN BONE MARROW, SIGNAL = 0.7; EXPRESSED IN HEART, SIGNAL = 1.4; EST_HUMAN HIT: AW080696.1, EVALUE 3.00e-93; SWISSPROT HIT: Q03376, EVALUE 5.30e-01; NT HIT: gi14768472, EVALUE 3.00e-95
gggaggcacaaggtgctggctgacttctgtctgttcttgttggtgccccaactcaggaaggaaagcttcttggagattttcttggttttatcagttttgtcgtcatcatcaatggctaagcagatcatggagtacgttttctgcattcccacggagtatgtggcactcttattatgctg

SEQ ID NO: 16017 - DNA, 173 bp, Homo sapiens
  MAP TO CHR6.1; EXPRESSED IN ADULT LIVER, SIGNAL = 0.57; EXPRESSED IN BONE MARROW, SIGNAL = 0.51; EXPRESSED IN LUNG, SIGNAL = 0.7; EXPRESSED IN BRAIN, SIGNAL = 0.43; EXPRESSED IN HEART, SIGNAL = 0.66; SWISSPROT HIT: Q06430, EVALUE 9.00e-24; NT HIT: L41605.1, EVALUE 2.00e-22; EST_HUMAN HIT: BI766041.1, EVALUE 5.00e-21
cacatacctggaatcctactgagtgtcacccagaaatgctcatcaggagagtcagtatcttttgaccactcaagtaaatcaatggcccttaggttttgaagaacaaaattagcaaattcccttgtaagggccacataggcagagccaaagtaaattgtcagatggtggggagg

SEQ ID NO: 16018 - DNA, 170 bp, Homo sapiens
  MAP TO CHR19.1; EXPRESSED IN HEART, SIGNAL = 0.71; EXPRESSED IN BONE MARROW, SIGNAL = 1.1; EXPRESSED IN PLACENTA, SIGNAL = 1.6; EXPRESSED IN FETAL LIVER, SIGNAL = 1.1; EXPRESSED IN HELA, SIGNAL =   2; EXPRESSED IN BRAIN, SIGNAL = 1.3; EXPRESSED IN LUNG, SIGNAL = 0.8; SWISSPROT HIT: Q9R1D7, EVALUE 1.10e+00; EST_HUMAN HIT: BE244518.1, EVALUE 3.00e-56
accgtgctccaggccgcagctgccccccttgacctcaggccccgggggcggctcagggggcagtgccagggcgaactcgggcttcaggccgttgggcagtggtggccctgaccgaggcggctccggtggtggctgaggctcagaggaccctgtgtcccgggtgtcaatgg

SEQ ID NO: 16019 - DNA, 276 bp, Homo sapiens
  MAP TO CHR19.1; EXPRESSED IN PLACENTA, SIGNAL = 4.1; EXPRESSED IN FETAL LIVER, SIGNAL =   2; EXPRESSED IN LUNG, SIGNAL = 3.1; EXPRESSED IN HELA, SIGNAL = 4.8; EXPRESSED IN BRAIN, SIGNAL = 3.2; EXPRESSED IN BONE MARROW, SIGNAL = 2.3; EXPRESSED IN HEART, SIGNAL =   3; SWISSPROT HIT: Q00918, EVALUE 3.00e-11; NT HIT: gi14787033, EVALUE 0.00e+00; EST_HUMAN HIT: BG398395.1, EVALUE 0.00e+00
caggcacgttcccaggctcgcagccccaggcacctgctagccccgttctgcccgccaggccacctccgccacccctgccccgccgacccagcacacctaggcagggccctgtggggagtgggcgccgggagtgctactttgacacagcggccccggatgcatgtgacaacatcctggctcggaatgtgacatggcaggagtgctgctgtactgtgggtgagggctggggcagcggctgccgcatccagcagtgcccgggcaccgagacaggtgggc

SEQ ID NO: 16020 - DNA, 157 bp, Homo sapiens
  MAP TO CHR17.1; EXPRESSED IN HELA, SIGNAL = 0.88; EXPRESSED IN LUNG, SIGNAL = 1.9; EXPRESSED IN BRAIN, SIGNAL = 1.2; EXPRESSED IN HEART, SIGNAL = 1.9; EXPRESSED IN BONE MARROW, SIGNAL = 1.5; EXPRESSED IN PLACENTA, SIGNAL = 1.3; EXPRESSED IN FETAL LIVER, SIGNAL = 1.5; SWISSPROT HIT: Q61084, EVALUE 2.00e-21; NT HIT: gi4505152, EVALUE 1.00e-69; EST_HUMAN HIT: BE313361.1, EVALUE 2.00e-69
ctttatgtgctctaggctcccagaaccctggccgaagctcacctccccctggctatgttcctgagcggcagcagcacattgcccggcaggggtcctacaccagcatcaacagtgagggggagttcatcccagagaccagcgagcagtgcgtgagtat

SEQ ID NO: 16021 - DNA, 205 bp, Homo sapiens
  MAP TO CHR7.1; EXPRESSED IN ADULT LIVER, SIGNAL = 2.7; EXPRESSED IN FETAL LIVER, SIGNAL = 2.1; EXPRESSED IN LUNG, SIGNAL = 1.3; EXPRESSED IN HELA, SIGNAL = 1.5; EXPRESSED IN BRAIN, SIGNAL = 1.1; EXPRESSED IN HEART, SIGNAL =   1; SWISSPROT HIT: Q16850, EVALUE 4.00e-34; NT HIT: U51689.1, EVALUE 2.00e-97; EST_HUMAN HIT: AU129039.1, EVALUE 3.00e-93
aacaaacctggtcataagttaaaggaggcagattctctccacagactgttttctgttctaaataacattttttttgaagtgttttgtctctggccaaaaagaagcccatccaagcactagtagttgaggatgtatgctgccctgccaagagtaatccaataagcatccctgctacttcatcatcagtcaaaggacgcccatccct

SEQ ID NO: 16022 - DNA, 119 bp, Homo sapiens
  MAP TO CHR12.1; EXPRESSED IN HELA, SIGNAL = 0.58; EXPRESSED IN BRAIN, SIGNAL = 0.66; EXPRESSED IN LUNG, SIGNAL = 0.64; EXPRESSED IN BONE MARROW, SIGNAL = 0.67; EXPRESSED IN FETAL LIVER, SIGNAL = 0.44; EST_HUMAN HIT: AA173146.1, EVALUE 1.00e-54; SWISSPROT HIT: Q13936, EVALUE 8.00e-15; NT HIT: Z26284.1, EVALUE 8.00e-61
gttccaggctctcctaccaggatgacgaaaatcggcaactgacgctcccagaggaggacaagagggacatccggcaatctccgaagaggggtttcctccgctctgcctcactaggtaaa

SEQ ID NO: 16023 - DNA, 158 bp, Homo sapiens
  MAP TO CHR12.1; EXPRESSED IN HELA, SIGNAL = 2.1; EXPRESSED IN BRAIN, SIGNAL = 2.3; EXPRESSED IN LUNG, SIGNAL = 1.3; EXPRESSED IN HEART, SIGNAL = 1.3; EXPRESSED IN ADULT LIVER, SIGNAL = 2.8; EXPRESSED IN BONE MARROW, SIGNAL = 2.5; EXPRESSED IN PLACENTA, SIGNAL = 2.1; EST_HUMAN HIT: BI833870.1, EVALUE 8.00e-01; SWISSPROT HIT: O00189, EVALUE 2.60e+00; NT HIT: D90903.1, EVALUE 2.10e+00
ccccttcagacccatccatcagcagcggtccctgccagaagatggcctattgaacatttccagaaatagcacagccaagcccgtcaactgctttcttggaaatacattcaataaggatggcggtcctccagcagggagagcagaaagcctggcctgga

SEQ ID NO: 16024 - DNA, 353 bp, Homo sapiens
  MAP TO CHR19.1; EXPRESSED IN BONE MARROW, SIGNAL = 0.6; EXPRESSED IN FETAL LIVER, SIGNAL = 1.1; EXPRESSED IN BRAIN, SIGNAL = 0.65; EXPRESSED IN LUNG, SIGNAL = 0.81; SWISSPROT HIT: P56730, EVALUE 2.40e-01; NT HIT: gi14766620, EVALUE 0.00e+00; EST_HUMAN HIT: BI544606.1, EVALUE 0.00e+00
tgccagggccatccaggtgaccgtgtccaacccctaccacgtggtgatcctcttccagcctgtgaccctgccctgtacctaccagatgacctcgacccccacgcaacccatcgtcatctggaagtacaagtctttctgccgggaccgcatcgccgatgccttctccccggccagcgtcgacaaccagctcaatgcccagctggcagccgggaacccaggctacaacccctacgttgagtgccaggacagcgtgcgcaccgtcagggtcgtggccaccaagcagggcaacgctgtgaccctgggagattactaccagggccggaggattaccatcaccggaagtatgttgggca

SEQ ID NO: 16025 - DNA, 290 bp, Homo sapiens
  MAP TO CHR11.1; EXPRESSED IN FETAL LIVER, SIGNAL = 2.9; EXPRESSED IN PLACENTA, SIGNAL = 1.8; EXPRESSED IN LUNG, SIGNAL = 1.8; EXPRESSED IN BRAIN, SIGNAL = 2.8; EXPRESSED IN ADULT LIVER, SIGNAL = 1.6; EXPRESSED IN HEART, SIGNAL =  10; SWISSPROT HIT: Q14896, EVALUE 5.00e-45; NT HIT: U91629.1, EVALUE 0.00e+00; EST_HUMAN HIT: AU140784.1, EVALUE 0.00e+00
tcttacctgcctctatgaccttgaggtcgaacttgaccttggaggagccagcaatgactgcgtaagatccctggtcggcagggcccacttcccgcactgtcagcgtatgccgtgtgccctctgtggccaggccgtacttgttgctggcgctgatgtcactgcctccgcgctgccagcgcaccttcactcctgcccgctctgtctcggcctcgaacacggcagggctgcctgcggccacttccactgaccgtggcttcttgctaaaagctgagactgaagggccaggtgga

SEQ ID NO: 16026 - DNA, 263 bp, Homo sapiens
  MAP TO CHR11.1; EXPRESSED IN BRAIN, SIGNAL = 0.52; EXPRESSED IN LUNG, SIGNAL = 0.7; EXPRESSED IN HEART, SIGNAL = 0.83; EXPRESSED IN BONE MARROW, SIGNAL = 0.6; SWISSPROT HIT: Q61187, EVALUE 1.00e-38; NT HIT: gi14773028, EVALUE 0.00e+00; EST_HUMAN HIT: AL522502.1, EVALUE 0.00e+00
ttcaggaagacatccaggtctatcacgccccttctcaaggcttctcccaagtaaaagatagtgtcttcaatagcgttttcttctgcatacagattcaggatctgtttgtataagggagctgtgggaatgataacttcatcgatatcattgttttcagactgattttccattttttccagagcagaactgagttcttcatccttctttttcaaaagttctatgtttttatcaacctcggcctgaaaacagaacagtccaagcat

SEQ ID NO: 16027 - DNA, 243 bp, Homo sapiens
  MAP TO CHRX.1; EXPRESSED IN BRAIN, SIGNAL = 0.61; EXPRESSED IN ADULT LIVER, SIGNAL = 0.64; EXPRESSED IN BONE MARROW, SIGNAL = 0.75; EXPRESSED IN FETAL LIVER, SIGNAL = 0.84; EXPRESSED IN LUNG, SIGNAL = 1.1; SWISSPROT HIT: P24866, EVALUE 4.60e-01; NT HIT: AF195953.1, EVALUE 0.00e+00; EST_HUMAN HIT: BF830085.1, EVALUE 1.00e-101
ctggcaaacccaccttgggtatcatttcatagatcccatacatggtatagctggtcccaatccagatcctcacatctcccaatgagtaggcctggatgctgtcacgaacttggctgtaatcctcgatttgcacacacatggggcctgtgcaactggagttcagatagctcaaggtttcggagctaaagcgactcttgtttgcaaacaacctgggtggggtgggaagacaaggagggtcctgag

SEQ ID NO: 16028 - DNA, 154 bp, Homo sapiens
  MAP TO CHR19.1; EXPRESSED IN FETAL LIVER, SIGNAL = 2.1; EXPRESSED IN LUNG, SIGNAL = 5.5; EXPRESSED IN HELA, SIGNAL = 2.1; EXPRESSED IN BRAIN, SIGNAL = 1.9; EXPRESSED IN HEART, SIGNAL = 4.5; EXPRESSED IN ADULT LIVER, SIGNAL = 0.72; EXPRESSED IN BONE MARROW, SIGNAL =   2; SWISSPROT HIT: P55067, EVALUE 1.50e+00; NT HIT: gi15308579, EVALUE 9.00e-80; EST_HUMAN HIT: AI028345.1, EVALUE 2.00e-81
ggcagccagggtgggcagtgggtaccagcactgccatctcaggaaggcactttcagcttcggggtccccaggaagaactgcaggacgcggtcggccaggagcgccaggcagaagtccaggagcaggacctgggcaatgaccagcttgaactgtc

SEQ ID NO: 16029 - DNA, 200 bp, Homo sapiens
  MAP TO CHR18.1; EXPRESSED IN BONE MARROW, SIGNAL =  21; EXPRESSED IN ADULT LIVER, SIGNAL =  11; EXPRESSED IN LUNG, SIGNAL = 9.7; EXPRESSED IN HEART, SIGNAL =  10; EXPRESSED IN PLACENTA, SIGNAL =  15; EXPRESSED IN FETAL LIVER, SIGNAL =  16; EXPRESSED IN BRAIN, SIGNAL =  16; EXPRESSED IN HELA, SIGNAL =  10; SWISSPROT HIT: O08912, EVALUE 6.00e-31; NT HIT: gi14762496, EVALUE 6.00e-94; EST_HUMAN HIT: AV756505.1, EVALUE 8.00e-94
ttaacttgcttttatgacatcaggagaacagtggtgtgtcccatcatcgatgtgatcagtgatgatacttttgagtacatggcaggctctgatatgacctatggtgggttcaactggaagctcaattttcgctggtatcctgttccccaaagagaaatggacagaaggaaaggtgatcggactcttcctgtcaggtaatt

SEQ ID NO: 16030 - DNA, 173 bp, Homo sapiens
  MAP TO CHRX.1; EXPRESSED IN BONE MARROW, SIGNAL = 6.3; EXPRESSED IN ADULT LIVER, SIGNAL = 3.8; EXPRESSED IN PLACENTA, SIGNAL = 6.8; EXPRESSED IN FETAL LIVER, SIGNAL = 5.7; EXPRESSED IN LUNG, SIGNAL = 3.3; EXPRESSED IN BRAIN, SIGNAL = 6.1; EXPRESSED IN HEART, SIGNAL = 2.6; EST_HUMAN HIT: BE313838.1, EVALUE 1.00e-89; SWISSPROT HIT: Q15904, EVALUE 2.00e-27; NT HIT: L44140.1, EVALUE 8.00e-93
cccaggttcattctggccaaccgcctctacccagtgtctgcccggcactggtttaccatggagcgcctcgaagtccacagcaatggctccgtcgcctacttcaatgcttcccaggtcacagggcccagcatctactccttccactgcgagtatgtcagcagcctgagcaagaa

SEQ ID NO: 16031 - DNA, 317 bp, Homo sapiens
  MAP TO CHR19.1; EXPRESSED IN BRAIN, SIGNAL = 1.2; EXPRESSED IN BONE MARROW, SIGNAL = 1.2; EXPRESSED IN PLACENTA, SIGNAL = 1.6; EXPRESSED IN LUNG, SIGNAL = 1.8; EXPRESSED IN HELA, SIGNAL = 2.1; SWISSPROT HIT: P17527, EVALUE 8.70e+00; NT HIT: gi14762990, EVALUE 0.00e+00; EST_HUMAN HIT: BE350923.1, EVALUE 0.00e+00
caggacttcagtctgctgtacgaggaggcgcgctactatcagctccagcccatggtgcgcgagctggagcgctggcagcaggagcaggagcagcggcgccgcagccgggcctgtgactgcctggtggtgcgcgtcacgcccgacttgggcgagcggatcgcactcagcggcgagaaggccctcatcgaggaggtcttccccgagaccggagacgtcatgtgcaactccgtcaacgccggctggaaccaggaccccacgcacgtcatccgcttcccgctcaatggctactgccggctcaactcggtacaggtgagggc

SEQ ID NO: 16032 - DNA, 166 bp, Homo sapiens
  MAP TO CHR17.1; EXPRESSED IN HELA, SIGNAL = 2.7; EXPRESSED IN BRAIN, SIGNAL = 2.1; EXPRESSED IN LUNG, SIGNAL = 2.6; EXPRESSED IN HEART, SIGNAL = 1.5; EXPRESSED IN BONE MARROW, SIGNAL = 2.1; EXPRESSED IN PLACENTA, SIGNAL = 2.1; EXPRESSED IN FETAL LIVER, SIGNAL = 1.7; SWISSPROT HIT: Q01453, EVALUE 1.00e-12; NT HIT: M94048.1, EVALUE 1.00e-75; EST_HUMAN HIT: BG714597.1, EVALUE 2.00e-75
ttcccccagaatggctgcagtctgtccaggccaccatgatcctgtcgatcatcttcagcattctgtctctgttcctgttcttctgccaactcttcaccctcaccaaggggggcaggttttacatcactggaatcttccaaattcttgctggtaagttgtggatggt

SEQ ID NO: 16033 - DNA, 216 bp, Homo sapiens
  MAP TO CHR1.1; EXPRESSED IN BONE MARROW, SIGNAL = 4.3; EXPRESSED IN PLACENTA, SIGNAL = 5.8; EXPRESSED IN FETAL LIVER, SIGNAL = 3.8; EXPRESSED IN HELA, SIGNAL = 6.9; EXPRESSED IN BRAIN, SIGNAL = 3.8; EXPRESSED IN LUNG, SIGNAL = 1.8; EXPRESSED IN HEART, SIGNAL = 1.7; SWISSPROT HIT: P36718, EVALUE 3.00e-37; NT HIT: U58003.1, EVALUE 1.00e-118; EST_HUMAN HIT: AL134293.1, EVALUE 1.00e-114
aacacacctctcctttagtttgttgaactctgggtagagaattttctcatcctggagatccttagcaacaatctgattgttgttcattgaggcaaaggcaaatatcaggtgggtgcagagaaaggggtccaggtcatggggcaagatcgaggcagggcctggccgactgtgtgcccagttggtgaaataacacacgagtttatgggcagcacctgg

SEQ ID NO: 16034 - DNA, 275 bp, Homo sapiens
  MAP TO CHR5.1; EXPRESSED IN LUNG, SIGNAL = 1.5; EXPRESSED IN HELA, SIGNAL = 1.1; EXPRESSED IN BRAIN, SIGNAL = 1.5; EXPRESSED IN HEART, SIGNAL = 1.3; EXPRESSED IN ADULT LIVER, SIGNAL = 1.1; EXPRESSED IN BONE MARROW, SIGNAL = 1.6; SWISSPROT HIT: P19353, EVALUE 1.20e-01; NT HIT: gi14735844, EVALUE 0.00e+00; EST_HUMAN HIT: AW963585.1, EVALUE 0.00e+00
aagatgtccaaatcatgagaatgatcaacttcaatggcttcctctgcctccaacttggcttctgcatgtccttcctgtgactcatcaagagaggccaaggcctcattcgtgtcacttgcaaaagtttctcgtgatgtatcatcatcttcttgaaaatttagacttttaatagcttgtttcatctttttccccaacacttgtgttctcctcttcctagcagcttttttattttcatattccttttggttttcaatgtagaaaatgtcctgtaataa

SEQ ID NO: 16035 - DNA, 258 bp, Homo sapiens
  MAP TO CHRX.1; EXPRESSED IN PLACENTA, SIGNAL = 6.3; EXPRESSED IN FETAL LIVER, SIGNAL = 7.7; EXPRESSED IN LUNG, SIGNAL = 4.3; EXPRESSED IN HELA, SIGNAL = 7.8; EXPRESSED IN BRAIN, SIGNAL = 8.3; EXPRESSED IN BONE MARROW, SIGNAL = 7.3; EXPRESSED IN ADULT LIVER, SIGNAL = 8.6; SWISSPROT HIT: P43515, EVALUE 3.40e+00; NT HIT: L44140.1, EVALUE 0.00e+00
ccagatgtcgcccgatcccaaagccaccagatcgggcagtcctgggaagccaaaatccagctctttcatattttcccttatttggagtagattcttggatgttaggcacaccccgcccaccacaccacccctggccctcagaccccaggccagaccctcccactgggaggtatagcccaagcccaggagctgttcagctgggatccctaaggagctgtttccaggcctgcgtagccagggggcgcaggagggaaggaa

SEQ ID NO: 16036 - DNA, 227 bp, Homo sapiens
  MAP TO CHR7.1; EXPRESSED IN HEART, SIGNAL = 0.53; EXPRESSED IN BONE MARROW, SIGNAL = 0.67; EXPRESSED IN FETAL LIVER, SIGNAL = 0.83; EXPRESSED IN LUNG, SIGNAL = 1.1; EXPRESSED IN HELA, SIGNAL = 0.77; EXPRESSED IN BRAIN, SIGNAL = 0.63; SWISSPROT HIT: P53004, EVALUE 5.00e-37; NT HIT: gi4502416, EVALUE 1.00e-119; EST_HUMAN HIT: N28214.1, EVALUE 1.00e-120
ccaggcagtgcaggatgcgtttcttttcagcagccagttccttctcagagaactggcccaagagtttctggacaaatatattttgatctttcagaaatatgttcttattcactcctacatttggcacattctccaaggacccagacttgaaatggaagcttaaatatctgtttcgttttagaccaggtcctttttcttcaatccatgacagtggactgcaaagacaa

SEQ ID NO: 16037 - DNA, 266 bp, Homo sapiens
  MAP TO CHR19.1; EXPRESSED IN ADULT LIVER, SIGNAL = 1.4; EXPRESSED IN BONE MARROW, SIGNAL = 1.8; EXPRESSED IN PLACENTA, SIGNAL = 1.7; EXPRESSED IN FETAL LIVER, SIGNAL = 1.6; EXPRESSED IN HEART, SIGNAL = 1.1; EXPRESSED IN LUNG, SIGNAL = 0.95; EXPRESSED IN BRAIN, SIGNAL = 1.9; EXPRESSED IN HELA, SIGNAL = 2.3; SWISSPROT HIT: P32942, EVALUE 4.00e-25; NT HIT: gi13649886, EVALUE 0.00e+00; EST_HUMAN HIT: AI199660.1, EVALUE 0.00e+00
tgctccccggctcttggaagttggctcggaaaggcccgtgagctgcactctggacggactgtttccagcctcagaggccagggtctacctcgcactgggggaccagaatctgagtcctgatgtcaccctcgaaggggacgcattcgtggccactgccacagccacagctagcgcagagcaggagggtgccaggcagctggtctgcaacgtcaccctggggggcgaaaaccgggagacccgggagaacgtgaccatctacagtaagg

SEQ ID NO: 16038 - DNA, 273 bp, Homo sapiens
  MAP TO CHR9.1; EXPRESSED IN ADULT LIVER, SIGNAL = 6.7; EXPRESSED IN BONE MARROW, SIGNAL =  13; EXPRESSED IN PLACENTA, SIGNAL = 7.3; EXPRESSED IN FETAL LIVER, SIGNAL =  10; EXPRESSED IN LUNG, SIGNAL =   7; EXPRESSED IN HELA, SIGNAL = 6.5; EXPRESSED IN BRAIN, SIGNAL =  11; SWISSPROT HIT: O14656, EVALUE 2.00e-18; NT HIT: gi14740866, EVALUE 0.00e+00; EST_HUMAN HIT: BE902614.1, EVALUE 0.00e+00
gcctaccttgtagcgctcgatgtggctggggtgggggaagtggaggacgggagaaaagtggtgcacgcgggggctgcggaggccgccctggaagaggtagtgcgccagcagggagctgacataggatttgccggtgccggtccagccgtgcagggagaggaccagcggcttggtgggggctgggtcccgcacaaaggccttcagcgccttcaccaccagcgccttggccagatgctggccggccaggtgctgagccaggtcacactccagacc

SEQ ID NO: 16039 - DNA, 175 bp, Homo sapiens
  MAP TO CHR12.1; EXPRESSED IN FETAL LIVER, SIGNAL =   1; EXPRESSED IN HELA, SIGNAL = 0.62; EXPRESSED IN LUNG, SIGNAL = 1.1; EXPRESSED IN BRAIN, SIGNAL = 0.83; EXPRESSED IN HEART, SIGNAL = 0.92; EXPRESSED IN ADULT LIVER, SIGNAL = 0.84; EXPRESSED IN BONE MARROW, SIGNAL = 0.87; SWISSPROT HIT: Q00053, EVALUE 2.50e+00; NT HIT: AF195651.1, EVALUE 5.00e-60; EST_HUMAN HIT: BI550232.1, EVALUE 3.00e-62
gatttaaactgggataacatcacactctgtcctctactttaatgaggcaggattgcagatgttatgggctgatgccaaaaaggctagaagaataaagacaaatatgtggaagcacaatataaagtttcatcaacttccataccgggagatggagcatttgagacaggtatgggcc

SEQ ID NO: 16040 - DNA, 197 bp, Homo sapiens
  MAP TO AC020907.4; EXPRESSED IN FETAL LIVER, SIGNAL = 6.1; EXPRESSED IN LUNG, SIGNAL = 0.77; EXPRESSED IN BRAIN, SIGNAL = 1.1; EXPRESSED IN HEART, SIGNAL = 0.98; SWISSPROT HIT: P05981, EVALUE 9.00e-32; NT HIT: gi14766663, EVALUE 1.00e-101; EST_HUMAN HIT: BG538624.1, EVALUE 1.00e-103
  unsure 39
ttacctgtgaggggcaggggactggagaggtggaccagngcaatatcgttgctgttctcctcgctgttggggtcccgaaagggaagatagcccccgtggtagaccacagcctgcacccccagctgcagaccgtggggagaggcctgggccacggcaccggcaaacactcgccatcgggacaggacccggttccgcct

SEQ ID NO: 16041 - DNA, 327 bp, Homo sapiens
  MAP TO CHR5.1; EXPRESSED IN FETAL LIVER, SIGNAL = 0.85; EXPRESSED IN HELA, SIGNAL = 0.8; EXPRESSED IN LUNG, SIGNAL = 0.67; EXPRESSED IN BRAIN, SIGNAL = 0.83; EXPRESSED IN HEART, SIGNAL = 1.5; EXPRESSED IN BONE MARROW, SIGNAL = 0.69; EXPRESSED IN ADULT LIVER, SIGNAL = 1.1; SWISSPROT HIT: Q9Y5E4, EVALUE 1.00e-15; NT HIT: gi14861871, EVALUE 0.00e+00; EST_HUMAN HIT: BI087139.1, EVALUE 8.00e-46
gcgccttcgaccaagagcagccgcgagccttcaagctcacgctgcaggcccgcgaccaggactagctcgcgctcggcgtcaacgtgagcctgcgcgtgttggtggacgacctgaatgacaacgcaccgcgggtgctgtaccccagctctggagcgcaatggcttcgcgctcttggatatggtgctgcacgccgcggagcctggctacctggtcaccaaggtggtggctgtagacgcagatgtgagacacaatgcgtggctgtcctaccacgtgctgcaggccagcaagcccaggctcttcagcctggaatgcgcaccgacgaggtgc

SEQ ID NO: 16042 - DNA, 328 bp, Homo sapiens
  MAP TO CHR2.1; EXPRESSED IN ADULT LIVER, SIGNAL = 1.2; EXPRESSED IN FETAL LIVER, SIGNAL = 1.5; EXPRESSED IN BRAIN, SIGNAL = 1.5; EXPRESSED IN LUNG, SIGNAL = 0.7; EXPRESSED IN HEART, SIGNAL = 2.5; SWISSPROT HIT: P52179, EVALUE 2.00e-15; NT HIT: gi16157781, EVALUE 0.00e+00; EST_HUMAN HIT: BG989548.1, EVALUE 0.00e+00
tttacagatcctcctgatcctcctattaaactcaagattggcctcatcacaaagaacacagtgcatctgtcatggaaacccccgaagaatgatgggggctcccctgttacccactatattgttgagtgccttgcatgggaccctactgggacaaagaaagaagcctggaggcagtgcaataagcgtgatgtggaagaactgcaatttactgttgaagacctagtagagggtggggaatatgaattccgagtcaaagctgtcaatgctgcaggagtcagcaagccttcagccactgttggccctgtgactgtcaaagaccagacatgta

SEQ ID NO: 16043 - DNA, 186 bp, Homo sapiens
  MAP TO CHR11.1; EXPRESSED IN FETAL LIVER, SIGNAL = 2.2; EXPRESSED IN LUNG, SIGNAL = 2.9; EXPRESSED IN BRAIN, SIGNAL = 2.4; EXPRESSED IN HEART, SIGNAL = 2.9; EXPRESSED IN ADULT LIVER, SIGNAL = 3.2; EST_HUMAN HIT: BF796701.1, EVALUE 7.00e-88; SWISSPROT HIT: P10515, EVALUE 2.00e-25; NT HIT: Y00978.1, EVALUE 2.00e-87
ttttctttttaaacagaaatcatgttgttgatgtcagtgttgcggtcagtactcctgcaggactcatcacacctattgtgtttaatgcacatataaaaggagtggaaaccattgctaatgatgttgtttctttagcaaccaaagcaagagagggtaaactacagccacatgaattccaggtagggt

SEQ ID NO: 16044 - DNA, 194 bp, Homo sapiens
  MAP TO CHR7.1; EXPRESSED IN FETAL LIVER, SIGNAL =   3; EXPRESSED IN LUNG, SIGNAL =   4; EXPRESSED IN HELA, SIGNAL = 3.9; EXPRESSED IN BRAIN, SIGNAL = 3.3; EXPRESSED IN HEART, SIGNAL = 3.5; EXPRESSED IN BONE MARROW, SIGNAL = 3.7; SWISSPROT HIT: Q9RWB5, EVALUE 6.40e-01; NT HIT: gi14741051, EVALUE 1.00e-105; EST_HUMAN HIT: BE622365.1, EVALUE 1.00e-105
caggctcttgaccccagtgcttgcccttaccccagcaacgcggcgcggccagaaccagaatgcaataaatagaggcagggccaggaggcggagggccgggatggtgctagctttctgacgccgtctgcggcactgtgggttggtccacacagaagcgcttcaggggcggggcacctgagtcttcctcttcctca

SEQ ID NO: 16045 - DNA, 255 bp, Homo sapiens
  MAP TO CHR19.1; EXPRESSED IN FETAL LIVER, SIGNAL =   2; EXPRESSED IN LUNG, SIGNAL = 2.4; EXPRESSED IN HELA, SIGNAL = 2.4; EXPRESSED IN BRAIN, SIGNAL =   2; EXPRESSED IN HEART, SIGNAL =   2; EXPRESSED IN BONE MARROW, SIGNAL = 1.6; NT HIT: gi14764361, EVALUE 0.00e+00; EST_HUMAN HIT: BG831969.1, EVALUE 0.00e+00
ggccaatcacctgtagactctccttcagctgcgggatgagcatcttataacgctgcacaggatcgaagtcctgttgctgttgctgcaggaggccgctctgggcagggcccaccagttgtgctggcggttgcggctgctgctggggacccgggccgccagccgaactaggacccgatacaccagcagctgaggaagccgctgaagcttgctgctgggatgcagccatcttcctcgcgtagaccgccggaagtgcgt

SEQ ID NO: 16046 - DNA, 202 bp, Homo sapiens
  MAP TO CHR3.1; EXPRESSED IN FETAL LIVER, SIGNAL = 1.6; EXPRESSED IN BRAIN, SIGNAL = 2.2; EXPRESSED IN HEART, SIGNAL = 1.7; EXPRESSED IN ADULT LIVER, SIGNAL = 2.7; EXPRESSED IN BONE MARROW, SIGNAL = 2.3; EXPRESSED IN PLACENTA, SIGNAL = 1.7; EXPRESSED IN LUNG, SIGNAL = 2.4; SWISSPROT HIT: Q48303, EVALUE 8.40e-01; NT HIT: U66059.1, EVALUE 1.80e-01; EST_HUMAN HIT: AI860310.1, EVALUE 2.60e-01
gcctgaggcaagtgacactgagctgcttaccaccatgacaaggcatctgcacaaacacccatccttttgttcttgccagctctatgtgggtggcagaggttggaataatttcattaccagagtctatcagccttgacagtgtctctctaagattgcctttttcatgatcattttgtttgtttgcctgaaatggaattcaggt

SEQ ID NO: 16047 - DNA, 210 bp, Homo sapiens
  MAP TO CHR3.1; EXPRESSED IN BONE MARROW, SIGNAL = 0.82; EXPRESSED IN HEART, SIGNAL = 0.9; EXPRESSED IN ADULT LIVER, SIGNAL = 0.77; EXPRESSED IN BRAIN, SIGNAL = 0.77; SWISSPROT HIT: P43542, EVALUE 1.30e-01; EST_HUMAN HIT: AU123128.1, EVALUE 4.00e-03
cagcaaagaaaaggtctgatcgtcctgtacacagctataaacacgtacaaatccaatgactggtacattcctcttatcttcactctgatggctattttctttgctgggttgatttcctgggtatgtttcctgctttggaaatatgggaacattatggaatgctgtcagaaaatgaccaaggaagtctccaaggccaaacccaagtatgtg

SEQ ID NO: 16048 - DNA, 211 bp, Homo sapiens
  MAP TO CHR12.1; EXPRESSED IN BRAIN, SIGNAL = 1.4; EXPRESSED IN BONE MARROW, SIGNAL = 1.5; EXPRESSED IN HEART, SIGNAL = 1.5; EXPRESSED IN ADULT LIVER, SIGNAL = 1.9; EXPRESSED IN LUNG, SIGNAL =   3; SWISSPROT HIT: Q99622, EVALUE 9.00e-29; NT HIT: gi15306928, EVALUE 2.00e-97; EST_HUMAN HIT: BF796855.1, EVALUE 1.00e-113
cctccctgggatgcttctggcgcgcagtggtcctcgcggaggtgatccaggcgttctccgccccggagaatgcagtgcgcatggacgaggctcgggataacgcctgcaacgacatgggtaagatgctgcaattcgtgctgcccgtggccacgcagatccagcaggaggttatcaaagcctatggcttcagctgcgacggggaaggtgggtc

SEQ ID NO: 16049 - DNA, 241 bp, Homo sapiens
  MAP TO CHR19.1; EXPRESSED IN HEART, SIGNAL = 4.7; EXPRESSED IN PLACENTA, SIGNAL = 6.5; EXPRESSED IN LUNG, SIGNAL = 5.7; EXPRESSED IN FETAL LIVER, SIGNAL = 5.2; EXPRESSED IN BRAIN, SIGNAL = 6.2; EXPRESSED IN HELA, SIGNAL = 6.7; EXPRESSED IN BONE MARROW, SIGNAL = 7.7; EXPRESSED IN ADULT LIVER, SIGNAL = 0.6; SWISSPROT HIT: Q60847, EVALUE 6.00e-03; NT HIT: gi15302322, EVALUE 7.00e-57; EST_HUMAN HIT: BG763452.1, EVALUE 1.00e-56
cctgtttacactccccaaatgcgcacaggctgttatcatgggtcctgagtcatcccacacacagcctgccccagcgtccctgcccccagctggccgcagggcccgccccatggagccccctgccgccctgggctaatgggagccagatggccgcctggtgactcagccaccgggcctgtgggaacccaggcgtcccgccttcccatgcccccacacccggctcctgctcccccagcagaca

SEQ ID NO: 16050 - DNA, 141 bp, Homo sapiens
  MAP TO CHR8.1; EXPRESSED IN BONE MARROW, SIGNAL = 0.91; EXPRESSED IN ADULT LIVER, SIGNAL = 0.95; EXPRESSED IN FETAL LIVER, SIGNAL = 0.8; EXPRESSED IN BRAIN, SIGNAL = 0.84; EXPRESSED IN HEART, SIGNAL = 0.87; SWISSPROT HIT: P37327, EVALUE 5.90e+00; EST_HUMAN HIT: BE465432.1, EVALUE 7.00e-01
aactgctctagtcagtagagtccgaggagtccactttggaaaacaagaaaaattattattatggtgattattattttttaaataaaaatttcttgtgggaatgcagaaagaccagaggaaattttcccagtgctaaagttg

SEQ ID NO: 16051 - DNA, 240 bp, Homo sapiens
  MAP TO CHR9.1; EXPRESSED IN BONE MARROW, SIGNAL = 1.8; EXPRESSED IN HEART, SIGNAL = 0.95; EXPRESSED IN PLACENTA, SIGNAL = 1.4; EXPRESSED IN LUNG, SIGNAL = 0.83; EXPRESSED IN HELA, SIGNAL = 1.8; EXPRESSED IN BRAIN, SIGNAL = 1.6; EST_HUMAN HIT: BE731749.1, EVALUE 1.00e-117; NT HIT: U80802.1, EVALUE 1.00e-129; SWISSPROT HIT: Q15406, EVALUE 9.00e-44
actcacccttccggttcatccccatctggaggcatttgagcaggcggcagtactggcacctgttcctctgcttccgagacatgacacagttcttgtcacgactgcatcgatatacccgtttgttgcaaatgctccgcttgaaaaaccctttgcagccctcacaggagatgatcccatagtgcaagcctgtagcgcggtccccacaaatgagacaggttcgttgttcagcccgatcatctg

SEQ ID NO: 16052 - DNA, 255 bp, Homo sapiens
  MAP TO CHR19.1; EXPRESSED IN LUNG, SIGNAL = 1.2; EXPRESSED IN HELA, SIGNAL = 1.2; EXPRESSED IN BRAIN, SIGNAL = 0.96; EXPRESSED IN HEART, SIGNAL =   1; EXPRESSED IN FETAL LIVER, SIGNAL = 0.96; SWISSPROT HIT: P53539, EVALUE 9.90e-02; EST_HUMAN HIT: AL043875.1, EVALUE 0.00e+00; NT HIT: AF200923.2, EVALUE 0.00e+00
ctcaccctcctcccatgccctcagcctccttcctcactctggcttcatcttgtctgtcagcagtaggttcttggcccgcagggcctcgtcttgggccagccgaagggtggagctcagggcctctgccctgacgtgtttggctaaggcctggcgctccagctcctggggagaggagcgtaggcgtagctgggcttgctggactgggctgggggtggagggggaactggattgcggagggcaaagggtagggtccca

SEQ ID NO: 16053 - DNA, 118 bp, Homo sapiens
  MAP TO CHR6.1; EXPRESSED IN ADULT LIVER, SIGNAL = 0.64; EXPRESSED IN FETAL LIVER, SIGNAL = 1.1; EXPRESSED IN BRAIN, SIGNAL = 0.93; EXPRESSED IN HEART, SIGNAL = 0.74; EXPRESSED IN BONE MARROW, SIGNAL = 1.1; NT HIT: gi14742942, EVALUE 3.00e-48; SWISSPROT HIT: Q9NVP1, EVALUE 3.00e-13; EST_HUMAN HIT: AL047372.1, EVALUE 4.00e-48
accttggattgtttcaagtagcgaagaaaacccaattattctgggcacaaaatgagcagggcatgccctctcccatttaggcctctggctgttctgcccacacaatgaatatattcct

SEQ ID NO: 16054 - DNA, 189 bp, Homo sapiens
  MAP TO CHR22.1; EXPRESSED IN LUNG, SIGNAL = 1.8; EXPRESSED IN HELA, SIGNAL = 1.4; EXPRESSED IN BRAIN, SIGNAL = 1.6; EXPRESSED IN HEART, SIGNAL = 2.3; EXPRESSED IN ADULT LIVER, SIGNAL =   2; EXPRESSED IN BONE MARROW, SIGNAL = 1.7; EXPRESSED IN FETAL LIVER, SIGNAL = 1.7; NT HIT: AB003286.1, EVALUE 1.00e-102; SWISSPROT HIT: Q92523, EVALUE 4.00e-27; EST_HUMAN HIT: BE251225.1, EVALUE 1.00e-100
cccatgtcttggcagtgccaggcggtcatcgagagttcctaccaggtggccaaggcgttggcagacgacgtggagttgtactgcttccagttcctgccctttggcaaaggcctcatcaagaagtgccggaccagccctgatgcctttgtgcagatcgcgctgcagctggctcacttccgggtaggagcc

SEQ ID NO: 16055 - DNA, 218 bp, Homo sapiens
  MAP TO CHR5.1; EXPRESSED IN BONE MARROW, SIGNAL = 0.66; EXPRESSED IN ADULT LIVER, SIGNAL = 0.58; EXPRESSED IN FETAL LIVER, SIGNAL = 0.49; EXPRESSED IN LUNG, SIGNAL = 0.99; EXPRESSED IN HELA, SIGNAL = 0.43; EXPRESSED IN BRAIN, SIGNAL = 0.67; EXPRESSED IN HEART, SIGNAL = 0.96; NT HIT: AF283000.1, EVALUE 7.80e-01; SWISSPROT HIT: P22888, EVALUE 4.00e+00; EST_HUMAN HIT: AA426598.1, EVALUE 7.30e-02
taagtttgttttttattgtttcagactgagaatgtacaatgcactggctacatttatattagttgccatggtttcaaatacttcagaaattgtccaagaaaggagtggaatttttctcaccatgcaaagatgtttttccctaacttgtttgtgcccacgtaatgtaccagtttgaatcgtctgcttttctcctccccatctgtgctgttttcaagggg

SEQ ID NO: 16056 - DNA, 220 bp, Homo sapiens
  MAP TO CHR2.1; EXPRESSED IN LUNG, SIGNAL = 2.6; EXPRESSED IN HELA, SIGNAL = 1.6; EXPRESSED IN BRAIN, SIGNAL = 1.5; EXPRESSED IN BONE MARROW, SIGNAL = 1.7; EXPRESSED IN HEART, SIGNAL = 2.6; EXPRESSED IN ADULT LIVER, SIGNAL =   1; NT HIT: gi14738457, EVALUE 1.00e-107; SWISSPROT HIT: O05942, EVALUE 1.00e-08; EST_HUMAN HIT: BI913754.1, EVALUE 1.00e-120
aggagcctctccccacgctgcctctgggacgctcagctgatgtccggcaaggggagtttgttgttgccatgggaagtccctttgcactgcagaacacgatcacatccggcattgttagctctgctcagcgtccagccagagacctgggactcccccaaaccaatgtggaatacattcaaactgatgcagctattgatgtgcgtcctgataggagagaaat

SEQ ID NO: 16057 - DNA, 122 bp, Homo sapiens
  MAP TO CHR7.1; EXPRESSED IN LUNG, SIGNAL = 1.5; EXPRESSED IN BRAIN, SIGNAL = 0.92; EXPRESSED IN HEART, SIGNAL = 1.1; EXPRESSED IN ADULT LIVER, SIGNAL = 0.63; NT HIT: M77144.1, EVALUE 1.60e+00; EST_HUMAN HIT: BG485478.1, EVALUE 2.00e-62
aaacaccagtgctctttcgttgtatttttctcatttttgctttttaaaattcctttaaaaaatgtgctgttaagccagtattaggtatctttattttgtaagtgaacattccagctgttttt

SEQ ID NO: 16058 - DNA, 181 bp, Homo sapiens
  MAP TO CHR17.1; EXPRESSED IN HELA, SIGNAL = 2.8; EXPRESSED IN BRAIN, SIGNAL = 3.4; EXPRESSED IN HEART, SIGNAL = 2.9; EXPRESSED IN ADULT LIVER, SIGNAL = 4.9; EXPRESSED IN LUNG, SIGNAL = 4.1; EXPRESSED IN FETAL LIVER, SIGNAL = 3.4; SWISSPROT HIT: Q92791, EVALUE 7.00e-28; NT HIT: gi14774935, EVALUE 2.00e-93; EST_HUMAN HIT: BF316883.1, EVALUE 2.00e-97
atacctgctatggccgggtagaagtccttgaagtccacctgctcatgggccccttcacagccggccaggcaccgggcaaagactgccaggtactctgacaaggcccgctccatgtcctccgtgctgctgcggaaatccccgctgttgtagagcttcacagcccggaggaacacggcctgga

SEQ ID NO: 16059 - DNA, 219 bp, Homo sapiens
  MAP TO CHR17.1; EXPRESSED IN BRAIN, SIGNAL = 0.64; EXPRESSED IN HEART, SIGNAL = 0.73; EXPRESSED IN ADULT LIVER, SIGNAL =   1; EXPRESSED IN BONE MARROW, SIGNAL = 0.77; EST_HUMAN HIT: BE875766.1, EVALUE 1.00e-107; SWISSPROT HIT: Q19020, EVALUE 7.10e+00; NT HIT: gi14785740, EVALUE 1.00e-107
gctgctgggaaaatgaacatcagtgttgatttggaaacgaattatgccgagttggttctagatgtgggaagagtcactcttggagagaacagtaggaaaaaaatgaaggattgtaaactgagaaaaaagcagaatgaaagggtctcacgagctatgtgtgctctgctcaattctggagggggagtgatcaaggctgaaattgagaatgaagactatagt

SEQ ID NO: 16060 - DNA, 396 bp, Homo sapiens
  MAP TO CHR17.1; EXPRESSED IN HELA, SIGNAL = 3.1; EXPRESSED IN BRAIN, SIGNAL = 4.1; EXPRESSED IN BONE MARROW, SIGNAL = 4.4; EXPRESSED IN HEART, SIGNAL = 3.2; EXPRESSED IN ADULT LIVER, SIGNAL = 2.1; EXPRESSED IN FETAL LIVER, SIGNAL = 3.7; EXPRESSED IN LUNG, SIGNAL = 3.2; EST_HUMAN HIT: BI457762.1, EVALUE 0.00e+00; SWISSPROT HIT: P11086, EVALUE 8.00e-61; NT HIT: X52730.1, EVALUE 0.00e+00
cttctgagcccaggcgaagaagacgcccttgacatcatctacgcctgtctgaaggtgggcaggcatgatataggtgcggaggtcccggaccttgtagccactacgcaccagggcctccctcacctcctcctcagacactggcaccaccgtcagcctggcctccccagccaggtaccacgactcctccagggccccgatgaggaggaggtgccccccaggcctcagcagcgtggtgatgtggtccagggcccgctgaaagctggcaagatctgggctcacagcctccaagcagaaggcagagaccagggcgtcagcaggcaggggagctgggctcccagcacccaggggctggggctggtgcacgtcgatgggcaggacccgtttcaccctggctcg

SEQ ID NO: 16061 - DNA, 136 bp, Homo sapiens
  MAP TO CHR22.1; EXPRESSED IN ADULT LIVER, SIGNAL = 0.47; EXPRESSED IN BONE MARROW, SIGNAL = 0.66; EXPRESSED IN FETAL LIVER, SIGNAL = 0.7; EXPRESSED IN HELA, SIGNAL = 1.5; EXPRESSED IN BRAIN, SIGNAL = 0.49; EST_HUMAN HIT: BI547806.1, EVALUE 2.00e-66; NT HIT: gi14777130, EVALUE 1.00e-66
gttacctgcttgaccatcttgctgctctcacggccatacatgcgcagtaaagacccccagttcttgacatgtgggtgcagcagctgaaggatcttctgtgaggctaactgctttccaactctcttgttcttaccta

SEQ ID NO: 16062 - DNA, 243 bp, Homo sapiens
  MAP TO CHR11.1; EXPRESSED IN BONE MARROW, SIGNAL =  13; EXPRESSED IN ADULT LIVER, SIGNAL = 8.4; EXPRESSED IN FETAL LIVER, SIGNAL =  11; EXPRESSED IN BRAIN, SIGNAL =  10; EXPRESSED IN PLACENTA, SIGNAL = 9.1; EXPRESSED IN LUNG, SIGNAL =  16; EXPRESSED IN HELA, SIGNAL = 6.1; EXPRESSED IN HEART, SIGNAL =  13; NT HIT: gi15487669, EVALUE 4.00e-55; EST_HUMAN HIT: AL574309.1, EVALUE 0.00e+00; SWISSPROT HIT: Q9ULJ8, EVALUE 3.00e+00
tcctctcaaaggacaggtggttccagctcagggctgcacatctccgcagacgggccctggtcaggatgcattagctcagcctcccagggggtgaaggtccccaggaggggagacacaggctacaactgacctgatgtaggtggactggtctcggaaggtgtcacacagggagtttccatcgagccagagctcttctagcttcagcccctttatcttgtccaattcccgctcagacttcaactg

SEQ ID NO: 16063 - DNA, 205 bp, Homo sapiens
  MAP TO CHR12.1; EXPRESSED IN LUNG, SIGNAL = 3.3; EXPRESSED IN BRAIN, SIGNAL = 1.5; EXPRESSED IN HEART, SIGNAL =   2; EXPRESSED IN ADULT LIVER, SIGNAL =   2; EXPRESSED IN BONE MARROW, SIGNAL = 1.2; EXPRESSED IN PLACENTA, SIGNAL = 4.2; EXPRESSED IN FETAL LIVER, SIGNAL = 1.3; SWISSPROT HIT: P54259, EVALUE 4.00e-14; NT HIT: gi14784121, EVALUE 4.00e-98; EST_HUMAN HIT: BI862001.1, EVALUE 6.00e-98
ctcacagctgccccttaccgggacctgccggcctccctttctgccccgatgtcagcagctcatcagctgcaggccatgcacgcacagtcagctgagctgcagcgcttggcgctggaacagcagcagtggctgcatgcccatcacccgctgcacagtgtgccgctgcctgcccaggaggactactacaggtaccctagggtgcccc

SEQ ID NO: 16064 - DNA, 215 bp, Homo sapiens
  MAP TO CHR3.1; EXPRESSED IN PLACENTA, SIGNAL = 2.7; EXPRESSED IN FETAL LIVER, SIGNAL = 2.5; EXPRESSED IN LUNG, SIGNAL = 1.6; EXPRESSED IN HELA, SIGNAL = 3.8; EXPRESSED IN BRAIN, SIGNAL = 2.5; EXPRESSED IN BONE MARROW, SIGNAL = 3.2; SWISSPROT HIT: P51178, EVALUE 6.00e-13; NT HIT: gi14737669, EVALUE 1.00e-105; EST_HUMAN HIT: BG766678.1, EVALUE 9.00e-97
tccctgagcagcaccggatgtaggcttcagtgctgctgggcccggctagctggtcctccacaggtaggtgttgtgtgaagaggacaccaggtagtggctaagtggctggcccatgtcctggtagacacggcggtgtgccaggctgaaggcgctgcgtcagcgacagtaagtacatgaggaagccgtccttggtcatctgccgctgcgccttggct

SEQ ID NO: 16065 - DNA, 134 bp, Homo sapiens
  MAP TO CHR16.1; EXPRESSED IN ADULT LIVER, SIGNAL = 0.49; EXPRESSED IN FETAL LIVER, SIGNAL = 0.6; EXPRESSED IN BRAIN, SIGNAL = 0.76; EXPRESSED IN HEART, SIGNAL =   1; EXPRESSED IN BONE MARROW, SIGNAL = 0.68; SWISSPROT HIT: P46804, EVALUE 2.30e-01; NT HIT: gi14776758, EVALUE 2.00e-68; EST_HUMAN HIT: BG468602.1, EVALUE 2.00e-68
caggtgaccaagaatatggcccaggtgaccaaagccctggacaaggccctgagcaccatggacctgcagaaggtctcctcagtgatggacaggttcgagcagcaggtgcagaacctggacgtccatacatcggt

SEQ ID NO: 16066 - DNA, 149 bp, Homo sapiens
  MAP TO CHR10.1; EXPRESSED IN LUNG, SIGNAL = 0.99; EXPRESSED IN HELA, SIGNAL =   2; EXPRESSED IN BRAIN, SIGNAL = 2.1; EXPRESSED IN BONE MARROW, SIGNAL =   2; EXPRESSED IN ADULT LIVER, SIGNAL = 2.4; EXPRESSED IN PLACENTA, SIGNAL = 1.7; EXPRESSED IN FETAL LIVER, SIGNAL = 1.4; SWISSPROT HIT: P50828, EVALUE 2.60e+00; NT HIT: AF143312.1, EVALUE 1.00e-78; EST_HUMAN HIT: AA021528.1, EVALUE 1.00e-05
ggggagtgggaatttggaaagttccccaactagggacacacgtgacctccttcggaaagtagttccgactgtggcccgtgtatccttccacctccttttgaaccctcctaggtctcctcgccccgcccactcgctgggctgcagcttcc

SEQ ID NO: 16067 - DNA, 186 bp, Homo sapiens
  MAP TO CHR19.1; EXPRESSED IN FETAL LIVER, SIGNAL = 5.2; EXPRESSED IN BRAIN, SIGNAL = 5.2; EXPRESSED IN LUNG, SIGNAL = 3.7; EXPRESSED IN HEART, SIGNAL = 3.5; EXPRESSED IN BONE MARROW, SIGNAL = 6.8; EXPRESSED IN ADULT LIVER, SIGNAL = 4.9; EST_HUMAN HIT: BE899453.1, EVALUE 3.00e-93; SWISSPROT HIT: Q02818, EVALUE 1.00e-12; NT HIT: gi15304409, EVALUE 2.00e-93
gtcacctgctgcagctctctcttctgggcctccaggcggccctgggaccgccctagagcctctgtctcctggctgaggcgctgggccttggcattcagctctgcctcccgggcagccagctcctcttcaaagcgcctcagctcttcctcggtgtaggcagggtgcatctccactgtctgcagggca

SEQ ID NO: 16068 - DNA, 144 bp, Homo sapiens
  MAP TO CHR2.1; EXPRESSED IN HEART, SIGNAL = 0.47; EXPRESSED IN BONE MARROW, SIGNAL = 1.2; EXPRESSED IN ADULT LIVER, SIGNAL = 0.61; EXPRESSED IN BRAIN, SIGNAL = 0.97; EXPRESSED IN LUNG, SIGNAL = 0.73; NT HIT: gi5902153, EVALUE 5.00e-69; EST_HUMAN HIT: BI011235.1, EVALUE 2.00e-66; SWISSPROT HIT: P18730, EVALUE 5.90e+00
tacctcataggaatcccggatcaggtccgaaatatcagtcacagggtagggctcctggtcgtcggagaaaaaggcatggtggctgccaactgggggccctgggctgtcctcattcttaatgtgatctagaaacctgaacacacc

SEQ ID NO: 16069 - DNA, 215 bp, Homo sapiens
  MAP TO CHR19.1; EXPRESSED IN PLACENTA, SIGNAL = 1.7; EXPRESSED IN FETAL LIVER, SIGNAL = 0.78; EXPRESSED IN LUNG, SIGNAL = 1.6; EXPRESSED IN BRAIN, SIGNAL = 0.77; EXPRESSED IN HEART, SIGNAL = 0.95; EXPRESSED IN BONE MARROW, SIGNAL = 0.85; EXPRESSED IN ADULT LIVER, SIGNAL = 1.1; NT HIT: gi14760508, EVALUE 1.00e-116; EST_HUMAN HIT: BG680205.1, EVALUE 1.00e-116
ctcacaggggacatcttcgaaagcttctcctcgcacccgcccctcatcctccccctggggagctcgcgcctgcgcctcactggtccagtgacggacgatgccttgcaccgtgaactccgtaggctccgccgcctcctctgggatcttgagcagcaggagctgccagccaattatcgccatgggcctcccgtggccacgtctccttgagaaccaat

SEQ ID NO: 16070 - DNA, 194 bp, Homo sapiens
  MAP TO CHR20.1; EXPRESSED IN BRAIN, SIGNAL = 2.2; EXPRESSED IN BONE MARROW, SIGNAL = 2.2; EXPRESSED IN HEART, SIGNAL = 1.2; EXPRESSED IN ADULT LIVER, SIGNAL = 1.6; EXPRESSED IN PLACENTA, SIGNAL = 1.7; EXPRESSED IN FETAL LIVER, SIGNAL = 1.9; EXPRESSED IN LUNG, SIGNAL = 1.2; SWISSPROT HIT: Q9Y6D5, EVALUE 1.00e-28; NT HIT: gi14786247, EVALUE 4.00e-98; EST_HUMAN HIT: BF909315.1, EVALUE 5.00e-98
aggctcttctgactgcagtgacttccccacacattgaaattcatgagggtactatcctgcagacagtgagaacatgttacaatatctatttggccagcaaaaatctcatcaatcaaaccactgccaaggctacccttactcagatgctgaacgtcattttcacccgcatggaaaaccaagtggtgagtgacagc

SEQ ID NO: 16071 - DNA, 231 bp, Homo sapiens
  MAP TO CHR7.1; EXPRESSED IN ADULT LIVER, SIGNAL = 2.9; EXPRESSED IN PLACENTA, SIGNAL = 3.4; EXPRESSED IN FETAL LIVER, SIGNAL = 3.6; EXPRESSED IN HELA, SIGNAL = 4.2; EXPRESSED IN LUNG, SIGNAL = 1.9; EXPRESSED IN BRAIN, SIGNAL = 3.5; EXPRESSED IN HEART, SIGNAL = 2.1; SWISSPROT HIT: P23523, EVALUE 2.40e-01; EST_HUMAN HIT: BF883142.1, EVALUE 8.00e-39
gtgacatctaccacatgaggaaaaaattcagaagcaaacttaggatttctacttcctatgaccacatgatagccgcatctaataagtcgaatggtcaaggatttggcaaaatctccacttccaatcacacctacagtgaccttccttgcatctttgataccatttatgccattaggtaaaaaagtttcactaaggctcttagggcttcccatcatagagattgattccatg

SEQ ID NO: 16072 - DNA, 313 bp, Homo sapiens
  MAP TO CHR7.1; EXPRESSED IN BRAIN, SIGNAL = 0.48; EXPRESSED IN HEART, SIGNAL = 0.85; EXPRESSED IN BONE MARROW, SIGNAL = 0.57; EXPRESSED IN LUNG, SIGNAL = 0.6; SWISSPROT HIT: Q02357, EVALUE 1.00e-08; NT HIT: gi11421851, EVALUE 0.00e+00; EST_HUMAN HIT: BE220587.1, EVALUE 0.00e+00
cttacctctccaaaccaattgcttggcacagagaatggaacttggagttgtacaaaagtgcaaagctgtgtgtccacttaaggagtagcaattgagctttgccccacgatcacagaggatcttaacacaatccacattggccatttcacaagccacgtgaagaggggttttcccattgggtctacagttgattgtagcattgtggtccagtagcaccagaagacattccacatggccaaacaagacagagagatggaggcctgtggcccaggaagacttcaatttatagctaggcaaccagtaacctgaaaaa

SEQ ID NO: 16073 - DNA, 179 bp, Homo sapiens
  MAP TO CHR7.1; EXPRESSED IN FETAL LIVER, SIGNAL = 1.9; EXPRESSED IN LUNG, SIGNAL = 3.6; EXPRESSED IN HELA, SIGNAL = 1.3; EXPRESSED IN BRAIN, SIGNAL = 2.2; EXPRESSED IN HEART, SIGNAL =   3; EST_HUMAN HIT: BF723595.1, EVALUE 1.00e-55; SWISSPROT HIT: P22751, EVALUE 1.10e+00
cctctctggcccagcaacttattggtgctttggatctggcacagagctcctggggatccctccccaagaggagaccatcttgggatcccagataacactgagcaacttacgccctgtccttcctgccctggcttctggcagtcagcctccatgagccagtcagcaggatccattcaagg

SEQ ID NO: 16074 - DNA, 176 bp, Homo sapiens
  MAP TO AL359813.20; EXPRESSED IN PLACENTA, SIGNAL = 4.1; EXPRESSED IN FETAL LIVER, SIGNAL = 4.5; EXPRESSED IN LUNG, SIGNAL = 2.5; EXPRESSED IN HELA, SIGNAL = 4.7; EXPRESSED IN BRAIN, SIGNAL = 4.7; EXPRESSED IN HEART, SIGNAL = 2.3; EXPRESSED IN BONE MARROW, SIGNAL = 4.5; EST_HUMAN HIT: AI357259.1, EVALUE 2.00e-88; SWISSPROT HIT: P02463, EVALUE 4.40e-02; NT HIT: gi16174226, EVALUE 1.00e-88
tgacctaccccaatgcaaccagcaatgaggcgtttgaattggtcctttcggcgcttgtcagccactttctgcagggaggggtttaaaagcttgcagtcaaactggtccagtgagtccttctgtatttcagggatttgctccattacagctcttatctccaggtacctggggcgctg

SEQ ID NO: 16075 - DNA, 256 bp, Homo sapiens
  MAP TO CHR19.1; EXPRESSED IN BRAIN, SIGNAL = 1.9; EXPRESSED IN HEART, SIGNAL = 0.71; EXPRESSED IN ADULT LIVER, SIGNAL = 1.1; EXPRESSED IN BONE MARROW, SIGNAL = 1.2; EXPRESSED IN FETAL LIVER, SIGNAL = 0.52; EST_HUMAN HIT: AA988386.1, EVALUE 0.00e+00; SWISSPROT HIT: P23441, EVALUE 8.50e-01; NT HIT: gi16177516, EVALUE 0.00e+00
catcccagcccctgaccttctggccatccagcagcacgcggtctcccaggcgcaagcccagtgcgctaagcatgagattgcctgggacgttgtcatagttgggtagcgtgaccttggggagggcgcaagatagtggcactgcctcttccagaagcgtccgcagctccttggccaccagtgccgcctctgccttgtccagggacatgtccataggatctgggaccacctccgccggcacctgtccttttcgattctg

SEQ ID NO: 16076 - DNA, 229 bp, Homo sapiens
  MAP TO CHR1.1; EXPRESSED IN LUNG, SIGNAL = 0.82; EXPRESSED IN FETAL LIVER, SIGNAL = 0.75; EXPRESSED IN BRAIN, SIGNAL = 0.95; SWISSPROT HIT: P51126, EVALUE 5.80e+00; NT HIT: AB029012.1, EVALUE 1.00e-116; EST_HUMAN HIT: BG995290.1, EVALUE 1.00e-113
tacctgctctctccaagctgtgcacacacataaggcagatgatgaccatttgaaagatgagaaggtccgggaggaaagcatatccactctcatactcctcctcatcctcactggccaggctgaggttgggtgaggagggcaggtagaagaggcagaggttgaagtcctccaggactgactggcaaagtgaggtcagctctgagtccacggagctacagaggggcaggag

SEQ ID NO: 16077 - DNA, 348 bp, Homo sapiens
  MAP TO CHR11.1; EXPRESSED IN ADULT LIVER, SIGNAL = 0.66; EXPRESSED IN BONE MARROW, SIGNAL = 0.67; EXPRESSED IN FETAL LIVER, SIGNAL = 0.56; EXPRESSED IN BRAIN, SIGNAL = 0.6; EXPRESSED IN LUNG, SIGNAL = 0.64; EXPRESSED IN HEART, SIGNAL = 0.92; SWISSPROT HIT: Q9Z0E8, EVALUE 2.00e-04; NT HIT: gi14773420, EVALUE 0.00e+00; EST_HUMAN HIT: BI762768.1, EVALUE 0.00e+00
gtgccatgaccttctcggagatcctggaccgtgtgggaagcatgggccatttccagttcctgcatgtagccatactgggcctcccgatcctcaacatggccaaccacaacctgctgcagatcttcacagccgccacccctgtccaccactgtcgcccgccccacaatgcctccacagggccttgggtgctccccatgggcccaaatgggaagcctgagaggtgcctccgttttgtacatccgcccaatgccagcctgcccaatgacacccagagggccatggagccatgcctggatggctgggtctacaacagcaccaaggactccattgtgacagaggtatgcctgg

SEQ ID NO: 16078 - DNA, 141 bp, Homo sapiens
  MAP TO CHR9.1; EXPRESSED IN FETAL LIVER, SIGNAL = 1.3; EXPRESSED IN HELA, SIGNAL = 2.5; EXPRESSED IN LUNG, SIGNAL = 1.9; EXPRESSED IN BRAIN, SIGNAL = 1.6; EXPRESSED IN BONE MARROW, SIGNAL = 1.7; EXPRESSED IN HEART, SIGNAL = 1.9; NT HIT: AB046844.1, EVALUE 3.00e-64; EST_HUMAN HIT: AI792319.1, EVALUE 4.00e-67
ttttaaacttgcagctcctggatgaaacggccacactggtcttctttgttctaacggggtataaattccgtccggcttcagataacccctacctacaactttctcaggaagaagaagacttggaaatggagtccgtgtaag

SEQ ID NO: 16079 - DNA, 195 bp, Homo sapiens
  MAP TO CHR12.1; EXPRESSED IN BRAIN, SIGNAL = 0.94; EXPRESSED IN HEART, SIGNAL = 0.78; EXPRESSED IN ADULT LIVER, SIGNAL = 1.3; EXPRESSED IN PLACENTA, SIGNAL = 1.2; EXPRESSED IN FETAL LIVER, SIGNAL = 0.89; SWISSPROT HIT: Q61193, EVALUE 1.70e-01; NT HIT: gi14763443, EVALUE 1.00e-101; EST_HUMAN HIT: AV686495.1, EVALUE 1.00e-101
ccccagctcgggcggccacctgtctttgccgcggtgacccttctctcatgaccctgcggtgccttgagccctccgggaatggcggggaagggacgcggagccagtgggggaccgcggggtcggcggaggagccatccccgcaggcggcgcgtctggcgaaggccctgcgggagctcggtcagacaggtagggagc

SEQ ID NO: 16080 - DNA, 127 bp, Homo sapiens
  MAP TO CHR11.1; EXPRESSED IN PLACENTA, SIGNAL = 1.9; EXPRESSED IN LUNG, SIGNAL = 1.2; EXPRESSED IN HELA, SIGNAL = 2.1; EXPRESSED IN BRAIN, SIGNAL = 1.9; EXPRESSED IN FETAL LIVER, SIGNAL = 1.3; EXPRESSED IN HEART, SIGNAL = 1.3; EXPRESSED IN BONE MARROW, SIGNAL = 1.8; EXPRESSED IN ADULT LIVER, SIGNAL = 2.2; SWISSPROT HIT: P17883, EVALUE 4.60e+00; NT HIT: AL161516.2, EVALUE 4.20e-01; EST_HUMAN HIT: BI771776.1, EVALUE 6.20e-01
acttgcttctcttctccaaaaattgctacaggtttatgcacagcaagcttgcttccagatacaatgtcactttggacttctaaaacaagagctgagcagaaattcacaaattgcaaagacatattac

SEQ ID NO: 16081 - DNA, 182 bp, Homo sapiens
  MAP TO CHR5.1; EXPRESSED IN ADULT LIVER, SIGNAL = 0.9; EXPRESSED IN BONE MARROW, SIGNAL = 0.66; EXPRESSED IN LUNG, SIGNAL = 0.61; EXPRESSED IN FETAL LIVER, SIGNAL = 0.5; EXPRESSED IN BRAIN, SIGNAL = 0.63; EXPRESSED IN HEART, SIGNAL = 0.85; EST_HUMAN HIT: BF829007.1, EVALUE 3.70e+00; SWISSPROT HIT: P52987, EVALUE 4.30e+00; NT HIT: gi16171606, EVALUE 1.00e-94
ccagctatgaccacgaaggccgcctgaccaacgtgacgcgccccacgggggtggtaaccagtctgcaccgggaaatggagaaatctattaccattgacattgagaactccaaccgtgatgatgacgtcactgtcatcaccaacctctcttcagtagaggcctcctacacagtggtacaaggt

SEQ ID NO: 16082 - DNA, 367 bp, Homo sapiens
  MAP TO CHR17.1; EXPRESSED IN BRAIN, SIGNAL = 0.63; EXPRESSED IN HEART, SIGNAL = 0.8; EXPRESSED IN LUNG, SIGNAL = 1.4; EST_HUMAN HIT: BF766850.1, EVALUE 4.00e-60; SWISSPROT HIT: P54726, EVALUE 3.80e+00; NT HIT: gi14772094, EVALUE 0.00e+00
tcctacctgtaaggcctccagtcgcatgggggatggttcgtaggtgcttcctgctgcagagccagcatcgctacctgaacaggaatcctccttgggcagtacgacaatggaaatgcagagtcgaatgagccagcagggctctgaagaccccttaggtgagctaactgacgtttcttccagagagggtcctgcaggggctttcttccaccaatcaggagggctgaggtgaggggttgctgaattgctattaccgagtccagaagaacatggctgttgcagaagtagttggacttcaggtaaaggtgcgtgggtggacactatagctcccaagagtgtgagacttgacacacgaacattaacatctgtc

SEQ ID NO: 16083 - DNA, 165 bp, Homo sapiens
  MAP TO CHR19.1; EXPRESSED IN PLACENTA, SIGNAL = 2.5; EXPRESSED IN FETAL LIVER, SIGNAL = 2.1; EXPRESSED IN LUNG, SIGNAL = 2.1; EXPRESSED IN HELA, SIGNAL =   2; EXPRESSED IN BRAIN, SIGNAL = 2.5; EXPRESSED IN HEART, SIGNAL =   2; EXPRESSED IN ADULT LIVER, SIGNAL = 2.7; EXPRESSED IN BONE MARROW, SIGNAL = 2.5; EST_HUMAN HIT: AL560022.1, EVALUE 4.00e-86; SWISSPROT HIT: P18887, EVALUE 6.00e-25; NT HIT: gi14763675, EVALUE 3.00e-86
gtaccttgctgtagggctggctgcaaacaattttgacccggtcccagcgcttctcggcggctgcccggaccagcttgtcaggcccaaacatgcgaacgcggttggggtttgagccactgcggctctcggaaggggacatgaaagatgaggtgaccagaaggacct

SEQ ID NO: 16084 - DNA, 198 bp, Homo sapiens
  MAP TO CHR19.1; EXPRESSED IN LUNG, SIGNAL =   1; EXPRESSED IN BRAIN, SIGNAL = 0.92; EXPRESSED IN HEART, SIGNAL = 0.89; EXPRESSED IN ADULT LIVER, SIGNAL = 1.4; EXPRESSED IN FETAL LIVER, SIGNAL = 1.1; NT HIT: gi4507748, EVALUE 1.00e-106; EST_HUMAN HIT: BI258081.1, EVALUE 1.00e-106; SWISSPROT HIT: P29597, EVALUE 1.00e-36
agggtcacttcggcaaggtcagcttgtactgctacgatccgaccaacgacggcactggcgagatggtggcggtgaaagccctcaaggcagactgcggcccccagcaccgctcgggctggaagcaggagattgacattctgcgcacgctctaccacgagcacatcatcaagtacaagggctgctgcgaggaccaaggtg

SEQ ID NO: 16085 - DNA, 133 bp, Homo sapiens
  MAP TO CHR3.1; EXPRESSED IN PLACENTA, SIGNAL = 2.5; EXPRESSED IN FETAL LIVER, SIGNAL = 2.3; EXPRESSED IN LUNG, SIGNAL = 1.8; EXPRESSED IN HELA, SIGNAL = 2.1; EXPRESSED IN BRAIN, SIGNAL = 2.1; EXPRESSED IN HEART, SIGNAL = 2.4; EXPRESSED IN BONE MARROW, SIGNAL = 2.1
gatcaagggacatgttcagaaaatggaaatatttggccaagccttcagagatttaattaaaattaatattatgccttatcaaagcagaaagctcaacgctgtgcatgtagaacaatctatttaaccaattagc

SEQ ID NO: 16086 - DNA, 349 bp, Homo sapiens
  MAP TO CHR12.1; EXPRESSED IN HEART, SIGNAL = 0.89; EXPRESSED IN BONE MARROW, SIGNAL = 0.76; EXPRESSED IN ADULT LIVER, SIGNAL = 0.83; EXPRESSED IN FETAL LIVER, SIGNAL = 0.64; EXPRESSED IN LUNG, SIGNAL = 0.82; EXPRESSED IN BRAIN, SIGNAL = 0.79; NT HIT: gi14150091, EVALUE 0.00e+00; EST_HUMAN HIT: AL539585.1, EVALUE 0.00e+00
gagtcgaccacaccaaaatgagtctacgtgatgctagtgggggacataagagatcaagagatagacgaaggtcaagtgacagatcacgagattcatctcatgaaagaacagagtctcaactcactccttgtattagaaatgtgacttctccaacacgacagcaccatgttgaacaagaaaaagactgcagttcctctcgtccaagcagtctgcgtcctcaaaaagcatccccaattggttccattagcagtgctgggaacagcagcagaaacagtagtcagtcaagttcaggtggtagctgtaagacatctggggagatggtgtttgtatatgaaaatgcaaaagaagg

SEQ ID NO: 16087 - DNA, 348 bp, Homo sapiens
  MAP TO AC009789.18; EXPRESSED IN FETAL LIVER, SIGNAL =   2; EXPRESSED IN LUNG, SIGNAL = 1.1; EXPRESSED IN HELA, SIGNAL = 2.5; EXPRESSED IN BRAIN, SIGNAL = 2.2; EXPRESSED IN HEART, SIGNAL = 1.2; EXPRESSED IN BONE MARROW, SIGNAL = 2.2; SWISSPROT HIT: O05544, EVALUE 1.50e+00; NT HIT: AF287967.1, EVALUE 0.00e+00; EST_HUMAN HIT: AI769799.1, EVALUE 0.00e+00
tcctgctgcctgggtaggccccacaaggcctggtctgggagtatacggaaacaaaaatgatcctcagtgcaaaatgtcttgtgtatttctctgtgaatccatgggtctggctagagggcccaaagcttgtaaatatggggatagtctgggtcagacccatctctcccttacccatcttgcttccaagaccatttgtagtgagcgagtggatgctgtgctacgtgtgaaatctgtctttgcggggcctgtctcagtgattcgcttttggtatttgtttgtagctttcctggaagtcaaataaatgtttcccccactccattgcccttccacttgtcttttctccgaggg

SEQ ID NO: 16088 - DNA, 201 bp, Homo sapiens
  MAP TO CHR7.1; EXPRESSED IN HEART, SIGNAL = 0.66; EXPRESSED IN BONE MARROW, SIGNAL = 0.57; EXPRESSED IN BRAIN, SIGNAL = 0.54; EXPRESSED IN LUNG, SIGNAL = 0.63; SWISSPROT HIT: Q60181, EVALUE 1.90e+00; NT HIT: gi14746296, EVALUE 9.00e-96; EST_HUMAN HIT: AI934090.1, EVALUE 1.00e+00
tctgttttccacataaaaagccctgcagaggaaacacttgccccttcaggaccagagtccaacgtaaaatggatgtcagaaccttctggatcgaaggccacgaactgatactcaaagttttcaccataaaatgtctgtaatttgtcttgcaatgcttgaatcactgggggctggttgtctgtaatagagaaaacacttaac

SEQ ID NO: 16089 - DNA, 206 bp, Homo sapiens
  MAP TO CHR13.1; EXPRESSED IN BRAIN, SIGNAL = 0.85; EXPRESSED IN ADULT LIVER, SIGNAL = 2.2; EST_HUMAN HIT: BI493852.1, EVALUE 8.00e-91; SWISSPROT HIT: Q9UZ57, EVALUE 1.10e+00; NT HIT: gi16165290, EVALUE 2.00e-90
cctcactgcacggcttgttcattggcactgcttcccgagtcctggggcttcatcacgtcgggcagctcaggcgggctggaaaacggctcgatgcacagggtctcaaagctgtcgtctgcgcggaaggcgagccccactgtggctggggcctgtggccgtgctgtttggctggtgaagccacactcacccagtgtcttgccatcatc

SEQ ID NO: 16090 - DNA, 223 bp, Homo sapiens
  MAP TO CHR22.1; EXPRESSED IN BONE MARROW, SIGNAL = 0.49; EXPRESSED IN FETAL LIVER, SIGNAL = 0.45; EXPRESSED IN BRAIN, SIGNAL = 0.43; EST_HUMAN HIT: AW392986.1, EVALUE 1.00e-113; SWISSPROT HIT: Q9Y6J0, EVALUE 3.00e-39; NT HIT: AB002328.1, EVALUE 1.00e-121
accttgatgtgcttgttgctgcagtccctcagcagcgggttgggcaggctggtgctgtgcctcctccagctgtggtagacgctgagcacgacctccgccaagcctggaggccaccttaccaagaacttgtggcccatggctttcaggtagcgcatcatcagctccaggatgcccccgttggttaggttctccagcaggaactcatgcacgtcctgcttttctg

SEQ ID NO: 16091 - DNA, 175 bp, Homo sapiens
  MAP TO CHR22.1; EXPRESSED IN FETAL LIVER, SIGNAL = 0.67; EXPRESSED IN HELA, SIGNAL = 1.1; EXPRESSED IN BRAIN, SIGNAL = 0.95; EXPRESSED IN HEART, SIGNAL = 0.61; EXPRESSED IN BONE MARROW, SIGNAL = 0.86; EXPRESSED IN ADULT LIVER, SIGNAL = 0.92; EST_HUMAN HIT: BI766192.1, EVALUE 3.00e-56; SWISSPROT HIT: P07476, EVALUE 2.60e-02; NT HIT: gi14778221, EVALUE 5.00e-94
agacctgtgagcagctgctgtttgtcgtgctcccactcagacaggcactgctcatcctcctccgcctgtcgccgccgtgccccctgctcctgtttcagcgcctgctccagcttgcccgcctgcttcctcaggccatccttctgcccttcagcctcctccagctgggccctgaggg

SEQ ID NO: 16092 - DNA, 203 bp, Homo sapiens
  MAP TO CHR2.1; EXPRESSED IN PLACENTA, SIGNAL = 1.1; EXPRESSED IN FETAL LIVER, SIGNAL = 1.1; EXPRESSED IN LUNG, SIGNAL = 1.3; EXPRESSED IN HELA, SIGNAL = 1.6; EXPRESSED IN BRAIN, SIGNAL = 1.1; EXPRESSED IN BONE MARROW, SIGNAL = 0.89; EXPRESSED IN HEART, SIGNAL = 1.4; EST_HUMAN HIT: AW503286.1, EVALUE 1.00e-86; SWISSPROT HIT: P35243, EVALUE 5.50e+00; NT HIT: gi16160080, EVALUE 3.00e-89
acattgataaactttgtgatgacttctgccctttgctggggggttggtttgctaagaaccatcaactggacccacttagagattccattaaataaagcaatcgatctttccaaggttggattattctccaggcagccatggatgacatagctttggtaatcagtgaactaggaaaggaagattcagagactctgaattataat

SEQ ID NO: 16093 - DNA, 219 bp, Homo sapiens
  MAP TO CHR17.1; EXPRESSED IN FETAL LIVER, SIGNAL = 0.64; EXPRESSED IN HELA, SIGNAL = 0.85; EXPRESSED IN BRAIN, SIGNAL = 0.78; EXPRESSED IN HEART, SIGNAL = 0.81; EXPRESSED IN BONE MARROW, SIGNAL = 0.85; EXPRESSED IN ADULT LIVER, SIGNAL = 0.93; EXPRESSED IN LUNG, SIGNAL = 0.81; NT HIT: gi11427857, EVALUE 1.00e-115; EST_HUMAN HIT: BG281391.1, EVALUE 1.00e-114; SWISSPROT HIT: Q13472, EVALUE 2.00e-37
ttaggtacatcagctatccccgaacagaaacaaacatttttcccagagacttaaacctgacggtgttggtggaacagcagacccccgatccacgctggggggcctttgcccagagcattctagagcggggtggtcccaccccacgcaatgggaacaagtctgaccaagctcaccctcccattcaccccaccaaatacaccaacaacttacaggttggtt

SEQ ID NO: 16094 - DNA, 483 bp, Homo sapiens
  MAP TO CHR6.1; EXPRESSED IN ADULT LIVER, SIGNAL = 1.1; EXPRESSED IN BONE MARROW, SIGNAL = 1.1; EXPRESSED IN PLACENTA, SIGNAL = 1.4; EXPRESSED IN LUNG, SIGNAL =   1; EXPRESSED IN BRAIN, SIGNAL = 0.98; EXPRESSED IN HEART, SIGNAL = 1.1; SWISSPROT HIT: P05549, EVALUE 9.00e-56; NT HIT: X77343.2, EVALUE 0.00e+00; EST_HUMAN HIT: AL556459.1, EVALUE 0.00e+00
gggctgtgttccctcccgcgctggttgcgcggcctcttaccgggacctcctcgatggcgtgaggtaaggagtggatcgagaggtctccgagtcctgagctgagcgcgtgtgggccgtgcaggaggtcctcgtgccgcctgtagtccctgcgaggatccaggcccgacagctggtgaggcagcccccggtgcgtgtgcaggagcccagactcctggctctgcctctggccgggccagcctgggtgctgcggctgcggctgggcgtgcagggggttcaggctgtaggggtcgttgacgtgggagtaaggatcttgcgactgggggtagataggctggtagggtggggggaagtatgggggctggaagtcggcattgggggtgtgggacagcggcggggcgctcgtgtagggagattgacctacagtgcccagctggggcaaccgtgccgtcccgttgctggtgccgtcgtgacggtcctagaaga

SEQ ID NO: 16095 - DNA, 208 bp, Homo sapiens
  MAP TO CHR1.1; EXPRESSED IN BRAIN, SIGNAL = 1.9; EXPRESSED IN HEART, SIGNAL = 2.5; EXPRESSED IN BONE MARROW, SIGNAL = 1.5; EXPRESSED IN ADULT LIVER, SIGNAL = 2.9; EXPRESSED IN FETAL LIVER, SIGNAL = 1.6; EXPRESSED IN LUNG, SIGNAL = 3.1; EST_HUMAN HIT: AI457186.1, EVALUE 1.00e-109; SWISSPROT HIT: P54739, EVALUE 2.50e+00; NT HIT: gi14764730, EVALUE 1.00e-113
gccctcacctggtgcgcagggcctgccaggcggcgtcgatgtcggcatagaggttcctctcggaaggcctgcccgagctggcaccgtagccggagtagtcgtaggagaagatgttgcagtggaggcgggagcccaggccaatgtagaagctgctcatctggcccaggtccacggcattgccgtgcgagaagaggaccgtgtacctggg

SEQ ID NO: 16096 - DNA, 287 bp, Homo sapiens
  MAP TO CHRX.1; EXPRESSED IN HELA, SIGNAL = 1.3; EXPRESSED IN BRAIN, SIGNAL = 1.1; EXPRESSED IN HEART, SIGNAL = 0.87; EXPRESSED IN BONE MARROW, SIGNAL =   1; EXPRESSED IN LUNG, SIGNAL = 0.76; EST_HUMAN HIT: BG911464.1, EVALUE 2.50e-02; SWISSPROT HIT: P36642, EVALUE 1.50e+00; NT HIT: gi13649009, EVALUE 0.00e+00
ttaccattttccccatcagacttcctttcatggtcagtgtcagtcaaggataatgcagagttggcccggctggacaaacaggaactatgctctgatttcattccccttatccacattcttagtgcatggtcaggtgaggcagcaccttctgtctctgtgtccacatcagatcccatctctagctggtagccatgccgagaaacgctgtgcatgtctgtttggtagccagagcacagagtgtgagaggtttcacagaattccatctctgagaagaaacaaagttcaga

SEQ ID NO: 16097 - DNA, 135 bp, Homo sapiens
  MAP TO CHR7.1; EXPRESSED IN PLACENTA, SIGNAL = 1.2; EXPRESSED IN FETAL LIVER, SIGNAL = 0.69; EXPRESSED IN LUNG, SIGNAL = 0.8; EXPRESSED IN HELA, SIGNAL = 0.76; EXPRESSED IN BRAIN, SIGNAL = 1.1; EXPRESSED IN HEART, SIGNAL = 0.93; EST_HUMAN HIT: BF511079.1, EVALUE 1.00e-63; SWISSPROT HIT: P42658, EVALUE 8.00e-19; NT HIT: gi15299249, EVALUE 1.00e-63
ctttgctcttccagtgccaacacggtgggcaacttcaacaggcagtgcctctcctgtgacctggttgagaactgcacctacttcagcgcttccttcagccatagcatggacttcttcctgctcaagtgcgaaggt

SEQ ID NO: 16098 - DNA, 259 bp, Homo sapiens
  MAP TO CHR7.1; EXPRESSED IN BRAIN, SIGNAL = 0.44; EXPRESSED IN HEART, SIGNAL = 0.59; EXPRESSED IN ADULT LIVER, SIGNAL = 0.47; EXPRESSED IN BONE MARROW, SIGNAL = 0.39; EXPRESSED IN FETAL LIVER, SIGNAL = 0.39; SWISSPROT HIT: O73700, EVALUE 1.50e+00; NT HIT: D90601.1, EVALUE 2.40e-01
aaagatgtggcttgccatcaccctgagggacactttcagtgggatgattacagctgctatgacaacaagaggaggatgtgatgtcacataatgatccagtgacttcaacggtcccgtcccaatgcagagctttgctgccagctggaaatccagcagagacctcattaagggcatctgttcagtaattactacaagtttcccttcatcacgcatccaaatttgaaaacagccataccgcagaactccaatgcctgattca

SEQ ID NO: 16099 - DNA, 135 bp, Homo sapiens
  MAP TO CHR19.1; EXPRESSED IN BRAIN, SIGNAL =  12; EXPRESSED IN BONE MARROW, SIGNAL =  19; EXPRESSED IN HEART, SIGNAL =  14; EXPRESSED IN ADULT LIVER, SIGNAL =  13; EXPRESSED IN PLACENTA, SIGNAL =  35; EXPRESSED IN FETAL LIVER, SIGNAL =  23; EXPRESSED IN LUNG, SIGNAL =  23; NT HIT: gi14766237, EVALUE 4.00e-69; EST_HUMAN HIT: BE785471.1, EVALUE 6.00e-69; SWISSPROT HIT: P11249, EVALUE 5.00e-21
acagcactgggtgacagcgcctgcggtggtcaggtcccggtattcccggtacatgttgtgggtgccgctccgggagtcatagcgcagccagatcccgaagttcttcacccgcaggggggacttctcaaacacctg

SEQ ID NO: 16100 - DNA, 150 bp, Homo sapiens
  MAP TO CHR17.1; EXPRESSED IN BRAIN, SIGNAL = 0.57; EXPRESSED IN BONE MARROW, SIGNAL = 0.65; EXPRESSED IN LUNG, SIGNAL = 0.78; NT HIT: AJ414143.1, EVALUE 5.10e-01; EST_HUMAN HIT: BF688005.1, EVALUE 3.00e+00; SWISSPROT HIT: P11120, EVALUE 7.80e-02
ataagagtttcttttcattagtttgcttcaaggtatttgatgttgaccgtgatggagttctctccagggttgaactgagagacatggtggttgcacttttagaagtctggaaggacaaccgcactgatgatattcctgtaagttatgatt

SEQ ID NO: 16101 - DNA, 255 bp, Homo sapiens
  MAP TO CHR7.1; EXPRESSED IN LUNG, SIGNAL = 0.91; EXPRESSED IN BRAIN, SIGNAL = 0.68; EXPRESSED IN HEART, SIGNAL = 5.2; EXPRESSED IN ADULT LIVER, SIGNAL = 0.93; EXPRESSED IN BONE MARROW, SIGNAL = 0.62; EXPRESSED IN FETAL LIVER, SIGNAL = 0.44; SWISSPROT HIT: P21333, EVALUE 6.00e-36; NT HIT: AF252549.1, EVALUE 0.00e+00; EST_HUMAN HIT: BF835730.1, EVALUE 0.00e+00
cttaccagcacgtggaaggggctgttggggatgtgctcacccccgaagcggatggtgatgacgtacttgcccggctcgggcgctgtgtagtagatgtcaaaggtaccgtcatggttctcaaccacatccacatcgagctctgccccatccggcgtggacaccgtgcatgtcaccttcccctcaccggctgccttggcatccaccgtgatcaccgtctcctgcccaatctggattcgagggcccaggcaggcacct

SEQ ID NO: 16102 - DNA, 194 bp, Homo sapiens
  MAP TO CHR11.1; EXPRESSED IN BRAIN, SIGNAL = 0.86; EXPRESSED IN BONE MARROW, SIGNAL = 0.87; EXPRESSED IN FETAL LIVER, SIGNAL = 0.86; EXPRESSED IN LUNG, SIGNAL = 0.67; SWISSPROT HIT: P47095, EVALUE 8.00e-12; NT HIT: gi14763649, EVALUE 3.00e-92; EST_HUMAN HIT: AV713375.1, EVALUE 1.00e-105
acatggttttggccttctcccatgtttccccccacacatatactccatgacgtctgaccagtactgcacaggagtctgggtattcattcattgcatgagccattctatctttgaggtctttctcctcaggtgtattctcaataatgggtaccactaacatatcatcatatctgtaagacaaaacaagccatttt

SEQ ID NO: 16103 - DNA, 130 bp, Homo sapiens
  MAP TO CHR5.1; EXPRESSED IN HELA, SIGNAL = 6.9; EXPRESSED IN BRAIN, SIGNAL = 4.6; EXPRESSED IN HEART, SIGNAL = 2.4; EXPRESSED IN BONE MARROW, SIGNAL = 3.9; EXPRESSED IN PLACENTA, SIGNAL = 5.2; EXPRESSED IN FETAL LIVER, SIGNAL = 3.4; EXPRESSED IN LUNG, SIGNAL = 2.5; SWISSPROT HIT: P40135, EVALUE 1.20e+00; NT HIT: L07488.1, EVALUE 3.00e-67; EST_HUMAN HIT: AI952032.1, EVALUE 6.40e-01
ggaaactccttccagagggttttctcctgtctctgtaggaaggggggccccagaggggtcataccacccatcgtggtccccgcctctgccctgccacagccccatcggagcccctgagtcagcatggctg

SEQ ID NO: 16104 - DNA, 190 bp, Homo sapiens
  MAP TO CHR13.1; EXPRESSED IN FETAL LIVER, SIGNAL =   2; EXPRESSED IN HELA, SIGNAL = 3.2; EXPRESSED IN BRAIN, SIGNAL = 2.5; EXPRESSED IN HEART, SIGNAL = 1.8; EXPRESSED IN ADULT LIVER, SIGNAL = 2.9; EXPRESSED IN BONE MARROW, SIGNAL = 3.8; EXPRESSED IN LUNG, SIGNAL = 2.5; EST_HUMAN HIT: BE396827.1, EVALUE 9.90e-01; SWISSPROT HIT: P49350, EVALUE 4.30e+00; NT HIT: AF072734.1, EVALUE 6.70e-01
ggctgacttgcacaatacttccattataattacgggacagacacaaaatgaaaagaatatttttaacaaagcacttgtacgatgcagctgtacccattcttaatgatcattaatgtctcatccaaagagaactgtactttgtttgtttcgtttaccgaaggtcagcatactgggaagcaattgccatcac

SEQ ID NO: 16105 - DNA, 321 bp, Homo sapiens
  MAP TO CHR5.1; EXPRESSED IN ADULT LIVER, SIGNAL = 0.76; EXPRESSED IN PLACENTA, SIGNAL = 1.3; EXPRESSED IN FETAL LIVER, SIGNAL = 1.1; EXPRESSED IN HELA, SIGNAL =   1; EXPRESSED IN BRAIN, SIGNAL = 1.2; EXPRESSED IN HEART, SIGNAL = 0.55; EXPRESSED IN BONE MARROW, SIGNAL = 1.2; EST_HUMAN HIT: AI651620.1, EVALUE 0.00e+00; SWISSPROT HIT: P21817, EVALUE 1.00e-57; NT HIT: U48462.1, EVALUE 0.00e+00
gcaggtatatgatgagcaatgggtacaagccggctccgctggacctgagccacgtgcggctgacgccggcgcagacgacactggtggaccgtctggcagaaaatgggcacaacgtgtgggcccgagaccgcgtgggccagggctggagctacagcgcagtgcaggacatcccagcgcgccgaaaccctcggctggtgccctaccgcctgctggatgaagccaccaagcgcagcaaccgggacagcctctgccaggccgtgcgcaccctcctgggctacggctacaacatcgagcctcctgaccaggagcccagtgagtgct

SEQ ID NO: 16106 - DNA, 211 bp, Homo sapiens
  MAP TO CHR17.1; EXPRESSED IN FETAL LIVER, SIGNAL = 0.46; EXPRESSED IN BRAIN, SIGNAL = 0.46; EXPRESSED IN HEART, SIGNAL = 0.67; EXPRESSED IN BONE MARROW, SIGNAL = 0.44; EST_HUMAN HIT: BG720093.1, EVALUE 1.00e-110; SWISSPROT HIT: P55552, EVALUE 3.20e+00; NT HIT: gi13652313, EVALUE 1.00e-110
ccctcaccagtgagctccacgtgctcctcctcctcggggctggtcagtgccatctgcagaagctctgctgtgcagatgagcaggtcatggcaccgggccaggtggccaaagccagcacgtggtcccatgtccccactcagggttgtcacggtccagcgtccatccagcatgcgcctgaactcttcaccatgctgggtcaccaggtgcacct

SEQ ID NO: 16107 - DNA, 221 bp, Homo sapiens
  MAP TO CHR6.1; EXPRESSED IN BRAIN, SIGNAL =   4; EXPRESSED IN PLACENTA, SIGNAL =  31; EXPRESSED IN LUNG, SIGNAL =  14; NT HIT: gi13648348, EVALUE 1.00e-121; EST_HUMAN HIT: BG397882.1, EVALUE 1.00e-119; SWISSPROT HIT: P47914, EVALUE 3.00e-30
aaatggcacagaaatggtatcaagaaaccccgatcacaaagatacgaatctcttaagggggtggaccccaagttcctgaggaacatgcgctttgccaagaagcacaacaagaagggcctaaagaagatgcaggccaacaatgccaaggccatgagtgcacgtgccgaggctatcaaggccctcgtaaagcccaaggaggttaagcccaagatcccaaaggg

SEQ ID NO: 16108 - DNA, 180 bp, Homo sapiens
  MAP TO CHR12.1; EXPRESSED IN LUNG, SIGNAL = 1.6; EXPRESSED IN HELA, SIGNAL = 1.7; EXPRESSED IN BRAIN, SIGNAL = 1.8; EXPRESSED IN BONE MARROW, SIGNAL = 1.6; EXPRESSED IN HEART, SIGNAL = 1.4; EXPRESSED IN PLACENTA, SIGNAL =   2; NT HIT: AF069489.1, EVALUE 5.00e-97; EST_HUMAN HIT: BF528806.1, EVALUE 3.00e-90; SWISSPROT HIT: P27815, EVALUE 4.00e-27
gctctcaggagcgggacctgctgaagaaattccgcatccctgtggacacgatggtgacatacatgctgacgctggaggatcactaccacgctgacgtggcctaccataacagcctgcacgcagctgacgtgctgcagtccacccacgtactgctggccacgcctgcactagatgtgagtg

SEQ ID NO: 16109 - DNA, 242 bp, Homo sapiens
  MAP TO CHR6.1; EXPRESSED IN BONE MARROW, SIGNAL = 1.7; EXPRESSED IN ADULT LIVER, SIGNAL = 1.1; EXPRESSED IN PLACENTA, SIGNAL = 2.3; EXPRESSED IN FETAL LIVER, SIGNAL = 1.5; EXPRESSED IN BRAIN, SIGNAL = 2.3; EXPRESSED IN LUNG, SIGNAL = 1.4; EXPRESSED IN HEART, SIGNAL =   1; NT HIT: U48705.1, EVALUE 0.00e+00; EST_HUMAN HIT: BF529368.1, EVALUE 0.00e+00; SWISSPROT HIT: Q08345, EVALUE 2.00e-42
ctcagctacccaatgctgctgcatgtggcagcccagatcgcctccggcatgcgctatctggccacactcaactttgtacatcgggacctggccacgcggaactgcctagttggggaaaatttcaccatcaaaatcgcagactttggcatgagccggaacctctatgctggggactattaccgtgtgcagggccgggcagtgctgcccatccgctggatggcctgggagtgcatcctcatggt

SEQ ID NO: 16110 - DNA, 354 bp, Homo sapiens
  MAP TO CHR5.1; EXPRESSED IN BONE MARROW, SIGNAL = 0.71; EXPRESSED IN LUNG, SIGNAL = 0.9; EXPRESSED IN HELA, SIGNAL = 0.81; EXPRESSED IN BRAIN, SIGNAL = 0.76; EXPRESSED IN HEART, SIGNAL = 0.86; SWISSPROT HIT: P21817, EVALUE 4.00e-50; NT HIT: U48483.1, EVALUE 0.00e+00; EST_HUMAN HIT: BI549601.1, EVALUE 0.00e+00
tccctgtaccccagtcctggggctccccaacagtgtggaggagatgtgtcccgacatcccggtgctggagcggctcatggcagacattggggggctggccgagtcaggtgcccgctacacagagatgccgcatgtcatcgagatcacgctgcccatgctatgcagctacctgccccgatggtgggagcgcgggcccgaggcacccccttccgccctgcccgccggcgcccccccaccctgcacagctgtcacctctgaccacctcaactccctgctggggaatatcctgagaatcatcgtcaacaacctgggcattgacgaggcctcctggatgaagcggctggctggtgggtc

SEQ ID NO: 16111 - DNA, 155 bp, Homo sapiens
  MAP TO CHR14.1; EXPRESSED IN PLACENTA, SIGNAL = 3.1; EXPRESSED IN FETAL LIVER, SIGNAL = 2.9; EXPRESSED IN LUNG, SIGNAL = 2.2; EXPRESSED IN HELA, SIGNAL = 2.7; EXPRESSED IN BRAIN, SIGNAL = 3.5; EXPRESSED IN BONE MARROW, SIGNAL = 3.4; EXPRESSED IN ADULT LIVER, SIGNAL = 1.8; EXPRESSED IN HEART, SIGNAL = 2.2; SWISSPROT HIT: P38262, EVALUE 5.90e-02; NT HIT: gi13649630, EVALUE 8.00e-74; EST_HUMAN HIT: BE739840.1, EVALUE 1.00e-73
cacctgtgctgtggccacagccttagcttcctgccacaagattagttccccagcttgatttccagatactgccatggaaccatctggtgcccaagccacagcagtgacggctgcagaactccttggtatacatgtgtcatctggaggagaaagga

SEQ ID NO: 16112 - DNA, 411 bp, Homo sapiens
  MAP TO CHR12.1; EXPRESSED IN LUNG, SIGNAL = 2.2; EXPRESSED IN FETAL LIVER, SIGNAL = 2.5; EXPRESSED IN BRAIN, SIGNAL = 3.7; EXPRESSED IN HEART, SIGNAL = 2.4; EXPRESSED IN BONE MARROW, SIGNAL = 3.6; EXPRESSED IN ADULT LIVER, SIGNAL =   4; EXPRESSED IN PLACENTA, SIGNAL = 3.4; EXPRESSED IN HELA, SIGNAL =   3; EST_HUMAN HIT: BI825961.1, EVALUE 0.00e+00; SWISSPROT HIT: Q62158, EVALUE 2.00e-30; NT HIT: gi7705824, EVALUE 0.00e+00
ggcagcaccctgtgcagccggtgctcccgggactccctgcacaccacacagatggggctctggtccttctggcagaaaagcttgaggggctcgtggtgctcctggcacaggtcttgcttctgcagaccaggatgctgctgcgccatctcggccaccttggtcagcagccggttgggcagcaggttcctctgcggggacatctctctgcactcggggcaggggaaggagcccttccgcttccgcctccccttcttgcccctcgccttttcccagctcagctggatgcaggctcggcagaagttgtggccacaggtggtcatcacagggtctgtgaagtaatccagacagatggagcacgtagcttcctcctgcagttttctggcgagttccacagcctccatggctcctggg

SEQ ID NO: 16113 - DNA, 158 bp, Homo sapiens
  MAP TO CHR12.1; EXPRESSED IN BRAIN, SIGNAL =   4; EXPRESSED IN HEART, SIGNAL = 2.2; EXPRESSED IN ADULT LIVER, SIGNAL = 4.2; EXPRESSED IN PLACENTA, SIGNAL = 4.4; EXPRESSED IN FETAL LIVER, SIGNAL = 2.5; EXPRESSED IN LUNG, SIGNAL = 2.8; EST_HUMAN HIT: BF525827.1, EVALUE 2.00e-66; SWISSPROT HIT: P00939, EVALUE 1.00e-18; NT HIT: X69723.1, EVALUE 6.00e-84
atcttgtcctcagaggtggtttgtgctccccctactgcctatatcgacttcgcccggcagaagctagatcccaagattgctgtggctgcgcagaactgctacaaagtgactaatggggcttttactggggagatcaggtgagatcgaggtggagaggg

SEQ ID NO: 16114 - DNA, 319 bp, Homo sapiens
  MAP TO CHR22.1; EXPRESSED IN BONE MARROW, SIGNAL = 0.86; EXPRESSED IN HEART, SIGNAL = 0.89; EXPRESSED IN ADULT LIVER, SIGNAL = 0.87; EXPRESSED IN HELA, SIGNAL = 0.58; EXPRESSED IN BRAIN, SIGNAL = 1.2; EXPRESSED IN LUNG, SIGNAL =   1; NT HIT: AL603646.1, EVALUE 1.20e+00; EST_HUMAN HIT: AI124880.1, EVALUE 5.00e-13; SWISSPROT HIT: P87503, EVALUE 6.00e-03
acgtctggggccggtggctcctgcaggaagagctcccgtcgatggctgtggctctccaggttgggcccgcggggcgggaacttcttgcgcgagagccgcaggtacttgtgggcctttcggggcttgcggagcgggaagggcagggtgggcaccaaggggcccttgtccaccagctcaggtgcccccgccttgaccaccccctcagggctcccgctgccgagtgggcacgtcagggagaagcagagcttctccttgcccttggccttgtgggagctccgcaggtccatgctgtacagccgctgcgggggcaagccagggc

SEQ ID NO: 16115 - DNA, 442 bp, Homo sapiens
  MAP TO CHR6.1; EXPRESSED IN HELA, SIGNAL = 1.4; EXPRESSED IN LUNG, SIGNAL = 1.2; EXPRESSED IN BRAIN, SIGNAL = 1.4; EXPRESSED IN HEART, SIGNAL = 1.6; EXPRESSED IN FETAL LIVER, SIGNAL = 1.3; EXPRESSED IN PLACENTA, SIGNAL = 1.5; NT HIT: AJ302613.1, EVALUE 0.00e+00; EST_HUMAN HIT: BI562613.1, EVALUE 0.00e+00; SWISSPROT HIT: Q9GZK4, EVALUE 3.00e-72
ccatggttaaccaaagctcccccatgggcttcctccttctgggcttctctgaacacccagcactggaaaggactctctttgtggttgtcttcacttcctacctcttgaccctggtgggcaacacactcatcatcctgctgtctgtactgtaccccaggctccactctccaatgtactttttcctctctgacctctccttcttggacctctgctttaccacaagttgtgtcccccagatgctggtcaacctctggggcccaaagaagaccatcagcttcctgggatgctctgtccagctcttcatcttcctgtccctggggaccactgagtgcatcctcctgacagtgatggcctttgaccgatacgtggctgtctgccagcccctccactatgccaccatcatccacccccgcctgtgctggcagctggcatctgtggcctg

SEQ ID NO: 16116 - DNA, 306 bp, Homo sapiens
  MAP TO CHR2.1; EXPRESSED IN FETAL LIVER, SIGNAL = 0.84; EXPRESSED IN LUNG, SIGNAL = 0.65; EXPRESSED IN HELA, SIGNAL = 0.61; EXPRESSED IN BRAIN, SIGNAL = 0.85; EXPRESSED IN BONE MARROW, SIGNAL = 0.94; SWISSPROT HIT: Q14324, EVALUE 8.00e-15; NT HIT: gi16157781, EVALUE 0.00e+00; EST_HUMAN HIT: BF829497.1, EVALUE 0.00e+00
agaacccccaagaaatgttcgtatcactgatatttcaaagaactctgtcagcctttcatggcaacaaccagctttcgatggaggtagcaagattacaggctacattgttgagagacgtgaccttccagatggcagatggaccaaggccagcttcaccaatgttactgaaactcaattcatcatctctggcttgactcagaattcccagtatgaattccgtgtctttgctaggaatgctgttggttccattagcaatccatctgaggttgtagggcccattacttgcatcgattcttatggtaagca

SEQ ID NO: 16117 - DNA, 245 bp, Homo sapiens
  MAP TO CHR19.1; EXPRESSED IN LUNG, SIGNAL = 1.4; EXPRESSED IN HELA, SIGNAL = 2.4; EXPRESSED IN BRAIN, SIGNAL = 2.1; EXPRESSED IN HEART, SIGNAL = 2.9; EXPRESSED IN ADULT LIVER, SIGNAL = 4.8; SWISSPROT HIT: O60664, EVALUE 3.00e-08; NT HIT: AB067468.1, EVALUE 0.00e+00; EST_HUMAN HIT: AW007846.1, EVALUE 1.00e-28
gtgtctttggtgccggtcagcacagtcttggtggtgtccacaccggcctgtacggtccctttggccacattcactgcccccgtgagcccagtggacaccgtgtccttggtgccggtgaggacagccttcgaggtgtccagacccccttggacggcccccttagccatgtccatggcccctgtgaccccgctggacaccacctccttggtgcccgtaagtgcagaccgagtggtgtccaggcctcc

SEQ ID NO: 16118 - DNA, 143 bp, Homo sapiens
  MAP TO CHR17.1; EXPRESSED IN PLACENTA, SIGNAL = 4.9; EXPRESSED IN FETAL LIVER, SIGNAL = 4.2; EXPRESSED IN BRAIN, SIGNAL = 4.9; EXPRESSED IN LUNG, SIGNAL = 3.8; EXPRESSED IN HELA, SIGNAL = 4.6; EXPRESSED IN BONE MARROW, SIGNAL = 5.3; EXPRESSED IN HEART, SIGNAL = 3.1; SWISSPROT HIT: P43035, EVALUE 8.00e-23; NT HIT: U72336.1, EVALUE 5.00e-75; EST_HUMAN HIT: AL133739.1, EVALUE 7.00e-75
aaggttatggaattagaatcaaagctaaatgaagcaaaagaagaatttacgtcaggtggacctcttggtcagaaacgagacccaaaagaatggattccccgtccgccagaaaaatatgcattgagtggtcacaggagtccagt

SEQ ID NO: 16119 - DNA, 217 bp, Homo sapiens
  MAP TO CHR19.1; EXPRESSED IN ADULT LIVER, SIGNAL =   2; EXPRESSED IN LUNG, SIGNAL = 3.2; EXPRESSED IN FETAL LIVER, SIGNAL = 1.6; EXPRESSED IN BRAIN, SIGNAL = 2.2; EXPRESSED IN HEART, SIGNAL = 2.3; EST_HUMAN HIT: AI818800.1, EVALUE 1.00e-108; SWISSPROT HIT: P15882, EVALUE 1.10e+00; NT HIT: gi15308560, EVALUE 1.00e-109
agggacccatgcacacctgaacagatgggccaccaggtgccgcagggtgttgtagttagagtcaggcagctgtaccaagagggtcttcagcgagcggataacctcagggctggggctgggggtcccagggtcgtccccagggtctgcatgcaaggtcttagccagagagatgaaggcgtcgtagaggtggaaggggatcacgggctcggtgagctgg

SEQ ID NO: 16120 - DNA, 102 bp, Homo sapiens
  MAP TO CHR1.1; EXPRESSED IN ADULT LIVER, SIGNAL = 3.7; EXPRESSED IN BONE MARROW, SIGNAL = 5.2; EXPRESSED IN FETAL LIVER, SIGNAL = 3.5; EXPRESSED IN HELA, SIGNAL = 3.4; EXPRESSED IN BRAIN, SIGNAL = 4.5; EXPRESSED IN HEART, SIGNAL =   3; EST_HUMAN HIT: AI263794.1, EVALUE 4.80e-01
tctgttgaatgtctgaatggatttattttaaacccatagtagagacaacagcttgagaggcaggactttctttgattctgaaagctgtgcattttgagaaag

SEQ ID NO: 16121 - DNA, 249 bp, Homo sapiens
  MAP TO CHR6.1; EXPRESSED IN HELA, SIGNAL = 4.2; EXPRESSED IN BRAIN, SIGNAL = 4.5; EXPRESSED IN HEART, SIGNAL = 3.2; EXPRESSED IN ADULT LIVER, SIGNAL = 4.1; EXPRESSED IN LUNG, SIGNAL = 4.2; EXPRESSED IN FETAL LIVER, SIGNAL = 3.5; EST_HUMAN HIT: BE731877.1, EVALUE 0.00e+00; SWISSPROT HIT: Q99594, EVALUE 3.00e-35; NT HIT: gi14782964, EVALUE 0.00e+00
gcacgcaccgtacatcttgccctcgtctgacaggatgatcttccgccggccgcagggcgggtagatggccagggcctcctggaagctctgctcgatgtccgggctccacacgccctccgcatcgttgtccagccccttgtccaggccctcgggcccatcctcccgggcctccccggggctgctgctggcgttccagctgttggacgctattgtgctggttgctctgggctctgggcctgagcccactgg

SEQ ID NO: 16122 - DNA, 235 bp, Homo sapiens
  MAP TO CHR1.1; EXPRESSED IN PLACENTA, SIGNAL = 2.9; EXPRESSED IN LUNG, SIGNAL = 0.92; EXPRESSED IN BRAIN, SIGNAL = 0.81; EXPRESSED IN BONE MARROW, SIGNAL = 0.87; EST_HUMAN HIT: AL574763.1, EVALUE 1.00e-118; SWISSPROT HIT: P13942, EVALUE 1.90e-01; NT HIT: gi16161678, EVALUE 1.00e-122
tccttcctaggtccaggccttttccaggtccagccgaccagcccaaccccctcgcctcctgcacacagcagacacctgtcagctagaggtggccctgattggagcctctccccggggaaaccgttccctgtttgggctggaggtagccacattgggccagggccctgactgcccctcaatgcaggagcagcactccatcgacgatgaatatgcaccggccgtcttccaggtcagg

SEQ ID NO: 16123 - DNA, 226 bp, Homo sapiens
  MAP TO CHR12.1; EXPRESSED IN HELA, SIGNAL = 1.1; EXPRESSED IN FETAL LIVER, SIGNAL = 1.3; EXPRESSED IN BRAIN, SIGNAL = 0.83; EXPRESSED IN LUNG, SIGNAL = 0.76; EXPRESSED IN BONE MARROW, SIGNAL = 0.97; EXPRESSED IN ADULT LIVER, SIGNAL = 0.86; NT HIT: gi14766622, EVALUE 2.00e-97; EST_HUMAN HIT: AL557774.1, EVALUE 3.00e-97; SWISSPROT HIT: P42688, EVALUE 1.90e+00
attacctgtttggtatctttcctggtatgtcaatcagctctccctgcaccagcttcatgtagtgattcattgagaactggggccctaccaagaaggccccatagaagtaggagaaaccagcaacttccagcagggaaggaacaccacgtatggcatatttctgttgctcagaggacaaggaattctatgccaagaagagaatgcatggttcaggatagccttgaat

SEQ ID NO: 16124 - DNA, 220 bp, Homo sapiens
  MAP TO CHR3.1; EXPRESSED IN LUNG, SIGNAL = 1.2; EXPRESSED IN HELA, SIGNAL = 1.5; EXPRESSED IN BRAIN, SIGNAL = 1.7; EXPRESSED IN HEART, SIGNAL = 1.2; EXPRESSED IN BONE MARROW, SIGNAL = 1.2; EXPRESSED IN ADULT LIVER, SIGNAL = 0.44; SWISSPROT HIT: P33515, EVALUE 4.00e+00; NT HIT: AF183917.1, EVALUE 3.10e+00; EST_HUMAN HIT: AI932619.1, EVALUE 2.90e-01
ggggtctgtgcctcggaataccccctcccaggcgtgtttgacacgtgtttccgcctctccctgcatgggctcccgctgctgctatttataacctttaagagctcctgccgactgcaaagttttcttaaactcaaaatatcaccgaggtcccgggcacgcgttccagaggctggctgggccctgcggtttgaagggaggagggggccaggaaggaggaggt

SEQ ID NO: 16125 - DNA, 184 bp, Homo sapiens
  MAP TO CHR17.1; EXPRESSED IN ADULT LIVER, SIGNAL = 1.3; EXPRESSED IN FETAL LIVER, SIGNAL = 0.7; EXPRESSED IN HELA, SIGNAL = 0.81; EXPRESSED IN BRAIN, SIGNAL = 0.8; EXPRESSED IN LUNG, SIGNAL = 0.88; EXPRESSED IN HEART, SIGNAL = 0.99; EST_HUMAN HIT: BF885208.1, EVALUE 3.00e-16; SWISSPROT HIT: P41234, EVALUE 7.00e-07; NT HIT: gi14773065, EVALUE 8.00e-96
gtacctctttatccacttcttgtggcagaatcccttttattttagcaaagagtctgaggttttctcttacagtgaggaagtcaaattgcacattggattgtggacaaactccggtcagcttgctgagattttctaggtcagccatttctgaaagcttattgttatagatggtgactgaacctgt

SEQ ID NO: 16126 - DNA, 169 bp, Homo sapiens
  MAP TO CHR19.1; EXPRESSED IN LUNG, SIGNAL = 2.4; EXPRESSED IN BRAIN, SIGNAL = 2.8; EXPRESSED IN PLACENTA, SIGNAL = 3.7; EXPRESSED IN FETAL LIVER, SIGNAL = 2.1; EXPRESSED IN HELA, SIGNAL = 2.5; EXPRESSED IN HEART, SIGNAL = 3.1; EXPRESSED IN BONE MARROW, SIGNAL = 2.4; EXPRESSED IN ADULT LIVER, SIGNAL = 3.4; EST_HUMAN HIT: BE252584.1, EVALUE 1.00e-83; SWISSPROT HIT: P27692, EVALUE 1.00e-07; NT HIT: AF040253.1, EVALUE 7.00e-84
tacctcatgcatggtgaggtcagagaacaggataacgaaattctcctccacccgcacaatgaggcctgtgtcgccctcgaatcggccagcaatcaccttcacgtggtcccccatcttgaagtattttctaagttcctgggctgggaactccaacatgtcctgggggatt

SEQ ID NO: 16127 - DNA, 343 bp, Homo sapiens
  MAP TO CHR2.1; EXPRESSED IN BONE MARROW, SIGNAL = 1.3; EXPRESSED IN HEART, SIGNAL = 3.8; EXPRESSED IN ADULT LIVER, SIGNAL = 0.81; EXPRESSED IN FETAL LIVER, SIGNAL = 1.1; EXPRESSED IN LUNG, SIGNAL = 0.65; EXPRESSED IN HELA, SIGNAL = 0.94; EXPRESSED IN BRAIN, SIGNAL = 1.3; EST_HUMAN HIT: BF126349.1, EVALUE 1.00e-19; SWISSPROT HIT: P52179, EVALUE 8.00e-12; NT HIT: gi16157781, EVALUE 0.00e+00
taatcttctaaattatgtttttcttctaggtgagccggatcccccaaggaaattagaagtgactgaaatgaccaagaacagtgccaccttagcctggttacctcccctacgtgatggaggtgctaaaatcgatggctacatcactagttacagagaagaagagcagcctgcagatcgctggacagagtactcagtggtaaaagatctgagccttgttgtcactggcctaaaggaaggaaagaaatacaaatttagagtagcggccagaaatgctgttggagtcagtttgccaagagaagctgaaggagtgtatgaagccaaagaacaactgtgtaagtagtct

SEQ ID NO: 16128 - DNA, 415 bp, Homo sapiens
  MAP TO CHR15.1; EXPRESSED IN LUNG, SIGNAL = 1.1; EXPRESSED IN BRAIN, SIGNAL = 1.1; EXPRESSED IN BONE MARROW, SIGNAL = 1.2; EXPRESSED IN HEART, SIGNAL = 1.3; EXPRESSED IN ADULT LIVER, SIGNAL =   1; EXPRESSED IN PLACENTA, SIGNAL = 1.5; EXPRESSED IN FETAL LIVER, SIGNAL = 1.5; EST_HUMAN HIT: BG472205.1, EVALUE 5.00e-32; SWISSPROT HIT: Q08379, EVALUE 5.00e-16; NT HIT: gi14745297, EVALUE 4.00e-32
tcctgcaggtggagctgaagagccaagaggctcagagtctgcagcagcagccagaccattacctgggtcacctgcagcagtacgtggccacctatcagcagcaggtggccgcctatcagcagctgacctgtgagaaggaggcgctgtacaggcagtggctgcagcagacccagctaatgaaccagttgcagcagcaggaagcttggggcaaagcggtggccgagatggcctgccaaaagttgcaggaggcccaggggagggagctgccgaggatggggccgtgagggggacgacctggcaaactctgtgccttctcactctttcctggccccttaggagcgtctggaagctgccagccagcagaaacagcagctaacggcccagttgagcctcatggctctccctggggaaggta

SEQ ID NO: 16129 - DNA, 219 bp, Homo sapiens
  MAP TO CHR19.1; EXPRESSED IN LUNG, SIGNAL = 1.8; EXPRESSED IN HELA, SIGNAL =   4; EXPRESSED IN BRAIN, SIGNAL = 3.6; EXPRESSED IN HEART, SIGNAL = 2.3; EXPRESSED IN ADULT LIVER, SIGNAL = 4.1; EXPRESSED IN PLACENTA, SIGNAL = 4.6; NT HIT: AF289221.1, EVALUE 1.00e-120; EST_HUMAN HIT: BE780931.1, EVALUE 1.00e-105; SWISSPROT HIT: P17426, EVALUE 3.00e-31
ccccacagggttacctgttcatttctgtgctggtgaactcgaactcggagctgatccgcctcatcaacaacgccatcaagaatgacctggccagccgcaaccccaccttcatgtgcctggccctgcactgcatcgccaacgtgggcagccgggagatgggcgaggcctttgccgctgacatcccccgcatcctggtggccgggtaaggcactggggacc

SEQ ID NO: 16130 - DNA, 157 bp, Homo sapiens
  MAP TO CHR1.1; EXPRESSED IN LUNG, SIGNAL = 0.78; EXPRESSED IN FETAL LIVER, SIGNAL = 0.54; EXPRESSED IN BRAIN, SIGNAL = 0.5; EXPRESSED IN HEART, SIGNAL = 0.44; EXPRESSED IN ADULT LIVER, SIGNAL = 0.96; NT HIT: gi12056481, EVALUE 2.00e-16; EST_HUMAN HIT: W44916.1, EVALUE 2.00e-54; SWISSPROT HIT: Q9UL59, EVALUE 4.00e-20
tctctcctgtgtggactctccgatggcatattaatggtgaattgtggctgaagcccttaccacacacatcacacttgtagggtttctctccagtgtggactctctgatggatgtgaaaatgtgcagcctgagtgaagcccttaccacattcctcaca

SEQ ID NO: 16131 - DNA, 265 bp, Homo sapiens
  MAP TO CHR18.1; EXPRESSED IN PLACENTA, SIGNAL = 2.8; EXPRESSED IN FETAL LIVER, SIGNAL = 2.5; EXPRESSED IN LUNG, SIGNAL = 3.1; EXPRESSED IN HELA, SIGNAL = 3.3; EXPRESSED IN BRAIN, SIGNAL = 3.3; EXPRESSED IN HEART, SIGNAL = 3.2; EXPRESSED IN ADULT LIVER, SIGNAL = 3.9; SWISSPROT HIT: Q9WUA1, EVALUE 8.00e-04; NT HIT: gi14756107, EVALUE 0.00e+00; EST_HUMAN HIT: BF997813.1, EVALUE 1.40e+00
tcccacctgtacctggttacaagttcctgccccagtgtgggcattgcagttctcaggacacagagccatgcggcagtgtgggccagcccagccctgaggacatcggcagagccccgcacctgcagcaccgtcctggggcacgcattcctgggggacgggacagctcccggggccccctgacccacagcgggcagagcccaccgaagcattgaagccccaggatgaggagccattggcctcccagtgcagcacgagcagccctgtg

SEQ ID NO: 16132 - DNA, 198 bp, Homo sapiens
  MAP TO CHR18.1; EXPRESSED IN LUNG, SIGNAL = 1.1; EXPRESSED IN FETAL LIVER, SIGNAL =   1; EXPRESSED IN HELA, SIGNAL = 1.3; EXPRESSED IN BRAIN, SIGNAL = 1.4; EXPRESSED IN HEART, SIGNAL = 0.92; EXPRESSED IN ADULT LIVER, SIGNAL = 1.7; EXPRESSED IN BONE MARROW, SIGNAL = 1.6; EST_HUMAN HIT: AU140164.1, EVALUE 1.00e-104; SWISSPROT HIT: Q28983, EVALUE 1.90e+00; NT HIT: gi13376407, EVALUE 1.00e-104
gtatccagctgtatccagtgaacctcattgctagagctaatgcgggactgttgggtctgcagagtgtatgggaaggagctgacctggagcaccaggaggttgaaagcttccagaacttctctgcaattaatgactctatcagctagcccatgactgggttcgctatgtgacaaagagcctgaaatgacactgtagaaa

SEQ ID NO: 16133 - DNA, 156 bp, Homo sapiens
  MAP TO CHR7.1; EXPRESSED IN HELA, SIGNAL = 1.3; EXPRESSED IN FETAL LIVER, SIGNAL = 1.2; EXPRESSED IN BRAIN, SIGNAL = 1.4; EXPRESSED IN HEART, SIGNAL =   1; EXPRESSED IN ADULT LIVER, SIGNAL = 1.7; EXPRESSED IN PLACENTA, SIGNAL = 1.2; EXPRESSED IN LUNG, SIGNAL = 0.98; EST_HUMAN HIT: AI253087.1, EVALUE 5.00e-76; SWISSPROT HIT: P45018, EVALUE 7.60e+00; NT HIT: gi14781751, EVALUE 3.00e-76
ttttttctttccacagacagcaatggatcaacttcatatgcacttcacccaagccattcacaacaccgtgtttcaagttgttcttggttatgtggaactatgtgcaggaaacacagacacaaaattccaaaagctgcaatataaggatctctgtac

SEQ ID NO: 16134 - DNA, 208 bp, Homo sapiens
  MAP TO CHR5.1; EXPRESSED IN HELA, SIGNAL = 0.71; EXPRESSED IN BRAIN, SIGNAL = 0.76; EXPRESSED IN HEART, SIGNAL = 0.76; EXPRESSED IN BONE MARROW, SIGNAL = 0.86; EXPRESSED IN FETAL LIVER, SIGNAL = 0.71; EXPRESSED IN LUNG, SIGNAL = 0.81; EST_HUMAN HIT: BG699335.1, EVALUE 2.00e-88; SWISSPROT HIT: O76743, EVALUE 1.60e-01; NT HIT: gi16158291, EVALUE 3.00e-86
acatgtaaacctacctttgttgcaataataatctgttttctttttcttttaaagctttctttagttctgctgtccttgagggcctatgtaggtattttctttttcctgtgcattcataagtccaatgtccaaattccaagcatttctgacatcttacatgttgcttatttgcttcactacagaacaaaaaacagaatacaagccttaa

SEQ ID NO: 16135 - DNA, 163 bp, Homo sapiens
  MAP TO CHR7.1; EXPRESSED IN ADULT LIVER, SIGNAL =   2; EXPRESSED IN PLACENTA, SIGNAL = 1.8; EXPRESSED IN LUNG, SIGNAL = 2.4; EXPRESSED IN FETAL LIVER, SIGNAL = 2.1; EXPRESSED IN HELA, SIGNAL = 3.3; EXPRESSED IN BRAIN, SIGNAL = 1.8; EXPRESSED IN HEART, SIGNAL = 1.7; NT HIT: X90691.1, EVALUE 1.40e-01; EST_HUMAN HIT: AA825433.1, EVALUE 2.00e-60; SWISSPROT HIT: P31695, EVALUE 2.60e+00
tacctggttcacagcatccgtgatgatggtggtcagtctgacagtatttgtcccttaaaggcattttcagtggactcgacctactttgctttcactgtaagaagctcttcattgcggcgtggctgttgaaagaagcacaaacccgtcactcgccctgaacttc

SEQ ID NO: 16136 - DNA, 211 bp, Homo sapiens
  MAP TO CHR9.1; EXPRESSED IN HELA, SIGNAL = 5.6; EXPRESSED IN LUNG, SIGNAL = 3.7; EXPRESSED IN FETAL LIVER, SIGNAL = 6.4; EXPRESSED IN BRAIN, SIGNAL = 4.6; EXPRESSED IN HEART, SIGNAL =   4; EXPRESSED IN BONE MARROW, SIGNAL = 6.3; EXPRESSED IN ADULT LIVER, SIGNAL = 3.8; EXPRESSED IN PLACENTA, SIGNAL =  11; NT HIT: gi16180761, EVALUE 2.00e-96; EST_HUMAN HIT: AA404630.1, EVALUE 1.00e-113; SWISSPROT HIT: O15078, EVALUE 8.30e-01
acctgaggtgcagcaagtagcagaggaggcggtgggtggggttagcatttccctcctcacccacaggcaccaaaaagaggcgatggcgcaggaaggtcatgtgggcagcaggcatgtccgagaagtcaaaggtcacaaggaacatctttaccacagtctggttggggttaaataaggtctagggacaggacagtcaaggttggtagggcct

SEQ ID NO: 16137 - DNA, 260 bp, Homo sapiens
  MAP TO CHR12.1; EXPRESSED IN PLACENTA, SIGNAL = 2.6; EXPRESSED IN LUNG, SIGNAL = 7.2; EXPRESSED IN BRAIN, SIGNAL = 0.51; EXPRESSED IN HEART, SIGNAL = 2.8; EXPRESSED IN BONE MARROW, SIGNAL = 0.65; EXPRESSED IN ADULT LIVER, SIGNAL =  99; NT HIT: X06596.1, EVALUE 0.00e+00; EST_HUMAN HIT: BF525559.1, EVALUE 0.00e+00; SWISSPROT HIT: P09871, EVALUE 1.00e-48
tgcaaagaagtgaaagtggagaaacccacagcagatgcagaggcctatgttttcactcctaacatgatctgtgctggaggagagaagggcatggatagctgtaaaggggacagtggtggggcctttgctgtacaggatcccaatgacaagaccaaattctacgcagctggcctggtgtcctgggggccccagtgtgggacctatgggctctacacacgggtaaagaactatgttgactggataatgaagactatgcagga

SEQ ID NO: 16138 - DNA, 203 bp, Homo sapiens
  MAP TO CHR1.1; EXPRESSED IN HELA, SIGNAL = 0.81; EXPRESSED IN BRAIN, SIGNAL = 0.51; EXPRESSED IN HEART, SIGNAL = 0.82; SWISSPROT HIT: P23249, EVALUE 1.00e-26; NT HIT: gi16161881, EVALUE 6.00e-97; EST_HUMAN HIT: BE388156.1, EVALUE 9.00e-97
cccaaagcctcctgagccgctttgtggatgggctgaccttcaaggtgaactttaccttcaaccgccagccgctgcgagtccagcaccgtgccctggagctgacagggcgctggctgctgtggcccatgctctttcctgtggcacctcgggacgtcccgctgctgccctcagatgtgaaactcaagtgagactgtgggcaggga

SEQ ID NO: 16139 - DNA, 183 bp, Homo sapiens
  MAP TO CHR17.1; EXPRESSED IN ADULT LIVER, SIGNAL = 1.7; EXPRESSED IN PLACENTA, SIGNAL = 3.4; EXPRESSED IN FETAL LIVER, SIGNAL =   2; EXPRESSED IN HELA, SIGNAL = 4.2; EXPRESSED IN BRAIN, SIGNAL = 2.4; EXPRESSED IN LUNG, SIGNAL = 1.4; EXPRESSED IN HEART, SIGNAL = 0.94; SWISSPROT HIT: P34703, EVALUE 1.10e-02; NT HIT: gi14773925, EVALUE 5.00e-97; EST_HUMAN HIT: BF795108.1, EVALUE 8.00e-97
tcagctatggcaacgaccagacatattttgaggagataaaacagttttactaccgagatgagttcagccaccaggtgcaggagtggaaccggcagcgcaccatggccatcgaacgggctttacagcagttcctctatgtgcagatggccaaagaactcaagaacaagctgctggctgaagcca

SEQ ID NO: 16140 - DNA, 229 bp, Homo sapiens
  MAP TO CHR3.1; EXPRESSED IN FETAL LIVER, SIGNAL = 0.64; EXPRESSED IN LUNG, SIGNAL = 0.9; EXPRESSED IN BRAIN, SIGNAL = 0.68; EXPRESSED IN HEART, SIGNAL = 1.1; EXPRESSED IN BONE MARROW, SIGNAL = 0.6; EST_HUMAN HIT: AL119270.1, EVALUE 1.00e-119; SWISSPROT HIT: O60344, EVALUE 3.00e-40; NT HIT: AF192531.1, EVALUE 1.00e-119
ccacagacccatcccacagcacctgccttacagaggcctgcattcgagtggctggaaaaatcctggagtccctggaccgaggggtgagcccctgtgaggacttttaccagttctcctgtgggggctggattcggaggaaccccctgcccgatgggcgttctcgctggaacaccttcaacagcctctgggaccaaaaccaggccatactgaagcacctgcttggtgagtg

SEQ ID NO: 16141 - DNA, 224 bp, Homo sapiens
  MAP TO CHR19.1; EXPRESSED IN LUNG, SIGNAL = 0.6; EXPRESSED IN BRAIN, SIGNAL = 0.39; EXPRESSED IN HEART, SIGNAL = 0.57; EST_HUMAN HIT: BG533870.1, EVALUE 1.00e-52; SWISSPROT HIT: Q9Y2G7, EVALUE 5.00e-43; NT HIT: gi7662407, EVALUE 1.00e-123
ggccttcgactacatcacaaacttcatactggagaaaaaccctatgaatgtaaggagtgtggaaaggcctttagagtgcggcagcaacttactctccatcagagaattcacactggtgagaagccttatgattgtaaggaatgtgggaagactttcagtcgtggctatcatctaactctccatcagagaatacatactggtgaaaagccctatgaatgtaagga

SEQ ID NO: 16142 - DNA, 238 bp, Homo sapiens
  MAP TO CHR12.1; EXPRESSED IN HELA, SIGNAL = 2.2; EXPRESSED IN BRAIN, SIGNAL = 1.1; EXPRESSED IN LUNG, SIGNAL = 1.7; EXPRESSED IN HEART, SIGNAL = 1.4; EXPRESSED IN BONE MARROW, SIGNAL = 1.1; EXPRESSED IN ADULT LIVER, SIGNAL = 2.3; EXPRESSED IN PLACENTA, SIGNAL = 2.5; EST_HUMAN HIT: BE882895.1, EVALUE 1.00e-127; SWISSPROT HIT: Q09775, EVALUE 6.00e-07; NT HIT: gi4759277, EVALUE 1.00e-128
ttccccagattacatccaccgcattggccgcacgggacgagcaggcaagagtggggtggccatcaccttcctcacaaaagaggactctgctgtgttctacgagctgaagcaagctatcctggaaagcccagtgtcttcctgtccccccgaactagccaaccacccagatgcccagcataagccaggcaccatcctcaccaagaagcgccgggaagagaccatctttgcctgacacagc

SEQ ID NO: 16143 - DNA, 185 bp, Homo sapiens
  MAP TO AC027045.2; EXPRESSED IN ADULT LIVER, SIGNAL = 0.61; EXPRESSED IN FETAL LIVER, SIGNAL = 0.48; EXPRESSED IN BRAIN, SIGNAL = 0.5; EXPRESSED IN BONE MARROW, SIGNAL = 0.59; EXPRESSED IN HEART, SIGNAL = 1.2; EST_HUMAN HIT: AI741640.1, EVALUE 1.00e-83; SWISSPROT HIT: O42224, EVALUE 1.90e+00
  unsure 114
  unsure 141
  unsure 161
gttacccctcctccgggacattgagcttctccttcaccccacaggccaccacggcgaaaaagaactccgggaagaaggtgcggacgtacacggcggccttggggatggggggtnggccataaacacctcttgcttcttctncgcacggtgcgcatcacctnctccgccacctctactgggtgcac

SEQ ID NO: 16144 - DNA, 203 bp, Homo sapiens
  MAP TO CHR11.1; EXPRESSED IN BONE MARROW, SIGNAL = 2.5; EXPRESSED IN PLACENTA, SIGNAL = 1.3; EXPRESSED IN LUNG, SIGNAL = 2.6; EXPRESSED IN FETAL LIVER, SIGNAL = 1.1; EXPRESSED IN BRAIN, SIGNAL = 1.5; EXPRESSED IN HEART, SIGNAL = 1.8; NT HIT: gi16164218, EVALUE 4.00e-98; SWISSPROT HIT: Q9KII6, EVALUE 1.90e+00; EST_HUMAN HIT: AW573021.1, EVALUE 6.70e-02
agcaacttaccagaggagaactcctgggcgaatgccagggacatcagcaacaagggggagcccacagctacgaacttgactatccggtccaggggcagttccagacgcagtcctttgaggcggggtcccctgcggtcaggcagcagggcatctgagagcatgtactctgcagctgtgtgtgcaagtgacatgatgctgctgag

SEQ ID NO: 16145 - DNA, 264 bp, Homo sapiens
  MAP TO CHR7.1; EXPRESSED IN HELA, SIGNAL =   2; EXPRESSED IN FETAL LIVER, SIGNAL = 2.2; EXPRESSED IN BRAIN, SIGNAL =   3; EXPRESSED IN HEART, SIGNAL = 4.2; EXPRESSED IN ADULT LIVER, SIGNAL = 2.5; EXPRESSED IN BONE MARROW, SIGNAL = 3.2; EXPRESSED IN LUNG, SIGNAL =   4; SWISSPROT HIT: P08581, EVALUE 4.00e-31; NT HIT: gi14752528, EVALUE 1.00e-98; EST_HUMAN HIT: BF695365.1, EVALUE 8.00e-98
ctcttcctatctaaatttgacaaaagtattcactgttccataatgaagttaatgtctccaccactggatttctcaggaatcactgacataggagaagtttcccaatttctgaccgagggaatcatcatgaaagattttagtcatcccaatgtcctctcgctcctgggaatctgcctgcgaagtgaagggtctccgctggtggtcctaccatacatgaaacatggagatcttcgaaatttcattcgaaatgagactcatgtaagt

SEQ ID NO: 16146 - DNA, 107 bp, Homo sapiens
  MAP TO CHR19.1; EXPRESSED IN LUNG, SIGNAL = 1.7; EXPRESSED IN FETAL LIVER, SIGNAL = 1.2; EXPRESSED IN HELA, SIGNAL = 1.7; EXPRESSED IN BRAIN, SIGNAL = 1.6; EXPRESSED IN HEART, SIGNAL = 1.3; EXPRESSED IN ADULT LIVER, SIGNAL = 2.2; EXPRESSED IN PLACENTA, SIGNAL = 1.7; EST_HUMAN HIT: BE797839.1, EVALUE 4.00e-51; SWISSPROT HIT: P03323, EVALUE 9.20e-01; NT HIT: gi15302818, EVALUE 3.00e-51
tccagggacatgggcggctttgccatctggtgcaagaaggccaaggccccgaggccagtgcccaagccccgaggtctcagccgggacatgcagggcctctctctgga

SEQ ID NO: 16147 - DNA, 185 bp, Homo sapiens
  MAP TO CHR16.1; EXPRESSED IN HELA, SIGNAL =   8; EXPRESSED IN BRAIN, SIGNAL =  10; EXPRESSED IN LUNG, SIGNAL =   5; EXPRESSED IN HEART, SIGNAL = 5.5; EXPRESSED IN BONE MARROW, SIGNAL =  12; EXPRESSED IN ADULT LIVER, SIGNAL = 5.2; EXPRESSED IN FETAL LIVER, SIGNAL = 9.3; EST_HUMAN HIT: BG746944.1, EVALUE 8.00e-94; SWISSPROT HIT: P09012, EVALUE 1.10e-02; NT HIT: M60782.1, EVALUE 1.00e-100
tctccacagggcatgccgccgatgactcaggcgccccgcattatgcaccacatgccgggccagccgccctacatgccgccccctggtatgatccccccgccaggccttgcacctggccagatcccaccaggggccatgcccccgcagcagcttatgccaggacagatgccccctgcccagcctgt

SEQ ID NO: 16148 - DNA, 303 bp, Homo sapiens
  MAP TO CHR22.1; EXPRESSED IN ADULT LIVER, SIGNAL = 1.7; EXPRESSED IN PLACENTA, SIGNAL = 4.1; EXPRESSED IN HELA, SIGNAL = 4.5; EXPRESSED IN BRAIN, SIGNAL = 2.4; EXPRESSED IN HEART, SIGNAL = 1.3; EST_HUMAN HIT: BF306996.1, EVALUE 0.00e+00; SWISSPROT HIT: P35085, EVALUE 4.20e-01; NT HIT: gi14777127, EVALUE 0.00e+00
accaacggattcatctttgcacacctcgactttggccttcacctgccccagggccccaggggctgcctcagcccctagtgggtctttctcgtccgggggccccgggtcagcacccatagagtcaggctcatccaggggaaactccagctctgcagatcggctcaggggcttgacgggggacacatccccactaggggtgaggtcactgctttgctcccgttcctcgttgtccttcattttcttataatgcagacaagggatgctactcagaggagggtcgtgtttctgtggatagtgaaattg

SEQ ID NO: 16149 - DNA, 228 bp, Homo sapiens
  MAP TO CHR12.1; EXPRESSED IN BONE MARROW, SIGNAL = 0.6; EXPRESSED IN FETAL LIVER, SIGNAL = 0.84; EXPRESSED IN LUNG, SIGNAL = 1.1; EXPRESSED IN HELA, SIGNAL = 0.97; EXPRESSED IN BRAIN, SIGNAL = 0.65; SWISSPROT HIT: O66679, EVALUE 3.00e-01; NT HIT: AP003009.2, EVALUE 8.20e-01
cagctcagaggcccacagcaggtaatgagggtgaaagtccaagctttgccatctgacagctgtgtcgatgtgtggagccaaaacatttctcttgactgcgtctctctacctattgggtcctggaagactcagttcccttccaaacccagccagcatcttgaatgcactcaaaatccacgttttggctcaatcaggtgttcctgcttgtgccgggatggggaggggcag

SEQ ID NO: 16150 - DNA, 171 bp, Homo sapiens
  MAP TO CHR1.1; EXPRESSED IN ADULT LIVER, SIGNAL = 1.4; EXPRESSED IN BONE MARROW, SIGNAL = 1.1; EXPRESSED IN PLACENTA, SIGNAL = 1.6; EXPRESSED IN LUNG, SIGNAL = 2.5; EXPRESSED IN HELA, SIGNAL = 0.8; EXPRESSED IN FETAL LIVER, SIGNAL = 0.91; EXPRESSED IN BRAIN, SIGNAL =   1; EST_HUMAN HIT: BG572906.1, EVALUE 7.00e-23; SWISSPROT HIT: P11369, EVALUE 2.00e-14; NT HIT: gi14754395, EVALUE 5.00e-20
atctggataccttttatttaatttcattacctaattgccctggctagaacccccagtacaatgttgaatagaagggtcaagagtgggcatccttgtcttgttcctgatcttagggggaaagcatccagtctttcaccattaaatatgatgttagtggtgggtttttcatag

SEQ ID NO: 16151 - DNA, 265 bp, Homo sapiens
  MAP TO CHR19.1; EXPRESSED IN ADULT LIVER, SIGNAL = 5.4; EXPRESSED IN PLACENTA, SIGNAL = 6.4; EXPRESSED IN FETAL LIVER, SIGNAL = 4.8; EXPRESSED IN HELA, SIGNAL = 6.3; EXPRESSED IN HEART, SIGNAL = 2.5; EXPRESSED IN BONE MARROW, SIGNAL = 4.2; EXPRESSED IN LUNG, SIGNAL =   2; EXPRESSED IN BRAIN, SIGNAL = 5.3; NT HIT: gi11276076, EVALUE 6.00e-05; EST_HUMAN HIT: BF062364.1, EVALUE 1.00e-03; SWISSPROT HIT: Q9UGF6, EVALUE 5.00e-20
cacagtggttcagatccgttcagcagccagccgccggaaggccttctccacctgttcttcccacctgggcatggtgctcctgttctatggcaccggcagctccacctacatgcgacccaccacccgctactccccgctggaagggcgcttggctgctgtcttctactccatcctcatacccaccctgaatccgctcatctacagcctgaggaaccaggacatgaagagagccctgtggaagctctatctccaggtgccatactag

SEQ ID NO: 16152 - DNA, 189 bp, Homo sapiens
  MAP TO CHR19.1; EXPRESSED IN BONE MARROW, SIGNAL = 1.2; EXPRESSED IN ADULT LIVER, SIGNAL = 2.4; EXPRESSED IN HELA, SIGNAL = 1.8; EXPRESSED IN BRAIN, SIGNAL = 0.94; EXPRESSED IN LUNG, SIGNAL =   6; EXPRESSED IN HEART, SIGNAL = 1.9; NT HIT: gi11425227, EVALUE 1.00e-102; EST_HUMAN HIT: AI869996.1, EVALUE 1.00e-102; SWISSPROT HIT: P17564, EVALUE 1.00e-20
gagaaggtcactgtccatttcctggctgtctgggcagggccggcccaggccgcccgccagggcccctgggagcagcttgctcgggatcgcagccgcttcgcacgccgcatcacccaggcccaggaggagctgagcccctgcctcacccctgctgcccgggccagagcctgggcacgcctcaggaaccca

SEQ ID NO: 16153 - DNA, 182 bp, Homo sapiens
  MAP TO CHR9.1; EXPRESSED IN BRAIN, SIGNAL = 1.4; EXPRESSED IN HEART, SIGNAL = 1.6; EXPRESSED IN BONE MARROW, SIGNAL = 0.99; EXPRESSED IN PLACENTA, SIGNAL = 1.9; EXPRESSED IN FETAL LIVER, SIGNAL = 1.8; EXPRESSED IN LUNG, SIGNAL = 2.1; SWISSPROT HIT: O19049, EVALUE 6.50e-01; NT HIT: gi4504864, EVALUE 3.00e-58; EST_HUMAN HIT: BI859344.1, EVALUE 5.00e-58
atctctccagaaagcgaagatgatgctggatgacattgtgtctcggggtcatggggggcccccaggacagttccacgacaccgccaaagggggccagaatggcactgtacaggacatgatccctgcgggcaacgccggcctggtcatcgccaagggcggggagaccatgaagcagctgcagg

SEQ ID NO: 16154 - DNA, 257 bp, Homo sapiens
  MAP TO CHR19.1; EXPRESSED IN FETAL LIVER, SIGNAL = 2.8; EXPRESSED IN BRAIN, SIGNAL = 3.5; EXPRESSED IN LUNG, SIGNAL = 1.8; EXPRESSED IN HEART, SIGNAL = 2.6; EXPRESSED IN BONE MARROW, SIGNAL = 3.1; EXPRESSED IN ADULT LIVER, SIGNAL = 5.1; SWISSPROT HIT: P16818, EVALUE 1.30e-01; EST_HUMAN HIT: AV650826.1, EVALUE 9.00e-45
ctgccaggccaagctgctctctggtggcctgggcggtcccaacagagacctcgtcctgcagcacctggtcactggacatcccctgctcatcccgtatcccagggcctgggagagaggagggcaggggtggcaaagggtgggtcccagggccacaccatcgtttttaccttaatgccagcaccagctacgacgaggacttcaaccatgagccgtgtcagaggaagggccacaaggcacactgggcggtgagtgcaggt

SEQ ID NO: 16155 - DNA, 282 bp, Homo sapiens
  MAP TO CHR6.1; EXPRESSED IN ADULT LIVER, SIGNAL = 1.8; EXPRESSED IN PLACENTA, SIGNAL = 1.7; EXPRESSED IN FETAL LIVER, SIGNAL = 1.8; EXPRESSED IN LUNG, SIGNAL = 2.2; EXPRESSED IN HELA, SIGNAL = 2.1; EXPRESSED IN BRAIN, SIGNAL = 1.6; EXPRESSED IN HEART, SIGNAL = 1.8; EST_HUMAN HIT: AL598440.1, EVALUE 0.00e+00; SWISSPROT HIT: P40151, EVALUE 8.00e-18; NT HIT: gi14750628, EVALUE 0.00e+00
taggtgcttctggcccagtgtgtggtctactttgccagagccccaaagtccattgaggtgtacagcgcctacaacaacgtcaaagcctgcctgaggaaccaccaggggccactgccccccgtgcccctgcacctgaggaacgcgcccactaggctgatgaaggatttgggctatggcaaaggctacaagtacaaccccatgtacagcgagcctgtggatcaggagtacctgcctgaagagttgaggggggtagatttcttcaagcagaggaggtgctgactc

SEQ ID NO: 16156 - DNA, 166 bp, Homo sapiens
  MAP TO CHR5.1; EXPRESSED IN BRAIN, SIGNAL = 0.48; EXPRESSED IN HEART, SIGNAL = 0.72; EXPRESSED IN ADULT LIVER, SIGNAL = 0.54; EXPRESSED IN BONE MARROW, SIGNAL = 0.51; EXPRESSED IN LUNG, SIGNAL = 0.62; EXPRESSED IN FETAL LIVER, SIGNAL = 0.54; SWISSPROT HIT: O51066, EVALUE 2.00e+00
tgctcaaaggaaaaagaagctttataagttccttggacatcaaatatcattttgatacttgatacttaaatgagagagaaatgtgctgcttaaagttcctttgaaatccacattggatataaaactgaggtctaaaaatattcttagcataaataaatttataggc

SEQ ID NO: 16157 - DNA, 227 bp, Homo sapiens
  MAP TO CHR7.1; EXPRESSED IN BONE MARROW, SIGNAL = 0.73; EXPRESSED IN BRAIN, SIGNAL = 0.57; EST_HUMAN HIT: BG618391.1, EVALUE 1.00e-112; SWISSPROT HIT: P21439, EVALUE 2.00e-32; NT HIT: gi14739712, EVALUE 1.00e-105
aaagtgtgacattaacaatgtacctactctgttagccgcgtattgagttcagtggtgtcgttgatgtcaaaccatcctatttcctgtcgtagaatagcatgaaaaaacttctgcctaattttcctgatctgtcgaccagctgccaaagtccaaaatgaaacttgtatataggcagcaacaagaactccagcacccaatcctgagtagtaatatgcatatctgaaaaa

SEQ ID NO: 16158 - DNA, 130 bp, Homo sapiens
  MAP TO CHR14.1; EXPRESSED IN BONE MARROW, SIGNAL = 1.3; EXPRESSED IN ADULT LIVER, SIGNAL =   1; EXPRESSED IN PLACENTA, SIGNAL = 1.6; EXPRESSED IN LUNG, SIGNAL = 1.1; EXPRESSED IN BRAIN, SIGNAL = 1.6; EXPRESSED IN HEART, SIGNAL = 1.1; EXPRESSED IN FETAL LIVER, SIGNAL = 0.96; EXPRESSED IN HELA, SIGNAL = 1.5; EST_HUMAN HIT: BE728682.1, EVALUE 1.60e-01; SWISSPROT HIT: P15321, EVALUE 2.70e+00
tctatattctatgtgagttcaagtgtatgcacacatgttcacatacccacaaacaaagtaactttcctggaggtcaaactataggcagcattgttaggcaaaggaggcaacatacctttcctcccactct

SEQ ID NO: 16159 - DNA, 174 bp, Homo sapiens
  MAP TO CHR2.1; EXPRESSED IN HELA, SIGNAL = 1.6; EXPRESSED IN BRAIN, SIGNAL = 1.7; EXPRESSED IN HEART, SIGNAL = 1.8; EXPRESSED IN ADULT LIVER, SIGNAL =   1; EXPRESSED IN BONE MARROW, SIGNAL =   2; EXPRESSED IN PLACENTA, SIGNAL = 1.5; EXPRESSED IN LUNG, SIGNAL = 1.8; EST_HUMAN HIT: BI823626.1, EVALUE 1.00e-80; NT HIT: gi14738407, EVALUE 7.00e-81; SWISSPROT HIT: O95754, EVALUE 6.00e-25
tctcttcctgccagaggctgactcctgtctcacccggttcgcagtccctcacacatacaattactctgttctccttgtggatcctgcctcccacacactttatgttggcgcccgggacaccatcttcgctttatccctgcccttctcaggggagagaccccgcagggtgagaga

SEQ ID NO: 16160 - DNA, 333 bp, Homo sapiens
  MAP TO CHR5.1; EXPRESSED IN FETAL LIVER, SIGNAL = 2.9; EXPRESSED IN HELA, SIGNAL = 3.4; EXPRESSED IN BRAIN, SIGNAL =   3; EXPRESSED IN HEART, SIGNAL =   2; EXPRESSED IN ADULT LIVER, SIGNAL = 3.2; EXPRESSED IN BONE MARROW, SIGNAL = 3.1; EXPRESSED IN PLACENTA, SIGNAL = 2.5; EXPRESSED IN LUNG, SIGNAL = 3.5; EST_HUMAN HIT: BG435751.1, EVALUE 0.00e+00; NT HIT: gi15295777, EVALUE 0.00e+00; SWISSPROT HIT: Q15545, EVALUE 5.00e-39
acttctctaggagtgattctagctcctcttgcaaagagctgagttgctccttttctcggtcttccttttgtttgagctcatccagtacagcctgaaatctgttcttgagagccagattttccactttcatgatgagatcctcttgtcgttttgccctgtcctgggtctcttggagcttgcctttcatgttgtcaatctgcttctgaattcccataaccagctgattggttccttcattttcctggtgctgttcatctgattcatttagcttgtcctgtagctgtctctccagatcttcctccgtgtcaatgatgtttatatcttcttcatctt

SEQ ID NO: 16161 - DNA, 131 bp, Homo sapiens
  MAP TO CHR1.1; EXPRESSED IN BONE MARROW, SIGNAL = 6.5; EXPRESSED IN ADULT LIVER, SIGNAL = 4.3; EXPRESSED IN PLACENTA, SIGNAL =  86; EXPRESSED IN FETAL LIVER, SIGNAL = 4.2; EXPRESSED IN LUNG, SIGNAL =   3; EXPRESSED IN HELA, SIGNAL = 4.5; EXPRESSED IN HEART, SIGNAL = 2.9; EXPRESSED IN BRAIN, SIGNAL = 4.3; EST_HUMAN HIT: AA815279.1, EVALUE 1.00e-57; NT HIT: gi4504180, EVALUE 9.00e-58; SWISSPROT HIT: P46439, EVALUE 9.00e-16
ggccttcttcagatcacctttgtggatttccttgcctatgatgtccttgacatgaagcgtatatttgagcccaagtgcttggacgccttcctaaacttgaaggacttcatctcccgctttgaggtgatgcc

SEQ ID NO: 16162 - DNA, 208 bp, Homo sapiens
  MAP TO CHR14.1; EXPRESSED IN ADULT LIVER, SIGNAL = 5.9; EXPRESSED IN BONE MARROW, SIGNAL = 7.7; EXPRESSED IN LUNG, SIGNAL = 5.8; EXPRESSED IN HELA, SIGNAL = 4.7; EXPRESSED IN FETAL LIVER, SIGNAL = 5.5; EXPRESSED IN BRAIN, SIGNAL = 6.6; EXPRESSED IN HEART, SIGNAL = 4.8; SWISSPROT HIT: P22735, EVALUE 1.00e-28; EST_HUMAN HIT: BF357103.1, EVALUE 2.00e-94; NT HIT: M98447.1, EVALUE 1.00e-113
tcctgggcaggtgaactccctggatgacaatggagtcctgattgggaactggtctggtgattactcccgaggcaccaacccatcagcgtgggtgggcagcgtggagatcctgcttagctacctacgcacgggatattccgtcccctatggccagtgctgggtctttgctggcgtgaccaccacaggtagtggagggactgggacagga

SEQ ID NO: 16163 - DNA, 115 bp, Homo sapiens
  MAP TO CHR14.1; EXPRESSED IN PLACENTA, SIGNAL = 1.7; EXPRESSED IN FETAL LIVER, SIGNAL = 2.1; EXPRESSED IN LUNG, SIGNAL = 6.3; EXPRESSED IN HELA, SIGNAL = 2.1; EXPRESSED IN BRAIN, SIGNAL = 1.9; EXPRESSED IN BONE MARROW, SIGNAL = 4.9; EXPRESSED IN HEART, SIGNAL = 3.2; NT HIT: X62107.1, EVALUE 2.00e-58; SWISSPROT HIT: P23083, EVALUE 2.00e-13; EST_HUMAN HIT: BG107090.1, EVALUE 3.00e-55
tagctagtgaaggtgtatccagaagccttgcaggaaaccttcactgaggccccaggcttcttcacctcagccccagactgcaccagctgaacctgggagtggacacctgtagaga

SEQ ID NO: 16164 - DNA, 216 bp, Homo sapiens
  MAP TO CHR15.1; EXPRESSED IN BONE MARROW, SIGNAL = 0.49; EXPRESSED IN BRAIN, SIGNAL = 0.48; SWISSPROT HIT: P06316, EVALUE 5.00e+00; NT HIT: gi14752378, EVALUE 9.00e-87; EST_HUMAN HIT: AW022882.1, EVALUE 1.00e-105
attaagctattctgttctctgcttcatctcttagattggtggaacgagaatgcctacacgcagccacaggaatccagtttccatggaaaccaaaagcagttgcttgcctgctcagcaagttgaaactgaaggagtggctccacataaaagaaaaataacttgaggactgtaccatggaaaactaaatttaaaaaaacagttataacagtgtttaat

SEQ ID NO: 16165 - DNA, 484 bp, Homo sapiens
  MAP TO CHR5.1; EXPRESSED IN HELA, SIGNAL = 4.4; EXPRESSED IN FETAL LIVER, SIGNAL = 2.7; EXPRESSED IN BRAIN, SIGNAL = 3.3; EXPRESSED IN LUNG, SIGNAL = 1.6; EXPRESSED IN HEART, SIGNAL = 2.9; EXPRESSED IN BONE MARROW, SIGNAL = 3.1; EXPRESSED IN ADULT LIVER, SIGNAL = 3.7; EXPRESSED IN PLACENTA, SIGNAL = 3.9; EST_HUMAN HIT: BI488619.1, EVALUE 0.00e+00; NT HIT: gi14724301, EVALUE 0.00e+00; SWISSPROT HIT: Q9UN66, EVALUE 7.00e-37
tgctggaccagaacgacaacgcgcccgagatcctgtaccccgccctccccacagatggttctaccggcgtggagctggcgcccctctccgcagagcccggctacctggtgaccaaggtggtggcggtggacagagactcgggccagaacgcctggctgtcctaccgcctgctcaaggccagcgagccgggactcttctcggtgggtctgcacacgggcgaggtgcgcacggcgcgagccctgctggacagagacgcgctcaagcagagtctcgtggtggccgtccaggaccacggccagcccccgctctccgccactgtcacgctcaccgtggccgtggccgacaggatctccgacatcctggccgacctgggcagcctcgagccctccgccaaacccaacgattcggacctcactctgtacctggtggtggcggcggccgcggtctcctgcgtcttcctggccttcgtcatcgtgctgctggc

SEQ ID NO: 16166 - DNA, 183 bp, Homo sapiens
  MAP TO CHR19.1; EXPRESSED IN PLACENTA, SIGNAL = 1.4; EXPRESSED IN FETAL LIVER, SIGNAL = 0.94; EXPRESSED IN HELA, SIGNAL = 0.97; EXPRESSED IN LUNG, SIGNAL = 1.1; EXPRESSED IN BRAIN, SIGNAL = 0.91; EXPRESSED IN HEART, SIGNAL = 1.1; EST_HUMAN HIT: BG110455.1, EVALUE 7.00e-82; NT HIT: gi7661689, EVALUE 4.00e-82; SWISSPROT HIT: P07210, EVALUE 9.70e+00
ctgcaggaaggggttcttgaacccaacccagtgcggaacttcctggacgacccccggcgacgcagcgggcccctggaggagtctgagcgggaccgccgggaggagagccgccggcacggccgcaactgggggggccccgacttcgagcgggtgcgctgtggccttgagcacgagcggcaggtg

SEQ ID NO: 16167 - DNA, 163 bp, Homo sapiens
  MAP TO CHR22.1; EXPRESSED IN HEART, SIGNAL = 0.57; EXPRESSED IN BONE MARROW, SIGNAL = 0.83; EXPRESSED IN ADULT LIVER, SIGNAL = 0.92; EXPRESSED IN FETAL LIVER, SIGNAL = 0.58; EXPRESSED IN HELA, SIGNAL = 0.55; EXPRESSED IN BRAIN, SIGNAL = 0.84; EST_HUMAN HIT: AW449360.1, EVALUE 6.00e-85; NT HIT: gi5174644, EVALUE 4.00e-85; SWISSPROT HIT: O43272, EVALUE 9.00e-26
atgaagatgaccttctatgggcattttgtagccggggaggaccaggagtccatccagcccctgcttcggcactacagggccttcggtgtcagcgccatcctggactatggagtggaggaggacctgagccccgaggaggcagagcacaaggagatggagtaag

SEQ ID NO: 16168 - DNA, 289 bp, Homo sapiens
  MAP TO CHR19.1; EXPRESSED IN HELA, SIGNAL = 1.5; EXPRESSED IN BRAIN, SIGNAL = 1.3; EXPRESSED IN BONE MARROW, SIGNAL = 1.2; EXPRESSED IN HEART, SIGNAL = 1.3; EXPRESSED IN FETAL LIVER, SIGNAL = 1.5; EXPRESSED IN LUNG, SIGNAL = 1.8; EST_HUMAN HIT: AV708648.1, EVALUE 9.00e-67; NT HIT: gi14766687, EVALUE 1.00e-21; SWISSPROT HIT: P17027, EVALUE 3.00e-37
caatacacataaaccgtatgaatgtaaggaatgtgggaaatactttagtcgtagtgcaaatcttattcagcatcagagtattcatactggagagaaaccctttgaatgtaaggagtgtgggaaagcctttcgacttcacatacaatttactcgacatcagaaatttcatactggtgagaaaccttttgaatgtaacgaatgtggaaaggcctttagtcttcttaccctgcttaatcgccataagaacattcacacaggtgagaaactgtttgaatgtaaggaatgtggg

SEQ ID NO: 16169 - DNA, 203 bp, Homo sapiens
  MAP TO CHR19.1; EXPRESSED IN FETAL LIVER, SIGNAL = 1.1; EXPRESSED IN LUNG, SIGNAL = 1.7; EXPRESSED IN HELA, SIGNAL = 0.71; EXPRESSED IN BRAIN, SIGNAL = 0.77; EXPRESSED IN HEART, SIGNAL = 1.5; EXPRESSED IN BONE MARROW, SIGNAL =   1; EST_HUMAN HIT: AI376921.1, EVALUE 1.00e-110; NT HIT: S77127.1, EVALUE 4.60e-02; SWISSPROT HIT: P10163, EVALUE 4.90e-01
ctgcccactgcctctacagaccaacaaggcttgggccaagggggacatccagggggcaggggccgcctcccgccgtgccttcctgctgggggtcctcgccgtcgggctgggcgtgtgcacgtatgcggctgccctggtgaccctggctgcctaccttgcctcccgagacccgccctagttgcccctacagccctcactgtgaa

SEQ ID NO: 16170 - DNA, 203 bp, Homo sapiens
  MAP TO CHR16.1; EXPRESSED IN PLACENTA, SIGNAL = 5.3; EXPRESSED IN ADULT LIVER, SIGNAL = 3.7; EXPRESSED IN BONE MARROW, SIGNAL = 4.7; EXPRESSED IN LUNG, SIGNAL = 2.7; EXPRESSED IN FETAL LIVER, SIGNAL = 3.8; EXPRESSED IN HEART, SIGNAL = 2.9; EXPRESSED IN BRAIN, SIGNAL = 4.6; EXPRESSED IN HELA, SIGNAL = 5.8; EST_HUMAN HIT: BI522552.1, EVALUE 1.00e-108; NT HIT: gi11430344, EVALUE 1.00e-108; SWISSPROT HIT: Q92889, EVALUE 4.00e-34
caggcatcttggtgtatagagcccacagaataatcgagtcttgtcaagaagcattcatcttgcgcctctttcgccagaaaaacaaacgtggttttattaaagctttcacagacaatgctgttgcctttgatactggtttttgtcatgtggaaagagtgatgagaaatctttttgtgaggaaactgtatctgtggccaaggtaa

SEQ ID NO: 16171 - DNA, 226 bp, Homo sapiens
  MAP TO CHR7.1; EXPRESSED IN LUNG, SIGNAL = 0.69; EXPRESSED IN HELA, SIGNAL = 0.85; EXPRESSED IN BRAIN, SIGNAL = 0.88; EXPRESSED IN HEART, SIGNAL = 0.87; EXPRESSED IN ADULT LIVER, SIGNAL = 0.48; EXPRESSED IN BONE MARROW, SIGNAL = 0.84; NT HIT: gi14211934, EVALUE 3.00e-03; SWISSPROT HIT: P42534, EVALUE 8.60e-01; EST_HUMAN HIT: BI831025.1, EVALUE 1.00e-116
cctttacctgctgaggttgatgactggggcgtcaccaggtgtgctccaggtggtaaatggaccctggggccaggtaacattggccatcaggaggacattggggagtggcagggagggcaccgaggaggtgaccccgaggatcacggtggcagacccttcacagacatctctccagttcccgggcttagtgacctggaaatcagcctcaggtacatgggtcagaaag

SEQ ID NO: 16172 - DNA, 334 bp, Homo sapiens
  MAP TO CHR6.1; EXPRESSED IN LUNG, SIGNAL = 3.6; EXPRESSED IN HELA, SIGNAL = 1.5; EXPRESSED IN FETAL LIVER, SIGNAL = 1.3; EXPRESSED IN BRAIN, SIGNAL = 1.4; EXPRESSED IN HEART, SIGNAL =   3; EXPRESSED IN ADULT LIVER, SIGNAL = 1.3; EXPRESSED IN PLACENTA, SIGNAL = 4.1; EST_HUMAN HIT: BF847439.1, EVALUE 4.00e-57; SWISSPROT HIT: P22105, EVALUE 4.00e-30; NT HIT: gi15208634, EVALUE 0.00e+00
tcagctgcagaggaagagacccccagccccacagaacccagcatggaggccccggagccccctgaggagccgctcctgggggagctaacagtgacaggatcctcccctgactcgctgagcctctcctggaccgtcccccagggccgcttcgactccttcaccgtgcagtacaaggacagggacgggcggccccaggtggtgcgtgttgggggcgaggagagcgaggtcaccgtggggggcctggagcctgggcgcaaatacaagatgcacctgtatggcctccacgaggggcggcgcgtgggcccggtgtccaccgtgggcgtgactggtgagt

SEQ ID NO: 16173 - DNA, 475 bp, Homo sapiens
  MAP TO CHR5.1; EXPRESSED IN ADULT LIVER, SIGNAL = 0.75; EXPRESSED IN FETAL LIVER, SIGNAL = 0.61; EXPRESSED IN HELA, SIGNAL = 0.51; EXPRESSED IN BRAIN, SIGNAL = 0.45; EXPRESSED IN HEART, SIGNAL = 0.57; NT HIT: AJ131244.1, EVALUE 0.00e+00; EST_HUMAN HIT: BF991907.1, EVALUE 0.00e+00; SWISSPROT HIT: O95486, EVALUE 3.00e-60
gaaggtcctgtccaaaatgcattgctgtcttcacaagagtcagtgagccaaggatacaatttccagcttccaggatcctaccctcatccaataccagcaaagactttgaatccagtctctggacagtctaactatggtggttctcagggatctgggcagactcttaatagaccacctgtggcctctaatccagtgacaccttcgcttcatagtggtcctgctccccgaatgccattacctgcttctcagaacccagctactacaccaatgccttctagtagctttcttcctgaagccaacctgccaccacctttgaattggcaatataactatccatccacagcctcacaaacaaaccattgtcctcgtgcatcatcccaaccaactgtatctggaaatacaagtttaaccacaaatcatcaatatgtttcttctggatatccttcacttcaaaatagcttcataaagtcaggta

SEQ ID NO: 16174 - DNA, 494 bp, Homo sapiens
  MAP TO CHRX.1; EXPRESSED IN HEART, SIGNAL = 4.7; EXPRESSED IN BONE MARROW, SIGNAL = 8.1; EXPRESSED IN ADULT LIVER, SIGNAL = 7.2; EXPRESSED IN PLACENTA, SIGNAL = 8.8; EXPRESSED IN FETAL LIVER, SIGNAL =   7; EXPRESSED IN HELA, SIGNAL = 9.2; EXPRESSED IN BRAIN, SIGNAL = 9.2; EXPRESSED IN LUNG, SIGNAL = 4.8; NT HIT: L13329.1, EVALUE 0.00e+00; EST_HUMAN HIT: BI438372.1, EVALUE 0.00e+00; SWISSPROT HIT: P22304, EVALUE 2.00e-92
tggcaaaactcaaggcatcaacaactggaaaagatctccaccttgggaatcattatacatattgtgatcctgcaatgggtcagaatccacaaaatacagttcccctgcatggatgtcagaaaagttagctagaaattcatcaggattgaagccaacccacacagtatacctatagtctatggtgcgtatggaatagcccatgatctttatatcttttaaactcggcttgtcagaattccactgagggatgtctgaaggccggggatactggctataggcaatcagttcacggggattaccagggaggtacggatcctcttccaagtcacggaatcgaaaatgcttcagaaggttcttgccttctctgcacagctcaacgtgaaatgaaggaacggggcagcgaggtggaacctgcagtcctgcaagtccagccagcgtgggaaaaagagacacaagttccacaaggtccatggattgcctgcctgaaacaggaa

SEQ ID NO: 16175 - DNA, 327 bp, Homo sapiens
  MAP TO CHR17.1; EXPRESSED IN LUNG, SIGNAL = 0.88; EXPRESSED IN FETAL LIVER, SIGNAL = 4.2; EXPRESSED IN HELA, SIGNAL =   1; EXPRESSED IN BRAIN, SIGNAL = 0.97; EXPRESSED IN ADULT LIVER, SIGNAL = 1.2; EXPRESSED IN BONE MARROW, SIGNAL =  14; EST_HUMAN HIT: BI028043.1, EVALUE 0.00e+00; NT HIT: M17171.1, EVALUE 0.00e+00; SWISSPROT HIT: P05164, EVALUE 8.00e-60
gctgacctgccaggaagcaggggatgcgcgctgagcggttggtgaggagacaggggtcatcgtgcaggttgtcaaagggcagcagggcccggccgttgtcttggaagcgctggttgacggccagcagccccagctggttggacatgttgcgcaggttcctggccaggggctcctcgctgccgtacaccatgctggcgtccacgaaggaagtgagcgcgttgatctggttgcggatggtgatgttgctcccggggcaagccgggcaggagcggaagaacgggatgcagtcggcttggttcttgatgcgggggtcattgggcgggatct

SEQ ID NO: 16176 - DNA, 343 bp, Homo sapiens
  MAP TO CHR5.1; EXPRESSED IN FETAL LIVER, SIGNAL = 1.1; EXPRESSED IN BRAIN, SIGNAL = 1.6; EXPRESSED IN LUNG, SIGNAL = 0.75; EXPRESSED IN HEART, SIGNAL = 0.78; EXPRESSED IN BONE MARROW, SIGNAL = 1.3; EXPRESSED IN ADULT LIVER, SIGNAL = 1.1; EST_HUMAN HIT: AI969295.1, EVALUE 0.00e+00; NT HIT: AJ007609.1, EVALUE 0.00e+00; SWISSPROT HIT: Q9Y5I1, EVALUE 1.00e-60
gcagcttttgttctctgagcgagaacaccggcgggttgtcgttaatgtccttcacctccacgttcacatggaaaacctgcagcggcctgtccacgatcacctccaggtggatgctgcactccgcgctctgcccgcacagctcctcgcggtcgatccgagaattcacaaacaaaatgccattctgcagatttacctccagaaggtccccatgtgttttggacgccacccggaacaggcgctgcaccagctccgccagctccagccccaggtcctgcgcgatgcggcccacgaaggtgccgtgtttggcctcctccgagacggagtagtggagctggccgctccc

SEQ ID NO: 16177 - DNA, 220 bp, Homo sapiens
  MAP TO CHR5.1; EXPRESSED IN ADULT LIVER, SIGNAL =   2; EXPRESSED IN BONE MARROW, SIGNAL = 1.8; EXPRESSED IN FETAL LIVER, SIGNAL = 1.7; EXPRESSED IN LUNG, SIGNAL = 2.5; EXPRESSED IN HELA, SIGNAL =   2; EXPRESSED IN BRAIN, SIGNAL = 3.3; EST_HUMAN HIT: BF513666.1, EVALUE 1.00e-120; NT HIT: gi14724348, EVALUE 1.00e-121; SWISSPROT HIT: Q62865, EVALUE 6.00e-01
gggaagtcaaggcatgcagtggaaacgtcaaacaatgaaaaacaaaacagaagactggtccccagggcgttgggaagaggcttggtagcaaaatgccctccctaaatccagcaagcatcagtaccatggggatggtgatcatgtcctccaaaacttgagcattgatcttgggctctggaaggaggtgaaggggctggcaccaaaccatgctttgggggaa

SEQ ID NO: 16178 - DNA, 197 bp, Homo sapiens
  MAP TO CHR19.1; EXPRESSED IN FETAL LIVER, SIGNAL = 3.1; EXPRESSED IN LUNG, SIGNAL = 3.8; EXPRESSED IN BRAIN, SIGNAL = 3.5; EXPRESSED IN HEART, SIGNAL = 3.6; EXPRESSED IN BONE MARROW, SIGNAL = 3.7; EXPRESSED IN PLACENTA, SIGNAL = 2.9; SWISSPROT HIT: P09959, EVALUE 2.90e-01; EST_HUMAN HIT: BE208545.1, EVALUE 2.00e-32; NT HIT: gi14249509, EVALUE 3.00e-92
acctgttctgctgcagcgcctggtccagcacctcctgcttgtccttcagcacctggtgcaggtgccgcatctcctgccggtactgggctgtcttgccggcgaagtcctcctgctgctccagcagacggtgactgatgtcccccagcttcagtgctgcctgcttcttgtagccctggtcgggggaaggactctgtgaa

SEQ ID NO: 16179 - DNA, 199 bp, Homo sapiens
  MAP TO CHR5.1; EXPRESSED IN HELA, SIGNAL = 0.72; EXPRESSED IN BRAIN, SIGNAL = 0.51; EXPRESSED IN HEART, SIGNAL = 0.67; EXPRESSED IN BONE MARROW, SIGNAL = 0.53; SWISSPROT HIT: P35821, EVALUE 7.30e+00; EST_HUMAN HIT: AW792992.1, EVALUE 6.60e-02
ttcttgtgaggctctgggtcgatggcgtgagagccctttgatagcaagctcttatttattatccattattctcagtcttattaataataagaaggaacaggctgcgtgccagagatagttgagtagatttgcagggctggaggattgaggccacagagaaaaatgaaaagaaataagattggttgagaaatatttaagg

SEQ ID NO: 16180 - DNA, 222 bp, Homo sapiens
  MAP TO CHR17.1; EXPRESSED IN BRAIN, SIGNAL = 1.1; EXPRESSED IN BONE MARROW, SIGNAL = 0.83; EXPRESSED IN HEART, SIGNAL = 1.6; EXPRESSED IN PLACENTA, SIGNAL = 1.2; EXPRESSED IN FETAL LIVER, SIGNAL =   6; EXPRESSED IN LUNG, SIGNAL =   2; EXPRESSED IN HELA, SIGNAL = 1.6; SWISSPROT HIT: P02749, EVALUE 2.00e-35; NT HIT: Y11497.1, EVALUE 1.00e-122; EST_HUMAN HIT: BG563151.1, EVALUE 1.00e-108
ttctctctttcagcatcttgtaaagtacctgtgaaaaaagccactgtggtgtaccaaggagagagagtaaagattcaggaaaaatttaagaatggaatgctacatggtgataaagtttctttcttctgcaaaaataaggaaaagaagtgtagctatacagaggatgctcagtgtatagatggcactatcgaagtccccaaatgcttcaagggtaagtctgca

SEQ ID NO: 16181 - DNA, 361 bp, Homo sapiens
  MAP TO CHR5.1; EXPRESSED IN PLACENTA, SIGNAL = 7.3; EXPRESSED IN HELA, SIGNAL =  10; EXPRESSED IN HEART, SIGNAL = 4.7; EXPRESSED IN BONE MARROW, SIGNAL = 6.9; EXPRESSED IN ADULT LIVER, SIGNAL = 4.9; EXPRESSED IN LUNG, SIGNAL = 5.3; EXPRESSED IN FETAL LIVER, SIGNAL = 6.9; EXPRESSED IN BRAIN, SIGNAL = 7.3; NT HIT: gi14735430, EVALUE 0.00e+00; EST_HUMAN HIT: AW027359.1, EVALUE 0.00e+00; SWISSPROT HIT: Q00417, EVALUE 8.00e-09
cattttttggttgtggtgtatgactatgaattcaccctctgtttacagataactctcttcactattcctaggaggaaaaagaaatgcattcggtacttacccggagaaggccgctgccccagccccgttccttccgatgacagtgctctaggctgccccgggtccccagctccccaggactcaccctcataccatctgctgccccgcttccccacagaactgcttactagccctgcggagccggcacctacatccccaggtctctccactgctctcagcctcccaaccccagggcccccacaggccccccgcagcaccctgcagagcacacaggtacagcaacaggaatctcagagacagg

SEQ ID NO: 16182 - DNA, 186 bp, Homo sapiens
  MAP TO CHR19.1; EXPRESSED IN FETAL LIVER, SIGNAL = 0.87; EXPRESSED IN BRAIN, SIGNAL = 0.58; NT HIT: gi16163602, EVALUE 3.00e-43; EST_HUMAN HIT: BF736826.1, EVALUE 2.00e-63; SWISSPROT HIT: P98187, EVALUE 3.00e-21
atgggcgacgcttctgcagggcctgtgacatagtgcacaacttcacagatgctgtcatccaggagcggcgtcgcaccctcactagccagggtgtcgatgacttcctgcaggccaaggccaagtccaagactttggacttcattgacgtgctcttgctggccaaggtgggctactctgggatctgaa

SEQ ID NO: 16183 - DNA, 159 bp, Homo sapiens
  MAP TO CHR17.1; EXPRESSED IN FETAL LIVER, SIGNAL = 1.2; EXPRESSED IN LUNG, SIGNAL = 1.3; EXPRESSED IN HELA, SIGNAL = 1.7; EXPRESSED IN BRAIN, SIGNAL = 1.7; EXPRESSED IN HEART, SIGNAL = 1.3; EXPRESSED IN ADULT LIVER, SIGNAL = 1.8; EXPRESSED IN BONE MARROW, SIGNAL = 1.3; NT HIT: gi13652890, EVALUE 1.00e-51; EST_HUMAN HIT: AL549850.1, EVALUE 8.00e-04; SWISSPROT HIT: Q13183, EVALUE 6.00e-04
aacgtggtgaacttcgcctcctggttcagcttcgccttccccaccatggtcatcttgctgctgctggcctggttgtggctgcagatcctcttcctgggcttcaagtaagtggcaaagttggtgagagaagcccaggtccctgcccttagccctgggagc

SEQ ID NO: 16184 - DNA, 249 bp, Homo sapiens
  MAP TO CHR9.1; EXPRESSED IN BRAIN, SIGNAL = 0.43; EXPRESSED IN HEART, SIGNAL = 0.6; EXPRESSED IN ADULT LIVER, SIGNAL = 0.83; NT HIT: AL163281.2, EVALUE 2.30e-01; EST_HUMAN HIT: BF371493.1, EVALUE 5.00e-28; SWISSPROT HIT: Q92794, EVALUE 1.90e-02
cctctcagctccagttcctggcaggggctgctgcgagattccccgtgcaaccctgacacggggctgtagctaaaacattggtctggcagttttccctctttaagttgaagtgtgatgttggcaggcagcaagctgtggtggcaggctgccagggggagcatgtgttggaaatccttgttccatgttgcagcaatctggggctcccccacccgcaaactgctccagagccagccagccctggggaccaga

SEQ ID NO: 16185 - DNA, 241 bp, Homo sapiens
  MAP TO CHR11.1; EXPRESSED IN ADULT LIVER, SIGNAL = 0.65; EXPRESSED IN BRAIN, SIGNAL = 0.4; EXPRESSED IN HEART, SIGNAL = 0.48; EXPRESSED IN BONE MARROW, SIGNAL = 0.33; NT HIT: gi14763630, EVALUE 0.00e+00; EST_HUMAN HIT: BG392023.1, EVALUE 0.00e+00; SWISSPROT HIT: O00330, EVALUE 2.00e-39
tagtatttccaacttggggatgtttggcatcgacgaatttactgcagtgattaaccctcctcaggcctgcattttggcggttgggaggttccgacctgtgctgaagctcactgaggatgaagagggaaatgccaaactgcagcagcgccagctcataacagtcacaatgtcaagtgacagtcgagtggttgatgacgaactggcaaccaggtttcttaaaagttttaaagcaaacctagag

SEQ ID NO: 16186 - DNA, 411 bp, Homo sapiens
  MAP TO CHR5.1; EXPRESSED IN BRAIN, SIGNAL = 2.2; EXPRESSED IN HEART, SIGNAL = 1.1; EXPRESSED IN BONE MARROW, SIGNAL = 1.8; EXPRESSED IN ADULT LIVER, SIGNAL = 1.7; EXPRESSED IN PLACENTA, SIGNAL = 2.2; EXPRESSED IN LUNG, SIGNAL = 1.4; SWISSPROT HIT: Q9Y5E7, EVALUE 6.00e-37; NT HIT: gi14724285, EVALUE 0.00e+00; EST_HUMAN HIT: BI488619.1, EVALUE 0.00e+00
cctctcagcagcaacatgtcactgagcctgttcgtgctggaccagaatgacaacccgcccgagatcctgtacccggccctccccacagatggttctactggcatggagctggcaccccgctccgcagagcccggctacctggtgaccaaggtggtggcggtggacaaagattcaggccagaacgcctggctgtcatacctcctgcttaaggccagcgagccaggactctttgcggttgggctgtacacgggcgaggtgcgcacggctcgggccctgctggacagagatgccctcaagcagagcctcgtggtggccgtccaggaccacggtcagcctcctctgtcagccaccgtcacactcaccgtggctgtggctgacagcatccccgaagtcttggccgacctgggcagc

SEQ ID NO: 16187 - DNA, 239 bp, Homo sapiens
  MAP TO CHR3.1; EXPRESSED IN BONE MARROW, SIGNAL = 0.66; EXPRESSED IN FETAL LIVER, SIGNAL = 0.53; EXPRESSED IN BRAIN, SIGNAL = 0.65; EXPRESSED IN HEART, SIGNAL = 0.66; SWISSPROT HIT: Q99551, EVALUE 1.00e-16; NT HIT: Y09615.1, EVALUE 9.00e-38; EST_HUMAN HIT: AU136800.1, EVALUE 2.00e-36
gacatggcaaagaaacgacagcctggagtttttaaaagaatgttcccaatgagcaggacctgaagatgtttcttcgttccaaaggagctagcaaagaagtgattgttagcatcatatcaaaataactaaaagctataacacacactcttgaacgtctttcaaaacaatgggatctatgaaggattatgatatcagatcttgatactgtaaatattttgggccattctcctgaatgcttt

SEQ ID NO: 16188 - DNA, 162 bp, Homo sapiens
  MAP TO CHR7.1; EXPRESSED IN BONE MARROW, SIGNAL = 0.75; EXPRESSED IN HEART, SIGNAL = 1.2; EXPRESSED IN FETAL LIVER, SIGNAL = 0.8; EXPRESSED IN LUNG, SIGNAL = 1.2; EXPRESSED IN BRAIN, SIGNAL = 0.65; NT HIT: gi14752048, EVALUE 2.00e-80; EST_HUMAN HIT: BG199496.1, EVALUE 4.00e-86; SWISSPROT HIT: P34562, EVALUE 5.80e+00
cagctcagacctccactcgttccccttgcatgcctttctcatggtttaatgacagccggaaaggatcctattccttcaggaacctgcctgcgcctacaagttcccttcagccttctcctgagactctaatttcagataaaaaggggtccaaggtagaaaaca

SEQ ID NO: 16189 - DNA, 243 bp, Homo sapiens
  MAP TO CHR17.1; EXPRESSED IN FETAL LIVER, SIGNAL = 1.3; EXPRESSED IN LUNG, SIGNAL = 1.3; EXPRESSED IN BRAIN, SIGNAL = 1.7; EXPRESSED IN HEART, SIGNAL = 0.96; EXPRESSED IN ADULT LIVER, SIGNAL = 2.2; EXPRESSED IN BONE MARROW, SIGNAL = 1.7; EST_HUMAN HIT: BF694887.1, EVALUE 2.10e-02; SWISSPROT HIT: P07725, EVALUE 4.00e+00
cttttaatgtttctggttttacaaaagaaaatctgcatcaatccttaaagttacatttaaaatttacattaacagtacaaccagatggcattctgacactcactgtaagtattctaggatttttctaaaatagctggctcaaatagaaaagtcatctttttcccaagtgtgttcctgtccttttctcttgttgtgtgttctaactgttgcacttatattaaaatcataaaaccagaatggaga

SEQ ID NO: 16190 - DNA, 236 bp, Homo sapiens
  MAP TO CHR20.1; EXPRESSED IN HELA, SIGNAL = 6.1; EXPRESSED IN BRAIN, SIGNAL = 5.4; EXPRESSED IN FETAL LIVER, SIGNAL = 4.6; EXPRESSED IN HEART, SIGNAL = 3.3; EXPRESSED IN BONE MARROW, SIGNAL = 4.8; EXPRESSED IN ADULT LIVER, SIGNAL = 4.4; EXPRESSED IN LUNG, SIGNAL =   4; EXPRESSED IN PLACENTA, SIGNAL = 5.4; NT HIT: U47676.1, EVALUE 1.00e-130; EST_HUMAN HIT: BE384696.1, EVALUE 1.00e-122; SWISSPROT HIT: Q01094, EVALUE 6.00e-37
gtacctacagccactggatgtggttcttggacttcttggcaatgagctggatgccctcaaggacgttggtgatgtcatagatgcgccgcttctgcaccttcagcacctcggcagcccagttcaggtcgacgacaccgtcagccgagtggctcagcagctccaggaagcgcttggtggtcagattcagtgaggtctcatagcgtgacttctcccccggggatttcacacctgtgggg

SEQ ID NO: 16191 - DNA, 165 bp, Homo sapiens
  MAP TO CHR9.1; EXPRESSED IN BONE MARROW, SIGNAL = 0.81; EXPRESSED IN ADULT LIVER, SIGNAL = 0.78; EXPRESSED IN HELA, SIGNAL = 0.91; EXPRESSED IN FETAL LIVER, SIGNAL = 0.71; EXPRESSED IN BRAIN, SIGNAL = 0.96; NT HIT: AB008807.1, EVALUE 5.70e-01; EST_HUMAN HIT: AA502064.1, EVALUE 8.40e-01; SWISSPROT HIT: P27153, EVALUE 2.00e+00
actacttaccttacaggacacgtgttgtgtgcagccacaggtttcagaagcagatggcatgtgctaaagagtgtatgtatgaattagctctgggaataacttctgctccaggtataaaagaaattaggaggagagccaaattaaaattgggcaataggcctatgc

SEQ ID NO: 16192 - DNA, 188 bp, Homo sapiens
  MAP TO CHR7.1; EXPRESSED IN BONE MARROW, SIGNAL = 1.4; EXPRESSED IN PLACENTA, SIGNAL = 1.2; EXPRESSED IN FETAL LIVER, SIGNAL = 1.3; EXPRESSED IN HELA, SIGNAL =   2; EXPRESSED IN LUNG, SIGNAL = 0.63; EXPRESSED IN BRAIN, SIGNAL = 1.5; EXPRESSED IN HEART, SIGNAL = 0.85; NT HIT: AJ010770.1, EVALUE 1.00e-102; EST_HUMAN HIT: BE002098.1, EVALUE 9.00e-66; SWISSPROT HIT: Q99996, EVALUE 8.00e-29
ctttaagaatgatttaaggctacagatggaagcccaacgcatttgcctctctctggtttattcaactcatgtggatcaggttcgtgaatatatggaaaatgaaaaagataaagctctttgcagtcttaaagaagagcttatttttgctcaagaggaaaagatcaaggaacttcagaaaatacaccagt

SEQ ID NO: 16193 - DNA, 189 bp, Homo sapiens
  MAP TO CHR19.1; EXPRESSED IN LUNG, SIGNAL = 0.93; EXPRESSED IN HELA, SIGNAL = 0.69; EXPRESSED IN BRAIN, SIGNAL = 0.63; EXPRESSED IN HEART, SIGNAL = 0.84; EXPRESSED IN FETAL LIVER, SIGNAL = 1.2; NT HIT: AB015306.1, EVALUE 9.00e-96; EST_HUMAN HIT: AW118600.1, EVALUE 7.00e-88; SWISSPROT HIT: P78329, EVALUE 5.00e-27
tcagagttcccacctccctcccctaggaactgcatcgggcagacgttcgcgatggcggagatgaaggtggtcctggcgctcacgctgctgcgcttccgcgtcctgcctgaccacaccgagccccgcaggaagccggagctggtcctgcgcgcagagggcggactttggctgcgggtggagcccctgagc

SEQ ID NO: 16194 - DNA, 208 bp, Homo sapiens
  MAP TO CHR6.1; EXPRESSED IN FETAL LIVER, SIGNAL = 4.6; EXPRESSED IN HELA, SIGNAL = 4.5; EXPRESSED IN BRAIN, SIGNAL = 5.8; EXPRESSED IN LUNG, SIGNAL = 4.4; EXPRESSED IN HEART, SIGNAL = 4.8; EXPRESSED IN BONE MARROW, SIGNAL = 5.7; EXPRESSED IN ADULT LIVER, SIGNAL =   7; EXPRESSED IN PLACENTA, SIGNAL = 6.4; SWISSPROT HIT: P31695, EVALUE 3.00e-27; NT HIT: D86566.1, EVALUE 1.00e-113; EST_HUMAN HIT: BF951906.1, EVALUE 2.00e-76
tgtctctctccccaggcatagacgtctcttccctttgccacaatggaggcctctgtgtcgacagcggcccctcctatttctgccactgcccccctggattccaaggcagcctgtgccaggatcacgtgaacccatgtgagtccaggccttgccagaacggggccacctgcatggcccagcccagtgggtatctctgccaggtgagagg

SEQ ID NO: 16195 - DNA, 138 bp, Homo sapiens
  MAP TO CHR12.1; EXPRESSED IN BONE MARROW, SIGNAL = 4.5; EXPRESSED IN FETAL LIVER, SIGNAL = 3.9; EXPRESSED IN LUNG, SIGNAL = 3.4; EXPRESSED IN HELA, SIGNAL = 6.8; EXPRESSED IN BRAIN, SIGNAL = 4.9; EXPRESSED IN HEART, SIGNAL = 2.7; EXPRESSED IN ADULT LIVER, SIGNAL = 4.9; SWISSPROT HIT: P75616, EVALUE 3.40e+00; NT HIT: AJ245621.1, EVALUE 9.00e-58; EST_HUMAN HIT: BG418953.1, EVALUE 1.00e-57
ccccagaggcctggtcattgccatggcgatgagcctcctgttcatcatcctgcttcgcttcctggctggtattatggtctgggtgatgatcatcatggtgattctggtgctgggctacggtgcgtcaccccctccctg

SEQ ID NO: 16196 - DNA, 296 bp, Homo sapiens
  MAP TO CHR9.1; EXPRESSED IN BRAIN, SIGNAL = 4.7; EXPRESSED IN HEART, SIGNAL = 2.5; EXPRESSED IN ADULT LIVER, SIGNAL = 4.5; EXPRESSED IN BONE MARROW, SIGNAL = 3.6; EXPRESSED IN FETAL LIVER, SIGNAL = 3.7; EXPRESSED IN LUNG, SIGNAL = 2.7; NT HIT: gi4759335, EVALUE 1.00e-124; EST_HUMAN HIT: AL551648.1, EVALUE 1.00e-124; SWISSPROT HIT: O15287, EVALUE 1.00e-34
ccaggcctggccctgaagcaggtgggtggcagagacccagagtgggcagtatggcagttccttggttccttttctggcatcttcccacagccgggacatcttgggtagcagagatgatgtgcggctgagcaactcctcacatagagtcaaggcatcttgggctctgcctgcctggatcagtgctaccgctgcctccaaaaacacctcaggcatacagggccctggaggggaggggggtggggagaactggagtgggaagaagaagcagtgtcttgaaaggcatgagccaccatccc

SEQ ID NO: 16197 - DNA, 222 bp, Homo sapiens
  MAP TO CHR17.1; EXPRESSED IN HEART, SIGNAL = 4.1; EXPRESSED IN ADULT LIVER, SIGNAL =   5; EXPRESSED IN FETAL LIVER, SIGNAL = 3.3; EXPRESSED IN LUNG, SIGNAL = 3.4; EXPRESSED IN PLACENTA, SIGNAL =   6; EXPRESSED IN HELA, SIGNAL = 3.9; EXPRESSED IN BRAIN, SIGNAL =   4; EST_HUMAN HIT: BE906410.1, EVALUE 1.20e+00; SWISSPROT HIT: P23813, EVALUE 1.00e+00
ggcagctggaagcatgagaagtcccgccgggccctcaaatggcgggaggagcagcgaaaggagtgctacgctaaggacgacagcgagaaggactcagacacaggtgatgaccaaccagacatcctggagccacccgaggtggccgcagcccgggagagcattgcagccctggtggacgagcagaagcaactgcgcaagcagaaggtgtccagggtttggggg

SEQ ID NO: 16198 - DNA, 216 bp, Homo sapiens
  MAP TO CHR7.1; EXPRESSED IN BRAIN, SIGNAL = 3.3; EXPRESSED IN HEART, SIGNAL = 2.6; EXPRESSED IN ADULT LIVER, SIGNAL = 2.6; EXPRESSED IN BONE MARROW, SIGNAL = 3.9; EXPRESSED IN PLACENTA, SIGNAL = 2.6; EXPRESSED IN FETAL LIVER, SIGNAL = 2.5; EXPRESSED IN LUNG, SIGNAL = 1.7; NT HIT: AB051545.1, EVALUE 1.00e-112; EST_HUMAN HIT: BI093816.1, EVALUE 1.00e-111; SWISSPROT HIT: P36924, EVALUE 1.70e+00
tcttccagactccaccatccatcagaagagattgcctggaaatgatttgtcagagcttgactcactgcttttgaaaaatcatcccatgatgtctgtttgcggatatttaaagcacatattgtgttttcacattccaagtcatcagaaccatagttgcttggttcaatctcacccactgaaatccttaagggtattttaagagcatctgttagaaga

SEQ ID NO: 16199 - DNA, 305 bp, Homo sapiens
  MAP TO CHR7.1; EXPRESSED IN PLACENTA, SIGNAL =  43; EXPRESSED IN FETAL LIVER, SIGNAL =  12; EXPRESSED IN LUNG, SIGNAL =  21; EXPRESSED IN BRAIN, SIGNAL = 4.6; EXPRESSED IN HEART, SIGNAL =  15; NT HIT: L05094.1, EVALUE 1.00e-128; EST_HUMAN HIT: BF128745.1, EVALUE 1.00e-128; SWISSPROT HIT: P08526, EVALUE 2.00e-39
gcccctacagccatgctctggtggctggaattgaccgctgtccccacaaagtgacagctgccatgggcaagaagaagatctctaagaggtcaaagatcaagtcttttgtgaaagtttataaccacaatcagctaatgcccacaaggtactctgtggatatccccttggacaaaactgtcatcaataaggatgtcttcagagaccctactcttaaacacaaggcccgatgagaggccaaggtcaagtttgaagagagatacaagacaggcaagaacaagcggttcttccagaagctgcggttttag

SEQ ID NO: 16200 - DNA, 428 bp, Homo sapiens
  MAP TO CHR17.1; EXPRESSED IN FETAL LIVER, SIGNAL = 0.84; EXPRESSED IN HELA, SIGNAL = 0.97; EXPRESSED IN BRAIN, SIGNAL = 0.99; EXPRESSED IN BONE MARROW, SIGNAL = 1.1; EXPRESSED IN HEART, SIGNAL = 0.67; SWISSPROT HIT: P30953, EVALUE 5.00e-78; NT HIT: U78308.1, EVALUE 0.00e+00; EST_HUMAN HIT: BF477726.1, EVALUE 0.00e+00
cacactttactcatggccaggttgtgtttttgtgcagacaatgtgatcccccactttttctgtgatatgtctgctctgctgaagctggccttctctgacactcgagttaatgaatgggtgatatttatcatgggagggctcattcttgtcatcccattcctactcatccttgggtcctatgcaagaattgtctcctccatcctcaaggtcccttcttctaagggtatctgcaaggccttctctacttgtggctcccacctgtctgtggtgtcactgttctatggaaccgttattggtctctacttatgctcatcagctaatagttctactctaaaggacactgtcatggctatgatgtacactgtggtgacccccatgctgaaccccttcatctacagcctgaggaacagagacatgaagggagccct

SEQ ID NO: 16201 - DNA, 237 bp, Homo sapiens
  MAP TO CHR1.1; EXPRESSED IN HELA, SIGNAL = 2.3; EXPRESSED IN BRAIN, SIGNAL = 1.7; EXPRESSED IN HEART, SIGNAL = 1.2; EXPRESSED IN BONE MARROW, SIGNAL = 1.5; EXPRESSED IN ADULT LIVER, SIGNAL = 1.5; EXPRESSED IN FETAL LIVER, SIGNAL = 1.8; EXPRESSED IN LUNG, SIGNAL = 1.4; EST_HUMAN HIT: AV660485.1, EVALUE 1.00e-113; SWISSPROT HIT: P41162, EVALUE 2.00e-41; NT HIT: L16464.1, EVALUE 1.00e-113
agggcccggctcagcttgtcataattcatctgtggtttgcatttcctgcggccccagaggcgggccacctcatctggatccttgatgacaaattccccgtactctccctgctgccaggcgatgacatggcggaactcttccttctgcagcagctccaggatgaagtgccacagctggatctgccgggagcctggggacgactcggctttgtaggcccaatcagggaaggccaaccct

SEQ ID NO: 16202 - DNA, 150 bp, Homo sapiens
  MAP TO CHR2.1; EXPRESSED IN FETAL LIVER, SIGNAL = 0.62; EXPRESSED IN LUNG, SIGNAL = 0.9; EXPRESSED IN BRAIN, SIGNAL = 0.49; EXPRESSED IN HEART, SIGNAL = 0.84; EXPRESSED IN BONE MARROW, SIGNAL = 0.55; NT HIT: gi14742988, EVALUE 2.00e-46; EST_HUMAN HIT: AL520450.1, EVALUE 3.00e-46; SWISSPROT HIT: P10925, EVALUE 4.50e+00
ccacacacctcttcagctgctcgaagctcatcttcctcgtgggcatcagctttttctgtagctgacagccctgctggaagtgccgttttcttgtcctcagcctgcaagggaagatgtgaaaacagctgagcacgggagatggagactcag

SEQ ID NO: 16203 - DNA, 187 bp, Homo sapiens
  MAP TO CHR19.1; EXPRESSED IN HEART, SIGNAL = 1.9; EXPRESSED IN BONE MARROW, SIGNAL = 2.5; EXPRESSED IN ADULT LIVER, SIGNAL = 4.5; EXPRESSED IN FETAL LIVER, SIGNAL = 2.1; EXPRESSED IN LUNG, SIGNAL = 1.7; EXPRESSED IN BRAIN, SIGNAL = 2.8; NT HIT: gi14575809, EVALUE 1.00e-101; EST_HUMAN HIT: BI906340.1, EVALUE 4.00e-80; SWISSPROT HIT: P12789, EVALUE 5.00e-13
tgctgaccttctgtcccctggaatgtctccaccagacaccgggcctccgcctggatcagctcctcgccttctcgcttccccatgcccaggtcccgcagagcaagcatggtaaacttcctcagctgcctccaccgctccccgttggagaagaaaacccctgcgcagaaggctagactcaaaaagggac

SEQ ID NO: 16204 - DNA, 223 bp, Homo sapiens
  MAP TO CHR17.1; EXPRESSED IN LUNG, SIGNAL = 0.72; EXPRESSED IN HELA, SIGNAL = 2.8; EXPRESSED IN BRAIN, SIGNAL = 1.4; EXPRESSED IN HEART, SIGNAL = 0.68; EXPRESSED IN ADULT LIVER, SIGNAL = 1.3; EXPRESSED IN BONE MARROW, SIGNAL = 1.4; EXPRESSED IN FETAL LIVER, SIGNAL = 1.3; NT HIT: gi16164889, EVALUE 1.00e-122; EST_HUMAN HIT: BG058769.1, EVALUE 1.00e-122; SWISSPROT HIT: P35240, EVALUE 8.20e-01
ttttccacattgtctctaatgttctgtagttttctggagttctgaaccagggatactaaactctccctaaaatcactagtcccatgatctctgccaacattatgaagctcatcaaagaaagtcaacgtctgtttgagtttggcctgaacaattttttgctcttctaattctgcaagaagggcctgcttagtacataattcagtcttgtacttctcctgtaact

SEQ ID NO: 16205 - DNA, 226 bp, Homo sapiens
  MAP TO CHR4.1; EXPRESSED IN FETAL LIVER, SIGNAL = 0.76; EXPRESSED IN BRAIN, SIGNAL = 0.68; EXPRESSED IN HEART, SIGNAL = 0.5; EXPRESSED IN ADULT LIVER, SIGNAL =   1; EXPRESSED IN BONE MARROW, SIGNAL = 0.73; NT HIT: AJ303368.1, EVALUE 1.00e-124; EST_HUMAN HIT: BF967194.1, EVALUE 2.00e-08; SWISSPROT HIT: P41823, EVALUE 2.00e-04
atacatatgttaagttaactctacggaaatccacggatcaagagatgtccaaatgcaagatatccatccgcagagggcggccaaatccagtatacaaggaaacttttgttttcaaagtgaccctatttcagctttctcatgtgacactcatgctgtctgtgtataacaaaagcagcatgagaagaaagatgataggctggatttatttaggtctcaacagctctgg

SEQ ID NO: 16206 - DNA, 202 bp, Homo sapiens
  MAP TO CHR6.1; EXPRESSED IN PLACENTA, SIGNAL = 2.8; EXPRESSED IN FETAL LIVER, SIGNAL = 3.7; EXPRESSED IN LUNG, SIGNAL = 2.6; EXPRESSED IN HELA, SIGNAL = 3.1; EXPRESSED IN BRAIN, SIGNAL = 4.8; EXPRESSED IN HEART, SIGNAL = 2.7; EXPRESSED IN ADULT LIVER, SIGNAL = 4.6; EXPRESSED IN BONE MARROW, SIGNAL =   4; NT HIT: gi14760812, EVALUE 6.00e-97; EST_HUMAN HIT: T07518.1, EVALUE 1.00e-104; SWISSPROT HIT: Q9UBS5, EVALUE 1.00e-07
accctcacttataaagcaaatgcactcgactcccatcacagctaagccggtcggggggctcagggggtcccctgggcaggcccccagagggttctgggggtgtcggtgggtggcgccgggagcggagctgctgccgagactggagttgatggcgcagttcagagacacgctcctctttctggaggaagaagcacaattggga

SEQ ID NO: 16207 - DNA, 144 bp, Homo sapiens
  MAP TO CHR19.1; EXPRESSED IN BRAIN, SIGNAL = 1.2; EXPRESSED IN HEART, SIGNAL = 1.2; EXPRESSED IN FETAL LIVER, SIGNAL = 0.85; EXPRESSED IN LUNG, SIGNAL = 1.2; SWISSPROT HIT: P52888, EVALUE 1.00e-19; NT HIT: gi4507490, EVALUE 5.00e-69; EST_HUMAN HIT: BG686225.1, EVALUE 7.00e-69
tacctggcgtggccgggaccccgaggatctcctggcagagccgcgcatactcctcggcggggtctgcgtccgtctgcgtgtgcagggcctggtccaccttggcgaggacgatctggcgcaggttgaagaggcctgggcgggagg

SEQ ID NO: 16208 - DNA, 435 bp, Homo sapiens
  MAP TO CHR9.1; EXPRESSED IN BONE MARROW, SIGNAL = 3.8; EXPRESSED IN FETAL LIVER, SIGNAL = 3.1; EXPRESSED IN LUNG, SIGNAL = 1.6; EXPRESSED IN HELA, SIGNAL = 3.6; EXPRESSED IN BRAIN, SIGNAL = 3.5; EXPRESSED IN ADULT LIVER, SIGNAL = 2.6; EXPRESSED IN HEART, SIGNAL = 1.7; SWISSPROT HIT: Q9NQN1, EVALUE 2.00e-66; NT HIT: AJ251154.1, EVALUE 0.00e+00; EST_HUMAN HIT: BF003023.1, EVALUE 7.00e-07
tgcccttctgtggggacaatgtcatcaatcacttcacctgtgagatcctggcagttctaaagttggcctgtgctgacatctgcatcaacgtgatcagcatggttgtgaccaacatgatcttccttgcactcccagtcctgtttatttttgtctcatatgtcttcatcattgccaccatcctgagaatcccctcagctgaggggaggaaaaaggccttctccacctgctctgcccacctcactgtcgtgatcgtcttctatgggatgatcctcttcatgtatgggaagcccaagtctaaggacccaatgggagcagacaaacaggaccttgcagacaaactcatctccattttctatggagtggtgacccccattctcaaccccatcatctacagcccgaggaacaaagatttgaaagctgctatgaggaacctgg

SEQ ID NO: 16209 - DNA, 148 bp, Homo sapiens
  MAP TO CHR19.1; EXPRESSED IN PLACENTA, SIGNAL = 5.3; EXPRESSED IN LUNG, SIGNAL = 3.4; EXPRESSED IN HELA, SIGNAL = 4.4; EXPRESSED IN BRAIN, SIGNAL = 4.6; EXPRESSED IN HEART, SIGNAL = 3.5; EXPRESSED IN ADULT LIVER, SIGNAL = 4.3; EXPRESSED IN BONE MARROW, SIGNAL = 6.5; EST_HUMAN HIT: BG548141.1, EVALUE 1.90e-01; SWISSPROT HIT: P23487, EVALUE 5.90e+00; NT HIT: AB025350.1, EVALUE 7.90e+00
aaaacagaagtttcccccacattcgtggagatggagcagaagggaaaacaaagacaagcacacttgtgccagataaatacagacgcaaacacatgcatggcagataaacacacactggcacaccaaatatacacacagccggctgcag

SEQ ID NO: 16210 - DNA, 185 bp, Homo sapiens
  MAP TO CHR14.1; EXPRESSED IN BRAIN, SIGNAL = 4.4; EXPRESSED IN ADULT LIVER, SIGNAL = 6.3; EXPRESSED IN BONE MARROW, SIGNAL = 3.5; EXPRESSED IN PLACENTA, SIGNAL = 5.8; EXPRESSED IN LUNG, SIGNAL = 2.7; EXPRESSED IN HELA, SIGNAL =   5; NT HIT: U32526.1, EVALUE 1.00e-100; SWISSPROT HIT: P04437, EVALUE 8.00e-14
caggggtgagtggccaacagaaggagaaaagtgaccagcagcaggtgaaacaaagtcctcaatctttgatagtccagaaaggagggatttcaattataaactgtgcttatgagaacactgcgtttgactactttccatggtaccaacaattccctgggaaaggccctgcattattgatagccata

SEQ ID NO: 16211 - DNA, 273 bp, Homo sapiens
  MAP TO CHR17.1; EXPRESSED IN HELA, SIGNAL = 7.3; EXPRESSED IN BRAIN, SIGNAL = 6.1; EXPRESSED IN LUNG, SIGNAL = 3.3; EXPRESSED IN HEART, SIGNAL = 3.2; EXPRESSED IN BONE MARROW, SIGNAL = 6.3; EXPRESSED IN ADULT LIVER, SIGNAL = 4.9; EXPRESSED IN PLACENTA, SIGNAL = 7.3; EXPRESSED IN FETAL LIVER, SIGNAL = 6.5; NT HIT: gi13651521, EVALUE 0.00e+00; SWISSPROT HIT: Q09499, EVALUE 8.00e-05
agagatgtcccactttgtgtccaatggtgatgggctggtggtgactgtggacagtgaatctggggacgtcctgtggatccaaaactacgcctcccctgtggtggccttttatgtctggcagcgggagggtctgaggaaggtgatgcacatcaatgtcgctgtggagaccctgcgctatctgaccttcatgtctggggaggtggggcgcatcacaaagtggaagtacccgttccccaaggagacagaggccaagagcaagctgacgtgagttgg

SEQ ID NO: 16212 - DNA, 169 bp, Homo sapiens
  MAP TO CHR19.1; EXPRESSED IN ADULT LIVER, SIGNAL = 5.8; EXPRESSED IN BONE MARROW, SIGNAL = 4.6; EXPRESSED IN PLACENTA, SIGNAL = 6.8; EXPRESSED IN FETAL LIVER, SIGNAL = 3.8; EXPRESSED IN LUNG, SIGNAL = 2.4; EXPRESSED IN BRAIN, SIGNAL = 5.3; EXPRESSED IN HEART, SIGNAL = 2.3; EST_HUMAN HIT: BG772498.1, EVALUE 4.00e-03
gacactgtctgaggaccccctcgcccaggaccacctccccctgcagctgcggctcagccccactgaccttggctcctgcccgccctgcggcccctgccccatcccgaagccggcagccagaggcaggcgccaggcaagtgcccaggggcaggtggtgagagcccggagc

SEQ ID NO: 16213 - DNA, 231 bp, Homo sapiens
  MAP TO CHR7.1; EXPRESSED IN ADULT LIVER, SIGNAL = 2.8; EXPRESSED IN PLACENTA, SIGNAL = 4.5; EXPRESSED IN FETAL LIVER, SIGNAL = 3.4; EXPRESSED IN HELA, SIGNAL = 4.4; EXPRESSED IN BRAIN, SIGNAL = 3.9; EXPRESSED IN HEART, SIGNAL = 1.9; EXPRESSED IN BONE MARROW, SIGNAL = 4.4; SWISSPROT HIT: Q14168, EVALUE 8.00e-25; EST_HUMAN HIT: H79904.1, EVALUE 1.00e-111; NT HIT: gi14751802, EVALUE 1.00e-111
tagttacttcacggaaaccaagggaagatgaaaaagatggccaggcatataagtttgtgtcacgatctgagatggaagcagatattaaagctggaaagtatttggaacatggggaatatgaaggaaatctctatggaaccaaaattgattctattcttgaggttgtccaaactggacggacttgcattctggatgtcaacccacaagtaagctgcttggattccaaagctg

SEQ ID NO: 16214 - DNA, 243 bp, Homo sapiens
  MAP TO CHR19.1; EXPRESSED IN FETAL LIVER, SIGNAL = 2.2; EXPRESSED IN LUNG, SIGNAL = 1.2; EXPRESSED IN HELA, SIGNAL = 1.4; EXPRESSED IN BRAIN, SIGNAL =   3; EXPRESSED IN HEART, SIGNAL = 2.1; EXPRESSED IN ADULT LIVER, SIGNAL = 1.5; EXPRESSED IN BONE MARROW, SIGNAL = 1.2; SWISSPROT HIT: Q07699, EVALUE 5.00e-42; NT HIT: U12191.1, EVALUE 0.00e+00; EST_HUMAN HIT: BF953777.1, EVALUE 1.00e-129
cgctatgagaatgaggtgttgcagctggaggaggatgagcgcttcgagggccgcgtggtgtggaatggcagccggggcaccaaagacctgcaggatctgtctatcttcatcaccaatgtcacctacaaccactcgggcgactacgagtgccacgtctaccgcctgctcttcttcgaaaactacgagcacaacaccagcgtcgtcaagaagatccacattgaggtagtggacaaaggtgagtcg

SEQ ID NO: 16215 - DNA, 144 bp, Homo sapiens
  MAP TO CHR20.1; EXPRESSED IN BRAIN, SIGNAL = 0.64; EXPRESSED IN HEART, SIGNAL = 1.7; EXPRESSED IN BONE MARROW, SIGNAL = 0.52; EXPRESSED IN ADULT LIVER, SIGNAL = 2.3; EXPRESSED IN LUNG, SIGNAL = 1.4; EXPRESSED IN HELA, SIGNAL = 0.79; SWISSPROT HIT: Q26998, EVALUE 2.00e-08; EST_HUMAN HIT: AV705043.1, EVALUE 3.00e-65; NT HIT: gi14770067, EVALUE 4.00e-66
cacctcgggctccccggtaagctggttggtctggatgaggatggtgccgatgcgcacgtctttgcacacagcgcgcagcgcgggctccatggtttcaccggcgcgcagaatggacacaccggtgatctgcggggaggggaggct

SEQ ID NO: 16216 - DNA, 202 bp, Homo sapiens
  MAP TO CHR17.1; EXPRESSED IN HELA, SIGNAL = 1.7; EXPRESSED IN BRAIN, SIGNAL = 1.3; EXPRESSED IN HEART, SIGNAL = 1.3; EXPRESSED IN ADULT LIVER, SIGNAL =   2; EXPRESSED IN BONE MARROW, SIGNAL = 1.3; EXPRESSED IN FETAL LIVER, SIGNAL =   1; EXPRESSED IN LUNG, SIGNAL = 1.1; NT HIT: AB011096.1, EVALUE 1.00e-105; SWISSPROT HIT: Q00597, EVALUE 1.40e+00; EST_HUMAN HIT: BF847317.1, EVALUE 8.00e-94
gcagtctcctgaaggtgcacctgcagctgcatggcttcagtgtcttcattgatgtggagaagctggaagcaggcaagttcgaggacaaactcatccagagtgtcatgggtgcccgcaactttgtgttggtgctatcacctggagcactggacaagtgcatgcaagaccatgactgcaaggattgggtgcataaggtaggtgc

SEQ ID NO: 16217 - DNA, 145 bp, Homo sapiens
  MAP TO CHR22.1; EXPRESSED IN FETAL LIVER, SIGNAL = 0.59; EXPRESSED IN HELA, SIGNAL = 0.42; EXPRESSED IN BRAIN, SIGNAL = 0.77; EXPRESSED IN BONE MARROW, SIGNAL = 0.77; EXPRESSED IN HEART, SIGNAL = 0.54; EXPRESSED IN ADULT LIVER, SIGNAL = 0.67; EST_HUMAN HIT: W78748.1, EVALUE 1.00e-67; NT HIT: gi14778437, EVALUE 1.00e-72; SWISSPROT HIT: P31636, EVALUE 7.00e-20
cctgtgtacaggatgcggctgatcatccccggcatcaccatgaggaacatgggcagcagcttcaggtaagcacacataatgcaagcggccttcacgtgagacatgtccttgccacacaggcagcgctgcacaatgacctgccggg

SEQ ID NO: 16218 - DNA, 177 bp, Homo sapiens
  MAP TO CHR7.1; EXPRESSED IN BRAIN, SIGNAL = 0.95; EXPRESSED IN HEART, SIGNAL =   1; EXPRESSED IN BONE MARROW, SIGNAL = 0.8; EXPRESSED IN HELA, SIGNAL = 0.82; EST_HUMAN HIT: AA084240.1, EVALUE 5.00e-95; NT HIT: gi9628718, EVALUE 2.40e+00; SWISSPROT HIT: Q9JJV3, EVALUE 1.50e+00
ttgttcacaaaagccagttggccttttgcatgaatgcacaccattttaataaaagtattcctaaaagcatgatccgacactcatacaacacaacaaaaaagacagctttactaggtcacattataaactcaactggcatctacacaagacagtatcccattagtttcagtggaattt

SEQ ID NO: 16219 - DNA, 334 bp, Homo sapiens
  MAP TO CHR15.1; EXPRESSED IN LUNG, SIGNAL = 0.7; EXPRESSED IN BRAIN, SIGNAL = 0.46; EXPRESSED IN HEART, SIGNAL = 0.64; EXPRESSED IN BONE MARROW, SIGNAL = 0.5; EXPRESSED IN ADULT LIVER, SIGNAL = 0.72; EST_HUMAN HIT: BI825110.1, EVALUE 0.00e+00; NT HIT: AF175292.1, EVALUE 4.00e-50; SWISSPROT HIT: Q12873, EVALUE 4.20e+00
cataccttcatgaagaatatcctcctacaggtcttgcctcgatcattcccagctgcttggagttgagcagcctccgaggccagtgctagatcaggaacactgctgggcccagcctccgatgtgtctgccagctgcacagatgagtggaaaattccctccttgccctgggccaaggaaatctcaaagggatcaggatatttctcatcagggctagagccatcatcactggtcttagcattacagagcatcagggacctggagatggaccgaaattttgcagattttctgctctttccagcgcggctgtgcgactccatcctcaaagaggaagtga

SEQ ID NO: 16220 - DNA, 212 bp, Homo sapiens
  MAP TO CHR15.1; EXPRESSED IN PLACENTA, SIGNAL = 7.6; EXPRESSED IN FETAL LIVER, SIGNAL =  10; EXPRESSED IN LUNG, SIGNAL = 6.9; EXPRESSED IN HELA, SIGNAL = 5.8; EXPRESSED IN BRAIN, SIGNAL =  10; EXPRESSED IN HEART, SIGNAL = 8.1; EXPRESSED IN ADULT LIVER, SIGNAL =  12; NT HIT: gi16161908, EVALUE 1.00e-112; SWISSPROT HIT: P30957, EVALUE 7.00e-12
gccaggtcactgaagaacctttagaagaagagacagaggatgttgcaaacctatggaattcctttaatgacgaggaagaggaagaagcgatggtattctttgtccttcaggagagcaccgggtatatggcaccaaccctgcgtgccctggccatcatccataccatcatctctctagtctgtgtggtgggctactactgcctgaaggtgagc

SEQ ID NO: 16221 - DNA, 275 bp, Homo sapiens
  MAP TO CHR14.1; EXPRESSED IN HEART, SIGNAL = 2.1; EXPRESSED IN ADULT LIVER, SIGNAL = 4.7; EXPRESSED IN PLACENTA, SIGNAL = 5.8; EXPRESSED IN LUNG, SIGNAL = 2.6; EXPRESSED IN HELA, SIGNAL = 5.7; EXPRESSED IN FETAL LIVER, SIGNAL = 4.1; EXPRESSED IN BRAIN, SIGNAL = 4.5; SWISSPROT HIT: P47467, EVALUE 1.70e+00; EST_HUMAN HIT: BI464766.1, EVALUE 0.00e+00; NT HIT: gi16190815, EVALUE 0.00e+00
tcagggggccttgggtagacattatggtccccatcagtgccagcctcacctgtactgcacgacttcctgtggaccatgggtttcaatgggaacgcccggtccactccaactcgtttctttgtaaaggggataaagtcctggttattggctttgggataccaggattgagggcctgacgagtaaaacaaaccatttccttggccctgggaatcactttctggatcttgctggctgattccagtacagtggggataggagtagctccgggcttttgt

SEQ ID NO: 16222 - DNA, 265 bp, Homo sapiens
  MAP TO CHR11.1; EXPRESSED IN HELA, SIGNAL = 0.96; EXPRESSED IN LUNG, SIGNAL = 1.9; EXPRESSED IN BRAIN, SIGNAL = 1.4; EXPRESSED IN HEART, SIGNAL = 1.8; EXPRESSED IN BONE MARROW, SIGNAL = 1.7; EXPRESSED IN ADULT LIVER, SIGNAL = 1.9; EXPRESSED IN FETAL LIVER, SIGNAL = 1.2; SWISSPROT HIT: O00327, EVALUE 9.00e-46; EST_HUMAN HIT: AA129554.1, EVALUE 1.00e-124; NT HIT: AB000813.1, EVALUE 0.00e+00
tttgctttctagcagatcgaaaaagcttctgcacaatccacagcacaggctatttgaaaagctggccacccacaaagatggggctggatgaagacaacgaaccagacaatgaggggtgtaacctcagctgcctcgtcgcaattggacgactgcattctcatgtagttccacaaccagtgaacggggaaatcagggtgaaatctatggaatatgtttctcggcacgcgatagatggaaagtttgtttttgtagaccagaggtaaga

SEQ ID NO: 16223 - DNA, 203 bp, Homo sapiens
  MAP TO CHR19.1; EXPRESSED IN BONE MARROW, SIGNAL = 0.84; EXPRESSED IN LUNG, SIGNAL = 0.72; EXPRESSED IN HELA, SIGNAL = 0.78; EXPRESSED IN BRAIN, SIGNAL = 0.96; EXPRESSED IN HEART, SIGNAL = 0.9; NT HIT: gi13647896, EVALUE 1.20e-02; SWISSPROT HIT: Q06886, EVALUE 1.90e-02; EST_HUMAN HIT: AL041673.1, EVALUE 1.00e-105
cttgttagcttcctcttccacaggaaggcggaagcagtctacccagatacagtggcactgaccttcgaccccatccaccagtggctgtcctgcgtgtataaggaccacagcatctacatctgggatgtcaaggacatcaacagagtgggcaaggtgtggtcagagctcttccacagctcctacgtttggaacgtggaggtgag

SEQ ID NO: 16224 - DNA, 429 bp, Homo sapiens
  MAP TO CHR1.1; EXPRESSED IN BRAIN, SIGNAL = 0.7; EXPRESSED IN HEART, SIGNAL = 0.83; EXPRESSED IN BONE MARROW, SIGNAL = 0.87; NT HIT: AF321235.1, EVALUE 7.00e-03; SWISSPROT HIT: O43869, EVALUE 4.00e-38; EST_HUMAN HIT: BE817889.1, EVALUE 6.00e-04
tgtatgtgtttcagcttccattctgtaggtctcggctcattaaccactttttctgtgaagttccagctctactatcattggtgtgtcaggacacctcccagtatgagtatacagtcctcctgagtggacttattatcttgctactaccattcctagccattctggcttcctatgctcgtgtgcttattgtggtattccagatgagctcaggaaaaggacaggcaaaagctgtttccacttgttcctcccacctgattgtggcaagcctgttctatgcaaccactctctttacctacacaaggccacactccttgcgttccccttcacgggataaggcggtggcagtattttacaccattgtcacacctctactgaacccatttatctacagcctgagaaataaggaagtgacgggggcagtgaggagac

SEQ ID NO: 16225 - DNA, 140 bp, Homo sapiens
  MAP TO CHR17.1; EXPRESSED IN PLACENTA, SIGNAL = 1.5; EXPRESSED IN FETAL LIVER, SIGNAL = 1.2; EXPRESSED IN HELA, SIGNAL =   3; EXPRESSED IN BRAIN, SIGNAL = 1.5; EXPRESSED IN LUNG, SIGNAL = 2.8; EXPRESSED IN HEART, SIGNAL = 1.1; EXPRESSED IN ADULT LIVER, SIGNAL =   1; EXPRESSED IN BONE MARROW, SIGNAL = 1.4; EST_HUMAN HIT: AA877995.1, EVALUE 7.00e-69; NT HIT: gi4502034, EVALUE 2.00e-68; SWISSPROT HIT: P30838, EVALUE 2.00e-21
ctctcaccttggccgggctcggggggtatctgaccttcaggccttcatcattcatcagaggcctcaccaggcaagagcggcggtgagagaaagtctcgaagctcttcttgccatggtaggatcccatgccgctgttccct

SEQ ID NO: 16226 - DNA, 167 bp, Homo sapiens
  MAP TO CHR11.1; EXPRESSED IN ADULT LIVER, SIGNAL = 1.3; EXPRESSED IN BONE MARROW, SIGNAL = 1.6; EXPRESSED IN PLACENTA, SIGNAL = 1.3; EXPRESSED IN LUNG, SIGNAL = 2.1; EXPRESSED IN FETAL LIVER, SIGNAL = 1.3; EXPRESSED IN HELA, SIGNAL = 1.1; EXPRESSED IN BRAIN, SIGNAL = 1.6; EST_HUMAN HIT: U69202.1, EVALUE 6.00e-82; NT HIT: gi4502232, EVALUE 6.00e-81; SWISSPROT HIT: O00327, EVALUE 8.00e-25
cattttcagttttacagacgagagaaaaaattacaactaattgctataaatttaaaatcaaagatggttcttttatcacactacggagtcgatggttcagtttcatgaacccttggaccaaggaagtagaatatattgtctcaactaacactgttgttttgtaagta

SEQ ID NO: 16227 - DNA, 162 bp, Homo sapiens
  MAP TO CHR19.1; EXPRESSED IN FETAL LIVER, SIGNAL = 0.54; EXPRESSED IN LUNG, SIGNAL = 0.92; EXPRESSED IN HELA, SIGNAL = 0.85; EXPRESSED IN BRAIN, SIGNAL = 0.79; EXPRESSED IN BONE MARROW, SIGNAL = 0.58; EXPRESSED IN HEART, SIGNAL = 0.96; EXPRESSED IN ADULT LIVER, SIGNAL = 0.72; EST_HUMAN HIT: AI572619.1, EVALUE 2.00e-84; NT HIT: gi16160747, EVALUE 9.00e-03; SWISSPROT HIT: P17053, EVALUE 1.30e-01
cacccgagtctagcacgtggttgttccggaggtccaggatctgcagggagcagttgaacttgagcaggttacccagctgggccgagtcctgcaggccgttgagcttgttgtccgccaggtacagctcccgcaggttcatgttcatcttcagggccgtggctg

SEQ ID NO: 16228 - DNA, 157 bp, Homo sapiens
  MAP TO CHR7.1; EXPRESSED IN HELA, SIGNAL = 0.72; EXPRESSED IN BRAIN, SIGNAL = 0.97; EXPRESSED IN HEART, SIGNAL =   1; EXPRESSED IN ADULT LIVER, SIGNAL = 0.59; EXPRESSED IN BONE MARROW, SIGNAL = 0.85; EXPRESSED IN FETAL LIVER, SIGNAL = 0.82; EXPRESSED IN LUNG, SIGNAL = 0.64; EST_HUMAN HIT: AW304362.1, EVALUE 2.00e-01; NT HIT: gi15668172, EVALUE 8.40e+00
ggaaagtatcaattatgttttcatttgaacaaaaattaaactctttcatttgtctgctcagctgttcatggaatactgcataaattgggtttaaaatacatgtgttatcaacgtaactgccttgcaattccttacattcaatagaactataaataaa

SEQ ID NO: 16229 - DNA, 231 bp, Homo sapiens
  MAP TO CHR11.1; EXPRESSED IN FETAL LIVER, SIGNAL = 1.4; EXPRESSED IN LUNG, SIGNAL = 2.6; EXPRESSED IN HELA, SIGNAL = 0.88; EXPRESSED IN BRAIN, SIGNAL = 1.2; EXPRESSED IN HEART, SIGNAL = 2.7; EXPRESSED IN BONE MARROW, SIGNAL = 1.2; SWISSPROT HIT: Q90734, EVALUE 6.00e+00; EST_HUMAN HIT: BI597594.1, EVALUE 9.00e-85; NT HIT: gi14150091, EVALUE 9.00e-84
tctacctaccttgaatgtttataaagtttacgaggtctactatgcaatttccgatcccaattctctggatcactggagttaccatcatagggatgaggccgtcctgccatcccactccaagcttcctcacactactgctctgaaagcacacatgtagcacccataacctacataaaagagcagtgttgacctttaaatctattccacgcagaataaaatagtcatagaatt

SEQ ID NO: 16230 - DNA, 220 bp, Homo sapiens
  MAP TO CHR19.1; EXPRESSED IN BRAIN, SIGNAL = 1.3; EXPRESSED IN PLACENTA, SIGNAL = 1.3; EXPRESSED IN HELA, SIGNAL = 1.6; EXPRESSED IN HEART, SIGNAL = 1.4; EXPRESSED IN BONE MARROW, SIGNAL = 1.3; EXPRESSED IN ADULT LIVER, SIGNAL = 0.84; EXPRESSED IN LUNG, SIGNAL = 2.1; EXPRESSED IN FETAL LIVER, SIGNAL = 1.5; SWISSPROT HIT: Q14585, EVALUE 2.00e-32; EST_HUMAN HIT: BE714172.1, EVALUE 7.00e-67; NT HIT: gi15321335, EVALUE 1.00e-121
aaagctttcccacactccttacattcataaggtttttcaccagtgtgaattctctgatgtttaataagatgtgatcgctgactaaaggcctttctacattcattacattcatagggtttttcaccagtatgaattctctgatgtcgagtaagatctgagccacaactaaaggccttcccacattccttacattcataagatttctcaccagtatgaattc

SEQ ID NO: 16231 - DNA, 146 bp, Homo sapiens
  MAP TO CHR7.1; EXPRESSED IN PLACENTA, SIGNAL = 1.4; EXPRESSED IN FETAL LIVER, SIGNAL = 1.8; EXPRESSED IN LUNG, SIGNAL = 2.9; EXPRESSED IN HELA, SIGNAL = 1.4; EXPRESSED IN BRAIN, SIGNAL = 1.6; EXPRESSED IN HEART, SIGNAL = 2.7; EXPRESSED IN BONE MARROW, SIGNAL = 1.6; NT HIT: AF124564.1, EVALUE 7.70e+00; EST_HUMAN HIT: T26460.1, EVALUE 2.00e-53
ttgccatggttttctacaaatgttttacaaccagctaaaggcaaacgtaccctttgagcttttcaatcttttcttgaaatcactcagtcattacttcctagagcaaatgctgcttcaggacccagcccagtctaatagggagtgga

SEQ ID NO: 16232 - DNA, 171 bp, Homo sapiens
  MAP TO CHR5.1; EXPRESSED IN HEART, SIGNAL = 2.4; EXPRESSED IN BONE MARROW, SIGNAL = 3.9; EXPRESSED IN ADULT LIVER, SIGNAL = 3.5; EXPRESSED IN PLACENTA, SIGNAL = 4.3; EXPRESSED IN HELA, SIGNAL = 5.2; EXPRESSED IN FETAL LIVER, SIGNAL = 3.4; EXPRESSED IN BRAIN, SIGNAL = 4.6; NT HIT: AF119153.1, EVALUE 7.00e-87; SWISSPROT HIT: O14511, EVALUE 3.00e-13; EST_HUMAN HIT: BF108794.1, EVALUE 5.00e-58
cacctaccgctgttgacgtaaagccggccccggagcggtgtccttccccaggatgttctcggcctcgcagacatactccccagcgtcctccaccttcaccttgttgaactgtagtcgtgagttctttctggttagggaggggataaaagggggagaggcgtgagccagggc

SEQ ID NO: 16233 - DNA, 170 bp, Homo sapiens
  MAP TO CHR1.1; EXPRESSED IN FETAL LIVER, SIGNAL =  60; EXPRESSED IN LUNG, SIGNAL =  62; EXPRESSED IN BRAIN, SIGNAL =  24; EXPRESSED IN HEART, SIGNAL =  37; EXPRESSED IN BONE MARROW, SIGNAL =  30; EST_HUMAN HIT: BG196817.1, EVALUE 1.00e-89; NT HIT: X04802.1, EVALUE 5.00e-91; SWISSPROT HIT: P02248, EVALUE 3.00e-21
taacaggtcaaaatgcagatcttcgtgaagaccctgactggcaagaccatcacccttgaagtggagcccagtgacaccatcgaaaatgtgaaggccaatatccaggataaggaaggcatcctccccgaccagcagaggctcatctttgcaggcatgcagctagaagatgg

SEQ ID NO: 16234 - DNA, 259 bp, Homo sapiens
  MAP TO CHR17.1; EXPRESSED IN PLACENTA, SIGNAL = 3.7; EXPRESSED IN FETAL LIVER, SIGNAL = 3.7; EXPRESSED IN HELA, SIGNAL = 3.7; EXPRESSED IN BRAIN, SIGNAL = 4.5; EXPRESSED IN LUNG, SIGNAL = 4.2; EXPRESSED IN HEART, SIGNAL = 4.6; EXPRESSED IN ADULT LIVER, SIGNAL = 2.9; EST_HUMAN HIT: BF966186.1, EVALUE 3.50e-01; NT HIT: AB001523.1, EVALUE 2.40e-01; SWISSPROT HIT: P13808, EVALUE 2.00e+00
ggagaccctaaacactcccaccggctgtcagctcctctggggtgggccggggcccaggctctgggtaatatggcagtgccctaggcgtctggtcaaaaggtgggagctcaggcactgtctcaggcttcaggtcaaagggctcagtctcaggcaggtcaaaaggcacgatcttgggtgtggccaggtcagagggtgcattcggcttcttcttgggctaagatgaggaaaaggggtttaaatggggcttggggtgggtgca

SEQ ID NO: 16235 - DNA, 413 bp, Homo sapiens
  MAP TO CHR10.1; EXPRESSED IN BRAIN, SIGNAL = 2.4; EXPRESSED IN BONE MARROW, SIGNAL = 2.1; EXPRESSED IN PLACENTA, SIGNAL =   3; EXPRESSED IN LUNG, SIGNAL = 1.1; EXPRESSED IN HELA, SIGNAL = 3.1; EXPRESSED IN HEART, SIGNAL = 1.7; EXPRESSED IN ADULT LIVER, SIGNAL = 2.5; EXPRESSED IN FETAL LIVER, SIGNAL = 2.6; EST_HUMAN HIT: BG118565.1, EVALUE 0.00e+00; NT HIT: AF161019.1, EVALUE 0.00e+00; SWISSPROT HIT: O57383, EVALUE 3.00e-11
ggtcaccagtcccgctcagcaggttctcggtaggggaggcctaagagcctgaagacatccttctcagtgggagtgggcagcactcggccaggccccaccttgcagccatgggtgttccggaccacagcagtgctgagggcatgttctgacagactcatgcccttggttttggccagggctcgcatggagcggttgaagtgtgcagagccggtgaagtagagcagggcacaggcaaactcgctatagggcaccacgatgatgtccaggcgccggtgccgccgccctggccctgggagccggcacacccccaagtacttctgttgctgaccattctcctcttggctcaccaagtcatctgtgaggaaccctggcccaacagaggggactgctgggagggcagggaaccaggcctg

SEQ ID NO: 16236 - DNA, 121 bp, Homo sapiens
  MAP TO CHR19.1; EXPRESSED IN ADULT LIVER, SIGNAL = 4.3; EXPRESSED IN BONE MARROW, SIGNAL = 4.4; EXPRESSED IN PLACENTA, SIGNAL = 3.9; EXPRESSED IN HELA, SIGNAL = 4.3; EXPRESSED IN FETAL LIVER, SIGNAL = 4.1; EXPRESSED IN LUNG, SIGNAL = 2.5; EXPRESSED IN BRAIN, SIGNAL = 4.7; EXPRESSED IN HEART, SIGNAL = 3.1; EST_HUMAN HIT: AL044278.1, EVALUE 1.00e-57; NT HIT: gi14767780, EVALUE 8.00e-58; SWISSPROT HIT: P21608, EVALUE 3.50e+00
caggcgatttctgcgggaaactctgaagatgtccaatgctgaggacctgaaccggctcacagcctgctccctcgtgcttctgggccacatcttctatgtgctgggaaaccacagggtgagt

SEQ ID NO: 16237 - DNA, 153 bp, Homo sapiens
  MAP TO CHR4.1; EXPRESSED IN FETAL LIVER, SIGNAL = 1.1; EXPRESSED IN LUNG, SIGNAL = 1.6; EXPRESSED IN HELA, SIGNAL = 1.5; EXPRESSED IN BRAIN, SIGNAL = 1.3; EXPRESSED IN BONE MARROW, SIGNAL = 1.1; EXPRESSED IN ADULT LIVER, SIGNAL = 0.94; EXPRESSED IN PLACENTA, SIGNAL = 1.3; EST_HUMAN HIT: BG875826.1, EVALUE 5.00e-33; NT HIT: X77398.1, EVALUE 1.00e-23; SWISSPROT HIT: P39028, EVALUE 3.00e-17
tgtgattttcttgctgttcttgatcagctggaccctgaaacacttccggaaggcagagtttggttgtttggcttcaacttctactttttccagcataatcccctttgcatttgaagcacctttaaaactgttggccttcagggctgtgcccaa

SEQ ID NO: 16238 - DNA, 150 bp, Homo sapiens
  MAP TO CHR9.1; EXPRESSED IN FETAL LIVER, SIGNAL = 1.7; EXPRESSED IN LUNG, SIGNAL = 2.3; EXPRESSED IN HELA, SIGNAL = 1.4; EXPRESSED IN BRAIN, SIGNAL = 1.3; EXPRESSED IN HEART, SIGNAL = 2.1; EXPRESSED IN BONE MARROW, SIGNAL = 1.1; EXPRESSED IN ADULT LIVER, SIGNAL = 1.6; NT HIT: gi14745778, EVALUE 8.00e-77; EST_HUMAN HIT: BF204037.1, EVALUE 3.00e-74
tacctcatgcagcgggtctctcctcatgttgcgcccggccagcggctcatcgtgggggaagacgacggagtagttcttggcgtaggactcatggcttcgctctcggatccagcgggggtggtccgtgagcgagtgatggaagcgcctgcc

SEQ ID NO: 16239 - DNA, 253 bp, Homo sapiens
  MAP TO CHR2.1; EXPRESSED IN FETAL LIVER, SIGNAL = 3.2; EXPRESSED IN LUNG, SIGNAL = 2.9; EXPRESSED IN BRAIN, SIGNAL = 2.1; EXPRESSED IN HEART, SIGNAL = 1.9; EXPRESSED IN BONE MARROW, SIGNAL = 2.6; EXPRESSED IN ADULT LIVER, SIGNAL = 2.8; SWISSPROT HIT: O75643, EVALUE 1.00e-40; EST_HUMAN HIT: AL602364.1, EVALUE 0.00e+00; NT HIT: gi14724658, EVALUE 0.00e+00
ctccctcctctgcccgccaggtatacatggactggtacgagaagttccaggacaggctcaacaagaaggtggtactcctgacaggcgagaccagcacagacctgaagctgctgggcaaagggaacattatcatcagcacccctgagaagtgggacatactttcccggcgatggaagcagcgcaagaacgtgcagaacatcaacctcttcgtggtggatgaggtccaccttatcgggggcgagaatggggtatg

SEQ ID NO: 16240 - DNA, 208 bp, Homo sapiens
  MAP TO CHR11.1; EXPRESSED IN LUNG, SIGNAL = 3.2; EXPRESSED IN HELA, SIGNAL = 2.6; EXPRESSED IN BRAIN, SIGNAL = 2.3; EXPRESSED IN HEART, SIGNAL = 2.8; EXPRESSED IN BONE MARROW, SIGNAL = 2.3; EXPRESSED IN ADULT LIVER, SIGNAL = 1.8; EXPRESSED IN FETAL LIVER, SIGNAL = 2.3; EXPRESSED IN PLACENTA, SIGNAL = 2.7; EST_HUMAN HIT: AA897079.1, EVALUE 1.00e-102; SWISSPROT HIT: P14207, EVALUE 1.00e-37; NT HIT: X69516.1, EVALUE 1.00e-113
tgctggatccagggccccaggttgggtgagcactcatagagacaggtgtcctggatgaagtggcgcttgcaggcgggctccatcttgccgcagtggtcccagttaaagttgtacaggcgggaggtgtccttgtgcagctcctggctggtgctggctgtgcagcaggcattcttcttccagggactgcactgggtggggaagacacagg

SEQ ID NO: 16241 - DNA, 202 bp, Homo sapiens
  MAP TO CHR16.1; EXPRESSED IN BONE MARROW, SIGNAL = 0.68; EXPRESSED IN FETAL LIVER, SIGNAL = 0.9; EXPRESSED IN LUNG, SIGNAL = 1.2; EXPRESSED IN BRAIN, SIGNAL = 0.65; EXPRESSED IN HEART, SIGNAL = 1.1; EST_HUMAN HIT: BF814199.1, EVALUE 1.00e-104; SWISSPROT HIT: P45763, EVALUE 9.50e-01
ttcagaaaaaccatgccacatggatcgtttggatcgaatcctattgtctggcatctataatgtacgcaagggaaagacccagctgcataagtgggctgagcgcctagttgtcctctgtggtacctgccttatcgtttcctcagtgaaggattgtcaaactggaaagatgcacattttgcctctggttggtggaaaggtaaga

SEQ ID NO: 16242 - DNA, 159 bp, Homo sapiens
  MAP TO CHR7.1; EXPRESSED IN LUNG, SIGNAL = 2.1; EXPRESSED IN BRAIN, SIGNAL = 1.8; EXPRESSED IN HEART, SIGNAL = 1.3; EXPRESSED IN ADULT LIVER, SIGNAL = 2.4; EXPRESSED IN PLACENTA, SIGNAL = 1.4; EXPRESSED IN FETAL LIVER, SIGNAL = 3.2; EST_HUMAN HIT: BE909088.1, EVALUE 2.00e-01; SWISSPROT HIT: P54467, EVALUE 2.60e+00
gaacaacagcagagaggtgaattcttaagggagttcaaaaagggtagagagctgtgtgtctaacccctaacagttcccaacagaaaagagagagagacaacacaagaaggagaaaggaatagagacacttgcaacaggctgcgcccctcaggagggaac

SEQ ID NO: 16243 - DNA, 202 bp, Homo sapiens
  MAP TO CHR5.1; EXPRESSED IN FETAL LIVER, SIGNAL = 2.5; EXPRESSED IN LUNG, SIGNAL = 1.7; EXPRESSED IN HELA, SIGNAL = 3.3; EXPRESSED IN BRAIN, SIGNAL = 2.6; EXPRESSED IN ADULT LIVER, SIGNAL = 1.8; EXPRESSED IN BONE MARROW, SIGNAL = 2.4; EXPRESSED IN HEART, SIGNAL = 1.4; NT HIT: AB054976.1, EVALUE 1.00e-110; EST_HUMAN HIT: BE905348.1, EVALUE 1.00e-101; SWISSPROT HIT: Q27355, EVALUE 1.30e-01
taccagtgaggttgttgaggagccaaaggccctcagggagcagactgggctgtttctggaaaaagaactgcagaaggataaataaggctgccacaacacgctcatctctgagctgcatttgccctcccacagtctccactgctgcctcagttagcaggttgcttagacatcgaagcacggggcatgccagctgcaaagacaa

SEQ ID NO: 16244 - DNA, 187 bp, Homo sapiens
  MAP TO CHR1.1; EXPRESSED IN BRAIN, SIGNAL = 1.2; EXPRESSED IN ADULT LIVER, SIGNAL = 1.3; NT HIT: gi14723150, EVALUE 3.00e-89; EST_HUMAN HIT: BI198942.1, EVALUE 5.00e-89; SWISSPROT HIT: P24667, EVALUE 3.00e-29
gctggtacaccatctcaaagtcagagtcattcccataatagggatcttcaataataagttgtttttgtggatcatagctcccaagtagctcaattttagctttgcaggttttaacttgattactttttctattcaaatctctcagattgctatcatccatacatggtatataatcaaatttggcaaa

SEQ ID NO: 16245 - DNA, 132 bp, Homo sapiens
  MAP TO CHR7.1; EXPRESSED IN BRAIN, SIGNAL = 0.77; EXPRESSED IN BONE MARROW, SIGNAL = 0.87; EXPRESSED IN ADULT LIVER, SIGNAL = 0.99; EXPRESSED IN LUNG, SIGNAL = 1.1; EXPRESSED IN HELA, SIGNAL = 0.85; NT HIT: U37100.1, EVALUE 6.00e-56; EST_HUMAN HIT: BG682196.1, EVALUE 8.00e-56; SWISSPROT HIT: P15122, EVALUE 3.00e-17
gaagcctcaccaaggtctatccggagagcccagggggctgtaggccgtaacggtgatgcccttggagtggcagtactggatcagtttctcctgcgtgaggtatgggtgacactcaacctgcaacagcaaaca

SEQ ID NO: 16246 - DNA, 122 bp, Homo sapiens
  MAP TO CHR19.1; EXPRESSED IN LUNG, SIGNAL = 1.1; EXPRESSED IN HELA, SIGNAL = 1.3; EXPRESSED IN BRAIN, SIGNAL = 1.4; EXPRESSED IN HEART, SIGNAL = 1.2; EXPRESSED IN ADULT LIVER, SIGNAL = 1.2; EXPRESSED IN BONE MARROW, SIGNAL = 1.6; EXPRESSED IN PLACENTA, SIGNAL = 1.5; NT HIT: gi15301350, EVALUE 1.00e-38; EST_HUMAN HIT: BE773795.1, EVALUE 3.00e-61; SWISSPROT HIT: Q15928, EVALUE 8.00e-13
aggttcctgtagttctccaacatcacgtccctgtacaaagctttctgaacagggtccaggcatttccactcctcctgagagaattctacagccacatccctgaatgtcaaagatccctgaaa

SEQ ID NO: 16247 - DNA, 159 bp, Homo sapiens
  MAP TO CHR7.1; EXPRESSED IN ADULT LIVER, SIGNAL = 1.7; EXPRESSED IN BONE MARROW, SIGNAL = 1.7; EXPRESSED IN PLACENTA, SIGNAL = 1.6; EXPRESSED IN LUNG, SIGNAL = 1.3; EXPRESSED IN HELA, SIGNAL = 1.7; EXPRESSED IN BRAIN, SIGNAL = 1.7; EXPRESSED IN HEART, SIGNAL = 1.3; SWISSPROT HIT: Q02643, EVALUE 1.50e+00; NT HIT: Z28337.1, EVALUE 8.50e+00
aggggtctctctgaccctggattgtgggctggtgttcagggaaaagctccaaacctaggggggacctggcaggtagggcagggaaaggaggccagatcgcccatccagaggaggagccgtggctaagggttattacacatggaagactgccacctggaa

SEQ ID NO: 16248 - DNA, 219 bp, Homo sapiens
  MAP TO CHR11.1; EXPRESSED IN FETAL LIVER, SIGNAL = 1.2; EXPRESSED IN LUNG, SIGNAL = 2.2; EXPRESSED IN BRAIN, SIGNAL = 0.9; EXPRESSED IN BONE MARROW, SIGNAL = 0.92; EXPRESSED IN HEART, SIGNAL =   2; NT HIT: gi14773028, EVALUE 1.00e-88; EST_HUMAN HIT: BI560022.1, EVALUE 2.00e-88; SWISSPROT HIT: Q99816, EVALUE 1.00e-31
aaaaataataaaaatagagtaactgaagtttctatttctttttcaggtaatacatacaatattccaatatgcctatggctactggacacatacccatataatccccctatctgttttgttaagcctactagttcaatgactattaaaacaggaaagcatgttgatgcaaatgggaagatatatcttccttatctacatgaatggaaacacgtaagtatt

SEQ ID NO: 16249 - DNA, 274 bp, Homo sapiens
  MAP TO CHR11.1; EXPRESSED IN FETAL LIVER, SIGNAL = 0.72; EXPRESSED IN LUNG, SIGNAL = 0.93; EXPRESSED IN HELA, SIGNAL =   1; EXPRESSED IN BRAIN, SIGNAL = 0.78; EXPRESSED IN HEART, SIGNAL = 0.84; EXPRESSED IN BONE MARROW, SIGNAL = 0.83; EST_HUMAN HIT: AI962273.1, EVALUE 3.00e-17; NT HIT: AF282279.1, EVALUE 2.00e-29; SWISSPROT HIT: Q15620, EVALUE 4.00e-35
taccatctttatctcttatggtttcatcctctccagcatcctccatatcagttccaaggagggcaggtccaaagctttcagcacttgcagttcccatataattgctgtttctctgttctttggatcaggtgcatttatgtatctcaacccatcttctgctgggtccatggataagagaaaattatcttctgtcttttatacaaatgtggttcccatgttgaaccccttaatctacagcctgaggaacaaagatgttaaatttgccctaagaaaa

SEQ ID NO: 16250 - DNA, 139 bp, Homo sapiens
  MAP TO CHR17.1; EXPRESSED IN FETAL LIVER, SIGNAL = 4.8; EXPRESSED IN LUNG, SIGNAL = 2.2; EXPRESSED IN PLACENTA, SIGNAL = 4.6; EXPRESSED IN BRAIN, SIGNAL = 4.6; EXPRESSED IN HEART, SIGNAL = 2.7; EXPRESSED IN ADULT LIVER, SIGNAL = 6.7; EXPRESSED IN BONE MARROW, SIGNAL = 4.6; EST_HUMAN HIT: BE276919.1, EVALUE 2.00e-66; NT HIT: gi8923803, EVALUE 1.00e-66; SWISSPROT HIT: Q9QZZ4, EVALUE 3.40e+00
cagttgcaggccccgggcattctgtctggcggacagcgatgaggaatcctccagcgctggctcctccgaggaagacgatgccccagagcccagcgggggagacaaacagctcctcccaggggctgaagggtgagtggat

SEQ ID NO: 16251 - DNA, 256 bp, Homo sapiens
  MAP TO AC068936.2; EXPRESSED IN FETAL LIVER, SIGNAL = 0.69; EXPRESSED IN BRAIN, SIGNAL = 0.77; EXPRESSED IN HEART, SIGNAL = 0.66; EXPRESSED IN BONE MARROW, SIGNAL = 0.89; SWISSPROT HIT: P34492, EVALUE 2.50e+00; EST_HUMAN HIT: AL541679.1, EVALUE 8.00e-27; NT HIT: gi4507202, EVALUE 5.00e-27
ccctctcagggaggtgcctcgtggcagcccgcccctccggcctggtttcctcaggaaaagccctgagaggaagcagggagggggttgggagctgtgggggccagacgaacccgagcgctcccaccgagctgcctgccatggggctggggctgctgctcccgctgctgctgctctggactcgggggactcaggggtccgagctggaccccaaagggcagcacgtctgtgtggccagcaggtgggtctcgtgggagtc

SEQ ID NO: 16252 - DNA, 199 bp, Homo sapiens
  MAP TO CHR22.1; EXPRESSED IN ADULT LIVER, SIGNAL = 2.3; EXPRESSED IN PLACENTA, SIGNAL = 2.5; EXPRESSED IN FETAL LIVER, SIGNAL = 2.2; EXPRESSED IN LUNG, SIGNAL = 2.4; EXPRESSED IN HELA, SIGNAL = 2.6; EXPRESSED IN BRAIN, SIGNAL = 2.5; EXPRESSED IN HEART, SIGNAL = 1.9; EXPRESSED IN BONE MARROW, SIGNAL = 2.1; EST_HUMAN HIT: BI764337.1, EVALUE 1.00e-105; NT HIT: gi14778708, EVALUE 1.00e-106; SWISSPROT HIT: O15169, EVALUE 8.40e-01
ctcaccttgaggcaggtgccaccctgggcccgctgcagctgaacctccagcagagccttggtgccctccaggctggtgagcgttgtcagcagctcatcccgctccgcctccaggccccgcacctgcttgcggtactggtccttctcgatgaggctctgtgagtactgcaactggatccggtcacggctctggatggcct

SEQ ID NO: 16253 - DNA, 151 bp, Homo sapiens
  MAP TO CHR17.1; EXPRESSED IN BONE MARROW, SIGNAL = 1.8; EXPRESSED IN PLACENTA, SIGNAL = 1.3; EXPRESSED IN FETAL LIVER, SIGNAL = 1.6; EXPRESSED IN LUNG, SIGNAL = 1.9; EXPRESSED IN HELA, SIGNAL = 1.9; EXPRESSED IN BRAIN, SIGNAL =   2; EXPRESSED IN ADULT LIVER, SIGNAL = 1.2; EXPRESSED IN HEART, SIGNAL = 1.6; EST_HUMAN HIT: AW504150.1, EVALUE 2.00e-69; NT HIT: gi14786062, EVALUE 1.00e-69; SWISSPROT HIT: P51692, EVALUE 1.00e-18
tcccctcctctagctcagtttggcccgctggcccagctgagcccccaggagcgtctgagccgggagacggccctccagcagaagcaggtgtctctggaggcctggttgcagcgtgaggcacagacactgcagcagtaccgcgtggtgagtg

SEQ ID NO: 16254 - DNA, 437 bp, Homo sapiens
  MAP TO AC002345.1; EXPRESSED IN ADULT LIVER, SIGNAL = 1.5; EXPRESSED IN PLACENTA, SIGNAL = 1.2; EXPRESSED IN LUNG, SIGNAL = 0.93; EXPRESSED IN HELA, SIGNAL = 0.54; EXPRESSED IN BRAIN, SIGNAL = 0.82; EXPRESSED IN HEART, SIGNAL = 0.94; EST_HUMAN HIT: BG395842.1, EVALUE 0.00e+00; SWISSPROT HIT: Q12809, EVALUE 2.00e-54; NT HIT: gi13540548, EVALUE 0.00e+00
  unsure 205
cccaggtcctgtccctgggcgcggatgtgctgccggagtacaagctgcaggcgccgcgcatccaccgctggaccatcctgcactacagccccttcaaggccgtgtgggactggctcatcctgctgctggtcatctacacggctgtcttcacgccctactcagccgccttcctgctcagcgaccaggacgaatcacggcgtggggncctgcagctatacctgcagtcccctcactgtggtggatctcatcgtggacatcatgttcgtcgtggacatcgtcatcaacttccgcaccacctatgtcaacaccaatgatgaggtggtcagccacccccgccgcatcgccgtccactacttcaagggctggttcctcattgacatggtggccgccatccctttcgacctcctgatcttccgcactggctccgatgaggtgag

SEQ ID NO: 16255 - DNA, 124 bp, Homo sapiens
  MAP TO CHR6.1; EXPRESSED IN HELA, SIGNAL = 3.1; EXPRESSED IN BRAIN, SIGNAL = 4.7; EXPRESSED IN ADULT LIVER, SIGNAL = 5.9; EXPRESSED IN BONE MARROW, SIGNAL = 4.1; EXPRESSED IN HEART, SIGNAL = 3.5; EXPRESSED IN PLACENTA, SIGNAL = 3.8; EXPRESSED IN FETAL LIVER, SIGNAL = 4.2; EXPRESSED IN LUNG, SIGNAL = 2.6; NT HIT: gi14738642, EVALUE 4.10e-01
atgccacgacaatacgtgttaactcctccaatcaaaaggggcttcacagggcttccaaacactgttttgttttccctgccaatcatctgaacaatactattgtcagtcatattaatttagacaa

SEQ ID NO: 16256 - DNA, 247 bp, Homo sapiens
  MAP TO AC002345.1; EXPRESSED IN BRAIN, SIGNAL = 0.58; EXPRESSED IN BONE MARROW, SIGNAL = 0.59; EXPRESSED IN HEART, SIGNAL = 0.54; EXPRESSED IN FETAL LIVER, SIGNAL = 0.54; NT HIT: gi13540548, EVALUE 1.00e-127; EST_HUMAN HIT: BF685466.1, EVALUE 1.00e-127; SWISSPROT HIT: Q12809, EVALUE 3.00e-30
  unsure 245
tcccaccccaggtcggaagttcctgattgccaatgctcagatggagaactgcgccatcatttactgcaacgacggcttctgcgaactcttcggctactcccgagtggaggtgatgcagcaaccctgcacctgcgacttcctcacaggccccaacacaccaagcagcgccgtgtcccgcctagcgcaggccctgctgggggctgaggagtgcaaggtggacatcctctactaccgcaaggatggtnga

SEQ ID NO: 16257 - DNA, 121 bp, Homo sapiens
  MAP TO CHR19.1; EXPRESSED IN ADULT LIVER, SIGNAL = 0.82; EXPRESSED IN LUNG, SIGNAL = 1.1; EXPRESSED IN FETAL LIVER, SIGNAL = 0.66; EXPRESSED IN HELA, SIGNAL = 0.78; EXPRESSED IN BRAIN, SIGNAL = 0.69; EXPRESSED IN HEART, SIGNAL = 0.99; NT HIT: gi14757575, EVALUE 1.00e-59; EST_HUMAN HIT: BF686670.1, EVALUE 2.00e-59; SWISSPROT HIT: P48301, EVALUE 3.00e-15
ctggcaggtggtgacaaacagagacacccaggaactgctgctctgcaccgcctatgtcttcgaggtctccaccagcgagcgtggggcccagcatcacatttaccgcctggtcagggactga

SEQ ID NO: 16258 - DNA, 168 bp, Homo sapiens
  MAP TO CHR12.1; EXPRESSED IN HEART, SIGNAL = 0.95; EXPRESSED IN ADULT LIVER, SIGNAL = 0.38; EXPRESSED IN BRAIN, SIGNAL = 0.65; NT HIT: gi5453693, EVALUE 4.00e-73; EST_HUMAN HIT: BI261250.1, EVALUE 5.00e-73; SWISSPROT HIT: Q12778, EVALUE 2.90e-01
cgttacctgtctggtcctccagcaggtaatactgcttcatgagctgccagtgggcctgcagggccttcgcggtacgggccaggtagaaggcatcagggtgtctgtgcagcaggtcctggaaggtctccaaggtgggctggctggtctagagggcaagaaacattctct

SEQ ID NO: 16259 - DNA, 259 bp, Homo sapiens
  MAP TO CHR7.1; EXPRESSED IN BRAIN, SIGNAL =   3; EXPRESSED IN ADULT LIVER, SIGNAL = 2.9; EXPRESSED IN BONE MARROW, SIGNAL = 3.2; EXPRESSED IN FETAL LIVER, SIGNAL = 2.5; EXPRESSED IN PLACENTA, SIGNAL = 2.6; EXPRESSED IN LUNG, SIGNAL =   2; NT HIT: AB033111.1, EVALUE 0.00e+00; EST_HUMAN HIT: BE796328.1, EVALUE 0.00e+00; SWISSPROT HIT: Q28990, EVALUE 8.80e-01
acccgtgcagttcctctgctgcaccagcatctgcttcagttcgctgaactcgctggagccttccgtggactcctccagcgtgttctctggctcctgcatgtccaggtctggctgttccccacaggggtcacccagctctgagtcctggaagccgtgctcttccacctgtcccatcaggggctcaggtgtctccaaactttctgagccctcgtcgttggtctgtacctcgatcttaatcacgatcccatcgtgcgctgag

SEQ ID NO: 16260 - DNA, 237 bp, Homo sapiens
  MAP TO CHR7.1; EXPRESSED IN FETAL LIVER, SIGNAL = 0.35; EXPRESSED IN BRAIN, SIGNAL = 0.37; EXPRESSED IN HEART, SIGNAL = 0.51; EXPRESSED IN BONE MARROW, SIGNAL = 0.37; EXPRESSED IN ADULT LIVER, SIGNAL = 0.57; SWISSPROT HIT: P30988, EVALUE 3.00e-37; NT HIT: gi16175746, EVALUE 1.00e-121; EST_HUMAN HIT: AW373738.1, EVALUE 1.20e+00
ttggcttccttacctggaaatgaatcagagagtgcatcacgtaatcatatatcttcccaagcatcttgttggaaggtctccagggaaagacgacaaactggattcccagcaggggcacaaggatcatggtggccttcacagccttcaggtacatgtgggattccgcctcatgggtttccctcattttggtcacaagcacccggacaatgttgagcaaaaagaagaaattgacctgca

SEQ ID NO: 16261 - DNA, 208 bp, Homo sapiens
  MAP TO CHR11.1; EXPRESSED IN BRAIN, SIGNAL = 5.7; EXPRESSED IN HEART, SIGNAL = 4.2; EXPRESSED IN BONE MARROW, SIGNAL = 5.6; EXPRESSED IN PLACENTA, SIGNAL = 6.2; EXPRESSED IN FETAL LIVER, SIGNAL = 5.3; EXPRESSED IN LUNG, SIGNAL = 3.3; EXPRESSED IN HELA, SIGNAL =  11; NT HIT: gi14141179, EVALUE 1.00e-108; EST_HUMAN HIT: BI549407.1, EVALUE 1.00e-108; SWISSPROT HIT: P51612, EVALUE 2.50e+00
cagaaagagctgacagatgagttccgggagctgcgggccacagtggagcggatggggctcatgaaggccaaccatgtcttcttcctgctgtacctgctgcacatcttgctgctggatggtgcagcctggctcaccctttgggtctttgggacgtcctttttgcccttcctcctctgtgcggtgctgctcagtgcagttcaggtgagag

SEQ ID NO: 16262 - DNA, 214 bp, Homo sapiens
  MAP TO CHR7.1; EXPRESSED IN LUNG, SIGNAL = 1.4; EXPRESSED IN PLACENTA, SIGNAL = 1.6; EXPRESSED IN HELA, SIGNAL = 2.3; EXPRESSED IN BRAIN, SIGNAL = 2.8; EXPRESSED IN HEART, SIGNAL =   2; EXPRESSED IN BONE MARROW, SIGNAL = 2.4; EXPRESSED IN ADULT LIVER, SIGNAL = 3.8; NT HIT: AE000058.2, EVALUE 1.90e-01; EST_HUMAN HIT: BF692737.1, EVALUE 1.10e+00; SWISSPROT HIT: P36812, EVALUE 6.30e+00
tcaaactccctcacattcataaacaaattcaaatccctgtgtcaacacttgaaattctgcctgcaaatcagaacacgctgtgattgaattgctgctcctatcatctaccactgactcctatcaaagcatataactggattagtgggaaaacagctacattatgcttgcatttcagctttgctaacagcaggcttcctttctgcaacaaagaaca

SEQ ID NO: 16263 - DNA, 408 bp, Homo sapiens
  MAP TO CHR15.1; EXPRESSED IN HELA, SIGNAL = 0.96; EXPRESSED IN BRAIN, SIGNAL = 0.9; EXPRESSED IN HEART, SIGNAL = 0.99; EXPRESSED IN ADULT LIVER, SIGNAL = 1.2; EXPRESSED IN LUNG, SIGNAL = 1.1; EXPRESSED IN BONE MARROW, SIGNAL = 0.94; EXPRESSED IN FETAL LIVER, SIGNAL =   1; EXPRESSED IN PLACENTA, SIGNAL = 1.2; EST_HUMAN HIT: AV731870.1, EVALUE 2.20e+00; SWISSPROT HIT: P11087, EVALUE 4.00e-03
gaaggatgcaccatcaggactcccggggtcggaggctgggccatcggggctcccggaggtggaggatgcaccatcaggaccccgggagtcggaggcttacccatcgggccccccagcgggggagcccgggactatcgggccccctaggggcagcgaggctgggtcatcggaaccaccggggcgggcagctggccctgtggggcctcccaggcaggctgaggtgcctgccaagcggccaatgaagcctgcaagtcaattggaggtggatcccaagggactggcggagcccgggaggaagcgggcggggcccgcatcagaaccgtagggcggctatagacaggcggcttcggggcctccgccggaggactcgagtcacccagattcttacttagctgcgacatgtccctt

SEQ ID NO: 16264 - DNA, 297 bp, Homo sapiens
  MAP TO CHR12.1; EXPRESSED IN BONE MARROW, SIGNAL = 0.6; EXPRESSED IN FETAL LIVER, SIGNAL = 0.51; EXPRESSED IN HELA, SIGNAL = 0.98; EXPRESSED IN BRAIN, SIGNAL = 0.61; EXPRESSED IN LUNG, SIGNAL = 0.84; EXPRESSED IN HEART, SIGNAL = 0.77; NT HIT: X02801.1, EVALUE 1.10e+00; SWISSPROT HIT: Q00624, EVALUE 1.20e+00; EST_HUMAN HIT: AI160406.1, EVALUE 1.60e+00
ttttaatgcagcagagaatctatggagccgctgagctctctcagccggcagcttgttactggggaggggaggaatatgggttatccaacggtcagtatggtaatccaggcacaataaggcctcacacacaatggacacatatttttcttcagcgatgtcagaagggaagcgctttgtactgaaacgtgtttccgaaagagaaaccaaatcgagatttagaaaggagatggggtggaggggcaattgcagagagcatttggatgctggcaaaaggtagtcagaaaaaataaaaataaa

SEQ ID NO: 16265 - DNA, 241 bp, Homo sapiens
  MAP TO CHR1.1; EXPRESSED IN FETAL LIVER, SIGNAL = 0.77; EXPRESSED IN LUNG, SIGNAL = 0.57; EXPRESSED IN HELA, SIGNAL = 0.76; EXPRESSED IN BRAIN, SIGNAL = 0.71; EXPRESSED IN BONE MARROW, SIGNAL = 0.79; NT HIT: AY048673.1, EVALUE 1.00e-126; EST_HUMAN HIT: BG210550.1, EVALUE 1.00e-126; SWISSPROT HIT: P35555, EVALUE 4.50e-01
ttccttctggagttgatcacaagcccaaggaatgcctaggactcctggaatgtatgtatgcaaacctccagcttcagacccagctcgcccaacaacagatggctgttttggaacatttacaggcatctgtgacacaactggctcctgggaggggaagcaataactcttctctcccagccttatctcctaatccattgttaaatcacctgccccaattcagtaaatgaattgtggaacaaag

SEQ ID NO: 16266 - DNA, 252 bp, Homo sapiens
  MAP TO CHR13.1; EXPRESSED IN BRAIN, SIGNAL = 0.56; EXPRESSED IN BONE MARROW, SIGNAL = 0.73; EXPRESSED IN ADULT LIVER, SIGNAL = 0.56; EXPRESSED IN FETAL LIVER, SIGNAL = 0.49; NT HIT: AF346501.1, EVALUE 5.00e-61; SWISSPROT HIT: P46023, EVALUE 3.00e-07
cctttgactttagttatttcaaaaactttcgatactgctcctatgctccccatgtccgaatatgtatgcccttgacggacggcatttcttcatttgaggacctcttggctaacaatatcctcagaatatttgtctgggttatagctttcattacctgctttggaaatctttttgtcattggcatgagatctttcattaaagctgaaaatacaactcacgctatgtccatcaaaatcctttgttgtaagtatg

SEQ ID NO: 16267 - DNA, 190 bp, Homo sapiens
  MAP TO CHR19.1; EXPRESSED IN ADULT LIVER, SIGNAL =  10; EXPRESSED IN BONE MARROW, SIGNAL = 1.8; EXPRESSED IN FETAL LIVER, SIGNAL =   2; EXPRESSED IN LUNG, SIGNAL = 0.67; EXPRESSED IN HELA, SIGNAL =   1; EXPRESSED IN BRAIN, SIGNAL =   1; EXPRESSED IN HEART, SIGNAL = 0.84; SWISSPROT HIT: P78329, EVALUE 3.00e-23; NT HIT: U02388.2, EVALUE 1.00e-51; EST_HUMAN HIT: AV655184.1, EVALUE 2.00e-51
gcgctcaggggctccacccgtagccaaagtccatcctccgcgcgcacgatcagctccaacttcctgcggggctccgcgtggtccggcaggacgcggaagcgcagcagagtgagcgccaggaccaccttcatctcagccatggcgaacgtctggccgatgcagttcccgggggagggggtggggactctga

SEQ ID NO: 16268 - DNA, 201 bp, Homo sapiens
  MAP TO CHR17.1; EXPRESSED IN HEART, SIGNAL = 5.2; EXPRESSED IN ADULT LIVER, SIGNAL = 3.6; EXPRESSED IN BONE MARROW, SIGNAL = 2.5; EXPRESSED IN FETAL LIVER, SIGNAL = 3.4; EXPRESSED IN LUNG, SIGNAL = 5.6; EXPRESSED IN HELA, SIGNAL = 2.4; EXPRESSED IN BRAIN, SIGNAL = 2.5; EST_HUMAN HIT: AA434222.1, EVALUE 3.00e-96; SWISSPROT HIT: P51250, EVALUE 4.20e+00; NT HIT: gi14770971, EVALUE 2.00e-96
gcctgtttccttccctgtcagaggagtgatggctgtaggagctcgtcactcttttgacaaaaagggggtgattgtggttgaagtggaggacagagagaagaaggctgtgaacctagagcgtgccctggagatggcaatcgaagcaggagctgaggatgtcaaggaaactgaagatgaagaagaaaggaacgtttttaaagt

SEQ ID NO: 16269 - DNA, 207 bp, Homo sapiens
  MAP TO CHR17.1; EXPRESSED IN BONE MARROW, SIGNAL = 0.72; EXPRESSED IN HEART, SIGNAL = 0.92; EXPRESSED IN FETAL LIVER, SIGNAL = 0.65; EXPRESSED IN BRAIN, SIGNAL = 0.71; EXPRESSED IN LUNG, SIGNAL = 0.68; NT HIT: gi14774564, EVALUE 4.00e-98; EST_HUMAN HIT: BE164569.1, EVALUE 6.00e-98; SWISSPROT HIT: O35787, EVALUE 7.00e-30
tgcttctcccactcaggtgagctatatggagatctactgtgagcgggtacgagacctcttgaaccccaagagtcggggttctctgcgggtccgggagcaccccatcctgggcccgtacgtgcaggacctgtccaaattggctgtgacctcctacgcagacattgctgacctcatggactgtggaaataaagcacggtgaggcaggct

SEQ ID NO: 16270 - DNA, 136 bp, Homo sapiens
  MAP TO CHR19.1; EXPRESSED IN FETAL LIVER, SIGNAL = 4.7; EXPRESSED IN HELA, SIGNAL = 4.3; EXPRESSED IN BRAIN, SIGNAL =   6; EXPRESSED IN HEART, SIGNAL = 5.2; EXPRESSED IN ADULT LIVER, SIGNAL =   6; EXPRESSED IN BONE MARROW, SIGNAL = 4.9; EXPRESSED IN LUNG, SIGNAL = 3.6; EXPRESSED IN PLACENTA, SIGNAL =   5; NT HIT: gi15303543, EVALUE 1.00e-69; EST_HUMAN HIT: BI755020.1, EVALUE 1.10e-02; SWISSPROT HIT: Q14324, EVALUE 1.00e-20
tggccaaggtgaacgggaaggagctcccagacaaaccgaccatcaagtggttcaaggggaagtggctggagctgggcagcaagagtggcgcccgcttctccttcaaggagtcccacaactccgccagcaatgtgag

SEQ ID NO: 16271 - DNA, 178 bp, Homo sapiens
  MAP TO CHR3.1; EXPRESSED IN PLACENTA, SIGNAL = 4.8; EXPRESSED IN FETAL LIVER, SIGNAL = 7.7; EXPRESSED IN HELA, SIGNAL = 4.9; EXPRESSED IN BRAIN, SIGNAL = 5.6; EXPRESSED IN ADULT LIVER, SIGNAL =  16; EXPRESSED IN BONE MARROW, SIGNAL = 5.6; EXPRESSED IN HEART, SIGNAL = 5.5; SWISSPROT HIT: P01125, EVALUE 2.00e-02; EST_HUMAN HIT: BI818374.1, EVALUE 9.20e-01
ggtgaaaggctctctgtcctgggcgccatattcccagccccacccagccaggcccacaattccctctggtccccagggagccacagggtgaccacagcctcccagatgtggcccatctggaatctgctgcccacccggccggctgaaaccggccctgtggccaaagcctgggctctgt

SEQ ID NO: 16272 - DNA, 248 bp, Homo sapiens
  MAP TO CHR17.1; EXPRESSED IN ADULT LIVER, SIGNAL = 0.91; EXPRESSED IN LUNG, SIGNAL = 0.87; EXPRESSED IN FETAL LIVER, SIGNAL = 0.76; EXPRESSED IN BRAIN, SIGNAL = 0.78; EXPRESSED IN HEART, SIGNAL = 0.81; NT HIT: L01965.1, EVALUE 0.00e+00; SWISSPROT HIT: P35499, EVALUE 7.00e-47; EST_HUMAN HIT: BG761119.1, EVALUE 3.00e-17
cagggctgaagacgatcgtgggggccctgatccagtcggtgaaaaagctgtcggatgtgatgatcctcactgtcttctgcctgagcgtctttgcgctggtaggactgcagctcttcatgggaaacctgaggcagaagtgtgtgcgctggcccccgccgttcaacgacaccaacaccacgtggtacagcaatgacacgtggtacggcaatgacacatggtatggcaatgagatgtggtacggcaatgac

SEQ ID NO: 16273 - DNA, 286 bp, Homo sapiens
  MAP TO CHR22.1; EXPRESSED IN HELA, SIGNAL = 7.4; EXPRESSED IN PLACENTA, SIGNAL = 7.8; EXPRESSED IN FETAL LIVER, SIGNAL =   6; EXPRESSED IN HEART, SIGNAL = 6.7; EXPRESSED IN BRAIN, SIGNAL = 7.6; EXPRESSED IN ADULT LIVER, SIGNAL =   8; EXPRESSED IN BONE MARROW, SIGNAL = 7.7; EXPRESSED IN LUNG, SIGNAL = 5.6; NT HIT: AB016207.1, EVALUE 0.00e+00; EST_HUMAN HIT: BF916820.1, EVALUE 0.00e+00; SWISSPROT HIT: O13843, EVALUE 9.40e+00
tgctgtgataaacctttccatgttcataaaggtgcaccctcaacctctcccaagggagagccaaatgaggcccagggtttcctaacaagtcacagtataataaaagcaggagacaaccacattaaattcctacaacacacatcagaggacgcatccagccaatcttcagcataaagccatacatctcagggcacgaatagatttaacaatcgctgtgaaaggagaatttacaacaaataccaaggctcaacggactgggggtgcaactttatagacatatcagtta

SEQ ID NO: 16274 - DNA, 183 bp, Homo sapiens
  MAP TO CHR2.1; EXPRESSED IN ADULT LIVER, SIGNAL = 0.41; EXPRESSED IN FETAL LIVER, SIGNAL = 0.52; EXPRESSED IN LUNG, SIGNAL = 0.69; EXPRESSED IN HELA, SIGNAL = 0.71; EXPRESSED IN BRAIN, SIGNAL = 0.67; EXPRESSED IN BONE MARROW, SIGNAL = 0.68; EXPRESSED IN HEART, SIGNAL = 0.85; SWISSPROT HIT: P14352, EVALUE 5.60e+00; EST_HUMAN HIT: AW855364.1, EVALUE 2.40e-01
gtcatggctgaccttggcatctgtcctgctgccttaatgaatcaggcctcgctaaggagaaagccccaagtggccaacaggaatgactcaaaatgacttaattgatttaattaactgaaaagagaggaaaagaaaccaaacccttctgagggcagtttgagtacctgcttgggcaatgagtgc

SEQ ID NO: 16275 - DNA, 226 bp, Homo sapiens
  MAP TO CHR1.1; EXPRESSED IN FETAL LIVER, SIGNAL = 0.36; EXPRESSED IN LUNG, SIGNAL = 1.2; EXPRESSED IN BRAIN, SIGNAL = 0.4; EXPRESSED IN BONE MARROW, SIGNAL = 0.37; NT HIT: U17758.1, EVALUE 1.00e-124; EST_HUMAN HIT: BI546563.1, EVALUE 1.00e-117; SWISSPROT HIT: Q13751, EVALUE 1.00e-25
tgtcttccagaccccgacactgatgcagccactatccaggaggtcagcgaggccgtgctggccctgtggctgcccacagactcagctactgttctgcagaagatgaatgagatccaggccattgcagccaggctccccaacgtggacttggtgctgtcccagaccaagcaggacattgcgcgtgcccgccggttgcaggctgaggctgaggaagccaggtatggcc

SEQ ID NO: 16276 - DNA, 147 bp, Homo sapiens
  MAP TO CHR19.1; EXPRESSED IN FETAL LIVER, SIGNAL = 1.9; EXPRESSED IN LUNG, SIGNAL = 2.9; EXPRESSED IN HELA, SIGNAL = 1.2; EXPRESSED IN BRAIN, SIGNAL = 1.3; EXPRESSED IN HEART, SIGNAL = 2.8; EXPRESSED IN BONE MARROW, SIGNAL = 1.2; NT HIT: gi14763698, EVALUE 2.00e-71; EST_HUMAN HIT: BF433285.1, EVALUE 3.00e-71; SWISSPROT HIT: O67065, EVALUE 3.40e+00
tgcttattccagagccccaacccccgcctgaccttctgcgtcaaaacctacgaacgccttttctacatggtggctccgagccccgaagccatgcgcatttggatggacgtcatcgtgaccgccgctgacgaaaaccacgccccctga

SEQ ID NO: 16277 - DNA, 310 bp, Homo sapiens
  MAP TO CHR5.1; EXPRESSED IN PLACENTA, SIGNAL = 1.7; EXPRESSED IN FETAL LIVER, SIGNAL = 0.87; EXPRESSED IN LUNG, SIGNAL = 1.1; EXPRESSED IN HELA, SIGNAL = 1.2; EXPRESSED IN BRAIN, SIGNAL = 0.92; EXPRESSED IN HEART, SIGNAL = 1.1; EXPRESSED IN BONE MARROW, SIGNAL = 0.99; NT HIT: gi16171606, EVALUE 0.00e+00; SWISSPROT HIT: Q36836, EVALUE 6.30e+00
ccatgtgtttcctctccaggttcttcatgaagaaatcgagctccctggttccaatgtgaaacttcgctatctgagctctagaactgcagggtacaagtcactgctgaagatcaccatgacccagtccacagtgcccctgaacctcattagggttcacctgatggtggctgtcgaggggcatctcttccagaagtcattccaggcttctcccaacctggcctacaccttcatctgggacaagacagatgcgtatggccaaagggtgtatggactctcagatgctgttggtatgttttggtttcaaccactt

SEQ ID NO: 16278 - DNA, 159 bp, Homo sapiens
  MAP TO CHR13.1; EXPRESSED IN ADULT LIVER, SIGNAL = 0.83; EXPRESSED IN BONE MARROW, SIGNAL = 0.81; EXPRESSED IN FETAL LIVER, SIGNAL = 0.7; EXPRESSED IN HELA, SIGNAL = 0.68; EXPRESSED IN BRAIN, SIGNAL = 0.84; EXPRESSED IN HEART, SIGNAL = 0.48; NT HIT: gi7662435, EVALUE 2.00e-84; EST_HUMAN HIT: BE747376.1, EVALUE 2.00e-84; SWISSPROT HIT: P11071, EVALUE 7.60e+00
atattctaatgctgaattcttcgaagttaattctttaaattccttcataaacatctccttgactttttccatttcatcaactagtttctccttttcttcttctttccacctgtcaaataacttcaaaaagtcttcctcttttgttttctgcatttcata

SEQ ID NO: 16279 - DNA, 206 bp, Homo sapiens
  MAP TO CHR2.1; EXPRESSED IN LUNG, SIGNAL = 0.96; EXPRESSED IN BRAIN, SIGNAL = 0.76; EXPRESSED IN HEART, SIGNAL = 0.66; EXPRESSED IN ADULT LIVER, SIGNAL = 0.96; EXPRESSED IN BONE MARROW, SIGNAL = 0.99; NT HIT: gi13787205, EVALUE 1.00e-109; EST_HUMAN HIT: AV717873.1, EVALUE 1.00e-109; SWISSPROT HIT: Q9NVP1, EVALUE 3.00e-33
ttttaggaacaggagtccttattctctcacctactagagaactagccatgcaaacctttggtgttcttaaggagctgatgactcaccacgtgcatacctatggcttgataatgggtggcagtaacagatctgctgaagcacagaaacttggtaatgggatcaacatcattgtggccacaccaggccgtctgctggaccatatgcag

SEQ ID NO: 16280 - DNA, 203 bp, Homo sapiens
  MAP TO CHR17.1; EXPRESSED IN HEART, SIGNAL = 1.1; EXPRESSED IN BONE MARROW, SIGNAL = 0.54; EXPRESSED IN FETAL LIVER, SIGNAL = 0.74; EXPRESSED IN LUNG, SIGNAL = 1.1; EXPRESSED IN BRAIN, SIGNAL = 0.55; NT HIT: AF046856.1, EVALUE 1.80e-01; EST_HUMAN HIT: BF379687.1, EVALUE 2.00e-39; SWISSPROT HIT: P36212, EVALUE 2.80e-01
ttttattttcaagcctgctctagactttcaggagccaaaagttcaaatcacagcaggattgattcagccctttcacaagcaatttagtactatgcagtttgtttaggatggtcaagtttccaggccctggcagagcagcatcattatctctctaagccttcgtgtatcaacttccctggccatatttcactttctatgtcttt

SEQ ID NO: 16281 - DNA, 235 bp, Homo sapiens
  MAP TO CHR7.1; EXPRESSED IN FETAL LIVER, SIGNAL = 0.94; EXPRESSED IN BRAIN, SIGNAL =   1; EXPRESSED IN HEART, SIGNAL = 0.44; EXPRESSED IN ADULT LIVER, SIGNAL = 0.64; EXPRESSED IN BONE MARROW, SIGNAL = 0.99; EST_HUMAN HIT: BE718742.1, EVALUE 1.00e-126; SWISSPROT HIT: P08243, EVALUE 1.00e-39; NT HIT: gi16177049, EVALUE 1.00e-126
ttttgaatttgaataccagaccaaagtggatggtgagataatccttcatctttatgacaaaggaggaattgagcaaacaatttgtatgttggatggtgtgtttgcatttgttttactggatactgccaataagaaagtgttcctgggtagagatacatatggagtcagacctttgtttaaagcaatgacagaagatggatttttggctgtatgttcagaagctaaaggtaataat

SEQ ID NO: 16282 - DNA, 249 bp, Homo sapiens
  MAP TO CHR8.1; EXPRESSED IN PLACENTA, SIGNAL = 1.4; EXPRESSED IN HELA, SIGNAL = 1.3; EXPRESSED IN FETAL LIVER, SIGNAL = 1.3; EXPRESSED IN BRAIN, SIGNAL = 1.1; EXPRESSED IN HEART, SIGNAL = 1.1; EXPRESSED IN ADULT LIVER, SIGNAL = 1.4; NT HIT: gi14110380, EVALUE 0.00e+00; EST_HUMAN HIT: BE000790.1, EVALUE 0.00e+00; SWISSPROT HIT: Q14596, EVALUE 2.00e-28
caatgacagaataaagatcatctctgagcagcaggcagttatttaatacaaggtcactcctcaatagcgttggctgtaccagtcgttgttgtttaactgaagaagttctgtcacaacctgcaggatattgtaattgtgtttcttcagcagccgtaggttcagctgcctgtcacagaatcccatttcaaagagatgggccatcagggctgctgtctgatcttcagaaattattggctgtgtagagacaag

SEQ ID NO: 16283 - DNA, 110 bp, Homo sapiens
  MAP TO CHR10.1; EXPRESSED IN FETAL LIVER, SIGNAL = 3.1; EXPRESSED IN HELA, SIGNAL = 3.1; EXPRESSED IN LUNG, SIGNAL = 2.4; EXPRESSED IN PLACENTA, SIGNAL = 3.1; EXPRESSED IN HEART, SIGNAL = 4.1; EXPRESSED IN BRAIN, SIGNAL = 3.4; EXPRESSED IN BONE MARROW, SIGNAL =   3; EXPRESSED IN ADULT LIVER, SIGNAL = 4.4; NT HIT: AF254822.1, EVALUE 2.00e-55; EST_HUMAN HIT: AW007209.1, EVALUE 1.00e-51; SWISSPROT HIT: P51532, EVALUE 3.00e-14
caggagcgcattcgcaaccacaagtaccgcagcctcaacgacctagagaaggacgtcatgctcctgtgccagaacgcacagaccttcaacctggagggctccctggtgag

SEQ ID NO: 16284 - DNA, 181 bp, Homo sapiens
  MAP TO CHR4.1; EXPRESSED IN FETAL LIVER, SIGNAL = 0.92; EXPRESSED IN LUNG, SIGNAL = 0.98; EXPRESSED IN BRAIN, SIGNAL = 1.2; EXPRESSED IN BONE MARROW, SIGNAL = 1.1; EXPRESSED IN HEART, SIGNAL = 1.1; EXPRESSED IN ADULT LIVER, SIGNAL = 0.85; NT HIT: X55272.1, EVALUE 3.00e-15; EST_HUMAN HIT: AA459285.1, EVALUE 2.40e-01; SWISSPROT HIT: P21529, EVALUE 2.50e+00
gtggaaaggcagtgcacctcccaaacaggtaggatgcgactcccagcagaattgagccagggagccaatcaggccgagaggatggtggcataaattatcttaaaaagagttgagccaatcagtagcccaaggaggcggggttctcctactagaaattgagcccagtagggaaaagggctcc

SEQ ID NO: 16285 - DNA, 135 bp, Homo sapiens
  MAP TO CHR7.1; EXPRESSED IN BONE MARROW, SIGNAL = 1.4; EXPRESSED IN HEART, SIGNAL = 1.3; EXPRESSED IN FETAL LIVER, SIGNAL = 1.2; EXPRESSED IN LUNG, SIGNAL = 1.1; EXPRESSED IN HELA, SIGNAL = 1.1; EXPRESSED IN BRAIN, SIGNAL = 1.4; NT HIT: gi14754098, EVALUE 2.90e-02; EST_HUMAN HIT: AA922190.1, EVALUE 4.00e-70
atgcttagtcttgtcaaaaacattgtatgtaagaagaagaaacttgagaaaggtggtcagtagagagcctcttcgactaatagacagtttgagcatctgacagctgcattagaagcagaaattggtaaacaactt

SEQ ID NO: 16286 - DNA, 266 bp, Homo sapiens
  MAP TO CHR2.1; EXPRESSED IN ADULT LIVER, SIGNAL = 1.7; EXPRESSED IN HELA, SIGNAL = 2.7; EXPRESSED IN BRAIN, SIGNAL =   2; EXPRESSED IN BONE MARROW, SIGNAL = 2.6; NT HIT: AJ277892.1, EVALUE 0.00e+00; SWISSPROT HIT: O06595, EVALUE 8.20e+00; EST_HUMAN HIT: AW511116.1, EVALUE 4.00e-41
tctttcaagtgcctgaggctcccaaagaagttgttcctgaaaagaaagtgccagtgcctcctcctaaaaagcctgaagtgccacccacaaaaggtagacaccctcttgttgctgtgtttgatattgtttgtttgtctttactttgtctaataatgaaaatactaatatctttaaagtcccagaggtgccaaaggcagctgtcccagaaaagaaggtgcctgaagctattcctcccaaaccggaaagtcctccccctgaaggtaatg

SEQ ID NO: 16287 - DNA, 341 bp, Homo sapiens
  MAP TO CHR19.1; EXPRESSED IN FETAL LIVER, SIGNAL = 0.63; EXPRESSED IN LUNG, SIGNAL = 0.92; EXPRESSED IN HELA, SIGNAL = 1.4; EXPRESSED IN BRAIN, SIGNAL = 0.91; EXPRESSED IN HEART, SIGNAL = 0.65; EXPRESSED IN ADULT LIVER, SIGNAL = 1.1; EXPRESSED IN BONE MARROW, SIGNAL = 0.95; EXPRESSED IN PLACENTA, SIGNAL = 1.2; NT HIT: gi14761174, EVALUE 0.00e+00; EST_HUMAN HIT: BG763451.1, EVALUE 0.00e+00; SWISSPROT HIT: Q28120, EVALUE 4.00e-20
tcaagtgcttgggccagctccagcagcagggcacagggcacagccgaatccgtggcccctacaaagggggtcgatccgggtgggaagagcttcgagtcataatggcaggcaagggtgaggtgacgggcagcccttgggtccagtgtggccaccacattgccaaagtccactggccccaggggtgttgaggctgtgaagggatccagctccacgtgccaacctgctgtcagggaccgcagcgtggcctccaggaactagcggcaagagagaggtgggagggtggacggggactggggaggaggtggggagaagggccacgtgacctgagccatgcagagcag

SEQ ID NO: 16288 - DNA, 287 bp, Homo sapiens
  MAP TO CHR7.1; EXPRESSED IN FETAL LIVER, SIGNAL = 0.9; EXPRESSED IN HELA, SIGNAL = 0.95; EXPRESSED IN BRAIN, SIGNAL = 0.89; EXPRESSED IN HEART, SIGNAL = 0.65; EST_HUMAN HIT: BF679279.1, EVALUE 1.00e-103; SWISSPROT HIT: Q53598, EVALUE 7.30e+00
tctctgaagggtacttacttgtttcaacttcatttcctgctttctttctccccaaggtgattgaatcgcactttgataaatacattgttattaaagtttactagaggcaattgcaattgtagatgtttcaaattaatgtctttcattatactgagtcaaaaagttaatgaattgaaaaattattctttttgtaggtattcagcagcattactcagtcaacatgtcctgacggtgtgtggagtgaccttctagattttgtggggagtgatgatggcaatatttcctgg

SEQ ID NO: 16289 - DNA, 191 bp, Homo sapiens
  MAP TO CHR19.1; EXPRESSED IN ADULT LIVER, SIGNAL = 2.1; EXPRESSED IN BONE MARROW, SIGNAL = 2.5; EXPRESSED IN PLACENTA, SIGNAL = 2.4; EXPRESSED IN LUNG, SIGNAL = 1.4; EXPRESSED IN HELA, SIGNAL = 1.8; EXPRESSED IN BRAIN, SIGNAL = 2.1; EXPRESSED IN HEART, SIGNAL = 1.9; EST_HUMAN HIT: AV726545.1, EVALUE 1.00e-03; SWISSPROT HIT: Q07017, EVALUE 3.30e+00; NT HIT: gi15294973, EVALUE 7.00e-04
ggtcacaagcagcagggagagagggtcttgtctccagcccagcacttgagcagcacatgaccttgactctaggcatctgctgctctctgccaacccctcttgccgagggaagatggcacaggacattcccgtgactgttgtctgacagtcagagaaaagatgtgaggctttaaacaagaattgcagctggg

SEQ ID NO: 16290 - DNA, 331 bp, Homo sapiens
  MAP TO AL139374.13; EXPRESSED IN HELA, SIGNAL = 3.7; EXPRESSED IN BRAIN, SIGNAL =   4; EXPRESSED IN HEART, SIGNAL = 2.1; EXPRESSED IN ADULT LIVER, SIGNAL = 5.7; EXPRESSED IN BONE MARROW, SIGNAL =   4; EXPRESSED IN PLACENTA, SIGNAL = 3.6; EXPRESSED IN FETAL LIVER, SIGNAL = 3.1; EST_HUMAN HIT: AI908802.1, EVALUE 1.00e-121; SWISSPROT HIT: O00507, EVALUE 2.40e+00; NT HIT: AB022688.1, EVALUE 1.20e+00
attatctatcagtccccttgccctgccattttctctcaagcattgcctggctgagaatagttgcccaacagttgtgaatttccttccttccgtttcctccttctccgatctggccaagtttcttggctgcaggcatttacagactatcaaaattctcaaaacagttcaaaccagttctgtgtatgagcagaatatagaatctgtcataatgttggccccctgaaattatgtttttatacactatgcttttcaaattggggccaatcaactcgtcattcactgaaatattttcagcagagattacactgacacatggggatgcatatgtcac

SEQ ID NO: 16291 - DNA, 143 bp, Homo sapiens
  MAP TO CHR2.1; EXPRESSED IN HELA, SIGNAL = 3.4; EXPRESSED IN FETAL LIVER, SIGNAL = 1.9; EXPRESSED IN LUNG, SIGNAL = 2.7; EXPRESSED IN BRAIN, SIGNAL = 1.9; EXPRESSED IN HEART, SIGNAL = 2.6; EXPRESSED IN BONE MARROW, SIGNAL = 1.6; EXPRESSED IN PLACENTA, SIGNAL = 2.3; NT HIT: AF009468.1, EVALUE 5.00e-75; EST_HUMAN HIT: BG566691.1, EVALUE 1.00e-70; SWISSPROT HIT: Q06278, EVALUE 6.00e-19
ttaaaattcaggtggtcagccgtgaattaagaatgccaatgtcgaatgtccacctgcgtggaacaagcacagaaactgtccctaatgcaaatatctctggaggttctgtggtggcagatctcaacggtttggcagtaaaggta

SEQ ID NO: 16292 - DNA, 168 bp, Homo sapiens
  MAP TO CHR1.1; EXPRESSED IN ADULT LIVER, SIGNAL = 0.39; EXPRESSED IN BRAIN, SIGNAL = 0.51; EXPRESSED IN HEART, SIGNAL = 0.46; NT HIT: AY044083.1, EVALUE 7.00e-90; SWISSPROT HIT: Q01576, EVALUE 4.40e+00
aaagcaaagaagctctataagccccacactcaagttcaatgaaaaagtattacaacatcaaaggagaaattgcaagccagccagaacccagatggcgggaaatccaagactggttcaagactctaaggcaagtgcaatggatcatacacttattattttaacagagaa

SEQ ID NO: 16293 - DNA, 298 bp, Homo sapiens
  MAP TO CHR5.1; EXPRESSED IN FETAL LIVER, SIGNAL = 0.67; EXPRESSED IN BRAIN, SIGNAL = 0.56; EXPRESSED IN BONE MARROW, SIGNAL = 0.55; EST_HUMAN HIT: BG202663.1, EVALUE 4.00e-01
cagtccatagcctggccccacagaggggagaagaaaggatctcttttaattttcttctcaggcctccacctgacgaaggagaaatatcacccaacattgttatctctcagaaaatactctctggaatcataaaaagggaaatacagtgaagctagaccacgaaggctgccccttaaatcaggagcttctaaattatcacagtggcgctctctaattcctcggaatgaaaacattaaagatgacaatgtccctttaaatcaaatgccctgggagttgctgtaaagagtcagtgggcttt

SEQ ID NO: 16294 - DNA, 221 bp, Homo sapiens
  MAP TO CHR11.1; EXPRESSED IN FETAL LIVER, SIGNAL = 0.51; EXPRESSED IN BRAIN, SIGNAL = 0.57; EXPRESSED IN BONE MARROW, SIGNAL = 0.47; NT HIT: gi14767293, EVALUE 3.00e-93; EST_HUMAN HIT: BE935686.1, EVALUE 4.00e-93; SWISSPROT HIT: Q9M291, EVALUE 5.40e+00
tgctctgcaaaggagctgatgaccacagaagcggtgtgtggaccctgtagtgagaaccagcagttcctgaaggaggtggtgcacagcgtgctggacggccagggagttggctggctcaacatgaaaaaggtgcgccggctgctggagagcgagcagctgcgagtctttgtcctgagcaagctgaaccgcatggtgcagtcagaggacgatgcccggcagga

SEQ ID NO: 16295 - DNA, 190 bp, Homo sapiens
  MAP TO CHR11.1; EXPRESSED IN BONE MARROW, SIGNAL = 0.54; EXPRESSED IN ADULT LIVER, SIGNAL = 0.87; EXPRESSED IN PLACENTA, SIGNAL = 1.2; EXPRESSED IN BRAIN, SIGNAL = 1.1; EXPRESSED IN LUNG, SIGNAL =   1; NT HIT: gi4502130, EVALUE 1.00e-103; EST_HUMAN HIT: BG338391.1, EVALUE 1.00e-103; SWISSPROT HIT: O00213, EVALUE 7.00e-13
cgccggagctggttctggccctcttttagccacttggcattggcagggcctggctcaggcccaccaccctcccccatggcgctgcgcaggtccttgggtcccacagctgtggcctgcagcttggcgttgagcagctggttgtgggcagcgtgcagaggcaggggtaggctcagtgcggggcctccgtggc

SEQ ID NO: 16296 - DNA, 246 bp, Homo sapiens
  MAP TO CHR17.1; EXPRESSED IN LUNG, SIGNAL = 7.7; EXPRESSED IN FETAL LIVER, SIGNAL = 2.7; EXPRESSED IN BRAIN, SIGNAL = 3.5; EXPRESSED IN HEART, SIGNAL = 4.9; EXPRESSED IN ADULT LIVER, SIGNAL = 2.7; EXPRESSED IN BONE MARROW, SIGNAL = 3.7; NT HIT: U75287.1, EVALUE 0.00e+00; SWISSPROT HIT: P51648, EVALUE 6.00e-40; EST_HUMAN HIT: BI759428.1, EVALUE 1.00e-129
cagagtgaattcaatgtgtacagtcaggaagtcattactgtccttggggaaattgattttatgcttgagaatcttcctgaatgggttactgctaaaccagttaagaagaacgtgctcaccatgctggatgaggcctatattcagccacagcctctgggagtggtgctgataatcggagcttggaattaccccttcgttctcaccattcagccactgataggagccatcgctgcaggtctggtgcca

SEQ ID NO: 16297 - DNA, 203 bp, Homo sapiens
  MAP TO CHR15.1; EXPRESSED IN ADULT LIVER, SIGNAL = 1.9; EXPRESSED IN BRAIN, SIGNAL = 2.1; EXPRESSED IN HEART, SIGNAL = 2.6; SWISSPROT HIT: P14866, EVALUE 2.00e-34; NT HIT: gi14755899, EVALUE 1.00e-110; EST_HUMAN HIT: AA293778.1, EVALUE 1.00e-110
gtgtctccaagcagccagccatcatgcccggtcagtcatacgggttggaagatgggtcttgcagttacaaagacttcagtgaatcccggaacaatcggttctccaccccagagcaggcagccaagaaccgcatccagcaccccagcaacgtgctgcacttcttcaacgccccgctggaggcgaccgaggagaacttctttgag

SEQ ID NO: 16298 - DNA, 176 bp, Homo sapiens
  MAP TO CHR17.1; EXPRESSED IN BRAIN, SIGNAL = 0.59; EXPRESSED IN BONE MARROW, SIGNAL = 0.61; EXPRESSED IN HEART, SIGNAL = 0.55; EXPRESSED IN FETAL LIVER, SIGNAL = 0.46; EST_HUMAN HIT: BG820134.1, EVALUE 1.00e-46; SWISSPROT HIT: Q00055, EVALUE 3.30e+00; NT HIT: AF100956.1, EVALUE 2.40e+00
cctttgctcccagatcttggagagggaaagtgaaaatggccacgcaggaagctagccagctgtgaacttgaccagatgtcagaagtgaaactgaccacaggcaagtcagaggctcgccaggagggccaggtcacaaccccacagctcccagccacccacgtggcctgggagacaca

SEQ ID NO: 16299 - DNA, 442 bp, Homo sapiens
  MAP TO CHR19.1; EXPRESSED IN PLACENTA, SIGNAL = 1.5; EXPRESSED IN LUNG, SIGNAL = 0.93; EXPRESSED IN BRAIN, SIGNAL = 1.6; EXPRESSED IN HEART, SIGNAL = 1.4; EXPRESSED IN BONE MARROW, SIGNAL = 1.6; EST_HUMAN HIT: BF672054.1, EVALUE 1.00e-108; SWISSPROT HIT: P16374, EVALUE 1.00e-60; NT HIT: gi14766687, EVALUE 2.00e-21
tatgaatgtaaggaatgtgggaaatactttagtcgtagtgcaaatcttattcagcatcagagtattcatactggagagaaaccctttgaatgtaaggagtgtgggaaagcctttcgacttcacatacaatttactcgacatcagaaatttcatactggtgagaaaccttttgaatgtaacgaatgtggaaaggcctttagtcttcttaccctgcttaatcgccataagaacattcacacaggtgagaaactgtttgaatgtaaggaatgtgggaagtcctttaatcgtagctcaaaccttgttcaacatcagagtattcattctggtgtaaaaccatatgaatgtaaggagtgtgggaaaggctttaatcgtggtgcacaccttattcagcatcagaaaattcattccaatgagaaaccctttgtatgtaaggaatgtggga

SEQ ID NO: 16300 - DNA, 147 bp, Homo sapiens
  MAP TO CHR17.1; EXPRESSED IN FETAL LIVER, SIGNAL = 1.2; EXPRESSED IN HELA, SIGNAL =   2; EXPRESSED IN BRAIN, SIGNAL = 1.1; EXPRESSED IN HEART, SIGNAL =   1; EXPRESSED IN BONE MARROW, SIGNAL = 1.3; EXPRESSED IN ADULT LIVER, SIGNAL = 1.3; NT HIT: gi14774602, EVALUE 3.00e-76; EST_HUMAN HIT: AA668878.1, EVALUE 3.00e-77
gccgccgcagttgctgacgagaaacgtggtctttggcctcggcggagagcttttcctgtgggacggagaagacagctccttcttagtcgttcgccttcggggccccagcggcggcggcgaagagcccgccctgtcccagtaccaggt

SEQ ID NO: 16301 - DNA, 232 bp, Homo sapiens
  MAP TO CHR1.1; EXPRESSED IN HELA, SIGNAL = 4.9; EXPRESSED IN BRAIN, SIGNAL = 3.1; EXPRESSED IN HEART, SIGNAL = 3.6; EXPRESSED IN ADULT LIVER, SIGNAL = 1.4; EXPRESSED IN BONE MARROW, SIGNAL = 2.7; EXPRESSED IN FETAL LIVER, SIGNAL = 3.8; EXPRESSED IN LUNG, SIGNAL = 4.2; NT HIT: gi16161879, EVALUE 1.00e-122; SWISSPROT HIT: P23249, EVALUE 1.00e-34; EST_HUMAN HIT: BG250549.1, EVALUE 1.00e-122
ctgcttcccagggctgatggaagtaaaggaaacaggtgatccaggagggcagctggtgctggcaggagaccctcggcagctggggcctgtgctgcgttccccactgacccagaagcatggactgggatactcactgctggagcggctgctcacctacaactccctgtacaagaagggccctgatggctatgacccccagttcataaccaagctgctccgcaactacaggtat

SEQ ID NO: 16302 - DNA, 300 bp, Homo sapiens
  MAP TO CHR19.1; EXPRESSED IN PLACENTA, SIGNAL = 2.6; EXPRESSED IN HELA, SIGNAL =   2; EXPRESSED IN LUNG, SIGNAL = 2.2; EXPRESSED IN BRAIN, SIGNAL = 2.8; EXPRESSED IN ADULT LIVER, SIGNAL =   3; EXPRESSED IN BONE MARROW, SIGNAL = 2.7; NT HIT: gi16163229, EVALUE 0.00e+00; SWISSPROT HIT: O88799, EVALUE 9.00e-16; EST_HUMAN HIT: AA327385.1, EVALUE 5.00e-19
tcctgcgaaggcatgcagtgcgcagccgggcagcgctgccaggtggtaggcgggaaggccgggtgtgtggcggagtccaccgctgtctgccgcgcccagggcgacccccattacaccaccttcgacggccgtcgctacgacatgatgggcacctgttcgtacacgatggtggagctgtgcagcgaggacgacaccctgcccgccttcagcgtggaggccaagaacgagcaccggggcagccgccgcgtctcctacgtgggcctcgtcactgtgcgcgcctacagccactctgtgtcgctg

SEQ ID NO: 16303 - DNA, 154 bp, Homo sapiens
  MAP TO CHRX.1; EXPRESSED IN ADULT LIVER, SIGNAL =   5; EXPRESSED IN BONE MARROW, SIGNAL = 4.9; EXPRESSED IN PLACENTA, SIGNAL = 4.7; EXPRESSED IN FETAL LIVER, SIGNAL = 4.6; EXPRESSED IN LUNG, SIGNAL =   2; EXPRESSED IN HELA, SIGNAL = 4.5; EXPRESSED IN BRAIN, SIGNAL = 4.6; EXPRESSED IN HEART, SIGNAL = 2.2; SWISSPROT HIT: Q10435, EVALUE 1.00e+01
aagaagcagcagatattcaatttacatcagtagttaccttgacagtagttacttttgagttctgtttttcctgattattaggcttcctctggcattttgttctttataattctttatcagcacctcctgcagtttcctgtgacagtttatctag

SEQ ID NO: 16304 - DNA, 121 bp, Homo sapiens
  MAP TO CHR14.1; EXPRESSED IN PLACENTA, SIGNAL = 3.6; EXPRESSED IN LUNG, SIGNAL =  18; EXPRESSED IN HELA, SIGNAL = 0.76; EXPRESSED IN BRAIN, SIGNAL = 0.78; EXPRESSED IN HEART, SIGNAL = 1.2; SWISSPROT HIT: P01764, EVALUE 3.00e-13; NT HIT: AF173907.1, EVALUE 8.00e-58; EST_HUMAN HIT: BG754024.1, EVALUE 3.00e-46
tcactgaaggtgaatccagaggctgcacaggagagtctcagggaccccccaggctggaccaagcctcccccggactccaccagctgcacctcacactggacacctgcaaacaaaaagaaac

SEQ ID NO: 16305 - DNA, 142 bp, Homo sapiens
  MAP TO CHR19.1; EXPRESSED IN BRAIN, SIGNAL = 1.1; EXPRESSED IN BONE MARROW, SIGNAL = 1.1; EXPRESSED IN HEART, SIGNAL = 0.77; EXPRESSED IN ADULT LIVER, SIGNAL = 0.99; EXPRESSED IN FETAL LIVER, SIGNAL = 0.95; EXPRESSED IN LUNG, SIGNAL =   1; SWISSPROT HIT: Q04725, EVALUE 4.00e-21; EST_HUMAN HIT: AI909780.1, EVALUE 4.00e-70; NT HIT: gi14764152, EVALUE 3.00e-70
atcaaggccgagctgacttcctcagccccagcctgctacgccctggccgtcagccccgacgccaaggtttgcttctcctgctgcagcgatggcaacattgtggtctgggacctgcagaatcagactatggtcaggtgggtgg

SEQ ID NO: 16306 - DNA, 291 bp, Homo sapiens
  MAP TO CHR19.1; EXPRESSED IN FETAL LIVER, SIGNAL = 0.67; EXPRESSED IN HELA, SIGNAL = 0.49; EXPRESSED IN BRAIN, SIGNAL = 0.73; EXPRESSED IN BONE MARROW, SIGNAL = 0.77; EXPRESSED IN HEART, SIGNAL = 0.59; EST_HUMAN HIT: AI909504.1, EVALUE 1.00e-04; SWISSPROT HIT: O14581, EVALUE 9.00e-22; NT HIT: AF179825.1, EVALUE 1.00e-116
attccagacagaggaacaccaccaaatatgcaagctgcaaaatatatcaggatgttattgatgagggtgtctgaacaggtgagttggatgacctgagccagttcacagaagaagagcgggatttccaggtctgtgcagaaggacagcctcaacaccatcaggctgagaagaagggcattcacaacactagtcaacagagagagaagaatcagcaggccacagaggcgggggttcatgatgactgtgtatctaagggggtgacaaatggccacatagcggtcataggccatt

SEQ ID NO: 16307 - DNA, 227 bp, Homo sapiens
  MAP TO CHR3.1; EXPRESSED IN HELA, SIGNAL = 1.7; EXPRESSED IN BRAIN, SIGNAL =   1; EXPRESSED IN BONE MARROW, SIGNAL = 1.1; EXPRESSED IN FETAL LIVER, SIGNAL = 1.6; EXPRESSED IN LUNG, SIGNAL = 1.3; EST_HUMAN HIT: BF671719.1, EVALUE 3.00e-97; SWISSPROT HIT: P08590, EVALUE 1.00e-29; NT HIT: M24245.1, EVALUE 1.00e-98
gggtaggggaggaggctgccctcacccagcgtggccagcacgtggcgaagctcagcacccatgacagtgccattgccctccttgtcgaagacccgcagcccctccacgaagtcctcataggtgcctgtgtccttgttcttggaaatgtgctggagcataggcaggaaagtttcaaagtccatcatcttggtattgagctctgcagagaaatggtcccaggttccagg

SEQ ID NO: 16308 - DNA, 220 bp, Homo sapiens
  MAP TO CHR19.1; EXPRESSED IN FETAL LIVER, SIGNAL = 1.6; EXPRESSED IN LUNG, SIGNAL = 1.4; EXPRESSED IN PLACENTA, SIGNAL = 2.9; EXPRESSED IN HELA, SIGNAL = 2.1; EXPRESSED IN BRAIN, SIGNAL = 1.3; EXPRESSED IN ADULT LIVER, SIGNAL =   3; EXPRESSED IN BONE MARROW, SIGNAL = 1.3; NT HIT: gi14764274, EVALUE 1.00e-113; EST_HUMAN HIT: AA985246.1, EVALUE 1.00e-113; SWISSPROT HIT: P18616, EVALUE 5.30e-02
gggccccacgtaccgtgacactgcggatgacacctgtctgtcccaccacctgtgtatccaggtaggtgtcccgcaccttcacctgaatgtcagtggttacccagtcgctggagttctgctcgatgcctgagcctggcgtgtgtgggttgtagccaccaggggagggagctccaggtgtcataggactgtagccaacggggctcgggctggggctagcctg

SEQ ID NO: 16309 - DNA, 378 bp, Homo sapiens
  MAP TO CHR7.1; EXPRESSED IN FETAL LIVER, SIGNAL = 1.2; EXPRESSED IN BRAIN, SIGNAL = 1.2; EXPRESSED IN LUNG, SIGNAL = 1.1; EXPRESSED IN HEART, SIGNAL = 0.75; EXPRESSED IN BONE MARROW, SIGNAL = 1.4; NT HIT: X57579.1, EVALUE 0.00e+00; EST_HUMAN HIT: AI925826.1, EVALUE 0.00e+00; SWISSPROT HIT: P08476, EVALUE 9.00e-66
ctggcgccactctcctggcactgctcacaggcaatccgaacgtccagggagctcttgccctggtccagcaaccgctggatgctgctggagacagggaagacatgccaggtgctcttccgagcgtctactactttttcagagagcaacagttcactcctctccccctttaagcccacttcctcggcctcttcccctgtgtccaagctgccctgcgggtgcttctgctgctggaagaggcggatggtgactttggtcctggtcctgttggccttggggacttttaggaagagccagacttctgcacgctccaccactgacaggtcactgccttccttggaaatctcgaagtgcagcgtcttcctggctgttcctgaagat

SEQ ID NO: 16310 - DNA, 165 bp, Homo sapiens
  MAP TO CHR5.1; EXPRESSED IN HEART, SIGNAL = 0.79; EXPRESSED IN BONE MARROW, SIGNAL = 1.6; EXPRESSED IN FETAL LIVER, SIGNAL = 1.6; EXPRESSED IN BRAIN, SIGNAL = 1.5; EXPRESSED IN LUNG, SIGNAL = 1.7; SWISSPROT HIT: P53746, EVALUE 5.10e-01; NT HIT: AF293026.1, EVALUE 1.00e-72; EST_HUMAN HIT: AA764990.1, EVALUE 2.00e-72
tgcttgctcaacccccgtctctcttcagagctttcaagccaccggtgggacgcagcagatgacatccaccgctccctcatggttgaccatgtgactgaggtcagtcagtggatggtaggagttaaaagattaattgcagaaaagaggagtctgttttcagaggag

SEQ ID NO: 16311 - DNA, 291 bp, Homo sapiens
  MAP TO CHR15.1; EXPRESSED IN HELA, SIGNAL = 0.58; EXPRESSED IN BRAIN, SIGNAL = 0.77; EXPRESSED IN ADULT LIVER, SIGNAL = 0.76; EST_HUMAN HIT: AI962273.1, EVALUE 3.00e-17; SWISSPROT HIT: Q15620, EVALUE 2.00e-37; NT HIT: AF282279.1, EVALUE 6.00e-30
ttttcttagggcaaatttaacatctttgttcctcaggctgtagattaaggggttcaacatgggaaccacatttgtataaaagacagaagataattttctcttatccatggacccagcagaagatgggttgagatacataaatgcacctgatccaaagaacagagaaacagcaattatatgggaactgcaagtgctgaaagctttggacctgccctccttggaactgatatggaggatgctggagaggatgaaaccataagagataaagatggtaacagtgggcacaatgat

SEQ ID NO: 16312 - DNA, 272 bp, Homo sapiens
  MAP TO CHR5.1; EXPRESSED IN FETAL LIVER, SIGNAL =  10; EXPRESSED IN HELA, SIGNAL = 5.8; EXPRESSED IN LUNG, SIGNAL = 7.1; EXPRESSED IN BRAIN, SIGNAL = 9.6; EXPRESSED IN HEART, SIGNAL = 9.5; EXPRESSED IN ADULT LIVER, SIGNAL =  11; EXPRESSED IN BONE MARROW, SIGNAL =  12; SWISSPROT HIT: Q60716, EVALUE 5.00e-30; EST_HUMAN HIT: AW886128.1, EVALUE 2.00e-95; NT HIT: gi12731110, EVALUE 1.00e-95
ggtgagtccagtgtctgcagacagccagactgggaccgaggattaggactcactcagctcagggcctgttactctgtgctttccagacaccccgtagacagaagaggcttttctgtaggtaccaccatggcaacagggccccacagctgctcattgcccccttcaaagaggaggacgagtgggacagcccgcacatcgtcaggtactacgatgtcatgtctgatgaggaaatcgagaggatcaaggagatcgcaaaacctaaagtaggtgtc

SEQ ID NO: 16313 - DNA, 387 bp, Homo sapiens
  MAP TO CHR19.1; EXPRESSED IN HEART, SIGNAL = 1.3; EXPRESSED IN ADULT LIVER, SIGNAL = 1.6; EXPRESSED IN PLACENTA, SIGNAL = 1.6; EXPRESSED IN FETAL LIVER, SIGNAL = 1.5; EXPRESSED IN LUNG, SIGNAL = 1.2; EXPRESSED IN HELA, SIGNAL = 2.7; EXPRESSED IN BRAIN, SIGNAL = 1.6; EST_HUMAN HIT: BI907306.1, EVALUE 0.00e+00; SWISSPROT HIT: O00268, EVALUE 2.40e-02; NT HIT: AF305731.1, EVALUE 0.00e+00
gccccactcaccgagcaccccccgaaccacagcatctctgcatgcagcaccatgagtccaatgccagttcctgccagcaccagtgcccagccggccagagacttctcctgctccagcaagcgctttcggcgtctcaaggcccccaggccaagcaccagatccccgcccatggcccccggggtcttggggctcagccagcttcctgcccagggtcccccacctcgcagcacgcacagggcagccactgtggcttgcaggtcgtcagcctgctctgctggctctgggacttttgctctgaggcacagcagagccctgtgccctctggggagtggtgacggccaggcagggcggggaggggcaggggaggccccagggtagggggaggct

SEQ ID NO: 16314 - DNA, 102 bp, Homo sapiens
  MAP TO CHR7.1; EXPRESSED IN FETAL LIVER, SIGNAL = 0.6; EXPRESSED IN LUNG, SIGNAL = 0.93; EXPRESSED IN BRAIN, SIGNAL = 0.49; EXPRESSED IN HEART, SIGNAL = 0.91; EXPRESSED IN BONE MARROW, SIGNAL = 0.55; NT HIT: gi14752543, EVALUE 1.00e-50; EST_HUMAN HIT: BG205092.1, EVALUE 1.00e-38; SWISSPROT HIT: P08581, EVALUE 1.00e-09
gttttctattttgctttgccagtggtgggagcacaataacaggtgttgggaaaaacctgaattcagttagtgtcccgagaatggtcataaatgtgcatgaag

SEQ ID NO: 16315 - DNA, 108 bp, Homo sapiens
  MAP TO CHR17.1; EXPRESSED IN FETAL LIVER, SIGNAL = 0.69; EXPRESSED IN LUNG, SIGNAL = 0.7; EXPRESSED IN BRAIN, SIGNAL = 0.61; EXPRESSED IN HEART, SIGNAL = 0.68; EXPRESSED IN BONE MARROW, SIGNAL = 0.88; NT HIT: AE004215.1, EVALUE 1.40e+00; EST_HUMAN HIT: BF182714.1, EVALUE 5.10e-01; SWISSPROT HIT: P28801, EVALUE 3.50e+00
tttcctcaagcactcaggagccaggtttccctggtcttggcttggcatagctgcctcttcttcactccaagaaagccccgcagaggccctccgtgggcaggcttggca

SEQ ID NO: 16316 - DNA, 186 bp, Homo sapiens
  MAP TO CHR7.1; EXPRESSED IN BRAIN, SIGNAL = 0.31; EXPRESSED IN BONE MARROW, SIGNAL = 0.39; NT HIT: gi13630377, EVALUE 5.00e-88; EST_HUMAN HIT: BF732311.1, EVALUE 5.00e-89; SWISSPROT HIT: Q9NRM2, EVALUE 3.00e-25
tgtatctgtggttgttttcaggtattattttccaacctatgaaaatgacactctcctgtgtacactatctgacagtgaaagtgacctgacagctcaggaacaaaatgaaaatgttcccatcatcagtgaagatacatctaaactgtatgctttgaaacaaagcagtattttgaaccagttgctact

SEQ ID NO: 16317 - DNA, 198 bp, Homo sapiens
  MAP TO CHR11.1; EXPRESSED IN LUNG, SIGNAL = 0.93; EXPRESSED IN HELA, SIGNAL = 1.1; EXPRESSED IN BRAIN, SIGNAL = 0.95; EXPRESSED IN HEART, SIGNAL = 0.91; EXPRESSED IN BONE MARROW, SIGNAL = 0.92; NT HIT: AF282275.1, EVALUE 1.00e-39; EST_HUMAN HIT: AI239808.1, EVALUE 4.00e-06; SWISSPROT HIT: Q9GZM6, EVALUE 6.00e-18
cacaaaattcaccagcatttttggggtaatgacagaagactggcagagatcaatgaaggacagactgctgaggaaatggtacatgggggtgtgcaggtgagaactgaaccctattagagtgatcatgctcaggttgcccaccactgtgaccacatagattcccaggaagaggaggaaaagaggcagctggagctctgg

SEQ ID NO: 16318 - DNA, 241 bp, Homo sapiens
  MAP TO CHRX.1; EXPRESSED IN PLACENTA, SIGNAL =   2; EXPRESSED IN BRAIN, SIGNAL =   2; EXPRESSED IN LUNG, SIGNAL = 2.3; EXPRESSED IN HEART, SIGNAL = 1.4; EXPRESSED IN ADULT LIVER, SIGNAL = 1.3; SWISSPROT HIT: P11413, EVALUE 2.00e-42; NT HIT: M65231.1, EVALUE 0.00e+00; EST_HUMAN HIT: BG675121.1, EVALUE 0.00e+00
accttgtatctgttgccgtaggtcaggtccagctccgactcctcggggttgaagaacatgcccggcttcttggtcatcatcttggtgtacacggcctcgttgggctgcacgcggatcaccagctcgttgcgcttgcactgctggtggaagatgtcgccggccacatcatggaactgcagcctcacctcggccttgcgctcgttcagggccttgccgcagcgcaggatgaagggcaccccta

SEQ ID NO: 16319 - DNA, 244 bp, Homo sapiens
  MAP TO CHR8.1; EXPRESSED IN HEART, SIGNAL = 0.46; EXPRESSED IN BONE MARROW, SIGNAL = 0.63; EXPRESSED IN FETAL LIVER, SIGNAL = 0.63; EXPRESSED IN BRAIN, SIGNAL = 0.55; EST_HUMAN HIT: BE834855.1, EVALUE 2.10e-02; SWISSPROT HIT: P57644, EVALUE 1.00e+00; NT HIT: gi14780889, EVALUE 1.00e-46
tctgtctgtccactgtatgtttcaggtatagaaatgtttccattttgtacatttccataggagttagaaatatttgagatgaaaggatttatctctgaatttagtgcattgcataaacagttttcttgaacaaatggatctacaggtttcttgaaatgcacaaaggtgacagtagcatcttttccttttccaaatcttttggccactgtacagttattcagagagcatgtcctttctgtggaaa

SEQ ID NO: 16320 - DNA, 192 bp, Homo sapiens
  MAP TO CHR5.1; EXPRESSED IN FETAL LIVER, SIGNAL = 0.68; EXPRESSED IN HELA, SIGNAL = 0.6; EXPRESSED IN BRAIN, SIGNAL = 0.85; EXPRESSED IN HEART, SIGNAL = 0.61; EXPRESSED IN BONE MARROW, SIGNAL = 0.79; EST_HUMAN HIT: AI142278.1, EVALUE 1.00e-104; SWISSPROT HIT: P33284, EVALUE 8.50e-01; NT HIT: AB022083.1, EVALUE 4.00e-73
cctggggcccggatccagtttcaggaagctccgccttcagagctgataagattgaccaaggtccccctgacaccagtgcctattaaaatgcagtccctactggagccttctgtaaaaattgaaaccaaagatgtcccctcactgtgctgccctcagatgcaggtattagacagcaggggagtctggttttca

SEQ ID NO: 16321 - DNA, 244 bp, Homo sapiens
  MAP TO CHR7.1; EXPRESSED IN PLACENTA, SIGNAL =  41; EXPRESSED IN FETAL LIVER, SIGNAL =  61; EXPRESSED IN HELA, SIGNAL =  33; EXPRESSED IN LUNG, SIGNAL =  61; EXPRESSED IN BRAIN, SIGNAL =  51; EXPRESSED IN HEART, SIGNAL =  53; EXPRESSED IN BONE MARROW, SIGNAL =  66; SWISSPROT HIT: P48656, EVALUE 5.20e+00
gctcaacactttacattacaataggcaagcctctgtgaggcagctttgaaatcccagaactgtggtcaaactacggacctcctggaaggacaaagtgttctgtttgtgtagcacaagggtgtggcttttgtagctagtaaaataatctgaacacaaaggcctccagatcctgcagagcactctgcagtgaactgactcagcggaaagcggtgggaaaggaagctggttcttagatttcagaacc

SEQ ID NO: 16322 - DNA, 210 bp, Homo sapiens
  MAP TO CHR7.1; EXPRESSED IN FETAL LIVER, SIGNAL = 0.82; EXPRESSED IN HELA, SIGNAL = 1.1; EXPRESSED IN BRAIN, SIGNAL = 0.88; EXPRESSED IN ADULT LIVER, SIGNAL = 0.72; EXPRESSED IN BONE MARROW, SIGNAL = 0.95; EST_HUMAN HIT: AW008475.1, EVALUE 1.00e-114; SWISSPROT HIT: P30343, EVALUE 1.10e+00; NT HIT: gi14739833, EVALUE 2.00e-56
cacaccattctagaaatgcaaggactcgagcatttccctggcatgacatgtattcttctattaataaaggagccactgatgacaaagtggcaattgcatgcagttgtaattcttcatgctgtgctgcagaccagtcaattattttttgcttctcaggcttcttaacataggtaaacaaagccaaaataactttgccatcaattaatagct

SEQ ID NO: 16323 - DNA, 106 bp, Homo sapiens
  MAP TO CHR14.1; EXPRESSED IN BONE MARROW, SIGNAL = 0.72; EXPRESSED IN HELA, SIGNAL = 0.58; EXPRESSED IN BRAIN, SIGNAL = 0.55; EXPRESSED IN HEART, SIGNAL =   1; EXPRESSED IN ADULT LIVER, SIGNAL = 0.51; NT HIT: AE008684.1, EVALUE 3.00e-17; EST_HUMAN HIT: AA584874.1, EVALUE 5.00e-01
tttgcttttctctttccaagcaggggtgagacgagtgaaggtggagcagagtccttcagttccgagtctccaggagagaaccagctctactctgagatgcagtttt

SEQ ID NO: 16324 - DNA, 205 bp, Homo sapiens
  MAP TO CHR5.1; EXPRESSED IN BRAIN, SIGNAL = 1.7; EXPRESSED IN HEART, SIGNAL = 1.3; EXPRESSED IN ADULT LIVER, SIGNAL = 1.9; EXPRESSED IN BONE MARROW, SIGNAL = 0.99; EXPRESSED IN LUNG, SIGNAL = 0.93; EXPRESSED IN FETAL LIVER, SIGNAL = 0.86; EXPRESSED IN PLACENTA, SIGNAL = 1.2; EXPRESSED IN HELA, SIGNAL = 1.1; NT HIT: gi15297270, EVALUE 2.00e-97; EST_HUMAN HIT: AW161406.1, EVALUE 1.00e-101; SWISSPROT HIT: Q92599, EVALUE 2.00e-20
attggcaaatccacactgatgaacacactcttcaacacgaccttcgagactgaggaagccagtcaccatgaggcatgcgtgcgcctgcggccccagacctatgacctccaggagagcaacgtgcagctcaagctgaccattgtggatgccgtgggctttggggatcagatcaataaggatgagaggcaagaggcgggaagggcgg

SEQ ID NO: 16325 - DNA, 184 bp, Homo sapiens
  MAP TO CHR16.1; EXPRESSED IN BRAIN, SIGNAL = 0.9; EXPRESSED IN LUNG, SIGNAL = 1.6; EXPRESSED IN HEART, SIGNAL = 0.63; EXPRESSED IN ADULT LIVER, SIGNAL = 1.5; EXPRESSED IN BONE MARROW, SIGNAL = 3.4; NT HIT: gi15317699, EVALUE 3.00e-98; EST_HUMAN HIT: AL562131.1, EVALUE 5.00e-98; SWISSPROT HIT: P07768, EVALUE 1.90e+00
acctggaaggccgcgaaccacatcagccagtccaggcggtagtggtacggggagatgaggcagggccgtctgctggggtcacctggcttgcacttgaactcgtagtcctcccacatggcatcgggggcgctggcgttggagctggctgtgccctgcaggatcacctccgcccgctccttggtga

SEQ ID NO: 16326 - DNA, 182 bp, Homo sapiens
  MAP TO CHR6.1; EXPRESSED IN HELA, SIGNAL = 0.95; EXPRESSED IN BRAIN, SIGNAL = 0.99; EXPRESSED IN HEART, SIGNAL = 0.8; EXPRESSED IN BONE MARROW, SIGNAL = 0.97; EXPRESSED IN ADULT LIVER, SIGNAL = 0.89; EXPRESSED IN FETAL LIVER, SIGNAL = 0.84; NT HIT: AF096339.1, EVALUE 3.00e-03; SWISSPROT HIT: O43684, EVALUE 6.50e-01
actgaggtgtctgtcaccatagtacctagacaatccctcaggcagagatatgagtgattaaatttctccctggcttgtgccctgtttgatccatgctaggcaggatttgggggagtaaaataaagaagcctgaagaatgaacaagaattataggaattttgtgcttgtgaattattaaaatt

SEQ ID NO: 16327 - DNA, 158 bp, Homo sapiens
  MAP TO CHR5.1; EXPRESSED IN HEART, SIGNAL = 0.91; EXPRESSED IN PLACENTA, SIGNAL = 1.8; EXPRESSED IN LUNG, SIGNAL = 1.1; EXPRESSED IN FETAL LIVER, SIGNAL = 1.3; EXPRESSED IN BRAIN, SIGNAL = 1.6; EXPRESSED IN HELA, SIGNAL = 2.1; EXPRESSED IN BONE MARROW, SIGNAL = 1.9; EXPRESSED IN ADULT LIVER, SIGNAL = 1.1; SWISSPROT HIT: Q9UFF9, EVALUE 6.00e-25; NT HIT: AF180476.1, EVALUE 6.00e-84; EST_HUMAN HIT: AI761731.1, EVALUE 9.00e-84
gaggacatgtactcccaggattccatagatctccttgctaactcaggactacagtttcagaagcatgaagaggaagggattgacacactgcactttgcagagctgcttatgacatcaggagtggttctctgtgacaatgtcaaatggctttcatttca

SEQ ID NO: 16328 - DNA, 171 bp, Homo sapiens
  MAP TO CHR11.1; EXPRESSED IN ADULT LIVER, SIGNAL = 0.8; EXPRESSED IN PLACENTA, SIGNAL = 1.8; EXPRESSED IN LUNG, SIGNAL = 0.98; EXPRESSED IN HELA, SIGNAL =   1; EXPRESSED IN BRAIN, SIGNAL = 0.87; EXPRESSED IN HEART, SIGNAL = 1.2; EXPRESSED IN BONE MARROW, SIGNAL = 0.91; SWISSPROT HIT: P33137, EVALUE 2.20e-01; NT HIT: AY045830.1, EVALUE 5.90e-01
tcttggcttcggggtttctgtgcctccttgcttcagaacaccgggtatttgggattaaatccagcctgaaatgttatttgctctgtttagtgcttttatgatgattctcttattatctgcatgtgcttcagtgctaattgtacattacaatggttgtaagcaggcagcctg

SEQ ID NO: 16329 - DNA, 258 bp, Homo sapiens
  MAP TO CHR5.1; EXPRESSED IN HELA, SIGNAL = 1.2; EXPRESSED IN BRAIN, SIGNAL = 0.97; EXPRESSED IN HEART, SIGNAL = 0.52; EXPRESSED IN BONE MARROW, SIGNAL = 0.91; NT HIT: gi14165420, EVALUE 0.00e+00; EST_HUMAN HIT: BG912030.1, EVALUE 6.00e-03; SWISSPROT HIT: Q9Y5H6, EVALUE 2.00e-35
ctattaaaagaatatgaaattgccccattggctccttcatccggatcagaagcattcagtttgataactgttgttccgttgtctgcgttttcgaatattcttacttcgtattcagactgttcgaaagtgggagcattatcattcacatccagcactgtgaccagcagctgaacagtgcctgtgagctcaggtttgcccccatctgtggctgtcaggaataagtggtgcgcaggagcgtcctctctgtccaaggatttt

SEQ ID NO: 16330 - DNA, 288 bp, Homo sapiens
  MAP TO CHR2.1; EXPRESSED IN ADULT LIVER, SIGNAL = 1.3; EXPRESSED IN BONE MARROW, SIGNAL = 1.9; EXPRESSED IN PLACENTA, SIGNAL = 1.9; EXPRESSED IN FETAL LIVER, SIGNAL = 1.6; EXPRESSED IN HELA, SIGNAL = 2.2; EXPRESSED IN BRAIN, SIGNAL = 1.9; EXPRESSED IN LUNG, SIGNAL = 0.8; NT HIT: AJ277892.1, EVALUE 0.00e+00; SWISSPROT HIT: Q15746, EVALUE 3.00e-08
tcagcaccaccaagatttgtgaagaagctcagtgacatatctactgtcgttggtaaagaagttcagctgcagactaccattgaaggcgctgaacccatttcagtggtgtggttcaaagataagggagaaatcgttagagaaagtgacaacatatggatttcttattcagaaaacattgcaaccttacagttttcaagagtggaaccagccaatgctggaaaatacacttgtcagatcaaaaacgatgctgggatgcaagagtgcttcgccacgctatccgttctcggt

SEQ ID NO: 16331 - DNA, 260 bp, Homo sapiens
  MAP TO CHR16.1; EXPRESSED IN BONE MARROW, SIGNAL = 0.85; EXPRESSED IN HELA, SIGNAL = 1.2; EXPRESSED IN BRAIN, SIGNAL = 0.8; EXPRESSED IN HEART, SIGNAL = 0.46; EXPRESSED IN ADULT LIVER, SIGNAL = 0.69; NT HIT: gi11430344, EVALUE 0.00e+00; EST_HUMAN HIT: AI653508.1, EVALUE 0.00e+00; SWISSPROT HIT: Q92889, EVALUE 7.00e-45
agtagcccagaaagctgcccggaagaaattaagcatgaagaatttgatgtaaatttgtcatcggatgctgctttcggaatcctgaaagaacccctcactatcatccatccgcttctgggttgcagcgacccctatgctctgacaagggtactacatgaagtggagccaagatacgtggttctttatgacgcagagctaacctttgttcggcagcttgaaatttacagggcgagtaggcctgggaaacctctgaggcaagt

SEQ ID NO: 16332 - DNA, 234 bp, Homo sapiens
  MAP TO CHR5.1; EXPRESSED IN FETAL LIVER, SIGNAL = 0.58; EXPRESSED IN BRAIN, SIGNAL = 0.41; EXPRESSED IN HEART, SIGNAL = 0.64; EXPRESSED IN ADULT LIVER, SIGNAL = 3.9; EXPRESSED IN BONE MARROW, SIGNAL = 0.51; NT HIT: gi16159531, EVALUE 1.00e-129; EST_HUMAN HIT: AI016221.1, EVALUE 1.00e-129; SWISSPROT HIT: P10912, EVALUE 1.00e-40
tttgttcagttggtctgtgctcacatagccacatgatgagagaaactctttgtcaggcaagggcaaggcagtcgcattgagtatgaggccctgtggggactgtactatatgaatggaggtatagtctgggacaggcatctcagaacctggaacatgttctcctgtcccaggcctcccagcagcagtggtaaggctttctgtggtgatgtaaatgtcctcttggtttaagcttgg

SEQ ID NO: 16333 - DNA, 224 bp, Homo sapiens
  MAP TO CHR1.1; EXPRESSED IN PLACENTA, SIGNAL = 6.6; EXPRESSED IN LUNG, SIGNAL = 1.4; EXPRESSED IN HELA, SIGNAL = 2.5; EXPRESSED IN BRAIN, SIGNAL = 1.8; EXPRESSED IN HEART, SIGNAL = 1.7; EXPRESSED IN ADULT LIVER, SIGNAL = 4.3; EXPRESSED IN BONE MARROW, SIGNAL = 2.1; NT HIT: gi13637528, EVALUE 1.00e-123; EST_HUMAN HIT: BG167829.1, EVALUE 1.00e-107; SWISSPROT HIT: P07155, EVALUE 6.00e-25
atcatagcgcactttatctgcctttgccatttcatcaaatttagatttctgtttcccggacatgtcttccacctctcagagcacttcttggaaaattccacaaaattgacagggacctctgggtttttcttcttatgttcttctctacttgtctgcacaaagaaggcataagcagacatcttgccctttggtttcttggggtcacctttagccatcctgactgt

SEQ ID NO: 16334 - DNA, 163 bp, Homo sapiens
  MAP TO CHR9.1; EXPRESSED IN ADULT LIVER, SIGNAL = 3.4; EXPRESSED IN BONE MARROW, SIGNAL = 6.8; EXPRESSED IN FETAL LIVER, SIGNAL = 5.3; EXPRESSED IN HELA, SIGNAL = 3.5; EXPRESSED IN BRAIN, SIGNAL = 6.2; EXPRESSED IN LUNG, SIGNAL = 4.9; SWISSPROT HIT: P52735, EVALUE 7.00e-26; NT HIT: gi11429600, EVALUE 3.00e-83; EST_HUMAN HIT: BF036000.1, EVALUE 4.00e-83
actcacccgtccgttggtctcgcccttccaccagccctggtctccgccgatgcggctgtagatcctcaccacgtcaccctcccgcagcgaaagctccctcatatctcgggcggcaaagttatacctggccacagctgtgccgatgacgcggggcgtgaacact

SEQ ID NO: 16335 - DNA, 178 bp, Homo sapiens
  MAP TO CHRX.1; EXPRESSED IN LUNG, SIGNAL = 0.9; EXPRESSED IN HELA, SIGNAL = 0.74; EXPRESSED IN BRAIN, SIGNAL = 0.55; EXPRESSED IN HEART, SIGNAL = 0.91; EXPRESSED IN BONE MARROW, SIGNAL = 0.6; SWISSPROT HIT: O95239, EVALUE 2.00e-26; NT HIT: gi15312148, EVALUE 5.00e-94; EST_HUMAN HIT: AL515973.1, EVALUE 7.00e-94
ttaccttctcttggtgctgttgctccattctgaccagctcagcttgtaactctgtctctatctcggcaaaatgatttcgttcctcaaacagcatcttctgcatgtcagcacagctggtcttgctctgtttcaggctgctttcaagtttgctgacctgtattttggaggagaccagctg

SEQ ID NO: 16336 - DNA, 244 bp, Homo sapiens
  MAP TO AC068936.2; EXPRESSED IN LUNG, SIGNAL = 1.8; EXPRESSED IN BRAIN, SIGNAL = 3.6; EXPRESSED IN HEART, SIGNAL = 2.6; EXPRESSED IN BONE MARROW, SIGNAL = 3.8; EXPRESSED IN ADULT LIVER, SIGNAL =   3; EXPRESSED IN PLACENTA, SIGNAL = 4.1; EXPRESSED IN FETAL LIVER, SIGNAL = 2.9; SWISSPROT HIT: O43281, EVALUE 2.70e-01; NT HIT: AF404827.1, EVALUE 3.50e+00
cttccttcctccgggaagcacatctatccagagcaggctcatccccggcggccacacaatggcccttatcagccgtggagccaggcgtagacccagtgcacaccaggtctcacttatttcctgtttccacccagtgggtcggggtggacccagaacggccatatcctgactggggcccagaggacggagagcaccccccattcccctttccgcctctcaatcactgctgggctcacccctccca

SEQ ID NO: 16337 - DNA, 260 bp, Homo sapiens
  MAP TO CHR19.1; EXPRESSED IN PLACENTA, SIGNAL = 3.4; EXPRESSED IN LUNG, SIGNAL = 1.9; EXPRESSED IN HELA, SIGNAL = 4.2; EXPRESSED IN BRAIN, SIGNAL = 2.7; EXPRESSED IN HEART, SIGNAL = 2.3; EXPRESSED IN ADULT LIVER, SIGNAL = 6.1; EXPRESSED IN BONE MARROW, SIGNAL = 2.8; EST_HUMAN HIT: BG755537.1, EVALUE 1.00e-03; NT HIT: AF229117.1, EVALUE 6.00e-02; SWISSPROT HIT: P54259, EVALUE 3.80e-02
cagctgtctccagctgttctctgcagccccgggagagagagggagggggtgccctcgcaggacagcccggcctcctttggctcaaaggtcccggggctccccaagggtccggaatgtggagcctccgccctgcccccgccgcacctctctctttgtttaccccgccgcacagctggcagtgccccgcccagaggtggcctggggcccagcgagggcgcgcagaggggagtggaggcgcgttcccgctcgtggctccgccc

SEQ ID NO: 16338 - DNA, 219 bp, Homo sapiens
  MAP TO CHR7.1; EXPRESSED IN BONE MARROW, SIGNAL = 0.54; EXPRESSED IN FETAL LIVER, SIGNAL = 0.57; EXPRESSED IN LUNG, SIGNAL =   1; EXPRESSED IN HELA, SIGNAL = 0.71; EXPRESSED IN BRAIN, SIGNAL = 0.54; EST_HUMAN HIT: BI770213.1, EVALUE 1.00e-111; NT HIT: M61934.1, EVALUE 1.00e-118; SWISSPROT HIT: P07942, EVALUE 3.00e-35
agcaatacctacccaggcctgtctggtgtaacagggcagaaatgctaaagatgatgtttctgcaaacatctgtcatcggtgttttcacaacgcttctgctgttctctagacatcggtatctctgaaaggtttcccaggcactgttggtgaccaccccatctcctgaacctcccacggtgaagatgtccagtgatttacagtatggcatgagaacaagct

SEQ ID NO: 16339 - DNA, 141 bp, Homo sapiens
  MAP TO CHR9.1; EXPRESSED IN HEART, SIGNAL = 1.2; EXPRESSED IN BONE MARROW, SIGNAL = 1.3; EXPRESSED IN LUNG, SIGNAL =   1; EXPRESSED IN PLACENTA, SIGNAL = 1.2; EXPRESSED IN BRAIN, SIGNAL = 1.2; EST_HUMAN HIT: BE766400.1, EVALUE 1.80e-01; NT HIT: AB038490.1, EVALUE 1.20e-01
ctgggatagaaacagatggtggtttggcagagtgattaaaacactagatatctgttttaatgaattgcctacccagcagataaaacactgcaatagtgagtctcagtcttctccgtcagtaattgcagtcttatttacaga

SEQ ID NO: 16340 - DNA, 163 bp, Homo sapiens
  MAP TO CHR7.1; EXPRESSED IN FETAL LIVER, SIGNAL = 1.3; EXPRESSED IN HELA, SIGNAL = 2.6; EXPRESSED IN BRAIN, SIGNAL = 1.2; EXPRESSED IN LUNG, SIGNAL = 0.78; EXPRESSED IN HEART, SIGNAL = 0.62; EXPRESSED IN BONE MARROW, SIGNAL = 1.3; EXPRESSED IN ADULT LIVER, SIGNAL = 0.84; EXPRESSED IN PLACENTA, SIGNAL = 1.7; EST_HUMAN HIT: BF221513.1, EVALUE 3.00e-59; NT HIT: AB032253.1, EVALUE 2.00e-59; SWISSPROT HIT: O47950, EVALUE 2.60e+00
tacttacagctcagcaacttcctgttcttcctcccaggcttccttgtgtgttagctgactgcttccagtactcttgcacgtccaaatgcgctcactgtacctttccaagcgggcttcatactctctgttggcagtagttcaggaaaacaatatgcaagcaaca

SEQ ID NO: 16341 - DNA, 153 bp, Homo sapiens
  MAP TO CHR5.1; EXPRESSED IN BRAIN, SIGNAL = 0.94; EXPRESSED IN HEART, SIGNAL = 0.83; EXPRESSED IN BONE MARROW, SIGNAL = 1.2; EXPRESSED IN ADULT LIVER, SIGNAL = 0.91; EXPRESSED IN FETAL LIVER, SIGNAL = 1.1; SWISSPROT HIT: Q15742, EVALUE 3.40e+00; NT HIT: gi14733931, EVALUE 5.00e-72; EST_HUMAN HIT: BE905276.1, EVALUE 7.00e-72
gcctcacctgctgtttcagcaactcattctgcgtgaccagctcctgtttccttaggagggcccctgctccttctgggctcccaaatgctgttggtggagatgatggcggggtttggatgctcagtgcttcctccagggcctggaatcaggaaa

SEQ ID NO: 16342 - DNA, 275 bp, Homo sapiens
  MAP TO AC015651.17; EXPRESSED IN BONE MARROW, SIGNAL = 0.65; EXPRESSED IN FETAL LIVER, SIGNAL = 0.9; EXPRESSED IN BRAIN, SIGNAL = 0.65; SWISSPROT HIT: Q09003, EVALUE 1.00e+00; NT HIT: gi14771000, EVALUE 0.00e+00; EST_HUMAN HIT: AL547109.1, EVALUE 0.00e+00
aaggtgcaatgaaagccttccacactttctgtgttgtccttctggtgtttgggagtgtctctgaagccaagtttgatgattttgaggatgaggaggacatagtagagtatgatgataatgacttcgctgaatttgaggatgtcatggaagactctgttactgaatctcctcaacgggtcataatcactgaagatgatgaagatgagaccactgtggagttggaagggcaggatgaaaaccaagaaggagattttgaagatgcagatacccaggtg

SEQ ID NO: 16343 - DNA, 210 bp, Homo sapiens
  MAP TO CHR15.1; EXPRESSED IN BRAIN, SIGNAL = 2.3; EXPRESSED IN ADULT LIVER, SIGNAL = 2.2; EXPRESSED IN BONE MARROW, SIGNAL = 1.9; EXPRESSED IN LUNG, SIGNAL = 1.7; NT HIT: AF072847.1, EVALUE 2.90e+00; SWISSPROT HIT: P40848, EVALUE 1.90e+00
ttgataataacaaagaggcagatggcccagccacaaagggcaatgtgaatgtctatatgttagatgccaacaaagtgattataaaattaaggacaagtatttgggcattgctttctaactgcatgttatttttcacaagaaatttcagggaaggttgggctttcacatatttaattagtgtaatggaactgattctgccaagtgtatctg

SEQ ID NO: 16344 - DNA, 264 bp, Homo sapiens
  MAP TO CHR17.1; EXPRESSED IN LUNG, SIGNAL = 1.1; EXPRESSED IN HELA, SIGNAL = 1.5; EXPRESSED IN BRAIN, SIGNAL = 1.4; EXPRESSED IN HEART, SIGNAL = 0.91; EXPRESSED IN BONE MARROW, SIGNAL = 1.4; EXPRESSED IN ADULT LIVER, SIGNAL = 1.3; EXPRESSED IN PLACENTA, SIGNAL = 1.9; EXPRESSED IN FETAL LIVER, SIGNAL = 1.6; EST_HUMAN HIT: AU123871.1, EVALUE 0.00e+00; NT HIT: gi15310239, EVALUE 0.00e+00; SWISSPROT HIT: P04626, EVALUE 2.00e-45
ccccagagtggcggtggggacctgacactagggctggagccctctgaagaggaggcccccaggtctccactggcaccctccgaaggggctggctccgatgtatttgatggtgacctgggaatgggggcagccaaggggctgcaaagcctccccacacatgaccccagccctctacagcggtacagtgaggaccccacagtacccctgccctctgagactgatggctacgttgcccccctgacctgcagcccccagcctggtatg

SEQ ID NO: 16345 - DNA, 239 bp, Homo sapiens
  MAP TO AC068936.2; EXPRESSED IN LUNG, SIGNAL = 2.1; EXPRESSED IN BRAIN, SIGNAL = 0.74; EXPRESSED IN HEART, SIGNAL =   1; EXPRESSED IN ADULT LIVER, SIGNAL = 1.1; EXPRESSED IN PLACENTA, SIGNAL =   2; EXPRESSED IN FETAL LIVER, SIGNAL = 1.1; EST_HUMAN HIT: BE002727.1, EVALUE 1.00e-125; NT HIT: AF092565.1, EVALUE 1.00e-104; SWISSPROT HIT: P34369, EVALUE 1.00e-33
aaagttctaccttgacaccacttgtaaacaagcagcggaggtggttctgtgtctgcaggcttaatccagggtgggaacaggcggcgcttgtcggcttcataccacaggtactggtccaggtaagcatcagttatcttctccaggggctcaacatcatatactggaacgaggtggctatacagatccatgaactcaatgcccacctgtgggacaaggaggctggttcacaccaatccacc

SEQ ID NO: 16346 - DNA, 251 bp, Homo sapiens
  MAP TO CHR17.1; EXPRESSED IN PLACENTA, SIGNAL = 2.2; EXPRESSED IN FETAL LIVER, SIGNAL = 1.7; EXPRESSED IN LUNG, SIGNAL = 1.9; EXPRESSED IN BRAIN, SIGNAL = 2.1; EXPRESSED IN HEART, SIGNAL = 1.8; EXPRESSED IN BONE MARROW, SIGNAL = 1.9; EST_HUMAN HIT: AU121122.1, EVALUE 0.00e+00; NT HIT: gi14773929, EVALUE 0.00e+00; SWISSPROT HIT: P34703, EVALUE 7.00e-17
ccttttcagcatacatcaagagagtgatcgcacacccatccttccataatatcaatttcaagcaagcagaaaagatgatggagaccatggaccagggtgatgtgattatccgaccaagcagcaagggcgagaaccacctgacagtgacctggaaagtcagtgatggcatctaccagcatgtggatgtgcgggaggagggcaaggaaaatgccttcagcctgggagccactctgtggatcaacagtgaggtg

SEQ ID NO: 16347 - DNA, 293 bp, Homo sapiens
  MAP TO CHR7.1; EXPRESSED IN BRAIN, SIGNAL = 0.87; EXPRESSED IN HEART, SIGNAL = 1.5; EXPRESSED IN BONE MARROW, SIGNAL =   1; EXPRESSED IN PLACENTA, SIGNAL = 1.7; EXPRESSED IN FETAL LIVER, SIGNAL =   1; EXPRESSED IN LUNG, SIGNAL = 1.5; SWISSPROT HIT: P09544, EVALUE 3.00e-51; NT HIT: gi4507926, EVALUE 0.00e+00; EST_HUMAN HIT: AL541368.1, EVALUE 0.00e+00
aacttacctgcctctcggtccctgatacagtagtctggagaattctcaaaatacacgaggtcatttttcgttggcttcttaaacctctcgttagccacagtgaaacctgtgccatcctggttcatgaccacctggatggccccattgtacttcctccagagataatcgcccgttttcctgaagtcggccatggccagccagcatgtcctgagagtacatgagccgctcaccccgtggcacttgcactcttgtttcaagaaccgctttacagcctgccgaaaaagacaggggca

SEQ ID NO: 16348 - DNA, 203 bp, Homo sapiens
  MAP TO CHR5.1; EXPRESSED IN LUNG, SIGNAL = 0.83; EXPRESSED IN FETAL LIVER, SIGNAL = 0.64; EXPRESSED IN BRAIN, SIGNAL = 0.76; EXPRESSED IN HEART, SIGNAL = 0.61; EXPRESSED IN BONE MARROW, SIGNAL = 0.84; SWISSPROT HIT: Q14195, EVALUE 3.00e-27; NT HIT: gi14726590, EVALUE 9.00e-93; EST_HUMAN HIT: BI869777.1, EVALUE 1.00e-92
tcccaccagagcgggccttacagactggtggttcttggcagagacgatcttcacagcatctggatcccagatgacgaggtcgctgtcagaacccacagatattcttcccttgcggggatacaggttgaagatcttggcagcgtttgtgcttgtcacagccacgaactggttttcgtccattttccctgtggcctattgaaata

SEQ ID NO: 16349 - DNA, 159 bp, Homo sapiens
  MAP TO CHR19.1; EXPRESSED IN PLACENTA, SIGNAL =   3; EXPRESSED IN FETAL LIVER, SIGNAL = 3.1; EXPRESSED IN LUNG, SIGNAL = 2.7; EXPRESSED IN BRAIN, SIGNAL = 2.9; EXPRESSED IN HELA, SIGNAL = 3.8; EXPRESSED IN HEART, SIGNAL = 4.1; EXPRESSED IN BONE MARROW, SIGNAL = 3.4; EXPRESSED IN ADULT LIVER, SIGNAL = 5.6; SWISSPROT HIT: Q00839, EVALUE 9.00e-16; EST_HUMAN HIT: BE799506.1, EVALUE 5.00e-73; NT HIT: gi14786843, EVALUE 3.00e-73
cttcacagataactgcgacctccacttcaaggtggcccgagatcggagtagtggctatccgctcacaattgagggctttgcatacctgtggtcaggagcccgtgccagctatggggtcagaaggggccgtgtatgcttcgagatgaaggtgagtaggag

SEQ ID NO: 16350 - DNA, 185 bp, Homo sapiens
  MAP TO CHR12.1; EXPRESSED IN HEART, SIGNAL = 2.1; EXPRESSED IN BONE MARROW, SIGNAL =   2; EXPRESSED IN ADULT LIVER, SIGNAL = 0.9; EXPRESSED IN PLACENTA, SIGNAL = 2.6; EXPRESSED IN FETAL LIVER, SIGNAL = 1.7; EXPRESSED IN LUNG, SIGNAL = 2.3; EXPRESSED IN BRAIN, SIGNAL = 2.1; NT HIT: AL163246.2, EVALUE 4.00e-45; SWISSPROT HIT: P29001, EVALUE 1.90e+00; EST_HUMAN HIT: AA165334.1, EVALUE 4.00e-43
gcctcatgaggagttccctatgatcagctgacaaaggaagagaagactagggcctggttcgcagatagttatgcccaatatgcaggcatcacccaaaagtggacagctgtagcactacagcccctttctaggacatccatgaaggagagcagtgaagggaaatcttcccagggggcagaacttca

SEQ ID NO: 16351 - DNA, 329 bp, Homo sapiens
  MAP TO CHR14.1; EXPRESSED IN BRAIN, SIGNAL = 0.49; EXPRESSED IN BONE MARROW, SIGNAL = 0.46; EXPRESSED IN FETAL LIVER, SIGNAL = 0.38; EST_HUMAN HIT: BI821699.1, EVALUE 0.00e+00; NT HIT: M97710.1, EVALUE 0.00e+00; SWISSPROT HIT: P06322, EVALUE 7.00e-23
tcagtgacccagatggaagggccagtgactctctcagaagaggccttcctgactataaactgcacgtacacagccacaggatacccttcccttttctggtatgtccaatatcctggagaaggtctacagctcctcctgaaagccacgaaggctgatgacaagggaagcaacaaaggttttgaagccacataccgtaaagaaaccacttctttccacttggagaaaggctcagttcaagtgtcagactcagcggtgtacttctgtgctctgagtgacacagtgacagggactgcagggggagctgagcacaaactctgagcagcacgggg

SEQ ID NO: 16352 - DNA, 169 bp, Homo sapiens
  MAP TO CHR7.1; EXPRESSED IN HEART, SIGNAL = 1.6; EXPRESSED IN BONE MARROW, SIGNAL = 1.4; EXPRESSED IN PLACENTA, SIGNAL = 2.3; EXPRESSED IN FETAL LIVER, SIGNAL = 1.5; EXPRESSED IN LUNG, SIGNAL = 1.6; EXPRESSED IN BRAIN, SIGNAL = 1.3; EST_HUMAN HIT: AW390498.1, EVALUE 2.20e-01; NT HIT: U66059.1, EVALUE 1.50e-01; SWISSPROT HIT: O51557, EVALUE 1.90e+00
gtgctcttctgttgactttgctttccagtgcactgcttggccattagtactttcagagaaacattgtaagctttggggaaagggcagcccattaaacttgtctgacttaggtcagcacagctgcctgcctagaagttgatgagctttctcagggctctgcagcccctac

SEQ ID NO: 16353 - DNA, 197 bp, Homo sapiens
  MAP TO CHR6.1; EXPRESSED IN BRAIN, SIGNAL = 1.2; EXPRESSED IN HEART, SIGNAL = 0.84; EXPRESSED IN ADULT LIVER, SIGNAL = 0.91; EXPRESSED IN BONE MARROW, SIGNAL = 1.1; EXPRESSED IN FETAL LIVER, SIGNAL = 0.89; EXPRESSED IN LUNG, SIGNAL = 0.93; EST_HUMAN HIT: AU133664.1, EVALUE 2.00e-66; NT HIT: X98208.1, EVALUE 1.00e-107; SWISSPROT HIT: Q08345, EVALUE 1.00e-04
tcccctgcagagatgctgcccccacccccttaggcccgagggatcaggagctatgggaccagaggccctgtcatctttactgctgctgctcttggtggcaagtggagatgctgacatgaagggacattttgatcctggtgaggagactgaatcatgggtccctgagggccagggcttgggaggtagagagttggggg

SEQ ID NO: 16354 - DNA, 271 bp, Homo sapiens
  MAP TO CHR19.1; EXPRESSED IN ADULT LIVER, SIGNAL = 1.4; EXPRESSED IN BONE MARROW, SIGNAL = 1.3; EXPRESSED IN FETAL LIVER, SIGNAL = 1.1; EXPRESSED IN HELA, SIGNAL = 4.1; EXPRESSED IN BRAIN, SIGNAL = 1.3; EXPRESSED IN LUNG, SIGNAL = 1.7; SWISSPROT HIT: P42285, EVALUE 4.90e+00; NT HIT: AF309494.1, EVALUE 2.50e-01; EST_HUMAN HIT: BF793559.1, EVALUE 0.00e+00
tccgccacccacttagcgttttaggcatcaattaccagcagtttctccgccactatctggaaaattacccgattgctcccggcagaatacaagagcttgaagaacgccgcaggcgattcgtggaagcctgcagagcaagggaagcagcgtttgatgccgaatatcagcgaaatcctcacagggtggacctcgatattttaacctttacgatagctctgactgcctctgaagttatcaaccctctgatagaagaacttggttgcgataagtt

SEQ ID NO: 16355 - DNA, 430 bp, Homo sapiens
  MAP TO CHRX.1; EXPRESSED IN BONE MARROW, SIGNAL = 0.51; EXPRESSED IN FETAL LIVER, SIGNAL = 0.49; EXPRESSED IN HELA, SIGNAL = 0.4; EXPRESSED IN BRAIN, SIGNAL = 0.48; EXPRESSED IN LUNG, SIGNAL = 0.67; EXPRESSED IN HEART, SIGNAL = 0.69; EST_HUMAN HIT: AI078183.1, EVALUE 0.00e+00; NT HIT: gi6754693, EVALUE 1.00e-105
agacaacaaagaattcatgaatacatatatatttatttaattcataatatagcattttggatgggctggaatattgtagagagggatgaggctgtgtaatccacagatgctcatatttctgtcactaggagagacactattggtccagagctcccaatacaaacaggcgtggggtaaagcatttgataaaaaatagtccaacaatagtctaataaatagtctagccaataacaacaatacagcatatgtctgaagctggcagactacaccataaaaggcagttttgtctgacctgatggcaatcagtttggccaacctgtaacacacagccaaatacagccattggctccaaggctgcagttggcttcaggagctagaaataagtgtaggagtggttcttacctacctgcctgacactctccattccttg

SEQ ID NO: 16356 - DNA, 157 bp, Homo sapiens
  MAP TO CHR2.1; EXPRESSED IN BONE MARROW, SIGNAL = 0.81; EXPRESSED IN LUNG, SIGNAL =   1; EXPRESSED IN HELA, SIGNAL = 0.91; EXPRESSED IN BRAIN, SIGNAL = 0.69; EXPRESSED IN HEART, SIGNAL = 0.96; NT HIT: X06292.1, EVALUE 8.40e+00; SWISSPROT HIT: O88943, EVALUE 1.50e+00; EST_HUMAN HIT: AA568190.1, EVALUE 8.00e-01
aaccctgagcaagtgagagacagcagtgccctccagggacctggcagagtgcacatgccaggcagcacgtagctgctacggcaggcatggaggcgttgccatggaaactgcccaggcggcctttccactcacaacctctaggttcctttgtttgtgt

SEQ ID NO: 16357 - DNA, 169 bp, Homo sapiens
  MAP TO CHR9.1; EXPRESSED IN PLACENTA, SIGNAL = 3.6; EXPRESSED IN LUNG, SIGNAL = 1.4; EXPRESSED IN HELA, SIGNAL = 3.2; EXPRESSED IN BRAIN, SIGNAL = 3.5; EXPRESSED IN BONE MARROW, SIGNAL = 4.2; EXPRESSED IN ADULT LIVER, SIGNAL = 1.6; NT HIT: gi14739129, EVALUE 3.80e-02
ccacccacggtcccattcttaaactgaatcagtaattgaatgctattaagcaaaattaatttgcctcctgcaggaaggtttatgatgaatgaaaggattgctgatctgggagggagccaggcttccctctactcatcaatatttcagagccgtaggcagtgtcaggaag

SEQ ID NO: 16358 - DNA, 114 bp, Homo sapiens
  MAP TO CHR1.1; EXPRESSED IN ADULT LIVER, SIGNAL = 3.9; EXPRESSED IN BONE MARROW, SIGNAL = 3.4; EXPRESSED IN PLACENTA, SIGNAL = 4.9; EXPRESSED IN FETAL LIVER, SIGNAL = 3.5; EXPRESSED IN LUNG, SIGNAL = 3.1; EXPRESSED IN HELA, SIGNAL = 5.3; EXPRESSED IN BRAIN, SIGNAL = 3.9; EXPRESSED IN HEART, SIGNAL = 3.1; NT HIT: AB032963.1, EVALUE 8.00e-58; SWISSPROT HIT: P98198, EVALUE 5.00e-16; EST_HUMAN HIT: BI043611.1, EVALUE 7.00e-56
gccattgatggagcacttgttgaaaaccatgatgttctgggtgagggtgcccgtcttgtcggagaagatgtactccacctggcccagctcctcgtttagggtggtggtgcgggc

SEQ ID NO: 16359 - DNA, 421 bp, Homo sapiens
  MAP TO CHR5.1; EXPRESSED IN LUNG, SIGNAL = 1.7; EXPRESSED IN BRAIN, SIGNAL = 1.4; EXPRESSED IN HEART, SIGNAL = 1.5; EXPRESSED IN BONE MARROW, SIGNAL = 1.2; EST_HUMAN HIT: BG719192.1, EVALUE 9.00e-71; NT HIT: gi14861872, EVALUE 0.00e+00; SWISSPROT HIT: Q9UN74, EVALUE 6.00e-76
ggcgcgttgtcgttttcgtccagcacgaacacctgcagcgtcacgttgctgcccagaggtggcacgccggcatcgcgagcggtcacctgaaactgcagcagctctagctcctcgtggtccagcggctgcagcgcgtacaccttgccgctctccgcatgcaccgaaacgtagctcgacagcgcgcgctcccctacccgccgctctaccagcgagtaggacaccagcgcgttctcctgcgcgtccgcgtcccacgcagacacagtgaagatgtggcagcccggcgggttgttctccttcacgaacactgtgtactcgggctgcgcgaacgccggagcgttgtcgttcacatcagccacctccacagaaacactggccgtggcccacagcgaaggcgagcccccgtctcgcgcggtcaccacca

SEQ ID NO: 16360 - DNA, 255 bp, Homo sapiens
  MAP TO CHR7.1; EXPRESSED IN ADULT LIVER, SIGNAL = 0.51; EXPRESSED IN HELA, SIGNAL = 0.85; EXPRESSED IN BRAIN, SIGNAL = 0.9; EXPRESSED IN LUNG, SIGNAL = 0.93; EXPRESSED IN BONE MARROW, SIGNAL = 0.82; EXPRESSED IN HEART, SIGNAL =   1; EST_HUMAN HIT: BG706779.1, EVALUE 0.00e+00; NT HIT: gi6912583, EVALUE 0.00e+00; SWISSPROT HIT: P28750, EVALUE 1.80e-01
cagatatgtgtcacaaagatgtctacacggaactgccagggaatggactcagtgatcaaacccctggacacaattcctgaggataaaaaagtcagagttcagaggacacagagcacttttgacccatttgagaaaccagctaatcaagtaaagagggtgcattctgagaacaatgcttgcattaactttaagacctcctccactggcaaagagtcacctaaagttaggcggcactccagccccagctcggtaagt

SEQ ID NO: 16361 - DNA, 266 bp, Homo sapiens
  MAP TO CHR17.1; EXPRESSED IN HELA, SIGNAL = 0.64; EXPRESSED IN BRAIN, SIGNAL = 0.78; EXPRESSED IN BONE MARROW, SIGNAL = 0.87; EXPRESSED IN HEART, SIGNAL = 0.49; EXPRESSED IN ADULT LIVER, SIGNAL = 0.67; EST_HUMAN HIT: C15785.1, EVALUE 9.10e-02; SWISSPROT HIT: P34294, EVALUE 2.10e+00; NT HIT: AJ249579.1, EVALUE 4.00e-03
aaaagattagtgcaattattagccaacagtaatggctataagccaatatgttctcaaatcctcctgagcaccaagtcaccttagagtctcttaaagccccaaacacaagactgtgtgttttcttgaatttggccatggtgttctcaaaggctgctgggtcggtggttaatgctgcccttacccacaaggctaataagcggagaaagaaacagtgaataatgcatgtgtctgagccctaggtccccatgcccccataagtctgtaaa

SEQ ID NO: 16362 - DNA, 203 bp, Homo sapiens
  MAP TO CHR6.1; EXPRESSED IN HEART, SIGNAL = 2.3; EXPRESSED IN BONE MARROW, SIGNAL = 2.1; EXPRESSED IN PLACENTA, SIGNAL = 2.1; EXPRESSED IN FETAL LIVER, SIGNAL = 2.5; EXPRESSED IN HELA, SIGNAL = 2.6; EXPRESSED IN BRAIN, SIGNAL = 2.1; EST_HUMAN HIT: BG548202.1, EVALUE 1.00e-107; NT HIT: D28769.1, EVALUE 1.00e-110; SWISSPROT HIT: Q15109, EVALUE 2.00e-34
agaacacaggccggacagaagcttggaaggtcctgtctccccagggaggaggcccctgggacagtgtggctcgtgtccttcccaacggctccctcttccttccggctgtcgggatccaggatgaggggattttccggtgccaggcaatgaacaggaatggaaaggagaccaagtccaactaccgagtccgtgtctaccgtaag

SEQ ID NO: 16363 - DNA, 263 bp, Homo sapiens
  MAP TO CHR12.1; EXPRESSED IN FETAL LIVER, SIGNAL = 3.6; EXPRESSED IN HELA, SIGNAL = 5.1; EXPRESSED IN LUNG, SIGNAL = 2.6; EXPRESSED IN BRAIN, SIGNAL = 4.2; EXPRESSED IN HEART, SIGNAL = 2.9; EXPRESSED IN BONE MARROW, SIGNAL = 3.5; EXPRESSED IN ADULT LIVER, SIGNAL = 2.9; SWISSPROT HIT: P17657, EVALUE 3.10e-01; EST_HUMAN HIT: AU133702.1, EVALUE 0.00e+00; NT HIT: gi14762973, EVALUE 0.00e+00
cctttaccccagtctgggccatgccaaaaggtccagggttcatgcccaggaagagtacttccttggggccctggcagtagcgagtcacgtagttgcgatgtggctcccatgcatactccacgggattgtagatgatgcccacaggctccgaaaactgcagctggctcagctcagcattgagccgaagctcctcctccaggaagctctcagccaagcttccagggcagggctggggctccatgagggcacctgcaggctcatgg

SEQ ID NO: 16364 - DNA, 293 bp, Homo sapiens
  MAP TO CHR7.1; EXPRESSED IN PLACENTA, SIGNAL = 6.8; EXPRESSED IN FETAL LIVER, SIGNAL = 6.5; EXPRESSED IN HEART, SIGNAL = 4.3; EXPRESSED IN BONE MARROW, SIGNAL = 7.6; EXPRESSED IN ADULT LIVER, SIGNAL =   3; EXPRESSED IN LUNG, SIGNAL = 2.8; EXPRESSED IN BRAIN, SIGNAL =   7; EXPRESSED IN HELA, SIGNAL = 6.4; NT HIT: AF252549.1, EVALUE 0.00e+00; SWISSPROT HIT: P21333, EVALUE 5.00e-25; EST_HUMAN HIT: BI870614.1, EVALUE 0.00e+00
accttggagggatcagggggcaggacaccctccacagcaaacgggctgccaggcaccgggtgaccatcgtaggtgatatccaccttgtagggcccctcctccgggggcatgtagcgcacagcctgggcttccgctccaccgcctggctccagcttgcaggggatgggccggcgagagggcgaagtcatccgcacatccagttggccctgaccgccagcccctcgtgtgttcacagagaatgcttgttcctgtcccacagccacctctgcgtggagggcaagtgacaccatgag

SEQ ID NO: 16365 - DNA, 207 bp, Homo sapiens
  MAP TO CHR7.1; EXPRESSED IN BRAIN, SIGNAL = 0.79; EXPRESSED IN LUNG, SIGNAL = 1.1; EXPRESSED IN HEART, SIGNAL = 0.97; EXPRESSED IN ADULT LIVER, SIGNAL = 1.6; EXPRESSED IN BONE MARROW, SIGNAL = 0.59; NT HIT: gi14752099, EVALUE 1.00e-113; SWISSPROT HIT: Q15165, EVALUE 2.00e-37; EST_HUMAN HIT: AA173390.1, EVALUE 1.00e-113
atacttatcatcaggtgaaatattgatcccatttgctgaatcaaatccttctgctaccactttaacttcatttggactgtagtaaacaacatttgcccagtgtaagttcaagtatgtttctaaatactttaagaaaggatcagagaagtagtggtcatttgtggcatagaaatgtgccggtccaacagctgtgatgtcattcacact

SEQ ID NO: 16366 - DNA, 158 bp, Homo sapiens
  MAP TO CHR17.1; EXPRESSED IN PLACENTA, SIGNAL = 1.6; EXPRESSED IN FETAL LIVER, SIGNAL = 1.7; EXPRESSED IN LUNG, SIGNAL = 2.5; EXPRESSED IN BRAIN, SIGNAL = 1.1; EXPRESSED IN BONE MARROW, SIGNAL = 1.3; EXPRESSED IN HEART, SIGNAL = 1.2; EST_HUMAN HIT: AW504979.1, EVALUE 1.00e-76; NT HIT: gi14786033, EVALUE 9.00e-77; SWISSPROT HIT: P52631, EVALUE 5.00e-22
cttaccgctgatgtccttctccacccaagtgaaagtgacgcctccttctttgctgctttcactgaatcttagcaggaaggtgcctggaggcttagtgctcaagatggcccgctcccgctccttactgataaagcccatgatgtacctggagccaagga

SEQ ID NO: 16367 - DNA, 196 bp, Homo sapiens
  MAP TO CHR2.1; EXPRESSED IN ADULT LIVER, SIGNAL = 1.5; EXPRESSED IN PLACENTA, SIGNAL =   2; EXPRESSED IN FETAL LIVER, SIGNAL = 1.5; EXPRESSED IN LUNG, SIGNAL = 1.5; EXPRESSED IN BRAIN, SIGNAL =   2; EXPRESSED IN BONE MARROW, SIGNAL = 1.5; EXPRESSED IN HEART, SIGNAL = 1.3; EST_HUMAN HIT: BG615293.1, EVALUE 4.00e-80; NT HIT: AF266285.1, EVALUE 1.70e-01; SWISSPROT HIT: Q11161, EVALUE 1.90e+00
aaaagtgaatgtttacttactgttagttgcttgcacgttttcctctagtttacagagcactcttaattcagacaccagccaagcacagagtttggtaaactcgggggaactggctccagcagagactgcctgagagagcgctccatcttccaacaatgggcccttgtaactggtgagcaagaaattacatttcaga

SEQ ID NO: 16368 - DNA, 146 bp, Homo sapiens
  MAP TO CHR14.1; EXPRESSED IN FETAL LIVER, SIGNAL = 0.55; EXPRESSED IN LUNG, SIGNAL =   1; EXPRESSED IN BRAIN, SIGNAL = 0.98; EXPRESSED IN HEART, SIGNAL = 1.2; EST_HUMAN HIT: BG913168.1, EVALUE 6.00e-57; NT HIT: AE005809.1, EVALUE 8.00e-03; SWISSPROT HIT: P98174, EVALUE 1.30e-01
ggactcacattggcctcatccgtggcgaggagcccaggattcttgctcaggtccaggtatcgaagggagctggcaaatgctgggtttgccccgaaggtctggccgagtgcctggagccctgagcacagcgggcactgggctgggtt

SEQ ID NO: 16369 - DNA, 483 bp, Homo sapiens
  MAP TO CHR20.1; EXPRESSED IN HELA, SIGNAL =   2; EXPRESSED IN FETAL LIVER, SIGNAL = 2.1; EXPRESSED IN BRAIN, SIGNAL = 2.6; EXPRESSED IN LUNG, SIGNAL = 1.4; EXPRESSED IN HEART, SIGNAL = 1.5; EXPRESSED IN PLACENTA, SIGNAL = 2.8; EST_HUMAN HIT: AL580725.1, EVALUE 0.00e+00; SWISSPROT HIT: Q9NUA8, EVALUE 4.40e-02
tcagggatgctctgctccacaaccacatgattgtctggcttggccacgttccacacaaagctggcttccccggagtgacatgtggcattgtgcaaggaaagcccctcaggggtttttgccagaaaactgcacccactgcatacaaaggttgggtctttattaaagtctgtgtgctctgagttcatatgtcccacaaattgggtcatgtcatgggatctgaaatcgcagtatttacaggaatataaatagccatctaaagtgctccgatgcccattggccagtgtagagccatcagtactgctggggttctgtgctgcctcactgctggcagcagatgcttctgggggcagatcctgctggggtccttcaggcaaggtctcagcgggctgggcctccatgctggcatcttgcaacaccacagtcttcactgggatcatgcatggtgtggtggatttcctcttgctggccatggtgacaatcact

SEQ ID NO: 16370 - DNA, 319 bp, Homo sapiens
  MAP TO CHR7.1; EXPRESSED IN HELA, SIGNAL =   1; EXPRESSED IN BRAIN, SIGNAL = 0.76; EXPRESSED IN HEART, SIGNAL =   1; EXPRESSED IN LUNG, SIGNAL =   1; SWISSPROT HIT: P03999, EVALUE 1.00e-58; EST_HUMAN HIT: AL524418.1, EVALUE 6.00e-25; NT HIT: M13295.1, EVALUE 0.00e+00
aatatctcttcagtggggccgtgggatgggcctcagtaccacattgcccctgtctgggccttctacctccaggcagctttcatgggcactgtcttccttatagggttcccactcaatgccatggtgctggtggccacactgcgctacaaaaagttgcggcagcccctcaactacattctggtcaacgtgtccttcggaggcttcctcctctgcatcttctctgtcttccctgtcttcgtcgccagctgtaacggatacttcgtcttcggtcgccatgtttgtgctttggagggcttcctgggcactgtagcaggtactg

SEQ ID NO: 16371 - DNA, 151 bp, Homo sapiens
  MAP TO CHR7.1; EXPRESSED IN BRAIN, SIGNAL = 0.5; EXPRESSED IN HEART, SIGNAL = 0.66; EXPRESSED IN FETAL LIVER, SIGNAL = 0.4; NT HIT: Z29597.1, EVALUE 5.20e-01; EST_HUMAN HIT: BI027352.1, EVALUE 1.90e-01
cctcagattgcatgagccatattacttgtcaagattaaacaagtgactcactgtgtttatctttctgctagcttccaaagtcatgttgctgatattgaaatgtcaattccttgacctttggatgcacatgggagtctcagagaacattcca

SEQ ID NO: 16372 - DNA, 163 bp, Homo sapiens
  MAP TO CHR7.1; EXPRESSED IN HEART, SIGNAL = 0.82; EXPRESSED IN BONE MARROW, SIGNAL = 0.65; EXPRESSED IN BRAIN, SIGNAL = 0.64; NT HIT: U81844.1, EVALUE 5.60e-01; SWISSPROT HIT: Q01965, EVALUE 3.40e+00; EST_HUMAN HIT: AW473665.1, EVALUE 3.30e+00
tctcaccagtggattcagtatgaaactctaggtggtaacatttggggacggttgactcttttatttctctcaggaaagaggaaatgagtacttatttgaaaacacgagttccctctggagactgtgtctttaaatgagcatttgaaattgcagatagcttttt

SEQ ID NO: 16373 - DNA, 208 bp, Homo sapiens
  MAP TO CHR19.1; EXPRESSED IN FETAL LIVER, SIGNAL = 1.1; EXPRESSED IN LUNG, SIGNAL = 2.1; EXPRESSED IN HELA, SIGNAL =   1; EXPRESSED IN BRAIN, SIGNAL = 0.97; EXPRESSED IN HEART, SIGNAL = 2.1; EXPRESSED IN BONE MARROW, SIGNAL = 0.88; EST_HUMAN HIT: BE892957.1, EVALUE 1.00e-107; NT HIT: gi15308579, EVALUE 1.00e-109; SWISSPROT HIT: P90747, EVALUE 8.00e-27
gggcccaccttggaacgggagatgaagaggaagcagccggccagcagcagcccctgtagggtggcctggaagtcactgaacttgactccctccaggtagaggacgctctggctgtaggccaggatgagggcattgagcgccaggatcttgaacatctgtagcgtggtcaccagcgtgcagcggccctgcttgatcacgtggcagactg

SEQ ID NO: 16374 - DNA, 254 bp, Homo sapiens
  MAP TO CHR10.1; EXPRESSED IN HELA, SIGNAL = 1.3; EXPRESSED IN BRAIN, SIGNAL = 1.5; EXPRESSED IN LUNG, SIGNAL = 1.9; EXPRESSED IN HEART, SIGNAL = 2.4; EXPRESSED IN ADULT LIVER, SIGNAL = 0.78; EXPRESSED IN BONE MARROW, SIGNAL = 1.5; EST_HUMAN HIT: AV763000.1, EVALUE 5.00e-65; NT HIT: gi4502436, EVALUE 3.00e-65; SWISSPROT HIT: P05423, EVALUE 5.00e-27
tcctgcttgatgagtaccacctctctgtccttgccctgtacctctgccttgatgggcttgatgtcctggataggtgggtggccagggagggtgtctggcaactggaggaacagcaattcctcctccttggtgaggctcagctccctgggcagctctgccacggatatgtccttcgggaggcccgggggtcttcctggctgctctggaaggagcctttatcttggcctcctcctcatcttgtagctcctctttca

SEQ ID NO: 16375 - DNA, 213 bp, Homo sapiens
  MAP TO CHRX.1; EXPRESSED IN FETAL LIVER, SIGNAL =   1; EXPRESSED IN PLACENTA, SIGNAL = 1.5; EXPRESSED IN LUNG, SIGNAL = 0.67; EXPRESSED IN BRAIN, SIGNAL = 1.2; EXPRESSED IN BONE MARROW, SIGNAL = 1.2; EXPRESSED IN HEART, SIGNAL = 0.76; EXPRESSED IN ADULT LIVER, SIGNAL = 1.4; NT HIT: AF195953.1, EVALUE 1.00e-116; SWISSPROT HIT: P12689, EVALUE 4.80e+00
tgagttaacaaatgacaatagaattcctgcttagaatgctagggaaataggtttctttgacctcctgggaggaattgtaatcaccaagttttcaaaaggctagggaatcttaactgaaggctgcttttcatttgagacaggaagagacagacacggagggtgagactgataagtgaaagggcgtgaagcaccatttcccccttcaggatgctg

SEQ ID NO: 16376 - DNA, 157 bp, Homo sapiens
  MAP TO CHR17.1; EXPRESSED IN FETAL LIVER, SIGNAL = 1.8; EXPRESSED IN BRAIN, SIGNAL = 1.5; EXPRESSED IN BONE MARROW, SIGNAL = 1.1; EXPRESSED IN ADULT LIVER, SIGNAL = 0.63; EXPRESSED IN PLACENTA, SIGNAL = 3.3; EST_HUMAN HIT: BG747202.1, EVALUE 2.00e-78; NT HIT: gi11321572, EVALUE 1.00e-78; SWISSPROT HIT: P31783, EVALUE 1.10e+00
caggaaagctcatcatctgcaatgtcactggcattgcccacaggcgtccccagggtgagagctatgaccaggcgatccgcaatgatgagacagggctgtggcagtgccccttctgtcagcaggacaatttccctgaactaagcgaggtgtgtgctgc

SEQ ID NO: 16377 - DNA, 110 bp, Homo sapiens
  MAP TO CHR13.1; EXPRESSED IN ADULT LIVER, SIGNAL = 5.5; EXPRESSED IN PLACENTA, SIGNAL = 4.9; EXPRESSED IN FETAL LIVER, SIGNAL = 3.8; EXPRESSED IN BRAIN, SIGNAL = 3.4; EXPRESSED IN LUNG, SIGNAL = 2.5; EXPRESSED IN HEART, SIGNAL = 1.7; EXPRESSED IN BONE MARROW, SIGNAL = 4.1; SWISSPROT HIT: Q62432, EVALUE 2.10e+00; NT HIT: AE007645.1, EVALUE 3.60e-01
ttcaggataatcactctgcaaactgtagacaagagacccagaaaccaccattcttttggtgctgtttagaatttggacaaagagccacagacacatttttgaggtgagga

SEQ ID NO: 16378 - DNA, 190 bp, Homo sapiens
  MAP TO CHR19.1; EXPRESSED IN FETAL LIVER, SIGNAL = 2.3; EXPRESSED IN LUNG, SIGNAL = 3.4; EXPRESSED IN BRAIN, SIGNAL =   3; EXPRESSED IN BONE MARROW, SIGNAL = 3.3; EXPRESSED IN PLACENTA, SIGNAL = 3.5; EXPRESSED IN HELA, SIGNAL = 3.2; EXPRESSED IN HEART, SIGNAL =   3; EXPRESSED IN ADULT LIVER, SIGNAL = 2.1; NT HIT: gi14786855, EVALUE 3.00e-21; SWISSPROT HIT: P57197, EVALUE 1.50e+00; EST_HUMAN HIT: BG749585.1, EVALUE 5.00e-21
ccctgtgcttcctctcatgggaggcctgcacgagttgcccacgtgtgtgcccttggcaccctgcacccacttcctgggaacaggggagggggtcaggaagaggtgggggtgccagcttcccctcttccctgtcctccagtgcccctgggcccccctgagaacattagtgctacgcggaatgggagccagg

SEQ ID NO: 16379 - DNA, 183 bp, Homo sapiens
  MAP TO CHR9.1; EXPRESSED IN HEART, SIGNAL = 0.76; EXPRESSED IN ADULT LIVER, SIGNAL = 1.6; EXPRESSED IN BONE MARROW, SIGNAL = 1.1; EXPRESSED IN FETAL LIVER, SIGNAL = 1.2; EXPRESSED IN LUNG, SIGNAL = 0.59; EXPRESSED IN HELA, SIGNAL = 1.3; EXPRESSED IN BRAIN, SIGNAL = 1.2; NT HIT: AF288818.1, EVALUE 6.40e-01; SWISSPROT HIT: P57620, EVALUE 5.60e+00; EST_HUMAN HIT: AA916145.1, EVALUE 3.70e+00
gagcttttcttttgaggcctttaagaatgttcaaacatgtcttgttagctcactaacaggtccaattgggatgtagaggagatgctggcagcctgtcagatcctgaggcccccaggcactgagattagccccagattgcatcctgggggttagtgtggaactgctaatagctttcagtctttt

SEQ ID NO: 16380 - DNA, 230 bp, Homo sapiens
  MAP TO CHR6.1; EXPRESSED IN HEART, SIGNAL = 0.89; EXPRESSED IN BONE MARROW, SIGNAL = 1.3; EXPRESSED IN PLACENTA, SIGNAL = 1.3; EXPRESSED IN FETAL LIVER, SIGNAL = 0.92; EXPRESSED IN BRAIN, SIGNAL = 1.1; EXPRESSED IN LUNG, SIGNAL = 1.5; NT HIT: AB057764.1, EVALUE 5.00e-30; SWISSPROT HIT: Q9Y2J0, EVALUE 9.00e-03; EST_HUMAN HIT: BI761941.1, EVALUE 1.00e-121
caggaaactgaaaacacacctgcagcatctccggtggaaaggagcgaagaacacggactgggagcacaaagagaagtgctgtgcgcgctgccagcaggtgctggggttcctgctgcaccggggcgccgtgtgccggggctgcagccaccgcgtgtgtgcccagtgccgagtgttcctgagggggacccatgcctggaagtgcacggtgtgcttcgaggacaggtaagcat

SEQ ID NO: 16381 - DNA, 154 bp, Homo sapiens
  MAP TO CHR8.1; EXPRESSED IN PLACENTA, SIGNAL = 6.4; EXPRESSED IN FETAL LIVER, SIGNAL = 5.3; EXPRESSED IN BONE MARROW, SIGNAL = 6.4; EXPRESSED IN LUNG, SIGNAL = 4.4; EXPRESSED IN BRAIN, SIGNAL =   6; EXPRESSED IN HELA, SIGNAL =   6; EXPRESSED IN HEART, SIGNAL = 3.4; EXPRESSED IN ADULT LIVER, SIGNAL = 3.8; EST_HUMAN HIT: BE274855.1, EVALUE 8.00e-35; NT HIT: gi6677620, EVALUE 4.00e-14; SWISSPROT HIT: Q9ZM46, EVALUE 8.80e-01
ctcctttctctccagaatgctggggttagatctggtggtgcgagatgacaatgggaacatcctagaccctgacgaaaccagcaccattgccctcttcaaggcccatgaggtggcctccaaaaggattgaggaaaagatccaagaagagaaggta

SEQ ID NO: 16382 - DNA, 206 bp, Homo sapiens
  MAP TO CHR11.1; EXPRESSED IN PLACENTA, SIGNAL = 1.5; EXPRESSED IN FETAL LIVER, SIGNAL = 1.7; EXPRESSED IN LUNG, SIGNAL = 1.4; EXPRESSED IN BRAIN, SIGNAL = 1.3; EXPRESSED IN HEART, SIGNAL = 1.1; EXPRESSED IN ADULT LIVER, SIGNAL =   1; EXPRESSED IN BONE MARROW, SIGNAL = 1.2; EST_HUMAN HIT: BG999262.1, EVALUE 1.00e-106; NT HIT: M21901.1, EVALUE 1.00e-110; SWISSPROT HIT: P08195, EVALUE 4.00e-15
cccaccagcatggtactcacactccagctgcaccagcgattgccagtggcattcaaatactgtgtgactagggattttgtatgctccccagtagaaccagaatcagacaggtatgagctagtcaacagcaagtctttgttggattcgagtaggctcaggatctgctgaaggtcggaggagttagtccccgcaatcaagagcctgca

SEQ ID NO: 16383 - DNA, 159 bp, Homo sapiens
  MAP TO CHR20.1; EXPRESSED IN HELA, SIGNAL = 2.1; EXPRESSED IN BRAIN, SIGNAL = 1.5; EXPRESSED IN HEART, SIGNAL = 1.7; EXPRESSED IN BONE MARROW, SIGNAL = 1.6; EXPRESSED IN FETAL LIVER, SIGNAL =   2; EXPRESSED IN PLACENTA, SIGNAL = 1.7; EXPRESSED IN LUNG, SIGNAL =   2; SWISSPROT HIT: Q15269, EVALUE 5.00e-23; EST_HUMAN HIT: N56712.1, EVALUE 1.00e-79; NT HIT: U56089.1, EVALUE 2.00e-84
tacctggacttcagcttctgtccgtgcaacatgagcagtttgtgagtccagaggaggtagaattccaggtggcgagacacttcaaaggaggaagctaaaaactccagcactttctccacatacagttcaggaagggaggaggtgaccacttcaactgca

SEQ ID NO: 16384 - DNA, 118 bp, Homo sapiens
  MAP TO CHR22.1; EXPRESSED IN HEART, SIGNAL = 1.4; EXPRESSED IN BONE MARROW, SIGNAL = 1.3; EXPRESSED IN PLACENTA, SIGNAL = 1.5; EXPRESSED IN FETAL LIVER, SIGNAL = 1.4; EXPRESSED IN LUNG, SIGNAL = 1.4; EXPRESSED IN HELA, SIGNAL = 1.8; EXPRESSED IN BRAIN, SIGNAL = 1.4; NT HIT: X81844.1, EVALUE 1.00e-47; SWISSPROT HIT: P54198, EVALUE 2.00e-14; EST_HUMAN HIT: AU121562.1, EVALUE 4.00e-48
ctgtcttctttcagatgtgatggatgtagcatggtctccccacgatgcctggctagcctcatgcagcgtggataacactgtcgtcatctggaatgctgtaaagttcccaggtctgggg

SEQ ID NO: 16385 - DNA, 251 bp, Homo sapiens
  MAP TO CHRX.1; EXPRESSED IN BONE MARROW, SIGNAL = 0.42; EXPRESSED IN FETAL LIVER, SIGNAL = 0.39; EXPRESSED IN BRAIN, SIGNAL = 0.4; EXPRESSED IN LUNG, SIGNAL = 0.6; SWISSPROT HIT: Q9XT26, EVALUE 1.90e+00; NT HIT: gi8924241, EVALUE 1.00e-12; EST_HUMAN HIT: BG680761.1, EVALUE 1.00e-129
ctacttacttcgaccaaactttcgaacttccttcattaattgatgttttatatcagcattgattccttgtgccatagcaggagtgatttgtaatgtatttggcatagctcccaaagtagatgctactgggtctttttggtcatctacggagagactgcagtttttggctcctcctacaaatgcgttactaccaggtttttgaatcagcccatctttgctgagacttgtgaagtcgtcagacagagaatcca

SEQ ID NO: 16386 - DNA, 300 bp, Homo sapiens
  MAP TO CHR6.1; EXPRESSED IN BONE MARROW, SIGNAL =   1; EXPRESSED IN HEART, SIGNAL = 0.6; EXPRESSED IN ADULT LIVER, SIGNAL = 0.81; EXPRESSED IN PLACENTA, SIGNAL = 1.3; EXPRESSED IN LUNG, SIGNAL = 0.7; EXPRESSED IN BRAIN, SIGNAL = 0.91; NT HIT: gi14783018, EVALUE 1.00e-125; SWISSPROT HIT: Q9ULD4, EVALUE 1.00e-23; EST_HUMAN HIT: BG983545.1, EVALUE 3.00e-45
gtaggagcagactctttctaaaatgttcaagcagattctctttttttctaatagatgactccaaactgcctcctccgccaaccctggagcccactgggcctgcaccttccttgtctgagcaagaatcccccccggagccccctactctgaaacccattaatgatagcaaacctccaagcaggttcctaaagcccagaaaggtggaagaagatgagctcttggaaaaatcaccactgcagctagggaatgagcctttgcaacgcttgctcagtgacaatggcatcaacagactatccctca

SEQ ID NO: 16387 - DNA, 204 bp, Homo sapiens
  MAP TO CHR18.1; EXPRESSED IN BRAIN, SIGNAL = 0.5; EXPRESSED IN BONE MARROW, SIGNAL = 0.46; EXPRESSED IN FETAL LIVER, SIGNAL = 0.63; NT HIT: AF224506.1, EVALUE 1.80e-01; SWISSPROT HIT: O15084, EVALUE 4.00e-07; EST_HUMAN HIT: BG545518.1, EVALUE 1.00e-21
ttacctggagactgggatgacagccaaagtccaataaagtcttcacaacttgaagatgacctttattgacagcaatatgaagtggtgtctgtcggcgcttgtttcgagcattcaaatcagcactacctcgatgtagtacttctataacagcgccttcatctccaaaagctgcatggtgaactgctctatcaccatctttatcct

SEQ ID NO: 16388 - DNA, 192 bp, Homo sapiens
  MAP TO CHR17.1; EXPRESSED IN ADULT LIVER, SIGNAL = 1e+02; EXPRESSED IN BONE MARROW, SIGNAL = 0.53; EXPRESSED IN HELA, SIGNAL = 0.47; EXPRESSED IN BRAIN, SIGNAL = 0.55; EXPRESSED IN HEART, SIGNAL = 0.96; NT HIT: AF382388.1, EVALUE 1.00e-103; SWISSPROT HIT: P04004, EVALUE 8.00e-27; EST_HUMAN HIT: T79663.1, EVALUE 2.00e-94
agaagcaagacttgccctctctccataccagaggttctgccccagaagagaagctcgaagatgtcctcccagctgtcccgctgcatcatggcaaagtgttcaaacacagccgacagggagctgccttcacactcctcctgactgggctggtgctggaactggtactcccagtactgtttccctgaggagcag

SEQ ID NO: 16389 - DNA, 277 bp, Homo sapiens
  MAP TO CHR17.1; EXPRESSED IN BRAIN, SIGNAL = 0.8; EXPRESSED IN ADULT LIVER, SIGNAL = 0.75; EXPRESSED IN HEART, SIGNAL = 0.85; EXPRESSED IN BONE MARROW, SIGNAL = 0.97; EST_HUMAN HIT: BE564528.1, EVALUE 0.00e+00; NT HIT: gi14772899, EVALUE 0.00e+00; SWISSPROT HIT: P38398, EVALUE 6.00e-50
gtgctgggagtccgcctatcattacatgtttccttacttccagcccatctgttatgttggctccttgctaagccaggctgtttgcttttattacagaattcagccttttctacattcattctgtctttagtgagtaataaactgctgttctcatgctgtaatgagctggcatgagtatttgtgccacatggctccacatgcaagtttgaaacagaactaccctgatacttttctggatgcctctcagctgcacgcttctcagtggtgttcaaatcat

SEQ ID NO: 16390 - DNA, 185 bp, Homo sapiens
  MAP TO CHR7.1; EXPRESSED IN LUNG, SIGNAL = 0.68; EXPRESSED IN BRAIN, SIGNAL = 1.1; EXPRESSED IN HEART, SIGNAL = 0.65; EXPRESSED IN ADULT LIVER, SIGNAL = 0.7; EXPRESSED IN BONE MARROW, SIGNAL = 1.1; EST_HUMAN HIT: AU138873.1, EVALUE 9.60e-01; NT HIT: gi4504148, EVALUE 4.00e-73; SWISSPROT HIT: O00222, EVALUE 6.00e-25
tacctgtgcatttctttatatgactgttccttttcccatgtgatcctaacttgcagccaaaattctcctcccagaattctgcaaaccacacatttcttcgattattggcaagagttcggcttctaaagtatcgatcaaatcctatttcaaaggagaaaggtatgattttaatattctttcaaaat

SEQ ID NO: 16391 - DNA, 351 bp, Homo sapiens
  MAP TO CHR19.1; EXPRESSED IN ADULT LIVER, SIGNAL = 5.8; EXPRESSED IN FETAL LIVER, SIGNAL = 4.2; EXPRESSED IN BRAIN, SIGNAL = 3.2; EXPRESSED IN PLACENTA, SIGNAL = 5.8; EXPRESSED IN LUNG, SIGNAL = 2.4; EXPRESSED IN HELA, SIGNAL =  10; EXPRESSED IN HEART, SIGNAL = 2.3; EXPRESSED IN BONE MARROW, SIGNAL =   4; SWISSPROT HIT: P51617, EVALUE 5.30e-01; EST_HUMAN HIT: BF516466.1, EVALUE 0.00e+00; NT HIT: gi13645425, EVALUE 5.00e-03
acctgggcgtcctggtagccctggagcagcaggaagtaggggcggttgctgggggcctggatgaggcactgagtcaactgatcgaagtccccggggtctgcagttccgatttgggcgtcggctgcccctggggccatgctaagtgcctgctgtctccgctcctgctgccgccgccgccgcccctgaaggctaagctccgacacgctgcgccgcaaagacaagttttctgagcgctccttgcctccagacccagctggggcccctgatccggtccccgggccaggactggccagcgctgccccacccgacgccgcccgggagcggttcttctgtggccgccacgaaggggcg

SEQ ID NO: 16392 - DNA, 282 bp, Homo sapiens
  MAP TO CHR12.1; EXPRESSED IN ADULT LIVER, SIGNAL = 0.92; EXPRESSED IN FETAL LIVER, SIGNAL = 1.1; EXPRESSED IN BRAIN, SIGNAL = 1.3; EXPRESSED IN LUNG, SIGNAL = 1.1; EXPRESSED IN HEART, SIGNAL =   1; NT HIT: gi14763847, EVALUE 1.00e-129; SWISSPROT HIT: P36896, EVALUE 7.00e-40; EST_HUMAN HIT: BF949313.1, EVALUE 1.00e-124
tttgtcaaatttgcaatgtcaggtttcttcctattctttggttcacagggttacccctctttgtccagcgcacagtggcccgaaccatcgttttacaagagattattggcaagggtcggtttggggaagtatggcggggccgctggaggggtggtgatgtggctgtgaaaatattctcttctcgtgaagaacggtcttggttcagggaagcagagatataccagacggtcatgctgcgccatgaaaacatccttggatttattgctgctgacaataaaggta

SEQ ID NO: 16393 - DNA, 204 bp, Homo sapiens
  MAP TO CHR8.1; EXPRESSED IN FETAL LIVER, SIGNAL = 5.7; EXPRESSED IN HELA, SIGNAL = 5.5; EXPRESSED IN BRAIN, SIGNAL = 6.8; EXPRESSED IN LUNG, SIGNAL = 5.6; EXPRESSED IN HEART, SIGNAL = 4.4; EXPRESSED IN BONE MARROW, SIGNAL = 7.2; EXPRESSED IN PLACENTA, SIGNAL = 5.3; SWISSPROT HIT: P58099, EVALUE 3.70e-01; NT HIT: AF110520.1, EVALUE 1.00e-109
gagaggggcaccagcacatttgaagggttttgttctttcccttttccttgtgccagatcttagcattggagatgcttctgctcaattagatgaattaaattcactgggtttagttggattccgaggtaacaagggccaggtggcagcattgaatcgcccgagacaaggtgattctagttattataatggacagcgtagacaaaa

SEQ ID NO: 16394 - DNA, 244 bp, Homo sapiens
  MAP TO AC023121.3; EXPRESSED IN ADULT LIVER, SIGNAL = 1.1; EXPRESSED IN BONE MARROW, SIGNAL = 1.1; EXPRESSED IN HEART, SIGNAL = 0.72; EXPRESSED IN FETAL LIVER, SIGNAL = 0.93; EXPRESSED IN BRAIN, SIGNAL = 1.2; NT HIT: gi4885084, EVALUE 1.00e-119; SWISSPROT HIT: Q93050, EVALUE 3.00e-38; EST_HUMAN HIT: AU119028.1, EVALUE 1.00e-119
tcctttttagctatttcaagaagcccctgaatatctactttggatttattcctgaaataatcttcatgacctctttgtttggctatttggttatccttattttttacaagtggacggcctatgatgctcatacctctgagaatgcaccaagccttctgatccatttcataaacatgttcctcttttcctacccagagtctggttattcaatgttgtattctggacaggtacgtcagcccagagg

SEQ ID NO: 16395 - DNA, 121 bp, Homo sapiens
  MAP TO CHR5.1; EXPRESSED IN BONE MARROW, SIGNAL = 0.88; EXPRESSED IN ADULT LIVER, SIGNAL =   1; EXPRESSED IN FETAL LIVER, SIGNAL = 0.94; EXPRESSED IN LUNG, SIGNAL = 0.91; EXPRESSED IN BRAIN, SIGNAL = 0.78; EXPRESSED IN HEART, SIGNAL = 1.2; NT HIT: AF083133.1, EVALUE 4.00e-01; EST_HUMAN HIT: BF947285.1, EVALUE 8.00e-62
cagcataggaagcggagtgttaggtcgcagcgtcagtgggtctaggttatctgcagaagcaaagagccaaatgaagcacacagaaaccagcagagtgggctccgcagggaagtctcctctc

SEQ ID NO: 16396 - DNA, 195 bp, Homo sapiens
  MAP TO CHR16.1; EXPRESSED IN FETAL LIVER, SIGNAL = 1.9; EXPRESSED IN BRAIN, SIGNAL = 1.8; EXPRESSED IN LUNG, SIGNAL = 2.1; EXPRESSED IN HEART, SIGNAL =   2; EXPRESSED IN BONE MARROW, SIGNAL = 1.8; EXPRESSED IN ADULT LIVER, SIGNAL = 2.1; EXPRESSED IN PLACENTA, SIGNAL = 1.7; SWISSPROT HIT: P12830, EVALUE 2.00e-22; NT HIT: AB025105.1, EVALUE 1.00e-106; EST_HUMAN HIT: BI091629.1, EVALUE 1.00e-105
agtcccctagtcgtcctcgccgcctccgtacatgtcagccagcttcttgaagcgattgccccattcgttcaagtagtcatagtcctggtctttgtctgactctgaggagttcagggagctcagactagcagcttcggaaccgcttccttcatagtcaaacacgagcagagaatcataaggcggggctgtggggtc

SEQ ID NO: 16397 - DNA, 184 bp, Homo sapiens
  MAP TO CHR14.1; EXPRESSED IN ADULT LIVER, SIGNAL = 1.3; EXPRESSED IN PLACENTA, SIGNAL = 2.8; EXPRESSED IN FETAL LIVER, SIGNAL = 1.2; EXPRESSED IN LUNG, SIGNAL = 1.6; EXPRESSED IN BRAIN, SIGNAL = 0.75; EXPRESSED IN HEART, SIGNAL = 1.5; SWISSPROT HIT: Q08274, EVALUE 4.30e+00; NT HIT: gi5031984, EVALUE 2.00e-81; EST_HUMAN HIT: BE298477.1, EVALUE 3.00e-81
cactcctccagatgctccaaatatcatgcacaaatgagcagggccgtggcgggagtgggtgcagtgcgctgctgccgccgaggtgttgtgcatgatgtttggacgctagactagttgcatctgacgggagaagtttgtattgtaccagcgcatgccttggaaagacttaagtaatgcaaaagat

SEQ ID NO: 16398 - DNA, 216 bp, Homo sapiens
  MAP TO CHR20.1; EXPRESSED IN ADULT LIVER, SIGNAL = 0.74; EXPRESSED IN PLACENTA, SIGNAL = 1.6; EXPRESSED IN FETAL LIVER, SIGNAL = 0.98; EXPRESSED IN LUNG, SIGNAL = 1.3; EXPRESSED IN BRAIN, SIGNAL = 1.3; EXPRESSED IN BONE MARROW, SIGNAL = 0.86; EXPRESSED IN HEART, SIGNAL = 1.1; SWISSPROT HIT: P10686, EVALUE 1.00e-35; NT HIT: gi4505868, EVALUE 1.00e-112; EST_HUMAN HIT: BE168239.1, EVALUE 1.00e-111
caggcggaacgggaaagtccagcactgccgtatccactcccggcaagatgctgggacccccaagttcttcttgacagacaacctcgtctttgactccctctatgacctcatcacgcactaccagcaggtgcccctgcgctgtaatgagtttgagatgcgactttcagagcctgtcccacagaccaacgcccacgagagcaaagagtgagggaaggg

SEQ ID NO: 16399 - DNA, 259 bp, Homo sapiens
  MAP TO CHR17.1; EXPRESSED IN HELA, SIGNAL = 1.1; EXPRESSED IN BRAIN, SIGNAL = 1.2; EXPRESSED IN HEART, SIGNAL = 0.63; EXPRESSED IN ADULT LIVER, SIGNAL = 0.94; EXPRESSED IN BONE MARROW, SIGNAL = 1.3; EST_HUMAN HIT: BF743607.1, EVALUE 8.80e-02; SWISSPROT HIT: Q9RRR1, EVALUE 2.60e+00; NT HIT: gi13652329, EVALUE 0.00e+00
tgttttcaacagatctctcgtctcaatcaggaggtgtctcagcttagccgggagctgcggcacatcatgggcctgctgcaggccaggtctgggtcccccaggccacccagcaggctccgcttggaccccagaccctccttgtccacagctgaggccaccatgcctctctccttgtgcgtccagaccaccacccagcctccaggatactacgcttgctgaagttcactgcccagccagtgtggggaccatggagacaggg

SEQ ID NO: 16400 - DNA, 109 bp, Homo sapiens
  MAP TO CHR5.1; EXPRESSED IN LUNG, SIGNAL = 0.73; EXPRESSED IN BRAIN, SIGNAL = 0.74; EXPRESSED IN HEART, SIGNAL = 0.9; EST_HUMAN HIT: AL119615.1, EVALUE 8.00e-03
ctgtcctcattattgttgtgcattaattattttcttcaattatattggcaaaaaaggctttcaaaaccaagcagtttaatgattctaaaagtttaatctcctttatctt

SEQ ID NO: 16401 - DNA, 123 bp, Homo sapiens
  MAP TO CHR20.1; EXPRESSED IN FETAL LIVER, SIGNAL = 0.29; EXPRESSED IN BRAIN, SIGNAL = 0.39; EXPRESSED IN BONE MARROW, SIGNAL = 0.39; EST_HUMAN HIT: BE379132.1, EVALUE 1.00e-57; SWISSPROT HIT: O00764, EVALUE 4.00e-15; NT HIT: gi14780635, EVALUE 8.00e-58
ggcacttactcctcctctgactccccagcacaatcaggtagttgctgccctgcggggagggcaggtcggagctggtgatgaccacggtgtcggggcccatagagtgcagcatgtccatcacct

SEQ ID NO: 16402 - DNA, 141 bp, Homo sapiens
  MAP TO CHR6.1; EXPRESSED IN FETAL LIVER, SIGNAL = 0.97; EXPRESSED IN BRAIN, SIGNAL = 0.85; EXPRESSED IN HEART, SIGNAL = 0.74; EXPRESSED IN ADULT LIVER, SIGNAL = 1.5; EST_HUMAN HIT: BE788746.1, EVALUE 7.00e-69; SWISSPROT HIT: P38661, EVALUE 2.00e-06; NT HIT: gi14749147, EVALUE 4.00e-69
taggtgtggtcattgtaagactctggctcctacttgggaggaactctctaaaaaggaattccctggtctggcgggggtcaagatcgccgaagtagactgcactgctgaacggaatatctgcagcaagtattcggtgggtac

SEQ ID NO: 16403 - DNA, 165 bp, Homo sapiens
  MAP TO CHR19.1; EXPRESSED IN LUNG, SIGNAL = 0.79; EXPRESSED IN HELA, SIGNAL = 1.9; EXPRESSED IN BRAIN, SIGNAL = 1.8; EXPRESSED IN PLACENTA, SIGNAL = 1.9; EXPRESSED IN FETAL LIVER, SIGNAL = 1.5; EXPRESSED IN HEART, SIGNAL = 0.72; EXPRESSED IN BONE MARROW, SIGNAL = 1.5; EXPRESSED IN ADULT LIVER, SIGNAL = 0.99; SWISSPROT HIT: P42859, EVALUE 8.70e-01; NT HIT: gi14764433, EVALUE 3.00e-86; EST_HUMAN HIT: BG745782.1, EVALUE 6.00e-79
caaagagctcttaccagttcttctcggtgaggatcgtgtgtgacagctgtggccgggccatggacatcacttggctccggagcttgctcaccaaggactggaaactggggtggccacgatacccaggcagcagggagaagagtgggctggaaccaggtcctggaa

SEQ ID NO: 16404 - DNA, 134 bp, Homo sapiens
  MAP TO CHR1.1; EXPRESSED IN BONE MARROW, SIGNAL = 0.86; EXPRESSED IN HEART, SIGNAL = 0.62; EXPRESSED IN ADULT LIVER, SIGNAL = 0.93; EXPRESSED IN PLACENTA, SIGNAL = 1.3; EXPRESSED IN FETAL LIVER, SIGNAL = 1.1; EXPRESSED IN HELA, SIGNAL =   1; EXPRESSED IN BRAIN, SIGNAL =   1; EST_HUMAN HIT: BG212935.1, EVALUE 2.00e-65; NT HIT: gi16159689, EVALUE 2.00e-65
acatacccagttgtgtccatgaactctttgccactgcctggatctacacataagggcagctcttgggccccttccaggtcctgcccatgctgcatatctgtcagggtgcagaaggatgccaccctctggtctgg

SEQ ID NO: 16405 - DNA, 244 bp, Homo sapiens
  MAP TO CHR14.1; EXPRESSED IN BONE MARROW, SIGNAL =  36; EXPRESSED IN ADULT LIVER, SIGNAL = 1.2; EXPRESSED IN PLACENTA, SIGNAL =  29; EXPRESSED IN HELA, SIGNAL =  22; EXPRESSED IN FETAL LIVER, SIGNAL =  34; EXPRESSED IN LUNG, SIGNAL =  41; EXPRESSED IN BRAIN, SIGNAL =  27; EXPRESSED IN HEART, SIGNAL =  35; EST_HUMAN HIT: AA724777.1, EVALUE 1.00e-115; SWISSPROT HIT: Q92813, EVALUE 4.00e-37; NT HIT: AB039888.1, EVALUE 1.00e-122
aggaggcagagaagatgggcatcctcagcgtagacttgctgatcacactgcaaattctgccagtttttttctccaactgcctcttcctggctctctatgactcggtcattctgctcaagcacgtggtgctgctgttgagccgctccaagtccactcgcggagagtggcggcgcatgctgacctcagagggactgcgctgcgtctggaagagcttcctcctcgatgcctacaaacaggtgagctg

SEQ ID NO: 16406 - DNA, 410 bp, Homo sapiens
  MAP TO AC007873.4; EXPRESSED IN FETAL LIVER, SIGNAL = 0.82; EXPRESSED IN LUNG, SIGNAL = 1.2; EXPRESSED IN HELA, SIGNAL = 0.65; EXPRESSED IN BRAIN, SIGNAL = 0.59; EXPRESSED IN HEART, SIGNAL = 0.88; EXPRESSED IN BONE MARROW, SIGNAL = 0.65; EST_HUMAN HIT: BG419335.1, EVALUE 0.00e+00; SWISSPROT HIT: P56094, EVALUE 5.20e-01; NT HIT: X16778.1, EVALUE 3.90e-01
  unsure 27
  unsure 32
  unsure 34
  unsure 84
  unsure 216
  unsure 222
  unsure 236
ccctgaagcaggagctgccgcggagcntgcancngggctgagcggaaactggctggcgtactggcagtacgagatcggcgtgancgagcaggatgcccactttcacttccaccagatccgcctgcagagcttcccgggccactcgggggccgtcaagtgcgtggcacccctaagcagcgaggacttcttcctgagcggcagcaaggatcgtaccgntgcgcnctctggccgctgtnacaactacggcgacgggaccagcgagacggccccacgcctcgtctacacccagcaccgcaagagcgtcttcttcgtgggccagcttgaggccccgcagcacgtggtgagctgtgacggggctgtgcacgtctgggaccccttcacaggtgagcgggcccaggtgaggcctgttc

SEQ ID NO: 16407 - DNA, 301 bp, Homo sapiens
  MAP TO CHR6.1; EXPRESSED IN BRAIN, SIGNAL = 5.1; EXPRESSED IN HEART, SIGNAL = 2.6; EXPRESSED IN ADULT LIVER, SIGNAL = 5.5; EXPRESSED IN BONE MARROW, SIGNAL = 5.1; EXPRESSED IN PLACENTA, SIGNAL = 4.9; EXPRESSED IN FETAL LIVER, SIGNAL =   6; EXPRESSED IN LUNG, SIGNAL = 2.4; EST_HUMAN HIT: BG113166.1, EVALUE 0.00e+00; SWISSPROT HIT: P78956, EVALUE 1.20e+00; NT HIT: gi13385375, EVALUE 8.00e-88
ccctaatcctgaaagtcgttagaagccatctgagaaagtggggcatttagccggtcaagttcatccacttggggtgggtgatgcattaatatctcctggtcctccaagacatcatctccagcagctaccagattcgtgagggatttgcttcgaacacactggaaatccacatggcgactcttcccttcttccttttcccatgacatctggatgaaggggcgttgtacataattatagatgacttcagaccggccgccaggccttctcttaattttttctttacaggtagggtaacctgcaa

SEQ ID NO: 16408 - DNA, 186 bp, Homo sapiens
  MAP TO CHRX.1; EXPRESSED IN FETAL LIVER, SIGNAL = 0.69; EXPRESSED IN HELA, SIGNAL = 0.86; EXPRESSED IN BRAIN, SIGNAL = 0.86; EXPRESSED IN LUNG, SIGNAL = 0.71; EXPRESSED IN HEART, SIGNAL = 0.72; EXPRESSED IN BONE MARROW, SIGNAL = 0.9; EXPRESSED IN ADULT LIVER, SIGNAL = 0.79; EST_HUMAN HIT: AA629975.1, EVALUE 2.40e-01; SWISSPROT HIT: P35556, EVALUE 8.50e-01; NT HIT: AJ132817.2, EVALUE 6.50e-01
atccaggtgggaagcaatatcctcatgaatgagggaatcctctacaaaatgaattactacaaatggagaagcagatcttaagcaataagcattcctcattttgaactgcatcaacatttctgcaattgcatccagttccaaatagagtttctggactgattctaagatgtttttcaatcccaatct

SEQ ID NO: 16409 - DNA, 219 bp, Homo sapiens
  MAP TO CHR17.1; EXPRESSED IN BRAIN, SIGNAL = 0.79; EXPRESSED IN BONE MARROW, SIGNAL = 0.73; EXPRESSED IN HEART, SIGNAL = 0.91; EXPRESSED IN ADULT LIVER, SIGNAL = 1.1; EXPRESSED IN FETAL LIVER, SIGNAL = 0.7; EXPRESSED IN LUNG, SIGNAL = 0.7; NT HIT: gi14773985, EVALUE 1.00e-117; EST_HUMAN HIT: BI333833.1, EVALUE 1.00e-117; SWISSPROT HIT: P23757, EVALUE 6.00e-01
ttacctcagatgccacgtcgtccttaatgacaatgttgctgatcttgcccagaagctgcgccagggaggtaagggtggtggtggctgtggccaggttctccactgaccgagcccagagcagccggtctagctcccaggtcattagcccttcactcgtaggccctgaaagcaggcattttggaggcagctggggctgagcaatcccaaagagcaacctgt

SEQ ID NO: 16410 - DNA, 182 bp, Homo sapiens
  MAP TO CHRX.1; EXPRESSED IN FETAL LIVER, SIGNAL = 0.87; EXPRESSED IN LUNG, SIGNAL = 1.2; EXPRESSED IN HELA, SIGNAL = 0.85; EXPRESSED IN BRAIN, SIGNAL = 1.1; EXPRESSED IN HEART, SIGNAL = 1.2; EXPRESSED IN ADULT LIVER, SIGNAL = 1.1; SWISSPROT HIT: Q13474, EVALUE 4.00e-28; NT HIT: gi14757195, EVALUE 3.00e-89; EST_HUMAN HIT: AU118913.1, EVALUE 5.00e-89
cttaccggaggttgtgagacttcttttttatttcattccaacacagattcatggctggtggttccaggggtccagaggcaccaacagacccgttcaacagctttaggcttaggcagggaaccccagcaccatcttgaggaggtgcagggctggtgacagcagctctaacctggacagaaaca

SEQ ID NO: 16411 - DNA, 173 bp, Homo sapiens
  MAP TO CHR2.1; EXPRESSED IN FETAL LIVER, SIGNAL = 0.84; EXPRESSED IN BRAIN, SIGNAL = 0.67; EXPRESSED IN ADULT LIVER, SIGNAL = 0.69; EXPRESSED IN BONE MARROW, SIGNAL = 0.79; EST_HUMAN HIT: AU136648.1, EVALUE 1.00e-83; SWISSPROT HIT: P27487, EVALUE 3.00e-17; NT HIT: gi14720334, EVALUE 7.00e-84
acatacctttgggtatggaatatttattgttctaggatattgttcatcgccataataggaataggcaataactggtatatccgtatcattaaattccgcatatgccaaaaattttccattaggagaccaccagagagcatattttgtagcaagcatttcctctgaaaaataag

SEQ ID NO: 16412 - DNA, 249 bp, Homo sapiens
  MAP TO CHR17.1; EXPRESSED IN HEART, SIGNAL = 1.2; EXPRESSED IN BONE MARROW, SIGNAL = 1.5; EXPRESSED IN PLACENTA, SIGNAL = 1.4; EXPRESSED IN FETAL LIVER, SIGNAL = 1.2; EXPRESSED IN HELA, SIGNAL = 1.3; EXPRESSED IN LUNG, SIGNAL = 1.1; EXPRESSED IN BRAIN, SIGNAL = 1.5; EST_HUMAN HIT: BF982335.1, EVALUE 1.00e-126; SWISSPROT HIT: P51954, EVALUE 3.00e-13; NT HIT: AF407579.1, EVALUE 5.00e-70
tgggccacaggcggcactctggctgagttcatccaaaagcgctgtaattccctgctggaggaggagaccatcctgcacttcttcgtgcagatcctgcttgcactgcatcatgtgcacacccacctcatcctgcaccgagacctcaagacccagaacatcctgcttgacaaacaccgcatggtcgtcaagatcggtgatttcggcatctccaagatccttagcagcaagagcaaggcctacacggtgcct

SEQ ID NO: 16413 - DNA, 224 bp, Homo sapiens
  MAP TO CHR16.1; EXPRESSED IN BRAIN, SIGNAL = 1.3; EXPRESSED IN HEART, SIGNAL =   1; EXPRESSED IN ADULT LIVER, SIGNAL = 1.8; EXPRESSED IN BONE MARROW, SIGNAL = 1.5; EXPRESSED IN FETAL LIVER, SIGNAL = 1.4; EXPRESSED IN HELA, SIGNAL = 1.5; EXPRESSED IN LUNG, SIGNAL =   1; EST_HUMAN HIT: AA493227.1, EVALUE 1.00e-117; SWISSPROT HIT: Q9KZV6, EVALUE 3.30e+00; NT HIT: gi15317918, EVALUE 1.00e-119
tccttaccgcctgctggcagttcattccaaggttccccttctcccctcgaactactttcatcagacagtgtagggtccgcccttttcgatgtaatccggaacaatggtgttcaatctccccccgacagcttaggatgatctcagggctcagagaaaagtcttccatcaacatgcgtcggtaatccagcatctccccctggcactcactgctgacttgtcgccct

SEQ ID NO: 16414 - DNA, 230 bp, Homo sapiens
  MAP TO CHR3.1; EXPRESSED IN BRAIN, SIGNAL = 0.92; EXPRESSED IN LUNG, SIGNAL = 0.73; EXPRESSED IN HEART, SIGNAL = 0.85; EXPRESSED IN ADULT LIVER, SIGNAL = 1.3; EXPRESSED IN BONE MARROW, SIGNAL = 0.87; EST_HUMAN HIT: AV708732.1, EVALUE 1.00e-100; SWISSPROT HIT: O60344, EVALUE 4.00e-32; NT HIT: AF192531.1, EVALUE 1.00e-100
gctccacactagacaccatatgcccccatgtctgtcctggcccgcaggtgtggtgctcggtccgcacaccagagagctctcacgaggggctggtgaccgacccccacagccctgcccgcttccgcgtgctgggcactctctccaactcccgtgacttcctgcggcacttcggctgccctgtcggctcccccatgaacccagggcagctgtgtgaggtgtggtagacctgg

SEQ ID NO: 16415 - DNA, 398 bp, Homo sapiens
  MAP TO CHR1.1; EXPRESSED IN BONE MARROW, SIGNAL = 0.83; EXPRESSED IN LUNG, SIGNAL =   1; EXPRESSED IN BRAIN, SIGNAL = 0.97; SWISSPROT HIT: Q02817, EVALUE 2.50e-02; NT HIT: gi16159697, EVALUE 0.00e+00; EST_HUMAN HIT: BE152441.1, EVALUE 0.00e+00
ggcttacctggaatgagaggatatctcactgagatcgcccatgctgccttccgcagcactgccggcggagatggtggacgcgtagccatgcacagaatataacttggctggctcgtcgtcaggcccagagacgtcggcagcatcagcccactgctcggcccggctgtggatcagggacctgctgcctgccaggtgcacagggccgaggatggtggcaggcatgcagggggccgtgtcgatgccactgtcggtggaggcccctttgatgtaggtcagccccagtaattcggggtccatcaggtcgccagacccaaagtgcttgtcgtcactgttgctggaggtgttgctggagagcgtgttgctgctggagtgactggagcaacttttatccccaatct

SEQ ID NO: 16416 - DNA, 309 bp, Homo sapiens
  MAP TO CHR2.1; EXPRESSED IN LUNG, SIGNAL = 0.72; EXPRESSED IN BRAIN, SIGNAL = 0.8; EXPRESSED IN HEART, SIGNAL = 2.8; EXPRESSED IN BONE MARROW, SIGNAL = 0.79; SWISSPROT HIT: Q63518, EVALUE 3.00e-09; NT HIT: gi4507720, EVALUE 0.00e+00; EST_HUMAN HIT: BF091531.1, EVALUE 0.00e+00
taatcttttccaattcagaggccccagaaatcttcctcgatgtgaagctccttgctggtctcactgtaaaagctgggaccaagattgaacttcctgccaccgtaaccggaaaacctgaacctaaaataacttggacaaaggctgatatgattctgaagcaggacaaaagaattaccattgaaaatgtccctaagaaatccacagtgactattgttgatagtaagagaagtgacactggcacatatatcattgaggctgtgaatgtgtgtggccgggcactgctgtggtggaagtgaacgtcttaggtaa

SEQ ID NO: 16417 - DNA, 182 bp, Homo sapiens
  MAP TO AC060233.1; EXPRESSED IN PLACENTA, SIGNAL = 1.5; EXPRESSED IN FETAL LIVER, SIGNAL =   1; EXPRESSED IN LUNG, SIGNAL = 1.9; EXPRESSED IN HELA, SIGNAL = 1.1; EXPRESSED IN BRAIN, SIGNAL = 1.2; EXPRESSED IN HEART, SIGNAL = 1.7; EXPRESSED IN BONE MARROW, SIGNAL = 1.2; EST_HUMAN HIT: BG425960.1, EVALUE 2.40e-01; SWISSPROT HIT: P06491, EVALUE 1.30e-01; NT HIT: AF250330.1, EVALUE 4.10e-02
gaggggagctggcaggagggaacaagggcatgcaaatgggacctgacaggggccgggcacctcaggcaaagaatgtaaataaaaatcggtaaatatttaggggaaatggagcgggaagtgggagagggagggtggaggggacgtgttggatttccaacaacatctggagggcagtcctctcc

SEQ ID NO: 16418 - DNA, 416 bp, Homo sapiens
  MAP TO CHR12.1; EXPRESSED IN BONE MARROW, SIGNAL = 0.48; EXPRESSED IN HEART, SIGNAL = 0.58; EXPRESSED IN ADULT LIVER, SIGNAL = 0.53; EXPRESSED IN FETAL LIVER, SIGNAL = 0.66; EXPRESSED IN BRAIN, SIGNAL = 0.45; EST_HUMAN HIT: BI764258.1, EVALUE 0.00e+00; NT HIT: gi13653079, EVALUE 0.00e+00; SWISSPROT HIT: Q25337, EVALUE 5.00e-08
gggttatttgtgccagcaagtcctcctctggaccctgagaaggtcaaagagttacagcgcttcatcaccctttccaagagactccttgtgatgactggggcaggaatctccaccgaatcggggataccagactacaggtcagaaaaagtggggctttatgcccgcactgaccgcaggcccatccagcatggtgattttgtccggagtgccccaatccgccagcggtactgggcgagaaacttcgtaggctggcctcaattctcctcccaccagcctaaccctgcacactgggctttgagcacctgggagaaactcggaaagctgtactggttggtgacccaaaatgtggatgctttgcacaccaaggcggggagtcggcgcctgacagagctccacggatgcatggacaggtgcag

SEQ ID NO: 16419 - DNA, 180 bp, Homo sapiens
  MAP TO CHR3.1; EXPRESSED IN FETAL LIVER, SIGNAL = 0.68; EXPRESSED IN BRAIN, SIGNAL = 0.65; EXPRESSED IN LUNG, SIGNAL = 0.65; EXPRESSED IN BONE MARROW, SIGNAL = 0.67; EXPRESSED IN HEART, SIGNAL = 0.67; EXPRESSED IN ADULT LIVER, SIGNAL = 0.87; EST_HUMAN HIT: AL556411.1, EVALUE 4.00e-37; SWISSPROT HIT: Q9WUR2, EVALUE 1.00e-09; NT HIT: gi4757969, EVALUE 2.00e-37
ggtagaacagccatctggattctgtccaaagatagtaaagagcggtggaaaccaagccttttcattagtacagaccacattgcaaagaggcaatatagatgcgcttagcctaatggctgggccattgactactacaataatagatttctgaaactgtatgaaagtattcacaaagtttct

SEQ ID NO: 16420 - DNA, 189 bp, Homo sapiens
  MAP TO CHR19.1; EXPRESSED IN HEART, SIGNAL =   2; EXPRESSED IN BONE MARROW, SIGNAL = 1.3; EXPRESSED IN ADULT LIVER, SIGNAL = 2.1; EXPRESSED IN LUNG, SIGNAL = 0.99; EXPRESSED IN HELA, SIGNAL = 1.6; EXPRESSED IN BRAIN, SIGNAL = 1.2; EST_HUMAN HIT: AL518502.1, EVALUE 1.00e-102; SWISSPROT HIT: Q9UKJ3, EVALUE 1.50e+00; NT HIT: AF057183.1, EVALUE 1.10e-02
gtccccgtggcaaggcccgactgtccgctgcgtcctgcccgaccctcctgtacctccggcctcccagcggccccctcgtcggcggtggcgtcgagcctgttgagactgttagccgccctctactcccaggctggagggacctctccagaccctgggctgcggctgaggcgcatccgttttcctgccctg

SEQ ID NO: 16421 - DNA, 238 bp, Homo sapiens
  MAP TO CHR7.1; EXPRESSED IN ADULT LIVER, SIGNAL = 0.44; EXPRESSED IN PLACENTA, SIGNAL = 4.3; EXPRESSED IN FETAL LIVER, SIGNAL = 4.4; EXPRESSED IN LUNG, SIGNAL = 5.3; EXPRESSED IN HELA, SIGNAL = 3.3; EXPRESSED IN BRAIN, SIGNAL =   4; EXPRESSED IN HEART, SIGNAL = 4.9; EXPRESSED IN BONE MARROW, SIGNAL = 4.5; EST_HUMAN HIT: BE250601.1, EVALUE 1.00e-122; SWISSPROT HIT: Q99835, EVALUE 4.00e-32; NT HIT: AF114821.1, EVALUE 0.00e+00
ccagtcactatacctgcgccacagcaaggattgccacagtgaggacaaaggggagtgaccaggtgagcaggtggaagtaggaggtcttgcccgagagaggctggtaggtggtgcccagggctttgaaggaagtgtgccaggcataggtgaggaccacaaaccaaaccacaccagccatcagggcgtagtacacgatgacaaagatgatgacgcaggacagagtctcattggagctgtg

SEQ ID NO: 16422 - DNA, 335 bp, Homo sapiens
  MAP TO CHR5.1; EXPRESSED IN BRAIN, SIGNAL = 0.65; EXPRESSED IN HEART, SIGNAL = 0.49; EXPRESSED IN ADULT LIVER, SIGNAL = 0.41; EXPRESSED IN BONE MARROW, SIGNAL = 0.47; EST_HUMAN HIT: AI651536.1, EVALUE 0.00e+00; SWISSPROT HIT: Q9UN75, EVALUE 3.00e-59; NT HIT: AF152308.1, EVALUE 0.00e+00
gggttgtcgttaatgtccttcacctccacgtccacatggaaaacctgcagcggcctgtccacgatcacctccaggtggatactgcactccgcgctccgcccgcacagcttctcgcggtcgatccgagaattcacaaacaaaatgccattctgcagatttacctccagaaggtccccgtgtcttttggacgccacccggaacaggcgcggcaccagctccgccagctccagccccaggtcctgagcgatgcggcccacgaaggtgccgtgtttggcctcctcgtagacggagtagtggagctggccgctccccacctcccaggctgcaaggagcag

SEQ ID NO: 16423 - DNA, 260 bp, Homo sapiens
  MAP TO CHR17.1; EXPRESSED IN BRAIN, SIGNAL = 3.1; EXPRESSED IN PLACENTA, SIGNAL = 3.6; EXPRESSED IN BONE MARROW, SIGNAL = 2.7; EXPRESSED IN HEART, SIGNAL = 2.2; EXPRESSED IN ADULT LIVER, SIGNAL = 3.1; EXPRESSED IN FETAL LIVER, SIGNAL = 2.6; EST_HUMAN HIT: W32152.1, EVALUE 0.00e+00; SWISSPROT HIT: Q64008, EVALUE 1.00e-21; NT HIT: gi14773912, EVALUE 1.00e-46
ccaactcaccagtgagagatgagactgcccagtactcagccttcatctcctgggccacctggagggcgtctttctccatcagcgcatactgagcaggggtctgagggaaggccagagtcagaggggggcattccctcaccaagctgggaagtccccccactggcacactcacactcagatccttcttggaacctacaaggaagagaagcacactggaagggtcattctccttcagggcatcggccagccactgcctgcca

SEQ ID NO: 16424 - DNA, 328 bp, Homo sapiens
  MAP TO CHR13.1; EXPRESSED IN LUNG, SIGNAL = 0.75; EXPRESSED IN HELA, SIGNAL = 0.54; EXPRESSED IN BRAIN, SIGNAL = 0.91; EXPRESSED IN HEART, SIGNAL = 0.62; EXPRESSED IN ADULT LIVER, SIGNAL = 1.3; EXPRESSED IN BONE MARROW, SIGNAL = 0.99; NT HIT: AB009667.1, EVALUE 0.00e+00; SWISSPROT HIT: Q02401, EVALUE 3.00e-12; EST_HUMAN HIT: BG699357.1, EVALUE 2.00e-61
gactatcccgagagcatgaagaataacctttcatctattctgcctgattttactgaatctgagaaaaagttcatcaaaggaactgctgacttttttgctctttgctttggacccaccttgagttttcaacttttggaccctcacatgaagttccgccaattggaatctcccaacctgaggcaactgctttcctggattgaccttgaatttaaccatcctcaaatatttattgtggaaaatggctggtttgtctcagggaccaccaagagagatgatgccaaatatatgtattacctcaaaaagttcatcatggaaaccttaaaaggta

SEQ ID NO: 16425 - DNA, 164 bp, Homo sapiens
  MAP TO CHR7.1; EXPRESSED IN BRAIN, SIGNAL = 0.7; EXPRESSED IN HEART, SIGNAL = 0.45; NT HIT: AE002263.2, EVALUE 5.70e-01; SWISSPROT HIT: Q9TV36, EVALUE 2.00e+00; EST_HUMAN HIT: AA947306.1, EVALUE 2.00e-57
ttgttttggagagcattcagcggatagcatttggtttcctccatttaaccaggtcacccaggcatggaatgcacagctctgccagacagaaagcgctttggatgcctgagaaacaacagcttgtccgggctactgatgcgaagagaggccatggtttccttttt

SEQ ID NO: 16426 - DNA, 143 bp, Homo sapiens
  MAP TO CHR22.1; EXPRESSED IN BONE MARROW, SIGNAL = 0.92; EXPRESSED IN FETAL LIVER, SIGNAL = 0.82; EXPRESSED IN LUNG, SIGNAL = 0.84; EXPRESSED IN HELA, SIGNAL = 1.1; EXPRESSED IN BRAIN, SIGNAL = 1.1; EXPRESSED IN HEART, SIGNAL = 0.9; EXPRESSED IN ADULT LIVER, SIGNAL = 0.75; SWISSPROT HIT: P15289, EVALUE 6.00e-21; NT HIT: X52150.1, EVALUE 5.00e-75; EST_HUMAN HIT: AI459538.1, EVALUE 1.00e-70
tgtgtcccagacctgagaccatgcgtatgtcccgaggcggctgctccggtctcttgcggtgtggaaagggaacgacctacgagggcggtgtccgagagcctgccttggccttctggccaggtcatatcgctcccggtcagtcc

SEQ ID NO: 16427 - DNA, 261 bp, Homo sapiens
  MAP TO CHR9.1; EXPRESSED IN BRAIN, SIGNAL = 0.51; EXPRESSED IN HEART, SIGNAL = 0.64; EXPRESSED IN BONE MARROW, SIGNAL = 0.53; SWISSPROT HIT: P31695, EVALUE 9.00e-01; EST_HUMAN HIT: BF529223.1, EVALUE 1.00e-121
gcacacaatcagctctttgtgagcaagccttgcctctccccctccccagcagagcgtctcaggagcccctgcggagaatggacgtttgtgtcaccgcagtggggcaggggggcagagtttctgcccattgaaacccggcagcacgggatgaaaagaaagcagggcctgggagccggcgcggggagaggggcagcataaaggtccctctgtttggggccctggcgcttggttcccagccagcacctcgaaaggagaggagcc

SEQ ID NO: 16428 - DNA, 233 bp, Homo sapiens
  MAP TO CHR8.1; EXPRESSED IN ADULT LIVER, SIGNAL = 9.4; EXPRESSED IN PLACENTA, SIGNAL =  18; EXPRESSED IN LUNG, SIGNAL = 4.7; EXPRESSED IN BRAIN, SIGNAL = 1.5; EXPRESSED IN HEART, SIGNAL = 2.8; EST_HUMAN HIT: BG489974.1, EVALUE 1.00e-128; NT HIT: gi15309638, EVALUE 1.00e-128
gagcagctgatgcagctgtacagtgcgcgccagcggcggcggctgaaccggggcctgcggcggaagcagcactccctgctgaagcgcctgcgcaaggccaagaaggaggcgccgcccatggagaagccggaagtggtgaagacgcacctgcgggacatgatcatcctacccgagatggtgggcagcatggtgggcgtctacaacggcaagaccttcaaccaggtggagatcaa

SEQ ID NO: 16429 - DNA, 254 bp, Homo sapiens
  MAP TO CHR13.1; EXPRESSED IN PLACENTA, SIGNAL = 2.8; EXPRESSED IN LUNG, SIGNAL = 2.1; EXPRESSED IN HEART, SIGNAL = 2.3; EXPRESSED IN FETAL LIVER, SIGNAL = 4.2; EXPRESSED IN BRAIN, SIGNAL = 3.7; EXPRESSED IN HELA, SIGNAL = 2.2; EXPRESSED IN BONE MARROW, SIGNAL = 4.4; EXPRESSED IN ADULT LIVER, SIGNAL = 4.1; EST_HUMAN HIT: BI906055.1, EVALUE 1.00e-124; SWISSPROT HIT: P13983, EVALUE 9.90e-02; NT HIT: gi15301770, EVALUE 1.00e-124
ttgccctttcatgcatccgttggtctaggttccacacgagttggtggcccagtctcgtaactcgtatgtggaggctgagatccacgtgccaaccctggaagaattggggacacagctggaggagagtggggcaactttccacacttacctgaaccatctcatccagggcctccagaaagaagccaaggagaagttcaaaggatgggtcacgtgctccagcacggacaatacagatcttgctttcaaaaaggtaa

SEQ ID NO: 16430 - DNA, 265 bp, Homo sapiens
  MAP TO CHR17.1; EXPRESSED IN BRAIN, SIGNAL = 0.52; EXPRESSED IN HEART, SIGNAL = 0.75; EXPRESSED IN FETAL LIVER, SIGNAL = 0.71; EXPRESSED IN HELA, SIGNAL = 0.74; EST_HUMAN HIT: AI393232.1, EVALUE 0.00e+00; SWISSPROT HIT: Q9UKJ3, EVALUE 2.00e-48; NT HIT: AF160252.1, EVALUE 0.00e+00
ggacccaaacatcctactggtcccttcttcccagttttgagcaaagatgaaagcactgccctccagtggccatcagaactattaattttcaccaaggcagaaccctccatttcatacagttgtaaccctttatattttgactttaaactttcaaggaacaaagatgccagaactaaaggaacagaaaaaccaaaggatataggaagctcctcaaaggaccatctccaaggcctagatcctggtgagccaaataaaagcaaggaag

SEQ ID NO: 16431 - DNA, 211 bp, Homo sapiens
  MAP TO CHR17.1; EXPRESSED IN BRAIN, SIGNAL = 0.46; EXPRESSED IN BONE MARROW, SIGNAL = 0.54; EXPRESSED IN HEART, SIGNAL = 0.54; EXPRESSED IN FETAL LIVER, SIGNAL = 0.59; NT HIT: gi13899232, EVALUE 1.00e-109; EST_HUMAN HIT: BI489645.1, EVALUE 2.80e-01; SWISSPROT HIT: Q58823, EVALUE 9.60e-02
agtggcagtgctgaagggagtcttcagaaagctgagaaagtgctgaagaaggtactggaatggaacaaggaagaggtacccaacaaggatgaactggttggaaacttgtatagctgcatagggaatgcccagattgagctggggcagatggaggcagccctgcagagccacagaaaggacctggagatcgccaaggaatagtgagtgccct

SEQ ID NO: 16432 - DNA, 203 bp, Homo sapiens
  MAP TO CHR17.1; EXPRESSED IN FETAL LIVER, SIGNAL = 0.78; EXPRESSED IN LUNG, SIGNAL = 0.95; EXPRESSED IN HELA, SIGNAL = 0.94; EXPRESSED IN BRAIN, SIGNAL = 0.91; EXPRESSED IN BONE MARROW, SIGNAL = 1.1; EXPRESSED IN HEART, SIGNAL = 0.96; NT HIT: gi14719832, EVALUE 9.00e-93; SWISSPROT HIT: P29315, EVALUE 3.00e-05; EST_HUMAN HIT: N53279.1, EVALUE 5.00e-49
agaacccaggccagactcaccgcagggtctccaggaggcagcgagggcgtctcagggtcttacaaagactcttcactgcagagtggctcagcgagtttccacttaggtccagctccttcaggtttctggtgaccttgaggacggagaagagaatctgccaataggcatctgtgactgggacccacctgaacctgagggggaga

SEQ ID NO: 16433 - DNA, 198 bp, Homo sapiens
  MAP TO CHR17.1; EXPRESSED IN FETAL LIVER, SIGNAL = 0.73; EXPRESSED IN LUNG, SIGNAL = 0.84; EXPRESSED IN BRAIN, SIGNAL = 0.72; EXPRESSED IN BONE MARROW, SIGNAL = 0.53; EXPRESSED IN HEART, SIGNAL = 0.85; SWISSPROT HIT: Q39565, EVALUE 2.00e-04; NT HIT: AE007646.1, EVALUE 7.00e-01
gcctggtacctggcagcatcgccttctccggggcagcattggtataccacaggtgccagtcacgagggtactgctcaaaggagttcatgagtccgtggaagttggtcagtttgtctagctctgtgatgttatcccagtaggcatctgcaagccagctactacatggattgtccatttggccctcccgatccaagacct

SEQ ID NO: 16434 - DNA, 226 bp, Homo sapiens
  MAP TO CHR7.1; EXPRESSED IN HELA, SIGNAL = 1.9; EXPRESSED IN BRAIN, SIGNAL = 2.2; EXPRESSED IN HEART, SIGNAL = 2.2; EXPRESSED IN BONE MARROW, SIGNAL = 2.4; EXPRESSED IN PLACENTA, SIGNAL = 1.4; EXPRESSED IN FETAL LIVER, SIGNAL =   2; EXPRESSED IN LUNG, SIGNAL = 2.2; EST_HUMAN HIT: AU140207.1, EVALUE 1.00e-108; SWISSPROT HIT: P00533, EVALUE 1.00e-32; NT HIT: U48727.1, EVALUE 1.00e-121
ttttcttctctccaatgtagtggtcagttttctcttgcagtcgtcagcctgaacataacatccttgggattacgctccctcaaggagataagtgatggagatgtgataatttcaggaaacaaaaatttgtgctatgcaaatacaataaactggaaaaaactgtttgggacctccggtcagaaaaccaaaattataagcaacagaggtgaaaacagctgcagtaagt

SEQ ID NO: 16435 - DNA, 266 bp, Homo sapiens
  MAP TO CHR19.1; EXPRESSED IN HEART, SIGNAL = 1.8; EXPRESSED IN ADULT LIVER, SIGNAL = 1.7; EXPRESSED IN BONE MARROW, SIGNAL = 1.3; EXPRESSED IN PLACENTA, SIGNAL = 2.4; EXPRESSED IN FETAL LIVER, SIGNAL = 2.4; EXPRESSED IN BRAIN, SIGNAL = 1.6; EXPRESSED IN LUNG, SIGNAL = 1.2; EST_HUMAN HIT: BI049273.1, EVALUE 4.00e-81; SWISSPROT HIT: Q9UNY5, EVALUE 4.00e-22; NT HIT: gi14768845, EVALUE 0.00e+00
tacatctccttgtaattctccagcagagtgacgagcttctcacagttctccggcttttttgctcgcacccaaggcttgagcttttcagggatgatggtcaggtactgctcaaggaccaagagctcgatgatctcctccttggtgcgggtctccggctgcaaccaatcgaggcagaggtttcggagtttgatcagggtcttccgaggcccaacaaattccacatagattaggttccgaaacctctgatgaaaaaactcagagtcagt

SEQ ID NO: 16436 - DNA, 126 bp, Homo sapiens
  MAP TO CHR5.1; EXPRESSED IN PLACENTA, SIGNAL = 2.3; EXPRESSED IN LUNG, SIGNAL = 2.1; EXPRESSED IN BRAIN, SIGNAL =   2; EXPRESSED IN HELA, SIGNAL = 1.9; EXPRESSED IN BONE MARROW, SIGNAL = 2.1; EXPRESSED IN HEART, SIGNAL = 1.8; EXPRESSED IN ADULT LIVER, SIGNAL = 0.66; NT HIT: gi12621105, EVALUE 4.00e-26; EST_HUMAN HIT: BF356153.1, EVALUE 6.00e-38; SWISSPROT HIT: P55196, EVALUE 4.60e-02
cccagaatgtcttgacaagggatctttttcccatctccctttcctcagggatggcaggctgtccttaggagatgagctgctggtaatcaatggtcatttactggtcgggctctcccacgaggaagc

SEQ ID NO: 16437 - DNA, 334 bp, Homo sapiens
  MAP TO CHR6.1; EXPRESSED IN BRAIN, SIGNAL = 1.2; EXPRESSED IN HEART, SIGNAL = 1.1; EXPRESSED IN PLACENTA, SIGNAL = 2.5; EXPRESSED IN FETAL LIVER, SIGNAL = 1.3; SWISSPROT HIT: Q16626, EVALUE 5.00e-41; NT HIT: gi7657325, EVALUE 0.00e+00; EST_HUMAN HIT: BG110606.1, EVALUE 0.00e+00
tcctccaccctacctggattcgatcctggatgtcagcaactacatctccatcccccactggtgccagttccacctcctcttgttcaggatcttggttcaggggctggtaggagtagccagctgggcccgaccccgtttcctcctgctcttcctcaggctcctcactgctccaatccccagtgccttctgaagggccctgatgtcccagttcctcagtctgattggggaagatacgctcagggcccatggtgtctcctcctagaactactgttgccatccgggcaggggctgcaagaacagggaggcggtaggacagggatcggatgaaaccagg

SEQ ID NO: 16438 - DNA, 124 bp, Homo sapiens
  MAP TO CHR7.1; EXPRESSED IN PLACENTA, SIGNAL = 2.4; EXPRESSED IN FETAL LIVER, SIGNAL = 2.4; EXPRESSED IN HELA, SIGNAL = 1.9; EXPRESSED IN BRAIN, SIGNAL = 2.5; EXPRESSED IN LUNG, SIGNAL = 1.9; EXPRESSED IN HEART, SIGNAL =   2; EST_HUMAN HIT: BI600198.1, EVALUE 2.00e-59; SWISSPROT HIT: O60896, EVALUE 2.00e-18; NT HIT: gi13626665, EVALUE 1.00e-59
ggcactcacacgatgaactcggacaggttgcaccacttccagacgtccaccttgcccatcatgtctgcgaaagccttcccacacaggggcagcctctccaacatgcctgtctcgttgcagccgc

SEQ ID NO: 16439 - DNA, 216 bp, Homo sapiens
  MAP TO CHR2.1; EXPRESSED IN HEART, SIGNAL = 0.98; EXPRESSED IN ADULT LIVER, SIGNAL = 0.99; EXPRESSED IN BONE MARROW, SIGNAL = 0.6; EXPRESSED IN HELA, SIGNAL = 3.4; EXPRESSED IN FETAL LIVER, SIGNAL = 1.1; EXPRESSED IN BRAIN, SIGNAL = 0.56; EXPRESSED IN LUNG, SIGNAL = 0.81; EST_HUMAN HIT: AA488536.1, EVALUE 1.00e-113; SWISSPROT HIT: P14650, EVALUE 3.00e-14; NT HIT: gi16157510, EVALUE 1.00e-116
tccaggttgtggtatgagaaccctggggtgttctccccggcccagctgactcagatcaagcagacgtcgctggccaggatcctatgcgacaacgcggacaacatcacccgggtgcagagcgacgtgttcagggtggcggagttccctcacggctacggcagctgtgacgagatccccagggtagacctccgggtgtggcaggactgctgtgaaggt

SEQ ID NO: 16440 - DNA, 295 bp, Homo sapiens
  MAP TO CHR9.1; EXPRESSED IN FETAL LIVER, SIGNAL =   1; EXPRESSED IN BRAIN, SIGNAL = 1.1; EXPRESSED IN LUNG, SIGNAL = 1.4; EXPRESSED IN HELA, SIGNAL = 0.6; EXPRESSED IN BONE MARROW, SIGNAL = 1.2; EXPRESSED IN HEART, SIGNAL = 1.7; EXPRESSED IN ADULT LIVER, SIGNAL = 1.3; EST_HUMAN HIT: BF338461.1, EVALUE 0.00e+00; SWISSPROT HIT: P22355, EVALUE 2.60e+00; NT HIT: gi15298469, EVALUE 0.00e+00
gctcttgtcttcggggagaaggcccttggagccgggctggcatcggccttctcggggtgagcgaggtcaccatgccagcttcccagagccgggcccgtgcccgggaccgcaacaacgtcctcaaccgggctgagttcctgtccctgaaccagccccccaaggggggcccggagccccgcagctcgggcagaaaggcctcgggcccatcagcacagcccccacctgctggtgacggggccagagagcgacgccagtcacagcagctgccagaggaggactgcatgcagctgaaccc

SEQ ID NO: 16441 - DNA, 228 bp, Homo sapiens
  MAP TO CHR7.1; EXPRESSED IN LUNG, SIGNAL = 0.58; EXPRESSED IN BRAIN, SIGNAL = 0.54; EXPRESSED IN BONE MARROW, SIGNAL = 0.6; EST_HUMAN HIT: H64118.1, EVALUE 1.00e-46; SWISSPROT HIT: Q9UPE1, EVALUE 8.00e-06; NT HIT: gi14782986, EVALUE 2.00e-04
gaatgcacaatttctccttttgggagaagactatgctgaaaattagtgttgcataaataccgttaccttttctggtgaaaaactccttggagtatttccccaacatagcgtattttcgagggactttccccagcagttcaatgatcaatgctatgtgatctgcattgggaaacattgccagcaaaacagaaacacacgacagtttaatcagtacactgcatgcagaca

SEQ ID NO: 16442 - DNA, 430 bp, Homo sapiens
  MAP TO CHR17.1; EXPRESSED IN HEART, SIGNAL = 0.73; EXPRESSED IN ADULT LIVER, SIGNAL = 0.41; EXPRESSED IN BONE MARROW, SIGNAL = 0.53; EXPRESSED IN LUNG, SIGNAL = 0.87; EXPRESSED IN BRAIN, SIGNAL = 0.59; EST_HUMAN HIT: BF772391.1, EVALUE 2.00e-50; SWISSPROT HIT: Q14849, EVALUE 5.00e-12; NT HIT: gi15310274, EVALUE 7.00e-49
acccattccaagggcaggggttaggggtaggcaggcaaatacctgagcagagaaacttttcttcccagcaacttcttcatctgattcattgtcagaccctgcagaaaacaggcacagatgacaatggcaaggggtggggagagagtgtggggaggtagtggggttcgggtatgtgagtgcaaggatgtgggggataaaagtgtgtgggagagggttgctggctttccccagggagcctgatagaaggaatagaaagaacagacccagcctaccccattcctcacaaggcccctccctgaaagcagttcccccacacaccagccctcacctgcaaaggattctgggggtgaatagaactgtccctcggacagagcaccggagaacagcaggggtccacgggcaacagcaacctgggcggcaagataccctg

SEQ ID NO: 16443 - DNA, 217 bp, Homo sapiens
  MAP TO CHR19.1; EXPRESSED IN FETAL LIVER, SIGNAL = 1.4; EXPRESSED IN LUNG, SIGNAL = 1.1; EXPRESSED IN HELA, SIGNAL =   2; EXPRESSED IN BRAIN, SIGNAL = 2.1; EXPRESSED IN HEART, SIGNAL = 1.3; EXPRESSED IN BONE MARROW, SIGNAL =   2; NT HIT: AF340156.1, EVALUE 1.00e-119; EST_HUMAN HIT: BI756372.1, EVALUE 1.00e-112; SWISSPROT HIT: Q9WVR6, EVALUE 1.00e-27
cagggaacatcatcggctcgggcatcttcatctcgcccaagggggtcctggagcactcaggctccgtgggtctggccctgttcgtctgggtcctgggtgggggcgtgacggctctgggctccctctgctatgcagagctgggagtcgccatccccaagtctggcggggactacgcctacgtcacagagatcttcgggggcctggctgggtgagtgtg

SEQ ID NO: 16444 - DNA, 295 bp, Homo sapiens
  MAP TO CHR12.1; EXPRESSED IN BRAIN, SIGNAL = 1.8; EXPRESSED IN HEART, SIGNAL = 1.1; EXPRESSED IN LUNG, SIGNAL = 2.4; EXPRESSED IN PLACENTA, SIGNAL = 4.5; EXPRESSED IN FETAL LIVER, SIGNAL = 1.7; NT HIT: gi14784244, EVALUE 6.00e-61; EST_HUMAN HIT: BF059003.1, EVALUE 8.00e-61; SWISSPROT HIT: Q63532, EVALUE 1.00e-01
tggtggaggtgtggaggggtgggggagaggaccacatctgccctaccatcttccctcccaatcatctcatccttcctctgctttccttccgagggtgctgggtcctgccgttcccctgagccctgtcacccttgctgccccaccctgtggcccatcccaagcccttttatcacccaggctccagtcccattggtggtgatggtgggcaaggcatgcagccagcctgaggctactccctctcctggtccccacaggaggaggagaacggggctgaggaggaagaagaagaaactgc

SEQ ID NO: 16445 - DNA, 257 bp, Homo sapiens
  MAP TO CHR19.1; EXPRESSED IN BRAIN, SIGNAL = 0.95; EXPRESSED IN HEART, SIGNAL = 0.44; EXPRESSED IN BONE MARROW, SIGNAL = 1.1; EXPRESSED IN ADULT LIVER, SIGNAL = 0.94; SWISSPROT HIT: P06731, EVALUE 1.10e+00; NT HIT: gi14763160, EVALUE 0.00e+00; EST_HUMAN HIT: BE735144.1, EVALUE 4.00e-07
tcctctccccacaggcagaagcacgtggcagccctcctcgacatccgtggcctgcgcaacacagccgcccgccaggagatcctggccgtggcccgggacctggaactctctgaggagggagccctgtcaccccctcgggaccgtgccttctttgcagacatccctgtgccccgcccatctttctgtctcagcctccctctcttcctgggccgcctccccctctcccggctggccaggcccagtttggcctgtctgcc

SEQ ID NO: 16446 - DNA, 117 bp, Homo sapiens
  MAP TO CHR11.1; EXPRESSED IN HELA, SIGNAL = 1.1; EXPRESSED IN BRAIN, SIGNAL = 0.97; EXPRESSED IN HEART, SIGNAL = 0.86; EXPRESSED IN BONE MARROW, SIGNAL = 0.89; EXPRESSED IN ADULT LIVER, SIGNAL = 0.85; EXPRESSED IN PLACENTA, SIGNAL = 1.3; EXPRESSED IN LUNG, SIGNAL = 0.82; EST_HUMAN HIT: AW901526.1, EVALUE 1.40e-01
tcctggaaactgtaatgcaaaatagtataattaaagatgttaaaaaatacgaatgtaactactgtgatattacgatgtaactgaatatttaaaaatagctcttcagggttgtgctta

SEQ ID NO: 16447 - DNA, 329 bp, Homo sapiens
  MAP TO CHR2.1; EXPRESSED IN LUNG, SIGNAL = 1.1; EXPRESSED IN FETAL LIVER, SIGNAL = 1.3; EXPRESSED IN HELA, SIGNAL = 1.9; EXPRESSED IN BRAIN, SIGNAL = 2.3; EXPRESSED IN HEART, SIGNAL = 1.1; EXPRESSED IN ADULT LIVER, SIGNAL = 1.9; SWISSPROT HIT: P11799, EVALUE 5.00e-11; EST_HUMAN HIT: AW948592.1, EVALUE 1.10e-01; NT HIT: AJ277892.1, EVALUE 0.00e+00
tctcattgtttatctccttttttctggtagcacctcctgttttcacccagaagccttctccagtaggagctcttaaaggttctgatgtgattctccaatgtgaaatttcgggaactcccccatttgaagtagtatgggttaaagatcgaaagcaggttagaaacagcaagaaatttaaaatcacttcaaaacattttgatacaagtcttcatatccttaatcttgaagcctccgatgtcggggaatatcactgcaaagctactaatgaggtgggaagtgacacgtgttcttgctctgtcaagttcaaaggtttgtatacatggacacaa

SEQ ID NO: 16448 - DNA, 153 bp, Homo sapiens
  MAP TO CHR19.1; EXPRESSED IN FETAL LIVER, SIGNAL = 1.6; EXPRESSED IN LUNG, SIGNAL = 3.1; EXPRESSED IN HELA, SIGNAL = 0.74; EXPRESSED IN BRAIN, SIGNAL = 1.1; EXPRESSED IN HEART, SIGNAL = 1.7; SWISSPROT HIT: P17024, EVALUE 1.00e-20; EST_HUMAN HIT: BF971504.1, EVALUE 2.00e-29; NT HIT: gi14760087, EVALUE 1.00e-41
taaaggctttaccacattgcttacactcatagggtttctctccagtatgaatcctttcatggtagagaaaagagttggaagaaatgaaggctttcccacactgtttacatttatagggtttctctccagtgtgagtccttttatgatagcgaa

SEQ ID NO: 16449 - DNA, 389 bp, Homo sapiens
  MAP TO CHR5.1; EXPRESSED IN LUNG, SIGNAL = 0.67; EXPRESSED IN BRAIN, SIGNAL = 1.4; EXPRESSED IN HELA, SIGNAL = 2.3; EXPRESSED IN BONE MARROW, SIGNAL = 1.3; EXPRESSED IN HEART, SIGNAL = 0.54; EST_HUMAN HIT: BG719192.1, EVALUE 2.00e-62; SWISSPROT HIT: Q9Y5H8, EVALUE 2.00e-68
cagcagtgccggcgcgttgtcgttctcgtccagcacgaacacctgcagcgtcacgttgctgcccagaggcggcacgcccgcatcgcgcgcactcacctggaactgcagcagctctagctcctcgtggtccagcggctgcagcgcgtacaccttgccgctctccgcgtgtaccgacacgtagctcgacagcgcgcgctcccccacccgccgttccaccagcgagtaggacaccagggcgttctcctgcgcgtccgcgtcccgcgcagacaccgtgaagatgtggcagcccggcgggttgttctccttcacgaacaccgtgtactcggactgcgagaatgccggcgcattgtcgttcacgtcggccacctccacggacacgctggccgtgg

SEQ ID NO: 16450 - DNA, 336 bp, Homo sapiens
  MAP TO CHR7.1; EXPRESSED IN FETAL LIVER, SIGNAL = 0.33; EXPRESSED IN BRAIN, SIGNAL = 0.68; SWISSPROT HIT: P22443, EVALUE 1.90e+00; NT HIT: AF023847.2, EVALUE 1.20e+00
atgaccagctggcccctggcagatcttgggcccaggtgtgaagtcgctggagaagcatttcagggccaagatgggagtgatttcattttccattgacactatgcagaaatgaaggggattcaagtgccttcagaaaagcttccttccagcgaatggagttttgggggttttccagacttgcaactgcttttattcttggaagcatcattgttgctttttccccccttccatttatatcccaggaactgattcagaaaccatagaaattggatttggaatcgctgaatgctagcagacagctgactgcactcttcccaagaaaccctgccagctggg

SEQ ID NO: 16451 - DNA, 330 bp, Homo sapiens
  MAP TO CHR7.1; EXPRESSED IN PLACENTA, SIGNAL = 4.2; EXPRESSED IN LUNG, SIGNAL = 3.8; EXPRESSED IN BRAIN, SIGNAL =   5; EXPRESSED IN HEART, SIGNAL = 3.8; EXPRESSED IN ADULT LIVER, SIGNAL = 2.9; EXPRESSED IN BONE MARROW, SIGNAL = 4.6; EXPRESSED IN FETAL LIVER, SIGNAL = 3.6; EST_HUMAN HIT: AW513069.1, EVALUE 0.00e+00; SWISSPROT HIT: Q99996, EVALUE 5.00e-49; NT HIT: AJ010770.1, EVALUE 0.00e+00
gccacccttgccctcagaggacctactgaaagagctgcagaaacagctagaggaaaaacacagtcgcatagtagaattgttaaatgagactgaaaaatataaactggattctttgcaaacacgacagcaaatggaaaaagataggcaggttcacaggaaaacactgcagacagaacaggaggccaacactgagggacagaaaaaaatgcatgagctccagtccaaagtggaagatcttcagcgccagctggaagagaaaagacaacaagtttataagttagaccttgaaggacagcgactacaaggaatcatgcaggaattccagaagca

SEQ ID NO: 16452 - DNA, 188 bp, Homo sapiens
  MAP TO CHR17.1; EXPRESSED IN FETAL LIVER, SIGNAL = 0.71; EXPRESSED IN HELA, SIGNAL = 0.61; EXPRESSED IN BRAIN, SIGNAL = 0.68; EXPRESSED IN BONE MARROW, SIGNAL = 0.71; EST_HUMAN HIT: BI906547.1, EVALUE 5.00e-21; NT HIT: gi13653286, EVALUE 5.00e-20
gtctccgagtcaccggctccctcctcaccgcgctgagcagtggcagcagctgctgcaggaaccaggaaggaaggagatgtcagagcctcccctctagccggatctccccacctccctctcccctgtcccctcctcccgccaagctccgggcagccgctcagctctgcccccctgctccccggaggact

SEQ ID NO: 16453 - DNA, 171 bp, Homo sapiens
  MAP TO CHR2.1; EXPRESSED IN ADULT LIVER, SIGNAL = 0.79; EXPRESSED IN BONE MARROW, SIGNAL = 0.47; EXPRESSED IN HELA, SIGNAL = 0.53; EXPRESSED IN BRAIN, SIGNAL = 0.46; EXPRESSED IN HEART, SIGNAL = 0.76; EST_HUMAN HIT: BF878441.1, EVALUE 4.00e-77; SWISSPROT HIT: Q00918, EVALUE 5.00e-29; NT HIT: gi14723948, EVALUE 1.00e-88
gatccccctgtgatctcggaagagaaagggccctgttaccgacttgtcagttctggaagacagtgtatgcaccctctgtctgttcacctcaccaagcagctctgctgttgtagtgtgggcaaggcctggggcccacactgtgagaaatgtccccttccaggcacaggtaag

SEQ ID NO: 16454 - DNA, 135 bp, Homo sapiens
  MAP TO CHR2.1; EXPRESSED IN ADULT LIVER, SIGNAL = 0.83; EXPRESSED IN HELA, SIGNAL = 0.89; EXPRESSED IN BRAIN, SIGNAL = 0.84; EXPRESSED IN BONE MARROW, SIGNAL = 0.96; EXPRESSED IN HEART, SIGNAL = 0.63; SWISSPROT HIT: Q01820, EVALUE 7.00e-07; NT HIT: gi14738090, EVALUE 3.00e-64; EST_HUMAN HIT: BG717174.1, EVALUE 4.00e-64
aaatacttacttgacataaatatattttgtgtaagctccattcttctcctagagcacaaatcttaatgtcactgttttcaccattcaaaaataatgtttgataaatatatttagatgtactctttaattttttcc

SEQ ID NO: 16455 - DNA, 183 bp, Homo sapiens
  MAP TO CHR19.1; EXPRESSED IN HELA, SIGNAL = 1.8; EXPRESSED IN BRAIN, SIGNAL = 2.8; EXPRESSED IN HEART, SIGNAL = 3.5; EXPRESSED IN BONE MARROW, SIGNAL = 2.9; EXPRESSED IN LUNG, SIGNAL = 5.1; EXPRESSED IN FETAL LIVER, SIGNAL = 1.7; SWISSPROT HIT: Q60604, EVALUE 3.30e+00; EST_HUMAN HIT: BG753238.1, EVALUE 7.00e-85; NT HIT: gi6912355, EVALUE 4.00e-79
tccttaaccagcccctgggtggctccagctatggctaccgtggccgagactgccgggccaacctttatttgctgcccaccggggagatagtgtactttgtggcctccgtagccgtgctatacagcgtggaggagcagaggcagcgacactacctgggacacaacgatgacatcaaatggtgag

SEQ ID NO: 16456 - DNA, 244 bp, Homo sapiens
  MAP TO CHR19.1; EXPRESSED IN LUNG, SIGNAL = 0.7; EXPRESSED IN HELA, SIGNAL = 0.55; EXPRESSED IN BRAIN, SIGNAL = 0.7; EXPRESSED IN BONE MARROW, SIGNAL = 0.66; EXPRESSED IN HEART, SIGNAL = 0.7; SWISSPROT HIT: P05445, EVALUE 1.40e+00; EST_HUMAN HIT: BI025054.1, EVALUE 5.00e-03; NT HIT: AF294352.1, EVALUE 4.00e-03
ttcccacagcacctagcgccatctcaaggactggacactcccttgtttatcagattcacagtctgccctcccaccggggctggcatctttgcagattttgctccctgccgagcccccggggcctaaaacagagcctggcacccaggaggtgcttggtaaatatttgtcgaaggaatgcacaggctcccggctgcacccccagcatttgagctccggctgggtgcccagcaaggtgtgggagagg

SEQ ID NO: 16457 - DNA, 187 bp, Homo sapiens
  MAP TO CHR19.1; EXPRESSED IN HEART, SIGNAL = 0.63; EXPRESSED IN BONE MARROW, SIGNAL = 1.3; EXPRESSED IN ADULT LIVER, SIGNAL = 1.3; EXPRESSED IN LUNG, SIGNAL = 0.65; EXPRESSED IN BRAIN, SIGNAL = 1.2; SWISSPROT HIT: P36776, EVALUE 4.00e-29; EST_HUMAN HIT: BI116857.1, EVALUE 2.00e-97; NT HIT: AF059304.1, EVALUE 1.00e-101
caggagttcattgccgttagccagctccgcggctccacccagggcaagatcctctgcttctatggcccccctggcgtgggtaagaccagcattgctcgctccatcgcccgcgccctgaaccgagagtacttccgcttcagcgtcgggggcatgactgacgtggctgagatcaagggccacaggtagg

SEQ ID NO: 16458 - DNA, 436 bp, Homo sapiens
  MAP TO CHR8.1; EXPRESSED IN BRAIN, SIGNAL = 3.9; EXPRESSED IN HEART, SIGNAL = 6.4; EXPRESSED IN ADULT LIVER, SIGNAL = 3.9; EXPRESSED IN BONE MARROW, SIGNAL = 4.2; EXPRESSED IN PLACENTA, SIGNAL = 4.1; EXPRESSED IN LUNG, SIGNAL = 5.3; SWISSPROT HIT: Q00927, EVALUE 9.70e-01; NT HIT: AL049866.2, EVALUE 0.00e+00
cttggctccgggactccgcggagggcaggctgcacgggtgaccgtgtggaatacagagtgccagctgtttctgggacgggcgagagagtcgcagagcttctgggcggcgccatcttcagctccagacagccggccaccttcctggtgagagcacgggggtctgcctggcctgagaggtttgtggcacaggcgccggcgggagccttcttggctccgggactccgcggagggcaggctgcacgggtgaccgtgtggaatacagagtgccagccgtttctgggacgggcgagagagtcgcagagattctggggcggcaccatcctcagctccagacaaccagccaccttcccggcaagagccacagagcttctgaggctgcgacatcttcgactccagacaactggccaccttcctggccaaagcaacacagcttctg

SEQ ID NO: 16459 - DNA, 242 bp, Homo sapiens
  MAP TO CHR17.1; EXPRESSED IN BONE MARROW, SIGNAL = 0.55; EXPRESSED IN HEART, SIGNAL = 0.78; EXPRESSED IN FETAL LIVER, SIGNAL = 0.57; EXPRESSED IN LUNG, SIGNAL = 0.67; EXPRESSED IN BRAIN, SIGNAL = 0.51; EXPRESSED IN HELA, SIGNAL = 0.63; NT HIT: AB046856.1, EVALUE 1.00e-70; EST_HUMAN HIT: BE009356.1, EVALUE 3.00e-66; SWISSPROT HIT: Q64542, EVALUE 5.20e+00
atctttttaatccagatgtggatgccaacagagagctgccactcacacagccaccttcagcccactcatctatcaccagtggaagctgcccaggaactccggaaatgcgcaggcggcaggaggaggctatgcgaagactagcctcgcaggtacaatatgattcccacgttggggatatggtagttccattttaatatcaaggaagcaaagatagggagacctttggcaaagtgaacaaaaat

SEQ ID NO: 16460 - DNA, 211 bp, Homo sapiens
  MAP TO CHR7.1; EXPRESSED IN PLACENTA, SIGNAL = 3.7; EXPRESSED IN FETAL LIVER, SIGNAL = 3.9; EXPRESSED IN LUNG, SIGNAL = 4.7; EXPRESSED IN HELA, SIGNAL = 4.5; EXPRESSED IN BRAIN, SIGNAL = 4.3; EXPRESSED IN HEART, SIGNAL = 5.4; EXPRESSED IN ADULT LIVER, SIGNAL = 2.6; EXPRESSED IN BONE MARROW, SIGNAL = 4.6; NT HIT: AF252549.1, EVALUE 1.00e-115; EST_HUMAN HIT: AW340724.1, EVALUE 2.00e-60; SWISSPROT HIT: P21333, EVALUE 7.00e-21
ccttaccttccgacacatggacagggaagggactgcgggtgatgggggcacccgcaaaggccacatgcacggtatgtggcccctccatggcaggtctgtatgtgcagcggaacgtgctgtcacccttgtcctccagggccacctccactgtgtcccgccggccctgtgggtccacgatcaccacagcaacatcgccagtgccggcccctgc

SEQ ID NO: 16461 - DNA, 199 bp, Homo sapiens
  MAP TO CHR17.1; EXPRESSED IN FETAL LIVER, SIGNAL = 0.58; EXPRESSED IN HELA, SIGNAL = 0.41; EXPRESSED IN BRAIN, SIGNAL = 0.6; EXPRESSED IN LUNG, SIGNAL = 0.65; EXPRESSED IN HEART, SIGNAL = 0.78; NT HIT: AF289477.1, EVALUE 1.80e-01; EST_HUMAN HIT: BG706540.1, EVALUE 4.10e+00; SWISSPROT HIT: P52632, EVALUE 9.50e+00
gtttccccatttctcctcctgccacctagaactttaaatagcctccagcacactatgtggctgccagaagttgtaattaaataatgtccagctgtcagaaaagctgttataaatggtccttttgtctgcaccactgtctgggaaaccaggaaggagagaaactagggggttataaatatgaagggcagaagttcagtgg

SEQ ID NO: 16462 - DNA, 265 bp, Homo sapiens
  MAP TO CHR19.1; EXPRESSED IN HEART, SIGNAL = 0.82; EXPRESSED IN ADULT LIVER, SIGNAL = 0.89; EXPRESSED IN LUNG, SIGNAL = 0.93; EXPRESSED IN BRAIN, SIGNAL = 0.96; SWISSPROT HIT: P29597, EVALUE 4.00e-36; NT HIT: gi14756716, EVALUE 0.00e+00; EST_HUMAN HIT: BE884149.1, EVALUE 0.00e+00
cagcttcaaggactgcatcccgcgctccttccgccggcatatccggcagcacagcgccctgacccggctgcgccttcggaacgtcttccgcaggttcctgcgggacttccagccgggccgactctcccagcagatggtcatggtcaaatacctagccacactcgagcggctggcaccccgcttcggcacagagcgtgtgcccgtgtgccacctgaggctgctggcccaggccgagggggagccctgctacatccgggacagtggg

SEQ ID NO: 16463 - DNA, 160 bp, Homo sapiens
  MAP TO CHR10.1; EXPRESSED IN FETAL LIVER, SIGNAL = 1.1; EXPRESSED IN BRAIN, SIGNAL = 0.85; EXPRESSED IN HEART, SIGNAL = 0.99; EXPRESSED IN BONE MARROW, SIGNAL = 0.9; EST_HUMAN HIT: BG773575.1, EVALUE 4.00e-83; SWISSPROT HIT: P01130, EVALUE 3.00e-24; NT HIT: L00343.1, EVALUE 4.00e-85
ccaggctccatcgcctacctcttcttcaccaaccggcacgaggtcaggaagatgacgctggaccggagcgagtacaccagcctcatccccaacctgaggaacgtggtcgctctggacacggaggtggccagcaatagaatctactggtctgacctgtccc

SEQ ID NO: 16464 - DNA, 256 bp, Homo sapiens
  MAP TO CHR6.1; EXPRESSED IN PLACENTA, SIGNAL = 1.8; EXPRESSED IN FETAL LIVER, SIGNAL = 1.5; EXPRESSED IN LUNG, SIGNAL = 1.5; EXPRESSED IN HELA, SIGNAL = 1.2; EXPRESSED IN BRAIN, SIGNAL = 1.1; EXPRESSED IN BONE MARROW, SIGNAL = 1.2; EXPRESSED IN HEART, SIGNAL = 1.5; SWISSPROT HIT: P08125, EVALUE 9.90e-02; EST_HUMAN HIT: BI839001.1, EVALUE 1.00e-120; NT HIT: Y17958.1, EVALUE 1.00e-120
agcctgacatctgctttccaaggccaccacttggtctctggaccgaggagttcctggggacccctgaatatatcctcaggagagccaaggttcaatgcaggtctcataaagggtacggttggagtgccaggctgtgtgggagataccggccattggacacctcactatggccccccgggccaatagagtcttcaacccaaaagaatcccgcagataaaccttcaaggtggtcgaaggggcgtggaagcatggaaga

SEQ ID NO: 16465 - DNA, 324 bp, Homo sapiens
  MAP TO CHR19.1; EXPRESSED IN ADULT LIVER, SIGNAL = 0.46; EXPRESSED IN HELA, SIGNAL = 0.82; EXPRESSED IN LUNG, SIGNAL = 0.99; EXPRESSED IN BRAIN, SIGNAL = 0.64; EXPRESSED IN HEART, SIGNAL = 1.2; SWISSPROT HIT: Q02080, EVALUE 2.50e-01; EST_HUMAN HIT: BI820173.1, EVALUE 0.00e+00; NT HIT: J04431.1, EVALUE 0.00e+00
agtccctcagcactccacgccgtagcggtcgaagttgcggagcagcaggccgatctccaggtgcacggtgccaccagcagctgtgtgcaggcgatagcggtcggccccactgtagatggtgtccccatgcagcagctgcggcccaccacccacgaaagcccgtgccaactgttctcgccaactgcccaggggccgccacgtggggcaggccagctggtgggtgcccgggctactgggcacatggcaaaatccatagcctgcaagctggcagcggccaaagctgtcctgggaccacacctggaaatggagccggggccagcctgc

SEQ ID NO: 16466 - DNA, 267 bp, Homo sapiens
  MAP TO CHR19.1; EXPRESSED IN HEART, SIGNAL =   2; EXPRESSED IN BONE MARROW, SIGNAL = 1.5; EXPRESSED IN ADULT LIVER, SIGNAL = 2.2; EXPRESSED IN PLACENTA, SIGNAL = 3.7; EXPRESSED IN FETAL LIVER, SIGNAL = 2.8; EXPRESSED IN BRAIN, SIGNAL = 1.7; EXPRESSED IN LUNG, SIGNAL = 2.9; EST_HUMAN HIT: BG818630.1, EVALUE 0.00e+00; SWISSPROT HIT: P43275, EVALUE 1.60e+00; NT HIT: L43631.1, EVALUE 1.00e-124
actgtgagcctgtagggctagagccggcagttgagcagagtagtgcggcctccgagctcgcggaggcctctagcgaggagctcgcagaagcacccacggaagccccaagcccagaagccagagatagcaaagaagacgggaggaagtttgattttgacgcttgtaatgaagtccctccggctcctaaagagtcctcaaccagtgagggcgctgatcagaaaatgaggtttgttttttctcagttttagaccagacgctatctccttt

SEQ ID NO: 16467 - DNA, 195 bp, Homo sapiens
  MAP TO CHR12.1; EXPRESSED IN FETAL LIVER, SIGNAL =   1; EXPRESSED IN LUNG, SIGNAL =   1; EXPRESSED IN BRAIN, SIGNAL = 0.99; EXPRESSED IN HEART, SIGNAL =   1; EXPRESSED IN ADULT LIVER, SIGNAL = 1.7; NT HIT: gi14767782, EVALUE 1.00e-103; EST_HUMAN HIT: AW672786.1, EVALUE 1.00e-103; SWISSPROT HIT: P02565, EVALUE 1.30e-01
aggttctgacagggagacaacagcaaatacaagagaagattgagcagaaccgacgggcacaagaggaatccctgaaacacagggagcaacttattcgaaatcttgaggaggtgagagagttggctcgtcgcgagaaagaggagagtgaaaagctgaaatcggccaggaagcaggagctggaagcccaggtagggc

SEQ ID NO: 16468 - DNA, 261 bp, Homo sapiens
  MAP TO AC007873.4; EXPRESSED IN HEART, SIGNAL = 0.7; EXPRESSED IN ADULT LIVER, SIGNAL =  16; EXPRESSED IN FETAL LIVER, SIGNAL =  11; EXPRESSED IN HELA, SIGNAL = 0.77; EXPRESSED IN BRAIN, SIGNAL = 0.86; EXPRESSED IN LUNG, SIGNAL = 1.2; EXPRESSED IN BONE MARROW, SIGNAL = 0.83; NT HIT: gi14774839, EVALUE 0.00e+00; EST_HUMAN HIT: AA345503.1, EVALUE 3.00e-60; SWISSPROT HIT: P08697, EVALUE 2.00e-31
  unsure 108
tgggcaggcctgcaggagttgttccaggccccagacctgcgtgggatctccgagcagagcctggtggtgtccggcgtgcagcatcagtccaccctggagctcagcganggtcggcgtggaggcggcggcggccaccagcattgccatgtcccgcatgtccctgtcctccttcagcgtgaaccgccccttcctcttcttcatcttcgaggacaccacaggccttcccctcttcgtgggcagcgtgaggaaccccaaccccag

SEQ ID NO: 16469 - DNA, 348 bp, Homo sapiens
  MAP TO CHR10.1; EXPRESSED IN FETAL LIVER, SIGNAL = 3.3; EXPRESSED IN LUNG, SIGNAL = 3.1; EXPRESSED IN HELA, SIGNAL = 3.7; EXPRESSED IN BRAIN, SIGNAL = 3.4; EXPRESSED IN HEART, SIGNAL = 3.3; EXPRESSED IN ADULT LIVER, SIGNAL = 2.6; EXPRESSED IN BONE MARROW, SIGNAL = 3.4; EST_HUMAN HIT: AA648079.1, EVALUE 4.80e-01; SWISSPROT HIT: P22421, EVALUE 2.70e-02
acgtgtgtgtacaccaccagcagcagcaggtcaagccacaagcaatgttgccaaacaccccactgagttatgcaaccagcttcccgagaagggcggggtgggtagaggtggaaccaggggagggccatgggtcccagagggagctggctgccttgcctgcttgcctgctggtctgaccgcagtggccccagagggtgggggcagggctggccctttatcagtgccctgcagggttgcacccaacaccccctggcttcctctctcaacagacggaaaggggaggcagccacagggggcaaggggagggctgggcgttatcctaggcagcagagccgggcggttaccccg

SEQ ID NO: 16470 - DNA, 173 bp, Homo sapiens
  MAP TO CHR15.1; EXPRESSED IN ADULT LIVER, SIGNAL = 0.79; EXPRESSED IN LUNG, SIGNAL = 0.76; EXPRESSED IN HELA, SIGNAL = 0.97; EXPRESSED IN BRAIN, SIGNAL = 1.4; EXPRESSED IN HEART, SIGNAL = 0.85; EST_HUMAN HIT: BI490063.1, EVALUE 9.00e-41; SWISSPROT HIT: Q9JJZ8, EVALUE 2.00e-02; NT HIT: gi14754916, EVALUE 2.00e-87
cagatcttccacatgacctacgacctggccagcgccgtggtgcgcatcgtgaacctcatcggcatgatgctcctgctctgccactgggacggctgcctgcagttcctggtacccatgctacaggacttccctgacgactgctgggtgtccatcaacaacatggtggtgagtgc

SEQ ID NO: 16471 - DNA, 191 bp, Homo sapiens
  MAP TO CHR1.1; EXPRESSED IN FETAL LIVER, SIGNAL = 2.1; EXPRESSED IN HELA, SIGNAL = 4.1; EXPRESSED IN BRAIN, SIGNAL = 2.5; EXPRESSED IN ADULT LIVER, SIGNAL = 3.4; EXPRESSED IN BONE MARROW, SIGNAL = 1.8; EXPRESSED IN LUNG, SIGNAL = 1.8; EST_HUMAN HIT: AL546764.1, EVALUE 3.00e-96; SWISSPROT HIT: Q13751, EVALUE 2.00e-31; NT HIT: U17748.1, EVALUE 1.00e-103
ggcatgctgattgagcgctcctcagacttcggtaagacctggcgagtgtaccagtacctggctgccgactgcacctccaccttccctcgggtccgccagggtcggcctcagagctggcaggatgttcggtgccagtccctgcctcagaggcctaatgcacgcctaaatggggggaaggtaggtagagggaa

SEQ ID NO: 16472 - DNA, 140 bp, Homo sapiens
  MAP TO CHR4.1; EXPRESSED IN LUNG, SIGNAL = 2.8; EXPRESSED IN BRAIN, SIGNAL = 0.41; EXPRESSED IN HEART, SIGNAL = 1.4; EXPRESSED IN ADULT LIVER, SIGNAL =  81; EXPRESSED IN BONE MARROW, SIGNAL = 0.37; SWISSPROT HIT: P00326, EVALUE 3.00e-20; EST_HUMAN HIT: AV655912.1, EVALUE 2.00e-62; NT HIT: gi11496888, EVALUE 5.00e-72
ctaccttggcaactttgactgcagacccataaccagtcgaaaatccacagccaatgaggcagactttctccaggggcgaggctgcatcaattttggccactgcattctcatccaccactgtgtactgggagaaggtgctg

SEQ ID NO: 16473 - DNA, 405 bp, Homo sapiens
  MAP TO CHR5.1; EXPRESSED IN FETAL LIVER, SIGNAL = 1.6; EXPRESSED IN LUNG, SIGNAL = 2.1; EXPRESSED IN HELA, SIGNAL = 2.2; EXPRESSED IN BRAIN, SIGNAL = 2.1; EXPRESSED IN HEART, SIGNAL = 1.4; EXPRESSED IN ADULT LIVER, SIGNAL = 3.1; SWISSPROT HIT: Q9Y5E8, EVALUE 1.50e+00; EST_HUMAN HIT: R73124.1, EVALUE 8.80e+00; NT HIT: gi14861871, EVALUE 0.00e+00
ccctcacctggctccgctcccgcagcgtattagagcgggaccggatggcgtcaggctccagcgccagagctgtgggctgctgaacgctgaggggtcttagaaaagtgaagtcactgccgtccgaggccggtgaaaagcacgtcctgtagcagtggctctgcgagtctgtgggccgcagcgtcacctccatgtacttgagcgtgccgtccgagctcacctgcaggttggggctggactgcttatagaagtccggggagggtgagtcctggcgcctgcagcactgccctccacccccgtccccgtctgcgtttccctgaaggcacttcgctgacagaaaggtgaaggtgactagggataagagactgacggtcgctagagccacaatgaggtaaagggtaaggtctg

SEQ ID NO: 16474 - DNA, 164 bp, Homo sapiens
  MAP TO CHR7.1; EXPRESSED IN HELA, SIGNAL = 0.52; EXPRESSED IN BRAIN, SIGNAL = 0.65; EXPRESSED IN HEART, SIGNAL = 0.55; EXPRESSED IN BONE MARROW, SIGNAL = 0.67; EST_HUMAN HIT: AW138877.1, EVALUE 4.00e-86; SWISSPROT HIT: Q99996, EVALUE 8.00e-14; NT HIT: AJ131693.1, EVALUE 2.00e-87
agcttgaacatgcgaaagtgacacagacagagttgatgcgtgagtcatttagacagaaacaagaagcaacagagtcccttaagtgccaagaggaacttcgagagcgccttcatgaggagtccagggccagagaacagctagctgtggagctcagtaaggctgag

SEQ ID NO: 16475 - DNA, 258 bp, Homo sapiens
  MAP TO CHR4.1; EXPRESSED IN BONE MARROW, SIGNAL = 0.48; EXPRESSED IN HELA, SIGNAL = 0.38; EXPRESSED IN BRAIN, SIGNAL = 0.58; EXPRESSED IN HEART, SIGNAL = 0.62; NT HIT: AF156490.1, EVALUE 5.00e-58; EST_HUMAN HIT: BI914503.1, EVALUE 6.00e-09; SWISSPROT HIT: P23574, EVALUE 6.00e-46
ttataagtaaagatagccaacccaataaaccaagttgaacagggcaaaagcggttgggaaaaatattctagaataagagtcaattttggcaatgcgtatgtgtatccttccttccctccaagatcctgttctgcagtcttcaaagcaacagaagaagctggcacaatctttgccctccaaacactgatacccataatcatcttcttgcggcacagaaatattattcattggaatcagagtggatccaggatggagacc

SEQ ID NO: 16476 - DNA, 159 bp, Homo sapiens
  MAP TO CHRX.1; EXPRESSED IN PLACENTA, SIGNAL = 3.4; EXPRESSED IN FETAL LIVER, SIGNAL = 3.5; EXPRESSED IN LUNG, SIGNAL = 5.2; EXPRESSED IN HELA, SIGNAL = 4.7; EXPRESSED IN BRAIN, SIGNAL = 6.1; EXPRESSED IN BONE MARROW, SIGNAL = 3.5; EXPRESSED IN ADULT LIVER, SIGNAL = 2.7; EXPRESSED IN HEART, SIGNAL = 3.8; NT HIT: gi4503970, EVALUE 2.00e-84; EST_HUMAN HIT: R87340.1, EVALUE 2.00e-84; SWISSPROT HIT: P31150, EVALUE 7.00e-26
caggtgttctgttcctgctcctacgatgccaccacacactttgagacaacctgcaacgacatcaaagacatctacaaacgcatggctggcacggcctttgactttgagaacatgaagcgcaaacagaacgacgtctttggagaagctgagcagtgattg

SEQ ID NO: 16477 - DNA, 202 bp, Homo sapiens
  MAP TO CHR6.1; EXPRESSED IN BONE MARROW, SIGNAL = 0.45; EXPRESSED IN FETAL LIVER, SIGNAL = 0.42; EXPRESSED IN LUNG, SIGNAL = 0.6; EXPRESSED IN HELA, SIGNAL = 0.49; EXPRESSED IN BRAIN, SIGNAL = 0.47; EXPRESSED IN HEART, SIGNAL = 0.56; SWISSPROT HIT: Q28824, EVALUE 1.40e+00; NT HIT: gi16157591, EVALUE 1.80e-01; EST_HUMAN HIT: BF943924.1, EVALUE 1.00e-34
tgactgccagctttactgagctcacatgttgtccttatttttgtgtttgccagggagaaatgcctgctgcctctccagttggctttggaatccaagaatgtgaagctggcccaacatgctttggcagggatgcaggtatggctttgactgaatgcaatgggatgatagaaattgacaggccactttggcattgaaagggcaa

SEQ ID NO: 16478 - DNA, 276 bp, Homo sapiens
  MAP TO CHR15.1; EXPRESSED IN FETAL LIVER, SIGNAL = 1.1; EXPRESSED IN LUNG, SIGNAL = 2.2; EXPRESSED IN HELA, SIGNAL = 0.6; EXPRESSED IN BRAIN, SIGNAL = 0.77; EXPRESSED IN BONE MARROW, SIGNAL = 0.8; EXPRESSED IN HEART, SIGNAL = 1.9; EST_HUMAN HIT: AL596783.1, EVALUE 2.00e-55; SWISSPROT HIT: Q9UPM8, EVALUE 2.00e-46; NT HIT: AF155156.2, EVALUE 0.00e+00
aggtattaggggaatattcctacctcttagataaggaaacgccagaggaagttatagctaagctctacaagttacttatgaatgactctgtgtcttcagaaacaaaagcctggttaattgctgctgtgaccaaattgacatctcaggcgcactcttctaatacagttgagagattaatccatgaatttaccatatctttggatacttgtatgagacaacatgcatttgaattaaaacatttgcatgagaatgtggaacttatgaagagcttgcttc

SEQ ID NO: 16479 - DNA, 284 bp, Homo sapiens
  MAP TO CHR22.1; EXPRESSED IN HELA, SIGNAL = 1.3; EXPRESSED IN BRAIN, SIGNAL = 0.91; EXPRESSED IN LUNG, SIGNAL = 0.82; EXPRESSED IN HEART, SIGNAL = 0.8; EXPRESSED IN ADULT LIVER, SIGNAL = 1.1; EST_HUMAN HIT: AI692666.1, EVALUE 0.00e+00; SWISSPROT HIT: Q28640, EVALUE 2.50e-02; NT HIT: L77566.1, EVALUE 0.00e+00
cccaaaggcctgagcccagccatgtcgccagccctacagcgccttgtgagcaggacggccagcaagtacacagaccgggccctgcgggccagctacacaccatccccagcacgctccacccacctcaagaccccggccagtgggctgcagacccccacaagcacaccggcgcctggctctgccacacgcacccctctcacacaggacccggcctccatcacggacaacctgctgcagctccctgcccggcgcaaagcttcggacttcttttagagccaggcctg

SEQ ID NO: 16480 - DNA, 101 bp, Homo sapiens
  MAP TO CHR3.1; EXPRESSED IN LUNG, SIGNAL = 1.2; EXPRESSED IN HELA, SIGNAL =   1; EXPRESSED IN BRAIN, SIGNAL = 1.1; EXPRESSED IN HEART, SIGNAL = 0.75; EST_HUMAN HIT: BE531149.1, EVALUE 2.00e-34; NT HIT: gi14758967, EVALUE 1.00e-34
cccttcattgctgtgtgaccttggggaaaggcagtgccctatctgggcaatcagatccacccagtgcttaagaatagcagggaagaaggtgcttcaaagac

SEQ ID NO: 16481 - DNA, 275 bp, Homo sapiens
  MAP TO CHR7.1; EXPRESSED IN FETAL LIVER, SIGNAL = 0.91; EXPRESSED IN BRAIN, SIGNAL = 1.2; EXPRESSED IN HELA, SIGNAL =   1; EXPRESSED IN BONE MARROW, SIGNAL = 1.1; SWISSPROT HIT: Q9JLN6, EVALUE 1.70e+00; EST_HUMAN HIT: BG716387.1, EVALUE 9.40e-02; NT HIT: gi4826977, EVALUE 0.00e+00
tggtggagagtggaaggtagacagtgatccgcttccaattctggaatctttccgaggtgtaaattgaactttccgtgtaatgcagacagccaatggttggaggaacacactcttcggtgacaagatgccagtccttgccattgttcagagaatactggagctgtacactgtgggagttgctgaagggcttgctacagcccatgctcatttcaaactgcaaaaaggtagatgctgacacatgaaaatcccaggtctcagcataacgaggttttcct

SEQ ID NO: 16482 - DNA, 245 bp, Homo sapiens
  MAP TO CHR1.1; EXPRESSED IN BONE MARROW, SIGNAL = 2.3; EXPRESSED IN FETAL LIVER, SIGNAL = 2.3; EXPRESSED IN LUNG, SIGNAL = 1.8; EXPRESSED IN BRAIN, SIGNAL = 5.2; EXPRESSED IN HEART, SIGNAL = 1.8; SWISSPROT HIT: P50993, EVALUE 5.00e-39; EST_HUMAN HIT: BF926154.1, EVALUE 1.00e-111; NT HIT: gi13636676, EVALUE 0.00e+00
gtgacagtggccagaagcccctcaggcacgttggccactatgatgccgatgaggaagatgactgcctccagccagctgtagcccaggatgagggagagcacgaagaaggagacccccaggaatacagcgacccctgtgatcagctggatgaagtgttcaatctccattgctatgggtgtccgcccaacctccaggcctgaggcgagagtagctatgcggcccatcaccgtccggtctcctgtggc

SEQ ID NO: 16483 - DNA, 175 bp, Homo sapiens
  MAP TO AC073133.5; EXPRESSED IN BRAIN, SIGNAL = 0.62; SWISSPROT HIT: Q62280, EVALUE 2.50e+00; EST_HUMAN HIT: AL535500.1, EVALUE 9.00e-01; NT HIT: AF104401.1, EVALUE 1.50e-01
aaaacccttaaaagcctgagggtgatccagcccctttaatacccaggccctgagcatgccgcagatcaaggcccaggccccagcctgctttgtctgcgaaagatgaaagccaggcgcaaacaggtgaaggcttttttgaatcatcacctgcaattaagcaaaggaaaaccaagag

SEQ ID NO: 16484 - DNA, 171 bp, Homo sapiens
  MAP TO CHR1.1; EXPRESSED IN BRAIN, SIGNAL = 1.3; EXPRESSED IN HEART, SIGNAL = 1.3; EXPRESSED IN ADULT LIVER, SIGNAL = 0.9; EXPRESSED IN BONE MARROW, SIGNAL = 1.1; EXPRESSED IN FETAL LIVER, SIGNAL =   1; EXPRESSED IN LUNG, SIGNAL = 1.3; NT HIT: gi14742780, EVALUE 2.00e-50; SWISSPROT HIT: P20063, EVALUE 5.00e-01; EST_HUMAN HIT: AI905894.1, EVALUE 1.00e-61
agctgccgggggaatatgcgaagggactgaccaatgccgctgtggggccggcctatgtgttgcaggctgaggcccttgttcatgtctagaagtccattcttgggccagcagcccatggcgaagctgtaagcctggaagacaggaggcaagtggttaacggaggccctgacc

SEQ ID NO: 16485 - DNA, 149 bp, Homo sapiens
  MAP TO CHR5.1; EXPRESSED IN HEART, SIGNAL = 2.6; EXPRESSED IN BONE MARROW, SIGNAL = 3.5; EXPRESSED IN ADULT LIVER, SIGNAL = 2.9; EXPRESSED IN PLACENTA, SIGNAL =   3; EXPRESSED IN FETAL LIVER, SIGNAL = 2.8; EXPRESSED IN HELA, SIGNAL = 3.9; EXPRESSED IN BRAIN, SIGNAL = 3.6; EXPRESSED IN LUNG, SIGNAL = 2.3; SWISSPROT HIT: P08510, EVALUE 4.50e+00; NT HIT: AJ308438.1, EVALUE 7.90e+00
cagcagtatgacgaaaaccagcagctgtctctgcaggctcaggctgggggctgggagtttattccatctgttctctttgttctgctcttaccctgttacttcccttcccaaccctgaataaaacagaatatttctagaatcctttgtta

SEQ ID NO: 16486 - DNA, 238 bp, Homo sapiens
  MAP TO CHR17.1; EXPRESSED IN HEART, SIGNAL = 0.63; EXPRESSED IN FETAL LIVER, SIGNAL = 0.45; EXPRESSED IN BRAIN, SIGNAL = 0.51; EST_HUMAN HIT: BG719412.1, EVALUE 1.00e-127; SWISSPROT HIT: Q09530, EVALUE 4.00e-22; NT HIT: gi14774624, EVALUE 1.00e-127
cacaggttggctatacagtgcgctttgatgatgtcacctcagaagacaccaggatcaagtttctgacagatggcatgcttctgcgtgaagcaatttcagactctttgcttcggaaatacagctgtgtcattttggatgaagctcacgaacggactatccacacagatgtgctctttggagtggtgaaagctgcacagaagaggagaaaggaactcgggaaacttcctctgaaagtatg

SEQ ID NO: 16487 - DNA, 105 bp, Homo sapiens
  MAP TO CHR17.1; EXPRESSED IN BRAIN, SIGNAL = 0.48; EXPRESSED IN ADULT LIVER, SIGNAL = 6.5; EXPRESSED IN LUNG, SIGNAL = 0.62; EST_HUMAN HIT: BG617410.1, EVALUE 9.00e-49; SWISSPROT HIT: P02749, EVALUE 9.00e-14; NT HIT: Y11494.1, EVALUE 2.00e-52
cagccagagtatgtccttttgctggaatcttagaaaatggagccgtacgctatacgacttttgaatatcccaacacgatcagtttttcttgtaacactgggtaag

SEQ ID NO: 16488 - DNA, 324 bp, Homo sapiens
  MAP TO CHR2.1; EXPRESSED IN PLACENTA, SIGNAL = 3.6; EXPRESSED IN LUNG, SIGNAL = 1.6; EXPRESSED IN FETAL LIVER, SIGNAL = 2.4; EXPRESSED IN HELA, SIGNAL = 3.5; EXPRESSED IN BRAIN, SIGNAL = 3.3; EXPRESSED IN HEART, SIGNAL = 2.4; EXPRESSED IN ADULT LIVER, SIGNAL = 1.8; EXPRESSED IN BONE MARROW, SIGNAL = 3.3; EST_HUMAN HIT: AI830329.1, EVALUE 4.40e-01; SWISSPROT HIT: Q15746, EVALUE 7.00e-10; NT HIT: AJ277892.1, EVALUE 0.00e+00
tcctcatgaaaataccttttcaattccagaacctaagaagccacctgtatttgatcagcaccttactccagtaacagtgagtgaaggagaatacgtgcagctcagctgccatgtccagggatctgagccaattaggatccagtggttgaaggctggcagggaaataaagccttcagacagatgcagcttcagctttgctagtgggacagctgtactggaactcagagatgtggctaaagcagattcgggagattatgtgtgtaaagcttcaaatgtggctggaagtgacactaccaaatcaaaagtgaccattaaaggtacaga

SEQ ID NO: 16489 - DNA, 156 bp, Homo sapiens
  MAP TO CHR7.1; EXPRESSED IN FETAL LIVER, SIGNAL = 0.42; EXPRESSED IN BRAIN, SIGNAL = 0.56; EXPRESSED IN BONE MARROW, SIGNAL = 0.55; EST_HUMAN HIT: BG282333.1, EVALUE 7.90e-01; NT HIT: Z99105.1, EVALUE 8.40e+00
tccaaatgttagatgtggttttagctactcaccgcaaagctgggttactaacatttctaaaatttctgaaaatgattttcaggcctctagcctgctttggagcagatgaaaattttccattgttgatccacagacattagtatgcaaggtaaataa

SEQ ID NO: 16490 - DNA, 152 bp, Homo sapiens
  MAP TO CHR19.1; EXPRESSED IN PLACENTA, SIGNAL = 1.6; EXPRESSED IN LUNG, SIGNAL = 2.8; EXPRESSED IN HELA, SIGNAL = 1.3; EXPRESSED IN BRAIN, SIGNAL = 1.5; EXPRESSED IN HEART, SIGNAL = 2.4; EXPRESSED IN BONE MARROW, SIGNAL =   2; SWISSPROT HIT: Q08477, EVALUE 2.00e-18; EST_HUMAN HIT: T85456.1, EVALUE 5.00e-73; NT HIT: AB002457.1, EVALUE 5.00e-78
ccccagctctgtccccttctctggctaggccaagtggcagctcctggcctcagagggtagtgcccgtctggacatgtttgagcacatcagcctcatgaccttggacagtctgcagaaatgtgtcttcagctttgacagccattgccaggagt

SEQ ID NO: 16491 - DNA, 191 bp, Homo sapiens
  MAP TO CHR7.1; EXPRESSED IN ADULT LIVER, SIGNAL = 0.5; EXPRESSED IN HELA, SIGNAL = 0.68; EXPRESSED IN FETAL LIVER, SIGNAL = 0.64; EXPRESSED IN BRAIN, SIGNAL = 0.7; EXPRESSED IN BONE MARROW, SIGNAL = 0.69; SWISSPROT HIT: Q14563, EVALUE 3.00e-25; NT HIT: gi5174672, EVALUE 5.00e-85
gttaccttgcagaaatgttggaatccaacaatgtgatcactttcaatggcttggccaacagctccagttatcataccttccttttggatgaggaacggagtaggctgtatgttggagcaaaggatcacatattttcattcgacctggttaatatcaaggattttcaaaaggtatcagtattctaatatatg

SEQ ID NO: 16492 - DNA, 146 bp, Homo sapiens
  MAP TO CHR5.1; EXPRESSED IN FETAL LIVER, SIGNAL = 1.8; EXPRESSED IN HELA, SIGNAL = 2.3; EXPRESSED IN BRAIN, SIGNAL =   2; EXPRESSED IN BONE MARROW, SIGNAL = 1.7; EXPRESSED IN HEART, SIGNAL = 1.4; NT HIT: gi14781244, EVALUE 5.00e-72; SWISSPROT HIT: Q9UKU0, EVALUE 2.00e-20; EST_HUMAN HIT: AL041091.1, EVALUE 7.00e-72
ttacctgaatcttattaaagaagagttcatcccagatactatcattcctgatgattccactccggacctcggcttgcttacgctttgctgcaaactccaggagccagcgctttaatggtgtgtttgcctggctgaagatctgagga

SEQ ID NO: 16493 - DNA, 252 bp, Homo sapiens
  MAP TO CHR7.1; EXPRESSED IN HELA, SIGNAL = 1.2; EXPRESSED IN BRAIN, SIGNAL = 1.1; EXPRESSED IN HEART, SIGNAL = 5.3; EXPRESSED IN ADULT LIVER, SIGNAL =   1; EXPRESSED IN PLACENTA, SIGNAL = 1.2; EXPRESSED IN LUNG, SIGNAL =   1; NT HIT: AJ132990.1, EVALUE 0.00e+00; SWISSPROT HIT: Q16676, EVALUE 1.40e+00; EST_HUMAN HIT: AL602841.1, EVALUE 0.00e+00
tgctcaccctcctgctgccgggtgatgctgccgaaggatcccaggcgctcccggcccaggaagtccccaaacacagcagggaaggggtccccgccgacctgggtggactcctccacccgcacctcgcgctttgtctccccgccccgcgtcttgctgatctccgtgcgctccgtgcgggtgtaggtgtggctgctgcgtgtgaaggtgcgtgtcaggcgctcctgggcagacaccatctggaaccagtttcct

SEQ ID NO: 16494 - DNA, 272 bp, Homo sapiens
  MAP TO CHR22.1; EXPRESSED IN HEART, SIGNAL = 0.94; EXPRESSED IN BONE MARROW, SIGNAL = 1.1; EXPRESSED IN ADULT LIVER, SIGNAL = 1.4; EXPRESSED IN PLACENTA, SIGNAL = 1.6; EXPRESSED IN FETAL LIVER, SIGNAL = 1.4; EXPRESSED IN HELA, SIGNAL = 1.6; EXPRESSED IN LUNG, SIGNAL = 3.1; EXPRESSED IN BRAIN, SIGNAL = 1.2; NT HIT: gi14777789, EVALUE 0.00e+00; EST_HUMAN HIT: BG534300.1, EVALUE 0.00e+00; SWISSPROT HIT: P34501, EVALUE 8.00e-15
gcacccacccagtcttgggggccggtagttgcggcagtcattggagggccgccgttgcatgtagcgggggcagtcgggtgcccagaggcagcagtaatagaagctgaggacatcgtagagccagtgggacatgctgggcactcggggtggcgtgcggaacgggggtgcgccccagtcatggccgcggtcgggagtgctgccgccgctggagtcagctgtcaggagctgcgtcccgtccgctgtgtagcagcactgctgacctgagccgtacc

SEQ ID NO: 16495 - DNA, 136 bp, Homo sapiens
  MAP TO CHR22.1; EXPRESSED IN ADULT LIVER, SIGNAL = 1.3; EXPRESSED IN FETAL LIVER, SIGNAL = 0.63; EXPRESSED IN BRAIN, SIGNAL = 0.79; EXPRESSED IN LUNG, SIGNAL = 1.4; EXPRESSED IN HEART, SIGNAL = 1.4; SWISSPROT HIT: Q02192, EVALUE 2.60e+00; NT HIT: gi15317470, EVALUE 4.00e-66; EST_HUMAN HIT: BF902692.1, EVALUE 6.00e-66
cttaccaggcacaaggaaattcttggactggtggtttgggtccccatcagggatgggcttgggcaggtggtgaacggtcacctcatattcctggtcagggtcaaccacaaagtggctgaaggtaaaacgccactga

SEQ ID NO: 16496 - DNA, 151 bp, Homo sapiens
  MAP TO CHR5.1; EXPRESSED IN HEART, SIGNAL = 1.7; EXPRESSED IN ADULT LIVER, SIGNAL = 2.4; EXPRESSED IN FETAL LIVER, SIGNAL = 2.7; EXPRESSED IN HELA, SIGNAL =   2; EXPRESSED IN BRAIN, SIGNAL = 2.7; EXPRESSED IN BONE MARROW, SIGNAL = 2.8; EXPRESSED IN PLACENTA, SIGNAL = 2.3; EXPRESSED IN LUNG, SIGNAL = 1.7; EST_HUMAN HIT: AA935376.1, EVALUE 3.00e-03
aaagcaaaaatttccagaattgttgctcttgagataatttgattcaaagtgaagagaaggcagtaataacgctaatcaaattataaatagttttatttaaggctgttctaagtttctcttattcatttgtactttaggttggtgcccaaaa

SEQ ID NO: 16497 - DNA, 132 bp, Homo sapiens
  MAP TO CHR10.1; EXPRESSED IN ADULT LIVER, SIGNAL = 0.52; EXPRESSED IN FETAL LIVER, SIGNAL = 0.76; EXPRESSED IN HELA, SIGNAL = 0.97; EXPRESSED IN LUNG, SIGNAL = 1.1; EXPRESSED IN BRAIN, SIGNAL = 0.74; EXPRESSED IN BONE MARROW, SIGNAL = 0.73; SWISSPROT HIT: P49327, EVALUE 3.50e+00; EST_HUMAN HIT: AW245557.1, EVALUE 2.00e-59; NT HIT: gi15805042, EVALUE 1.70e+00
tccagcagccgctccaccacctgctcgtggcgccccagcagccgtcgctgctgcgcctccgcgcggttggcgcccagcaggctgagcagcccctggctcacctcctctatgtcgcggaaggcggccatgact

SEQ ID NO: 16498 - DNA, 185 bp, Homo sapiens
  MAP TO CHR14.1; EXPRESSED IN LUNG, SIGNAL = 1.8; EXPRESSED IN HEART, SIGNAL = 1.8; EXPRESSED IN PLACENTA, SIGNAL = 3.8; EXPRESSED IN FETAL LIVER, SIGNAL = 3.2; EXPRESSED IN BRAIN, SIGNAL = 3.8; EXPRESSED IN HELA, SIGNAL = 3.6; EXPRESSED IN BONE MARROW, SIGNAL =   4; EXPRESSED IN ADULT LIVER, SIGNAL = 2.2; SWISSPROT HIT: P51955, EVALUE 2.00e-09; EST_HUMAN HIT: AI961740.1, EVALUE 2.00e-97; NT HIT: gi13652907, EVALUE 1.60e-01
aggatgactcactggttgtgtggaaggaagtcgatttgacccggctgtctgagaaggaacgtcgtgatgccttgaatgagatagttattctggcactgctgcagcacgacaacattattgcctactacaatcacttcatggacaataccacgctgctgattgagctggaatattgtaatggtaag

SEQ ID NO: 16499 - DNA, 172 bp, Homo sapiens
  MAP TO CHR12.1; EXPRESSED IN BRAIN, SIGNAL = 1.2; EXPRESSED IN HELA, SIGNAL =   1; EXPRESSED IN LUNG, SIGNAL = 0.99; EXPRESSED IN ADULT LIVER, SIGNAL = 0.87; EXPRESSED IN BONE MARROW, SIGNAL = 1.8; EXPRESSED IN FETAL LIVER, SIGNAL = 0.89; SWISSPROT HIT: P51689, EVALUE 6.60e-01; EST_HUMAN HIT: BG761162.1, EVALUE 4.00e-89; NT HIT: gi5032222, EVALUE 3.00e-89
tccaggtctctgaatattgtgtggcgacttactgcgggtttttagcccccagtttaaagagttcaaaagtgcgcacgaatgtcactgtgaagctgagagtacaagacacctacttggattgtggaaccctgcagtatcgggaggaccccagattcacggggtatcgggtgga

SEQ ID NO: 16500 - DNA, 277 bp, Homo sapiens
  MAP TO CHR5.1; EXPRESSED IN FETAL LIVER, SIGNAL =   5; EXPRESSED IN LUNG, SIGNAL = 8.9; EXPRESSED IN HELA, SIGNAL = 3.6; EXPRESSED IN BRAIN, SIGNAL = 3.7; EXPRESSED IN HEART, SIGNAL = 8.6; EXPRESSED IN BONE MARROW, SIGNAL =   4; EXPRESSED IN PLACENTA, SIGNAL = 3.8; SWISSPROT HIT: Q58696, EVALUE 6.70e+00; EST_HUMAN HIT: AU139053.1, EVALUE 1.50e+00; NT HIT: gi7657414, EVALUE 7.00e-85
ccctctccaggttcgacctgatcgcaaatggaggtgcttccttgactctacactttgagcgagccccgttcatgagccaggagcgcactgtgtggctgccgtggaacagcttttacgccatggacaccctggtgatgaagaccgaggagaactccatccccagctgtgacctcagtggctttgtccggcctgatccaatcatcatctcctccccactgtccaccttctttagtgctgcccctgggcagaatcccatcgtgcctgagacccaggtagg

SEQ ID NO: 16501 - DNA, 147 bp, Homo sapiens
  MAP TO CHR17.1; EXPRESSED IN BRAIN, SIGNAL = 0.75; EXPRESSED IN BONE MARROW, SIGNAL = 0.83; EXPRESSED IN FETAL LIVER, SIGNAL = 0.67; SWISSPROT HIT: Q99758, EVALUE 3.50e-02; EST_HUMAN HIT: AV731894.1, EVALUE 2.00e-47
ctagcatgtacatagacaaatattgtgccacagaatctctttcttcactggttaaacaacatatacctggagctactttattacaacagaatgaccaacaacttgtgtatagcttgcctttcaaggacatggacaaattttcaggta

SEQ ID NO: 16502 - DNA, 204 bp, Homo sapiens
  MAP TO CHR6.1; EXPRESSED IN ADULT LIVER, SIGNAL = 0.9; EXPRESSED IN BONE MARROW, SIGNAL = 0.63; EXPRESSED IN BRAIN, SIGNAL = 0.57; EXPRESSED IN HEART, SIGNAL = 0.64; NT HIT: AE000965.1, EVALUE 1.80e-01; SWISSPROT HIT: P25747, EVALUE 3.70e-01; EST_HUMAN HIT: BE788357.1, EVALUE 2.00e-32
aagcctgtctgttttcaattcttaacttttcacacatggcaaacgagtggaacttctgagcactgcgatcatctggctgatgaacaagctgttttccatttctggcaacaaatacttctggcttatcgtgacgggatgaaaagggatgaaaatatactctggttggatattgttgataacatttgtcatctttgcagctaaaaa

SEQ ID NO: 16503 - DNA, 311 bp, Homo sapiens
  MAP TO CHR19.1; EXPRESSED IN FETAL LIVER, SIGNAL = 0.85; EXPRESSED IN LUNG, SIGNAL = 0.65; EXPRESSED IN BRAIN, SIGNAL = 1.1; EXPRESSED IN HEART, SIGNAL = 0.9; EXPRESSED IN BONE MARROW, SIGNAL =   1; SWISSPROT HIT: P56146, EVALUE 1.70e+00; EST_HUMAN HIT: BF325665.1, EVALUE 1.00e-108
ccctgtcctgaaaagagctggaagacaggcttcgtagacatatatgtttcatttttcttgtcttcaactttaacacccacctctttatcaaaaattccctgtaattctgaaggtaattccccctttttgatggagttcagaaactgctgacttgcaccatttgaataacttctgaaataattgttgacggtgaatccatttttccataattttatgtttacgtctacctgtttcttttgttaagtgggagacaagcatttggaaccaaccttctgagcttcctcaaaaaggctatcaacaaactattcaca

SEQ ID NO: 16504 - DNA, 248 bp, Homo sapiens
  MAP TO CHR17.1; EXPRESSED IN HELA, SIGNAL =  14; EXPRESSED IN BRAIN, SIGNAL =  20; EXPRESSED IN HEART, SIGNAL =  15; EXPRESSED IN BONE MARROW, SIGNAL =  21; EXPRESSED IN PLACENTA, SIGNAL =  15; EXPRESSED IN FETAL LIVER, SIGNAL =  19; EXPRESSED IN LUNG, SIGNAL =  12; SWISSPROT HIT: Q39575, EVALUE 2.00e-06; EST_HUMAN HIT: BG471399.1, EVALUE 2.10e-02; NT HIT: X94763.1, EVALUE 1.50e-02
tgctatgactccctaggttgtcagcactggagacttatttcatccccaaggatggcagcctcgcttcttacaaggaatacatcagcttattgcctggcatggacccccctgaggcctttggccagcaccccaatgctgatgtggcctctcagatcactgaggcacaaaccctctttgatactttgctttccttgcaacctcagattacacccaccagggctggaggccagacccgggaagagaaggta

SEQ ID NO: 16505 - DNA, 213 bp, Homo sapiens
  MAP TO CHR2.1; EXPRESSED IN LUNG, SIGNAL = 1.5; EXPRESSED IN BRAIN, SIGNAL = 2.8; EXPRESSED IN HEART, SIGNAL = 1.8; EXPRESSED IN BONE MARROW, SIGNAL = 3.1; EXPRESSED IN ADULT LIVER, SIGNAL = 2.2; EXPRESSED IN PLACENTA, SIGNAL =   2; EXPRESSED IN FETAL LIVER, SIGNAL = 2.3; SWISSPROT HIT: Q00918, EVALUE 3.00e-22; EST_HUMAN HIT: BE838140.1, EVALUE 1.00e-65; NT HIT: gi4557730, EVALUE 7.00e-66
cctctgtttatccattaatatctggtgtttgtcagcctgtgtttgttttgtgtctgatgttccatgtcttttttgcagatattgatgaatgtgtaaacaacactgtttgtgacagtcacgggttttgtgacaatacagctggctccttccgctgcctctgttatcagggctttcaagccccacaggatgggcaagggtgtgtgggtgagtttt

SEQ ID NO: 16506 - DNA, 240 bp, Homo sapiens
  MAP TO CHR17.1; EXPRESSED IN FETAL LIVER, SIGNAL = 1.2; EXPRESSED IN HELA, SIGNAL = 1.5; EXPRESSED IN BRAIN, SIGNAL = 1.3; EXPRESSED IN LUNG, SIGNAL = 1.4; EXPRESSED IN HEART, SIGNAL = 1.1; EXPRESSED IN BONE MARROW, SIGNAL = 1.4; SWISSPROT HIT: P33076, EVALUE 1.00e+00; EST_HUMAN HIT: BG206750.1, EVALUE 1.00e-56; NT HIT: AB023143.1, EVALUE 0.00e+00
ctgctccaaagaaggaatgaggttctgcagagctgtggtccgagccgtgatcaggaaggatgcctcgggaagtatagttttccccagcaaactgcccagcagtgcatccgccggctgtggctggctccagtgcagacagagctcagaactcggctcctgcaagacccatcctggctcatctacaccatcgaggatgaagagcagccgctctggcctagacaggatctgtctaatgggagc

SEQ ID NO: 16507 - DNA, 183 bp, Homo sapiens
  MAP TO CHR22.1; EXPRESSED IN PLACENTA, SIGNAL = 5.8; EXPRESSED IN FETAL LIVER, SIGNAL = 4.3; EXPRESSED IN HELA, SIGNAL = 5.1; EXPRESSED IN BRAIN, SIGNAL = 5.7; EXPRESSED IN HEART, SIGNAL = 5.3; EXPRESSED IN ADULT LIVER, SIGNAL = 4.6; EXPRESSED IN BONE MARROW, SIGNAL = 6.4; SWISSPROT HIT: P34420, EVALUE 1.00e-07; EST_HUMAN HIT: AW163428.1, EVALUE 2.00e-91; NT HIT: L77570.1, EVALUE 9.00e-99
gcagggcctccagacggtcatccaaagggatttctttcctgatgtggagaagctccaggcacagaaggagtacctggaagccgaggagaatggagacttggaacggatgcgccagattgccatcaagtttggctctgccttgggcaagatgtcccgggagcccccgccaccctgtatgaggac

SEQ ID NO: 16508 - DNA, 214 bp, Homo sapiens
  MAP TO CHR19.1; EXPRESSED IN PLACENTA, SIGNAL =  22; EXPRESSED IN FETAL LIVER, SIGNAL =  13; EXPRESSED IN LUNG, SIGNAL =  12; EXPRESSED IN HEART, SIGNAL =  12; EXPRESSED IN BONE MARROW, SIGNAL =  16; EXPRESSED IN ADULT LIVER, SIGNAL =   5; EXPRESSED IN BRAIN, SIGNAL =  15; EXPRESSED IN HELA, SIGNAL =  19; SWISSPROT HIT: P35456, EVALUE 1.10e+00; EST_HUMAN HIT: AL551317.1, EVALUE 1.00e-102; NT HIT: gi16163211, EVALUE 1.00e-104
tggagggggcagccggacaaggggtgggattcgaggggagaagtaggtcttgttgcggaggtcagagttacagcgggacccctggcaacaggagccactgagcgtgaaccctgggcctgttactccatcccgagtgcagaattcatcctggacacagccccggacaggcaaggacacagtcacattagctgcaggaaggagacacagataggtc

SEQ ID NO: 16509 - DNA, 119 bp, Homo sapiens
  MAP TO CHR7.1; EXPRESSED IN BONE MARROW, SIGNAL = 2.2; EXPRESSED IN HELA, SIGNAL = 3.4; EXPRESSED IN FETAL LIVER, SIGNAL =   2; EXPRESSED IN BRAIN, SIGNAL = 2.5; EXPRESSED IN LUNG, SIGNAL =   1; EXPRESSED IN HEART, SIGNAL = 1.1; EST_HUMAN HIT: AA635016.1, EVALUE 1.00e-60; NT HIT: AF230460.1, EVALUE 3.90e-01
aaaacagacacccatttccatttcctttgcttctcaacacatcatgctggtgacagatgtttctgaactgtttcaatgtccctgtctaaatagaaaatgcacacttaatgatacccatg

SEQ ID NO: 16510 - DNA, 159 bp, Homo sapiens
  MAP TO CHR7.1; EXPRESSED IN FETAL LIVER, SIGNAL = 0.61; EXPRESSED IN BRAIN, SIGNAL = 0.5; EXPRESSED IN BONE MARROW, SIGNAL = 0.53; SWISSPROT HIT: P50440, EVALUE 7.60e+00; NT HIT: AF143392.1, EVALUE 1.40e-01; EST_HUMAN HIT: AA094808.1, EVALUE 2.00e-01
ccaagttcaaggccagaaaagtgtatcacccataaagtaaccccagcactccatgccagaggaatttctgacaaaatgaatggtttcaaatacaacagcctgctgactaagttcccagcttgcaacctccctggaatctgcagtcttggattaaccctc

SEQ ID NO: 16511 - DNA, 299 bp, Homo sapiens
  MAP TO CHR7.1; EXPRESSED IN HELA, SIGNAL = 0.54; EXPRESSED IN BRAIN, SIGNAL = 0.7; EXPRESSED IN BONE MARROW, SIGNAL = 0.63; EXPRESSED IN FETAL LIVER, SIGNAL = 0.62; EST_HUMAN HIT: BI761793.1, EVALUE 0.00e+00; SWISSPROT HIT: P97792, EVALUE 2.10e+00
gttccatttccctgaatgttgaccttcacgatgtaattgccttcatcagggaactgcagtgggttgataagcagagatgcattgggtggcatcatggtgaacttgtgttggtattccaagtcaggaaccacagacttattcacagagcccagtaagtatttgggcattgtgtggggtctctcaaatagccatatgatctggatgtctgatgctggagtgtggaagccatagtggacgggtaggtagagggcctgacctctgacgccatggacagtgtgtgatggcactgtcaccttcag

SEQ ID NO: 16512 - DNA, 124 bp, Homo sapiens
  MAP TO CHR8.1; EXPRESSED IN PLACENTA, SIGNAL = 2.1; EXPRESSED IN LUNG, SIGNAL = 2.4; EXPRESSED IN HELA, SIGNAL =   2; EXPRESSED IN BRAIN, SIGNAL = 2.3; EXPRESSED IN HEART, SIGNAL = 2.1; EXPRESSED IN ADULT LIVER, SIGNAL = 2.8; NT HIT: AF020503.1, EVALUE 2.60e-02; EST_HUMAN HIT: R51904.1, EVALUE 2.40e+00
tggaatttgtattcctcaagggaccattttttccagatacacatcatactaaatactttaatcaaatgtgtaatcaaaaatattttccattttacttcttttattcatttaatggatttatgtt

SEQ ID NO: 16513 - DNA, 217 bp, Homo sapiens
  MAP TO CHR22.1; EXPRESSED IN BRAIN, SIGNAL = 0.62; EXPRESSED IN HEART, SIGNAL = 0.64; EXPRESSED IN BONE MARROW, SIGNAL = 0.68; EXPRESSED IN ADULT LIVER, SIGNAL = 0.61; EXPRESSED IN PLACENTA, SIGNAL = 1.9; EXPRESSED IN FETAL LIVER, SIGNAL = 0.68; EST_HUMAN HIT: BF475827.1, EVALUE 1.00e-116; NT HIT: X57766.1, EVALUE 1.00e-116; SWISSPROT HIT: P24347, EVALUE 1.00e-38
cactcaccttggaagaaccaaatgtggccctgggcatcctcgaaggcagcgtccacagggctgggcagtccctgccagtggcgagaggccaatgctgggtagccgggctgcagctggcccccacggaggcgccacacaaagcccgctttgaagaaaaagagctcgcctcggatggtggagaccgcgtcaaaggaggcctcacaggcatctggcgggg

SEQ ID NO: 16514 - DNA, 178 bp, Homo sapiens
  MAP TO CHR19.1; EXPRESSED IN BRAIN, SIGNAL = 3.1; EXPRESSED IN HEART, SIGNAL = 4.4; EXPRESSED IN ADULT LIVER, SIGNAL = 6.3; EXPRESSED IN PLACENTA, SIGNAL = 3.5; EXPRESSED IN FETAL LIVER, SIGNAL = 2.6; EXPRESSED IN LUNG, SIGNAL =   5; EXPRESSED IN HELA, SIGNAL =   3; EST_HUMAN HIT: BI917570.1, EVALUE 6.00e-73; NT HIT: AB037816.1, EVALUE 5.00e-94; SWISSPROT HIT: Q9UBS0, EVALUE 1.70e-01
tgcaggtggccacgcggctccagtcgtcccctaatccagcagccctgctgaccctgcgcatggaattcacccgcatcctgtgcagccacgagcactacgtgaccctcaacctcccctgctgccccctgtcacctccagcctcgccctccccctctgtgtcctccaccacctcccaggt

SEQ ID NO: 16515 - DNA, 159 bp, Homo sapiens
  MAP TO CHR19.1; EXPRESSED IN FETAL LIVER, SIGNAL = 1.5; EXPRESSED IN LUNG, SIGNAL = 3.2; EXPRESSED IN BRAIN, SIGNAL = 1.2; EXPRESSED IN HEART, SIGNAL = 2.6; EXPRESSED IN BONE MARROW, SIGNAL = 1.4; EXPRESSED IN ADULT LIVER, SIGNAL = 1.3; EXPRESSED IN PLACENTA, SIGNAL = 1.6; SWISSPROT HIT: P48301, EVALUE 1.00e-24; EST_HUMAN HIT: BF686670.1, EVALUE 4.00e-83; NT HIT: gi14757575, EVALUE 2.00e-83
gacggaacgggcccagctggaggacggcagatttgtgtaccgcctgctgcgctcgcccatgtgcgagtacctggtgaatttcttgcacaagttgcggcagctgcctgagcgatacatgatgaacagcgtcctggaaaacttcaccatcctccaggtgat

SEQ ID NO: 16516 - DNA, 303 bp, Homo sapiens
  MAP TO CHR5.1; EXPRESSED IN HELA, SIGNAL =   4; EXPRESSED IN BRAIN, SIGNAL = 4.1; EXPRESSED IN LUNG, SIGNAL = 3.1; EXPRESSED IN HEART, SIGNAL = 3.2; EXPRESSED IN ADULT LIVER, SIGNAL =   3; EXPRESSED IN PLACENTA, SIGNAL = 4.1; EXPRESSED IN FETAL LIVER, SIGNAL = 3.5; SWISSPROT HIT: P15265, EVALUE 3.20e-01; EST_HUMAN HIT: BG327699.1, EVALUE 4.00e-38; NT HIT: gi6678244, EVALUE 7.00e-42
ttcctcgtgtctggccagcagccagactgctaacagctatctctcccaaccacaggcccagccctcctctctaccccctgtccccttcctgcggatatagacagcacttccctgcccccactgcagcccctggcgccccctaccccaggtgagtcccctacactgcagctaggctcctgcttcctgttgcccaggcttcagagcccacacaaggccatgcccaggccagtgcttgccctgtgttagtcgtttgtccatctgtccgtctgtcattttgcagccccctgctgtcctgtgcctgag

SEQ ID NO: 16517 - DNA, 226 bp, Homo sapiens
  MAP TO CHR5.1; EXPRESSED IN PLACENTA, SIGNAL = 1.6; EXPRESSED IN FETAL LIVER, SIGNAL = 1.1; EXPRESSED IN LUNG, SIGNAL = 1.2; EXPRESSED IN BRAIN, SIGNAL = 1.5; EXPRESSED IN ADULT LIVER, SIGNAL =   3; SWISSPROT HIT: P50468, EVALUE 4.80e-01; EST_HUMAN HIT: BE074885.1, EVALUE 1.00e-124; NT HIT: gi14781188, EVALUE 1.00e-124
agtgaacatcagaagttggaagagaacatagacaatataaaaagaaatcataatttggcattagggcgacagaaaggttatgaagaagaaattattcattttaagaaagaacttcgagaaccacaatttcgggatgctgaggaaaagtatagagaaatgatgattgttatgaggacaacagaacttgtgaacaaggatctggatatttattataagactcttgacc

SEQ ID NO: 16518 - DNA, 260 bp, Homo sapiens
  MAP TO CHR22.1; EXPRESSED IN HELA, SIGNAL = 7.2; EXPRESSED IN HEART, SIGNAL = 5.6; EXPRESSED IN ADULT LIVER, SIGNAL =  10; EXPRESSED IN BONE MARROW, SIGNAL = 9.1; EXPRESSED IN PLACENTA, SIGNAL = 8.3; EXPRESSED IN LUNG, SIGNAL = 7.3; EXPRESSED IN BRAIN, SIGNAL = 8.6; NT HIT: gi14777647, EVALUE 0.00e+00; SWISSPROT HIT: P12018, EVALUE 5.00e-48; EST_HUMAN HIT: BG502270.1, EVALUE 0.00e+00
ccccatagcacagtaatacatagcctcgtcctcaggctgcagctcagagatgctcaaataccccctgttcctggccacatctttggatccagagaagcgaggggggacctgggggccctggctcttgtctgattgtgagaaatatctcagcaggaacctgggagggtggcccggcctctgctggtaccagtagacgctgtacacaccgatgtcatggtcgttcctcagggtgcaggtgaggcggattgtggttccaaggg

SEQ ID NO: 16519 - DNA, 345 bp, Homo sapiens
  MAP TO CHR19.1; EXPRESSED IN HELA, SIGNAL = 3.8; EXPRESSED IN BRAIN, SIGNAL = 2.6; EXPRESSED IN BONE MARROW, SIGNAL = 2.2; EXPRESSED IN HEART, SIGNAL = 4.3; EXPRESSED IN PLACENTA, SIGNAL =   4; EXPRESSED IN FETAL LIVER, SIGNAL = 3.6; EXPRESSED IN LUNG, SIGNAL = 5.9; NT HIT: gi14759823, EVALUE 0.00e+00; SWISSPROT HIT: Q10438, EVALUE 5.20e-01; EST_HUMAN HIT: BG983485.1, EVALUE 3.00e-48
caaggaccccgatccaccctactccgtggagaccccctatggctaccgcctggacctggacttcctcaagtacgtggatgacatcgagaagggccacacgctgcgacgcgtggcagtgcagcgccgcccccgcctgagctcgctgccccgtggccctggctcctggtggacgtccactgagtcgctgtgctccaatgccagtggggacagccgccactcagcctattcctactgcggccgtggcttctaccctcagtatggtgctctggagacccgcggtggcttcaatccgcgggtggagcgcacgctgctggatgcccgtcgccgtctcgaggaccaggcggc

SEQ ID NO: 16520 - DNA, 177 bp, Homo sapiens
  MAP TO CHR22.1; EXPRESSED IN BRAIN, SIGNAL = 1.6; EXPRESSED IN HELA, SIGNAL =   2; EXPRESSED IN BONE MARROW, SIGNAL = 1.5; EXPRESSED IN HEART, SIGNAL = 1.1; EXPRESSED IN ADULT LIVER, SIGNAL = 1.5; EXPRESSED IN FETAL LIVER, SIGNAL = 1.2; EST_HUMAN HIT: AV648625.1, EVALUE 3.00e-10; NT HIT: AF240786.1, EVALUE 3.00e-95; SWISSPROT HIT: Q64471, EVALUE 3.00e-17
cactctcatgcctcagctccgtgattgccaccaagccagccacagagatacggggcccagtaaggaaggcctggtcccgcaggaacttgtcctcgagcagctgcaggcatccgtccagctcagccaaagtggccgccaacatctcgggtggcactgactcgcccaggaacacaggga

SEQ ID NO: 16521 - DNA, 131 bp, Homo sapiens
  MAP TO CHR4.1; EXPRESSED IN FETAL LIVER, SIGNAL = 0.67; EXPRESSED IN HELA, SIGNAL =   1; EXPRESSED IN BRAIN, SIGNAL = 0.53; EXPRESSED IN LUNG, SIGNAL = 0.67; EXPRESSED IN BONE MARROW, SIGNAL = 0.69; EST_HUMAN HIT: BF858099.1, EVALUE 6.50e-01; NT HIT: AL161534.2, EVALUE 1.10e-01; SWISSPROT HIT: Q12986, EVALUE 2.00e-03
acacaaacctttcttctacattgatgcttctgacagtcacgcatcttaacacacttagtttcacacagataaggtttatgacaaggcattcgttttgtatgctttccacagcgacaatgcttttccacttc

SEQ ID NO: 16522 - DNA, 158 bp, Homo sapiens
  MAP TO CHR5.1; EXPRESSED IN FETAL LIVER, SIGNAL = 1.5; EXPRESSED IN LUNG, SIGNAL = 1.2; EXPRESSED IN HELA, SIGNAL = 0.81; EXPRESSED IN BRAIN, SIGNAL = 1.5; EXPRESSED IN HEART, SIGNAL =   2; EXPRESSED IN ADULT LIVER, SIGNAL = 1.5; EXPRESSED IN BONE MARROW, SIGNAL = 1.8; SWISSPROT HIT: Q9USI6, EVALUE 5.80e+00; EST_HUMAN HIT: BG031196.1, EVALUE 8.00e-01; NT HIT: AP001514.1, EVALUE 5.40e-01
catcccaacacactgccttgtacattctcagcaagatgattactgactaattgggaaaacaatccaaactcgtgaggaaatgggtcataatgtgttttctctctgggcaacaaatagcaatccctggaccaccatggaagttatgttcctgaaaatta

SEQ ID NO: 16523 - DNA, 394 bp, Homo sapiens
  MAP TO CHR8.1; EXPRESSED IN FETAL LIVER, SIGNAL = 0.4; EXPRESSED IN BRAIN, SIGNAL = 0.53; EXPRESSED IN LUNG, SIGNAL = 0.76; EXPRESSED IN BONE MARROW, SIGNAL = 0.54; EXPRESSED IN HEART, SIGNAL = 0.76; SWISSPROT HIT: P40474, EVALUE 3.20e+00
aactgtaacatctgctggaactgtttgctttcttcagtgaccacagactctccctcatttttcatcagcattttccttctgtttctataaccccatcaaaaccaaatatacccaggcttccccatccatcttaggaaacaagacaaaaccactttcatttagccttggcagcatgcccgcctccacctttctccttcctgttccctgtcccctccccaccatcaaactatcactccatctcaaccctcccctccaggcttaagctctctgaacttgtctctgctttctttcaccaaactcatttcttacatccctgcagttctgtttctgggactgtctcctttcaccgccttcccaaagatttcctcatagtcaaaatatttgagtcctctct

SEQ ID NO: 16524 - DNA, 221 bp, Homo sapiens
  MAP TO CHR7.1; EXPRESSED IN PLACENTA, SIGNAL = 1.3; EXPRESSED IN FETAL LIVER, SIGNAL = 1.3; EXPRESSED IN LUNG, SIGNAL = 1.5; EXPRESSED IN BRAIN, SIGNAL = 1.4; EXPRESSED IN BONE MARROW, SIGNAL = 1.1; SWISSPROT HIT: P38470, EVALUE 1.40e+00; EST_HUMAN HIT: AA602506.1, EVALUE 1.00e-121; NT HIT: AL163204.2, EVALUE 7.90e-01
tatattttcattataaacacaatatttcattagatactccatgtaagagttgcagcctttgtggtcagtgtgtgtatggttcagtgagggatggtgctgacctccccagaaaagacttctgcttctttagatattccagtattggattaggattgctcattctgggtataccagagccttacagggtgcctagaaatgggagccagtgccgggagaaggcc

SEQ ID NO: 16525 - DNA, 405 bp, Homo sapiens
  MAP TO CHR2.1; EXPRESSED IN BONE MARROW, SIGNAL = 0.38; EXPRESSED IN FETAL LIVER, SIGNAL = 0.34; EXPRESSED IN BRAIN, SIGNAL = 0.34; SWISSPROT HIT: Q9JJV1, EVALUE 2.00e+00; EST_HUMAN HIT: AL514510.1, EVALUE 8.00e-65; NT HIT: gi7705396, EVALUE 0.00e+00
cttctcttttaagctgagccattatctggatattgtggaagtaaacattgctcaccagatctctctacgttcagaagcattttttcatgcaatgacctctcaacacgagttgcaggactacctcaggaaaacttcccaggctgtaaaaatgcttcgagataaaattgcacagattgataaagtaatgtgtgaaggatcactccacattttaagactggcacttaccagaaataattgtgttaaagtatacaataagctgaagttaatggccactgtacaccagactcagcctacagtacaggtgttattatctacttctgaatttgttggagcattggacttaatagcaacaacacaagaggttctacagcaggaacttcagggcattcacagtttccggtatgt

SEQ ID NO: 16526 - DNA, 450 bp, Homo sapiens
  MAP TO CHRX.1; EXPRESSED IN BRAIN, SIGNAL =   1; EXPRESSED IN HEART, SIGNAL = 0.92; EXPRESSED IN ADULT LIVER, SIGNAL = 1.3; EXPRESSED IN BONE MARROW, SIGNAL = 1.2; EXPRESSED IN LUNG, SIGNAL = 0.71; EXPRESSED IN HELA, SIGNAL =   1; SWISSPROT HIT: P24712, EVALUE 3.00e+00; EST_HUMAN HIT: AA382885.1, EVALUE 4.00e-02; NT HIT: gi13649009, EVALUE 0.00e+00
aggtgcgattagagtggccaacagaccttgcagtaaatcctatggacaattcattgtatgtcttggataacaacattgtgctgcaaatttctgagaacaggcgtgttcggatcatcgcaggacgccccattcactgccaggtgccaggcatcgatcatttcctggtcagcaaggtagcaattcactccactctagagtcagcgagggccatcagtgtctcccacagcgggctgctcttcatagctgaaacagacgagaggaaagtaaaccgcattcagcaagtaaccaccaatggggagatctacatcatcgctggtgcccccactgactgtgactgcaaaattgatccaaactgtgactgtttttcaggtatgacctttttagcaattcaccagcttcccctctctgttttgaaaagaaaaacgtgccccagtaaagtcaaaaggaaaa

SEQ ID NO: 16527 - DNA, 185 bp, Homo sapiens
  MAP TO CHR2.1; EXPRESSED IN LUNG, SIGNAL = 2.1; EXPRESSED IN FETAL LIVER, SIGNAL = 1.3; EXPRESSED IN HELA, SIGNAL = 1.5; EXPRESSED IN BRAIN, SIGNAL = 1.5; EXPRESSED IN HEART, SIGNAL = 1.7; EXPRESSED IN BONE MARROW, SIGNAL = 1.5; EXPRESSED IN ADULT LIVER, SIGNAL = 2.9; SWISSPROT HIT: P47989, EVALUE 2.00e-28; EST_HUMAN HIT: AL552489.1, EVALUE 3.00e-96; NT HIT: U39487.1, EVALUE 2.00e-96
taccagggtggtgaacttgtccacgcaggcattgcggatcttctccggggtggcagggctgtctagccggaagagttccttcacgttattacctgtgtgctgagctcgagctgcacggatggcatctttgatggcaaagaagatagaagcagccaggaagaggggcggctctccaacagcctgaa

SEQ ID NO: 16528 - DNA, 247 bp, Homo sapiens
  MAP TO CHR22.1; EXPRESSED IN HELA, SIGNAL =   2; EXPRESSED IN BRAIN, SIGNAL =   2; EXPRESSED IN HEART, SIGNAL = 1.9; EXPRESSED IN BONE MARROW, SIGNAL = 1.8; EXPRESSED IN ADULT LIVER, SIGNAL = 2.9; EXPRESSED IN FETAL LIVER, SIGNAL = 1.9; EXPRESSED IN PLACENTA, SIGNAL = 2.4; SWISSPROT HIT: P98153, EVALUE 2.00e-40; EST_HUMAN HIT: BF984969.1, EVALUE 1.00e-130; NT HIT: L77570.1, EVALUE 0.00e+00
cagtgcaccacttcaacctcggccgcaggatccctggctttgattacggcccagacgggtttggcacgggcctcacgccgctgcatctttctgacgacggagagggtgggactttccatttccacgaccctccacctccctacacggcatacaagtacccggacatcggccagcccgacgaccctccgccgccctacgaggcctccatccacccggacagtgtgttctatgaccctgcaggtgcctg

SEQ ID NO: 16529 - DNA, 238 bp, Homo sapiens
  MAP TO CHRX.1; EXPRESSED IN BRAIN, SIGNAL = 1.6; EXPRESSED IN ADULT LIVER, SIGNAL = 1.2; EXPRESSED IN BONE MARROW, SIGNAL = 0.7; EXPRESSED IN HEART, SIGNAL = 1.4; EXPRESSED IN FETAL LIVER, SIGNAL = 0.51; SWISSPROT HIT: Q24278, EVALUE 8.00e-07; NT HIT: AJ012582.1, EVALUE 1.00e-106; EST_HUMAN HIT: BI490383.1, EVALUE 1.00e-105
ccgaagtaggagccatcgaacagcttcatctccttgttgcccttagcgagcacgctgaccacgccgtgctgaatgaagtacatcttcccgatggtgccttcgcggatgaggtagtcacccggctggaagacctcgaacttgagcttggtcagcatggccgtgacgaagttggggtcagcattggcgaacagcggcatggaggtcaccagcttccggcagttgaagttgacaatctcct

SEQ ID NO: 16530 - DNA, 262 bp, Homo sapiens
  MAP TO CHR7.1; EXPRESSED IN LUNG, SIGNAL = 0.59; EXPRESSED IN BRAIN, SIGNAL = 0.86; EXPRESSED IN BONE MARROW, SIGNAL = 0.89; EXPRESSED IN FETAL LIVER, SIGNAL = 0.73; NT HIT: gi15079217, EVALUE 2.40e-01
tccactgacgagtcctctacagaaaggtgcaattctgcgagggctttcacatcttctgcaaatgccatcactaaggtgcctgttagcaatttaattatcacattatgagctttagaaaaagccagtctgctgtgctgcaggctgtgacgtggagctcggcagttcacccactttgcagcaaaacacttataaataaaatgagaatatagagagggaatcaaatttctttgctggaacacgatagcttgggaacaaatgtttt

SEQ ID NO: 16531 - DNA, 154 bp, Homo sapiens
  MAP TO CHR19.1; EXPRESSED IN HELA, SIGNAL =   1; EXPRESSED IN BRAIN, SIGNAL = 1.2; EXPRESSED IN LUNG, SIGNAL = 1.5; EXPRESSED IN HEART, SIGNAL = 1.9; EXPRESSED IN ADULT LIVER, SIGNAL = 1.2; EXPRESSED IN BONE MARROW, SIGNAL = 1.2; EXPRESSED IN FETAL LIVER, SIGNAL =   1; SWISSPROT HIT: Q9UIA0, EVALUE 7.00e-03; EST_HUMAN HIT: BF688894.1, EVALUE 3.00e-65; NT HIT: gi14763698, EVALUE 2.00e-65
tggggccacaacccgaaaactgcccacatgtgcaggtgtctgggtgctgctgccgtggacccctgtgaagatgggcggccgcatcaagacctggaggaagcgatggttctgcttgaccgccaagcccgccgcttggcctactatgcgggtaagc

SEQ ID NO: 16532 - DNA, 192 bp, Homo sapiens
  MAP TO CHR7.1; EXPRESSED IN BONE MARROW, SIGNAL = 0.47; EXPRESSED IN HEART, SIGNAL = 0.82; EXPRESSED IN FETAL LIVER, SIGNAL = 0.54; EXPRESSED IN LUNG, SIGNAL = 0.94; EXPRESSED IN BRAIN, SIGNAL = 0.5; SWISSPROT HIT: Q9ZMV7, EVALUE 4.30e+00; EST_HUMAN HIT: BE072393.1, EVALUE 1.60e-02
gaagcccatataaatgcattaaaaacagtgataacattcttttgcttctttatttcttattttgctgccttcatgacaaatatgacatttagtttaccttacagaagtcaccagttctttatgctgaaggacataatggcagcatatccctctggccactcggttataataatcttgagtaattctaagttc

SEQ ID NO: 16533 - DNA, 202 bp, Homo sapiens
  MAP TO CHR5.1; EXPRESSED IN ADULT LIVER, SIGNAL = 0.88; EXPRESSED IN FETAL LIVER, SIGNAL = 0.88; EXPRESSED IN BRAIN, SIGNAL =   1; EXPRESSED IN HEART, SIGNAL = 0.95; SWISSPROT HIT: O60925, EVALUE 5.00e-26; EST_HUMAN HIT: AL521761.1, EVALUE 2.00e-91; NT HIT: gi12408673, EVALUE 1.00e-91
ctaaatcatggacttgtttttattaggccttcacagagcttcaagccaaagttattgacactcaacagaaggtgaagctcgcagacatacagattgaacagctaaacagaacgaaaaagcatgcacatcttacagatacagagatcatgactttggtagatgagactaacatgtatgaaggtgtaggaagaatgtaagtaaa

SEQ ID NO: 16534 - DNA, 274 bp, Homo sapiens
  MAP TO CHRX.1; EXPRESSED IN BRAIN, SIGNAL = 1.3; EXPRESSED IN HEART, SIGNAL = 1.7; EXPRESSED IN ADULT LIVER, SIGNAL = 1.8; EXPRESSED IN PLACENTA, SIGNAL = 6.6; EXPRESSED IN LUNG, SIGNAL = 4.4; EXPRESSED IN FETAL LIVER, SIGNAL = 1.2; SWISSPROT HIT: P21333, EVALUE 2.00e-48; EST_HUMAN HIT: BI752108.1, EVALUE 0.00e+00; NT HIT: L44140.1, EVALUE 0.00e+00
cctacctggcactccagcttcagctctctccaggccagggcccccagctcggaccttgtgggctcccccttcccctaggggccccacggtgaactggaaggggctcccaggcacgtgctggcccttgtacttcacgctgactgtgtgtgtgcccatctcagcgggaacaaagcggatgcagtaggtgtggttctccccttccacgatctcggcctcatgggtcttgcccgatgggctggtcacctgggctgtcatatcctggatgctaatttct

SEQ ID NO: 16535 - DNA, 160 bp, Homo sapiens
  MAP TO CHR6.1; EXPRESSED IN HELA, SIGNAL = 0.79; EXPRESSED IN BRAIN, SIGNAL = 0.63; EXPRESSED IN HEART, SIGNAL = 0.66; EXPRESSED IN BONE MARROW, SIGNAL = 0.75; NT HIT: D37815.1, EVALUE 5.50e-01; SWISSPROT HIT: P38760, EVALUE 3.00e-01; EST_HUMAN HIT: AI123402.1, EVALUE 2.10e-01
ccttctttggttcatttccttcatgagataaatgaagagcgcaagagattgaggttccaaagaacatgtgattcgtgagtcatgtctattttttctctatagtgttcattgaaaattcattgttccagtagaagaaacagaaagttaaaatgaacattaa

SEQ ID NO: 16536 - DNA, 195 bp, Homo sapiens
  MAP TO AC074271.8; EXPRESSED IN ADULT LIVER, SIGNAL =   7; EXPRESSED IN PLACENTA, SIGNAL = 4.7; EXPRESSED IN FETAL LIVER, SIGNAL = 4.9; EXPRESSED IN LUNG, SIGNAL =   5; EXPRESSED IN HELA, SIGNAL =   4; EXPRESSED IN BRAIN, SIGNAL = 5.9; EXPRESSED IN HEART, SIGNAL = 5.5; EXPRESSED IN BONE MARROW, SIGNAL =   6; SWISSPROT HIT: Q57538, EVALUE 4.30e+00; EST_HUMAN HIT: BG110737.1, EVALUE 1.00e-104; NT HIT: gi16158414, EVALUE 1.00e-88
accacagcatcaaaccggttatgataaatttctgcctggctctgctcaatgtattgttgtttagcatgaataaaagctggtattcccccatacacccagccaatgatgcctgctgtagctgccgtcttacagatattagcaaggtcctttgaaattctctgctgttcactacaacatcaaaaagacaatgttgtt

SEQ ID NO: 16537 - DNA, 101 bp, Homo sapiens
  MAP TO CHR19.1; EXPRESSED IN HELA, SIGNAL =  10; EXPRESSED IN LUNG, SIGNAL =  10; EXPRESSED IN BRAIN, SIGNAL =   9; EXPRESSED IN HEART, SIGNAL =  10; EXPRESSED IN BONE MARROW, SIGNAL = 9.4; EXPRESSED IN ADULT LIVER, SIGNAL = 7.6; EST_HUMAN HIT: BF799057.1, EVALUE 6.00e-50; NT HIT: gi14785858, EVALUE 4.00e-50
cactcgctccaatcctgaaggggctgaggaccgggcagtaggggcacaggccagcgtgggcagccgcagcgagggtgagggtgaggccgccagtgctgatg

SEQ ID NO: 16538 - DNA, 252 bp, Homo sapiens
  MAP TO CHR19.1; EXPRESSED IN HELA, SIGNAL = 0.49; EXPRESSED IN BRAIN, SIGNAL = 0.53; EXPRESSED IN BONE MARROW, SIGNAL = 0.49; EXPRESSED IN HEART, SIGNAL = 0.49; NT HIT: gi8922288, EVALUE 0.00e+00; SWISSPROT HIT: P22607, EVALUE 2.20e-01; EST_HUMAN HIT: AU145954.1, EVALUE 0.00e+00
acctttcatgccactgccatcctcctggaaggtgttccggctggagccctgctcctctgtctgctcactgccagaggaggccacgctgctctggggcgagagaggtgcgtgatcgggcgtggtaaaagcagcccgggccccaagctcctctggactcggccactcaccagggacctgggggcttgtagggatgagtgacatggagcgcttcagtgggctagggtggatttggcaggggagacctggccagag

SEQ ID NO: 16539 - DNA, 243 bp, Homo sapiens
  MAP TO CHR7.1; EXPRESSED IN LUNG, SIGNAL =   3; EXPRESSED IN HELA, SIGNAL = 1.3; EXPRESSED IN FETAL LIVER, SIGNAL = 1.8; EXPRESSED IN BRAIN, SIGNAL = 2.2; EXPRESSED IN HEART, SIGNAL = 2.6; EXPRESSED IN ADULT LIVER, SIGNAL =   2; NT HIT: AF132550.1, EVALUE 8.80e-01; SWISSPROT HIT: P81475, EVALUE 8.90e+00
ttgcaaataggtaccaaattacatatatatctgtcaaaatgatgtaggacctaaagtctctctgtaagttgatccttttgaccccatgattaggagcttcacaatgtggtaccacacctggaaacctccagaacaagatctcaaggaaacacaggaaattcctgaaacagcaaaaccccctatgtgaagacgtctgttattcctttgtgtatcaggagcatcactgttaattaactgttgata

SEQ ID NO: 16540 - DNA, 270 bp, Homo sapiens
  MAP TO CHR19.1; EXPRESSED IN PLACENTA, SIGNAL = 1.8; EXPRESSED IN HELA, SIGNAL = 1.5; EXPRESSED IN LUNG, SIGNAL = 0.97; EXPRESSED IN BRAIN, SIGNAL = 0.51; EXPRESSED IN HEART, SIGNAL = 1.2; EXPRESSED IN ADULT LIVER, SIGNAL =   4; SWISSPROT HIT: O15235, EVALUE 7.00e-50; EST_HUMAN HIT: BI161311.1, EVALUE 0.00e+00; NT HIT: gi14756964, EVALUE 0.00e+00
ctgggccccacggaaggccggccgcagctgaagggtgtggtcctgtgcacgtttacccgcaagccgaagaagcccaactcagccaatcgcaagtgctgtcgagtgcggctcagcactggccgcgaggccgtctgcttcatccctggggagggccacaccctgcaggagcaccagattgtccttgtggagggcggccgcacccaggacctgccaggcgtcaagctcaccgttgtgcgtggcaagtacgactgtggccacgtgcagaagaag

SEQ ID NO: 16541 - DNA, 202 bp, Homo sapiens
  MAP TO CHRX.1; EXPRESSED IN ADULT LIVER, SIGNAL = 0.42; EXPRESSED IN LUNG, SIGNAL =   1; EXPRESSED IN BRAIN, SIGNAL = 0.42; SWISSPROT HIT: O19004, EVALUE 3.00e-30; EST_HUMAN HIT: BI046727.1, EVALUE 9.00e-97; NT HIT: U01337.1, EVALUE 1.00e-110
gaggctcactccatgccctgggcagtctgccgggccacgtcgatgagctggaccatgtcgaagcgtgtgtcggccacatgcaggtgatggtagaggctggagccctcacaccactgtgtgatgatggcaaatcccggccgggtcatgaagcccataaacagcaagatgttgacatgtcgcgtcttcctgcaggcagggaggg

SEQ ID NO: 16542 - DNA, 397 bp, Homo sapiens
  MAP TO CHR12.1; EXPRESSED IN HELA, SIGNAL = 0.93; EXPRESSED IN BRAIN, SIGNAL = 1.1; EXPRESSED IN HEART, SIGNAL =   1; EXPRESSED IN BONE MARROW, SIGNAL = 1.1; EXPRESSED IN PLACENTA, SIGNAL = 1.1; EXPRESSED IN FETAL LIVER, SIGNAL = 0.93; EXPRESSED IN LUNG, SIGNAL = 1.1; SWISSPROT HIT: P38838, EVALUE 1.10e+00; EST_HUMAN HIT: R77309.1, EVALUE 0.00e+00; NT HIT: gi9506442, EVALUE 1.00e-04
caggtgctgacctgacagcagtggaccctgttcggggcaagacggccctggaatgggcagtgctgaccgacagcttcgacaccgtgtggaggattcggcagctgctgaggcggccccaagtggagcagcttagccagcactacaagcccgagtggccggccttgtccgggctcgtggcccaggcccaggcccaggcccaggttgccccttcactcctagaacggctgcaggctaccttgagcctcccctttgccccgtctcctcaggaggggggtgttctggaccaccttgtgactgccacaaccagcctggccagtcccttcgtcaccactgcctgccacactctgtgccctgaccatccaccttcgctgggcacccgaagcaagtccgtgccaga

SEQ ID NO: 16543 - DNA, 415 bp, Homo sapiens
  MAP TO CHR1.1; EXPRESSED IN ADULT LIVER, SIGNAL = 1.1; EXPRESSED IN FETAL LIVER, SIGNAL = 1.1; EXPRESSED IN HELA, SIGNAL =   2; EXPRESSED IN BRAIN, SIGNAL = 1.6; EXPRESSED IN BONE MARROW, SIGNAL = 1.4; EXPRESSED IN HEART, SIGNAL = 0.65; SWISSPROT HIT: P05882, EVALUE 1.20e+00; EST_HUMAN HIT: BG006422.1, EVALUE 2.30e+00; NT HIT: U61380.1, EVALUE 9.90e-02
aacctccctcccatttcctagattcaaaataggggcattattaccatgaacaatcgtgatctctctgcccctgtagaaatctcccagggtgacagtcgagccctgttttgaagctactactcgaacagtcctcctgctgtccaaacaatccaagtaggggtcccattccaggtttctcttgctgagagattgggcccgggtagaggacatgcccaaggattctcccatgcgatcctggcagtaggacttgaacttccactgcacaactgcaggctgatgggaggatgttgagaagtggcagcgaagcacagtgggctggaagagcatggccaccttcttcttgtcgggcactgtgacctgaaggccttcgaccatggctgcaaaacagaataaacatgtccgaacagtgtccata

SEQ ID NO: 16544 - DNA, 208 bp, Homo sapiens
  MAP TO CHR12.1; EXPRESSED IN LUNG, SIGNAL = 1.1; EXPRESSED IN HELA, SIGNAL = 0.65; EXPRESSED IN BRAIN, SIGNAL = 0.65; EXPRESSED IN HEART, SIGNAL = 1.1; EXPRESSED IN BONE MARROW, SIGNAL = 0.64; SWISSPROT HIT: O88599, EVALUE 3.70e-01; NT HIT: X76081.1, EVALUE 7.40e-01
ggattctttggctttaatccacaacccctttctcccccaaacccaggcggcctctgtaggttcccatgacaacagcatgcctgggaaggaccagcttgaggaaaaaacagattttactgtaagaaaaaactggccagaagccacaggccgggcaggctgggacaggggctctgcagtggggctgggtcctgggacatggaccagagag

SEQ ID NO: 16545 - DNA, 137 bp, Homo sapiens
  MAP TO CHR12.1; EXPRESSED IN ADULT LIVER, SIGNAL = 1.7; EXPRESSED IN HEART, SIGNAL = 1.7; EXPRESSED IN BONE MARROW, SIGNAL = 2.4; EXPRESSED IN LUNG, SIGNAL = 1.7; EXPRESSED IN FETAL LIVER, SIGNAL = 1.5; EXPRESSED IN BRAIN, SIGNAL = 1.7; EXPRESSED IN HELA, SIGNAL = 2.3; EST_HUMAN HIT: BG025766.1, EVALUE 3.00e-68; SWISSPROT HIT: Q9QYY8, EVALUE 8.90e-01; NT HIT: gi13649857, EVALUE 2.00e-68
acctcctcagtgctgaggccaaagtcacagggcaccactgtgcggtacttgaagcgacagggcaggtcgtcgatgatgtcctcgtagtccagccggtaatactcatccaggtactcctcgaacgtcttgtcccctgc

SEQ ID NO: 16546 - DNA, 187 bp, Homo sapiens
  MAP TO CHR16.1; EXPRESSED IN ADULT LIVER, SIGNAL = 1.2; EXPRESSED IN BONE MARROW, SIGNAL = 1.2; EXPRESSED IN PLACENTA, SIGNAL = 1.3; EXPRESSED IN FETAL LIVER, SIGNAL = 1.4; EXPRESSED IN LUNG, SIGNAL = 1.3; EXPRESSED IN BRAIN, SIGNAL = 1.2; EXPRESSED IN HEART, SIGNAL = 1.6; EST_HUMAN HIT: AL545807.1, EVALUE 1.00e-101; SWISSPROT HIT: Q15046, EVALUE 3.00e-32; NT HIT: gi14775433, EVALUE 1.00e-101
ccttgtctttgaggccaaagtgaagatgaggtaacatatgcaaacagggagacagcagtgtgatctcatacggaatgatgctcagctcacccttcttggttttaccaggattcccctgaactccaattatgtctccccgacgcagtttgttattaatatgaataaattcttcttctgatttataatt

SEQ ID NO: 16547 - DNA, 211 bp, Homo sapiens
  MAP TO CHR17.1; EXPRESSED IN ADULT LIVER, SIGNAL =   1; EXPRESSED IN PLACENTA, SIGNAL = 1.4; EXPRESSED IN FETAL LIVER, SIGNAL = 1.4; EXPRESSED IN LUNG, SIGNAL = 0.74; EXPRESSED IN HELA, SIGNAL = 1.6; EXPRESSED IN BRAIN, SIGNAL = 1.2; EXPRESSED IN BONE MARROW, SIGNAL = 1.4; NT HIT: Z83813.1, EVALUE 2.00e-47; EST_HUMAN HIT: AA974564.1, EVALUE 2.80e-01; SWISSPROT HIT: Q9NYC9, EVALUE 3.00e-21
ggcaggatactgacctgggccagacctgagtacattcggcccatggacttgtagtccaggccctcagagcagttgaccacaatgacatatatgcccagggccttgcccaggtccttgacggtctcggtcttgcctgtgcctgcagggcctttgggggagccccctcggtgcaggtgcaatgccgtggtcagtgtcatgtaacacctgagaa

SEQ ID NO: 16548 - DNA, 160 bp, Homo sapiens
  MAP TO CHR14.1; EXPRESSED IN BRAIN, SIGNAL = 0.87; EXPRESSED IN LUNG, SIGNAL = 2.2; EXPRESSED IN HEART, SIGNAL =   2; EXPRESSED IN BONE MARROW, SIGNAL = 0.94; NT HIT: gi14761658, EVALUE 2.00e-80; EST_HUMAN HIT: BF763707.1, EVALUE 3.00e-80; SWISSPROT HIT: O43707, EVALUE 5.00e-22
cacgtacttgagctcctgggcaatggcggcgatctgctccacgcggtcctggtgcgcagccaggtcgctctcgaaggcctcgtgcttgcgaatgagggctttgatgtccgatagtgtggccgtctcgtagtcccggtgcttcagcatggcttccttccct

SEQ ID NO: 16549 - DNA, 202 bp, Homo sapiens
  MAP TO CHR5.1; EXPRESSED IN FETAL LIVER, SIGNAL = 0.87; EXPRESSED IN BRAIN, SIGNAL = 1.1; EXPRESSED IN HEART, SIGNAL = 1.1; EXPRESSED IN ADULT LIVER, SIGNAL = 1.3; EXPRESSED IN BONE MARROW, SIGNAL =   1; EST_HUMAN HIT: BI758502.1, EVALUE 2.00e-97; SWISSPROT HIT: O76082, EVALUE 3.00e-30; NT HIT: AB016625.1, EVALUE 1.00e-110
tctccagacttgtattatttggctacagtcctggtgatggtgggcaagtttggagtcacggctgccttttccatggtctacgtgtacacagccgagctgtatcccacagtggtgagaaacatgggtgtgggagtcagctccacagcatcccgcctgggcagcatcctgtctccctacttcgtttaccttggtaagtcccatg

SEQ ID NO: 16550 - DNA, 286 bp, Homo sapiens
  MAP TO CHR19.1; EXPRESSED IN HELA, SIGNAL = 1.6; EXPRESSED IN BRAIN, SIGNAL = 1.4; EXPRESSED IN BONE MARROW, SIGNAL = 1.4; EXPRESSED IN FETAL LIVER, SIGNAL = 1.7; EXPRESSED IN LUNG, SIGNAL = 0.73; EST_HUMAN HIT: BG832005.1, EVALUE 0.00e+00; SWISSPROT HIT: P30352, EVALUE 4.60e+00; NT HIT: gi14761401, EVALUE 0.00e+00
cctgcgcctgcagcgcttccagcgccagcgccaggtggcccacctcgtcccgcagcgcgttccaggcagcacgctgctcctcctccttgtggcgctgctgcgcctggtggcgccagtactccagcactaggcagccgccgcccacgatgaagatggtggcttcgcccagcagctctgcgcccagctcagctgccgcctcctcgttcagcggcttgatgaccgtgccccggaagcccatgatgcgcatcttggtccgcatctccacccagtgatacactgcggggga

SEQ ID NO: 16551 - DNA, 178 bp, Homo sapiens
  MAP TO CHR2.1; EXPRESSED IN HELA, SIGNAL = 0.81; EXPRESSED IN BRAIN, SIGNAL = 0.76; EXPRESSED IN BONE MARROW, SIGNAL =   1; EXPRESSED IN FETAL LIVER, SIGNAL = 0.61; SWISSPROT HIT: Q16829, EVALUE 2.50e+00
gtttgccaaaccacttctcttgtaactctcagttttcatatactcatggcattttgctccaacatgttatatttaatcttagcacaagtatagatgttttgggtatgatttgtataagatacataatgaatttcacattaactttgggtaatccatcagggaagagatacttgtgaca

SEQ ID NO: 16552 - DNA, 260 bp, Homo sapiens
  MAP TO CHR3.1; EXPRESSED IN HELA, SIGNAL = 0.96; EXPRESSED IN FETAL LIVER, SIGNAL = 0.84; EXPRESSED IN BRAIN, SIGNAL = 0.98; EXPRESSED IN ADULT LIVER, SIGNAL = 0.82; EXPRESSED IN BONE MARROW, SIGNAL = 1.1; EST_HUMAN HIT: BI819155.1, EVALUE 1.00e-126; SWISSPROT HIT: P51178, EVALUE 1.00e-39; NT HIT: gi14737669, EVALUE 1.00e-126
ggacccactgccaccaaaaggatactgctgtagcttctgacgctggtccatggagcctgagtggtggatgatcttgtgcagccccagcacccagtgctgggcatcagctggcgatggggcgatgaggtctagtgtattgcgctggtccttgaagacaatggagaagcagcggtcctcgggcacatcacgggcgaacttctccagaccctccgtgcggtgccccattcgcacctcctgaatgtcctcgatggagactgcga

SEQ ID NO: 16553 - DNA, 164 bp, Homo sapiens
  MAP TO CHR16.1; EXPRESSED IN BONE MARROW, SIGNAL = 0.52; EXPRESSED IN BRAIN, SIGNAL = 0.46; NT HIT: X52519.1, EVALUE 2.00e-87; EST_HUMAN HIT: AI908122.1, EVALUE 2.00e-87; SWISSPROT HIT: P17735, EVALUE 2.00e-23
cagtgctttgagtacccgaatttcatccgagtggtcatcacagtccccgaggtgatgatgctggaggcgtgcagccggatccaggagttctgtgagcagcactaccattgtgctgaaggcagccaggaggagtgtgataaataggcctgcatccattctcctga

SEQ ID NO: 16554 - DNA, 206 bp, Homo sapiens
  MAP TO CHRX.1; EXPRESSED IN HELA, SIGNAL = 1.1; EXPRESSED IN BRAIN, SIGNAL = 0.96; EXPRESSED IN HEART, SIGNAL = 1.3; EXPRESSED IN BONE MARROW, SIGNAL = 0.97; EXPRESSED IN ADULT LIVER, SIGNAL = 0.86; EXPRESSED IN FETAL LIVER, SIGNAL = 0.86; EXPRESSED IN LUNG, SIGNAL = 1.6; SWISSPROT HIT: P51805, EVALUE 4.00e-24; NT HIT: L44140.1, EVALUE 1.00e-112; EST_HUMAN HIT: BF375954.1, EVALUE 2.00e-17
cagggctgccctgagatcctgcccagtggggacctcctgatccccgttggggtcatgcagcctcttaccttgcgggctaagaacctacctcagccgcagtcgggccagaagaactatgagtgcgtggtgcgggtgcaggggcggcagcagcgggtgcctgccgtgcgcttcaacagcagcagtgtgcagtgccagaacgcctcggt

SEQ ID NO: 16555 - DNA, 244 bp, Homo sapiens
  MAP TO CHR20.1; EXPRESSED IN HEART, SIGNAL = 1.2; EXPRESSED IN BONE MARROW, SIGNAL = 1.2; EXPRESSED IN ADULT LIVER, SIGNAL = 1.2; EXPRESSED IN PLACENTA, SIGNAL = 1.4; EXPRESSED IN FETAL LIVER, SIGNAL = 1.1; EXPRESSED IN LUNG, SIGNAL = 1.6; EXPRESSED IN BRAIN, SIGNAL = 1.5; EXPRESSED IN HELA, SIGNAL = 1.3; EST_HUMAN HIT: BI113756.1, EVALUE 1.00e-119; SWISSPROT HIT: P08487, EVALUE 2.00e-39; NT HIT: gi4505868, EVALUE 1.00e-123
ctgtttggcccagagattggcacagaacgtgcttgctaccgggacatgtcatccttcccggaaaccaaggctgagaaatacgtgaacaaggccaaaggcaagaagttccttcagtacaatcgactgcagctctcccgcatctaccccaagggccagcgactggattcctccaactacgatcctttgcccatgtggatctgtggcagtcagcttgtggccctcaacttccagacccctggtgagg

SEQ ID NO: 16556 - DNA, 170 bp, Homo sapiens
  MAP TO CHR5.1; EXPRESSED IN FETAL LIVER, SIGNAL = 0.5; EXPRESSED IN LUNG, SIGNAL = 0.67; EXPRESSED IN BRAIN, SIGNAL = 0.64; EXPRESSED IN HEART, SIGNAL = 0.88; EXPRESSED IN BONE MARROW, SIGNAL = 0.64; EST_HUMAN HIT: BF363314.1, EVALUE 1.00e-79; SWISSPROT HIT: P57078, EVALUE 1.70e-01; NT HIT: gi13386461, EVALUE 1.00e-79
taaagattatttctgcttacttgtgctaattcataataccctgctgaacaagccaaacacagcaggctttctccttcttctgtatgttcatttacacttctgccttcatctagcaatttacgaacagcattaacatccccatctgaacaagcttctgctagactgcgact

SEQ ID NO: 16557 - DNA, 175 bp, Homo sapiens
  MAP TO CHR20.1; EXPRESSED IN FETAL LIVER, SIGNAL = 1.1; EXPRESSED IN LUNG, SIGNAL = 1.4; EXPRESSED IN BRAIN, SIGNAL = 0.94; EXPRESSED IN HEART, SIGNAL = 1.4; EXPRESSED IN ADULT LIVER, SIGNAL = 0.41; EXPRESSED IN BONE MARROW, SIGNAL = 0.91; EST_HUMAN HIT: BF740966.1, EVALUE 3.00e-90; SWISSPROT HIT: P19174, EVALUE 2.00e-26; NT HIT: gi4505868, EVALUE 2.00e-90
caggtacccagtcatcctgtccattgaggaccactgcagcattgcccagcagagaaacatggcccaatacttcaagaaggtgctgggggacacactcctcaccaagcccgtggagatctctgccgacgggctcccctcacccaaccagcttaagaggaagatcctcatcaaggtg

SEQ ID NO: 16558 - DNA, 388 bp, Homo sapiens
  MAP TO CHR5.1; EXPRESSED IN FETAL LIVER, SIGNAL = 1.1; EXPRESSED IN LUNG, SIGNAL = 1.4; EXPRESSED IN HELA, SIGNAL = 0.91; EXPRESSED IN BRAIN, SIGNAL = 1.3; EXPRESSED IN HEART, SIGNAL = 1.8; EXPRESSED IN BONE MARROW, SIGNAL = 1.5; EXPRESSED IN ADULT LIVER, SIGNAL = 2.2; EST_HUMAN HIT: BI464118.1, EVALUE 1.40e-01; SWISSPROT HIT: P37483, EVALUE 9.50e-02
cccattcccctgaatttaaaagaagtaagtcaaatggtccttcagtcagaaaagtgatttcttagccaccaaggacaaaatagcgtctctggttaccaaccctaaagaatgtcttggcacattcctccctctggggctgagctgttttgtgtgctggccggccaggagctgctgggggtagggaatccagttttcagcttcccctttcaccagggggttggaagagcagccaagcagccagccttgccaactctctccccttctcacccaggggaagactgggaggccgaaattcctgaggatggttgtcccaacaaccggagagggtccagtgggcagcttgggtcctgcccactgggccaaaggctccagcagcaccacaggcttt

SEQ ID NO: 16559 - DNA, 272 bp, Homo sapiens
  MAP TO CHR11.1; EXPRESSED IN BONE MARROW, SIGNAL = 1.3; EXPRESSED IN HEART, SIGNAL =   1; EXPRESSED IN ADULT LIVER, SIGNAL = 1.2; EXPRESSED IN FETAL LIVER, SIGNAL = 1.3; EXPRESSED IN LUNG, SIGNAL = 1.1; EXPRESSED IN BRAIN, SIGNAL = 1.4; EST_HUMAN HIT: BE702500.1, EVALUE 1.00e-121; SWISSPROT HIT: P28659, EVALUE 4.00e-14; NT HIT: AF248648.1, EVALUE 1.00e-80
ttgttggctagggacagcagaagaaggaacagctgggagcttgcacagtctgcagaaagcaaaccacaaagactcactgctaaatactggggtccaagagtatttagaccagcaaggtttccccacacagatggcgctgatttgctgcatctgctgctggagctgctgggccattctcttctgttctttgtccttctgtgtatcagcaaattttaccaccatgggtgatgagcaaccctgtgaaaagaccataacgaaagggtcaaattcct

SEQ ID NO: 16560 - DNA, 147 bp, Homo sapiens
  MAP TO CHR20.1; EXPRESSED IN LUNG, SIGNAL =   1; EXPRESSED IN BRAIN, SIGNAL = 1.1; EXPRESSED IN HEART, SIGNAL = 1.3; EXPRESSED IN BONE MARROW, SIGNAL = 1.1; NT HIT: gi15299689, EVALUE 5.00e-01
tttgtttcctcagtgaggtgttctcatcagagaaatctgttgtttagtgtatacaggttgatttggtgaaatgatatttgtgtgtggtgttatgtaaatagaggtatggcccatctttctgatagtagcatagtctataattaggat

SEQ ID NO: 16561 - DNA, 151 bp, Homo sapiens
  MAP TO CHR17.1; EXPRESSED IN BRAIN, SIGNAL = 0.76; EXPRESSED IN BONE MARROW, SIGNAL = 0.82; SWISSPROT HIT: P55268, EVALUE 1.30e-01
acagctttgtctcttcgcagcagcctgtgggctcccagccatatcctggctgagcgatagcacatccagcttgcttggggccagggctgaatcaccatgaatcccccacagcttggcagtggctgcttaaagagacccagggctgaaataa

SEQ ID NO: 16562 - DNA, 161 bp, Homo sapiens
  MAP TO CHR5.1; EXPRESSED IN BRAIN, SIGNAL = 2.2; EXPRESSED IN HEART, SIGNAL = 3.6; EXPRESSED IN ADULT LIVER, SIGNAL = 3.5; EXPRESSED IN BONE MARROW, SIGNAL = 2.6; EXPRESSED IN PLACENTA, SIGNAL =   2; EXPRESSED IN FETAL LIVER, SIGNAL = 2.1; EXPRESSED IN LUNG, SIGNAL = 2.5; SWISSPROT HIT: P49590, EVALUE 3.00e-08; NT HIT: gi16171280, EVALUE 6.00e-38; EST_HUMAN HIT: BG388600.1, EVALUE 1.00e-82
ttacctttggggtcttgataataaaatttggtttctcttgatgtgctttcagttgggatgttaacactgcctctgcaacctggcagaagaatgaatgtgagatgtggcttctctggacactggccagacctgtggcatctctgaccctgttgaccaccaac

SEQ ID NO: 16563 - DNA, 189 bp, Homo sapiens
  MAP TO CHR19.1; EXPRESSED IN HEART, SIGNAL = 3.1; EXPRESSED IN PLACENTA, SIGNAL = 7.6; EXPRESSED IN FETAL LIVER, SIGNAL = 4.6; EXPRESSED IN LUNG, SIGNAL = 8.1; EXPRESSED IN BRAIN, SIGNAL = 2.2; SWISSPROT HIT: P11249, EVALUE 5.00e-32; NT HIT: gi14766237, EVALUE 9.00e-99; EST_HUMAN HIT: BI770865.1, EVALUE 1.00e-98
acctgcccacagtagacaatctcccctgaagacttcttcatcttctttaactgagatacaaagtaccagaagcgggacttggcgacgacatgattaggcgcaaagattcgcatgcggtagaggggcggcgtgtggcatttgggggtgggcaggcagcgacccactaccttgtactctcgtagctgaaag

SEQ ID NO: 16564 - DNA, 269 bp, Homo sapiens
  MAP TO CHR7.1; EXPRESSED IN ADULT LIVER, SIGNAL = 3.7; EXPRESSED IN PLACENTA, SIGNAL = 5.3; EXPRESSED IN FETAL LIVER, SIGNAL = 4.2; EXPRESSED IN LUNG, SIGNAL = 1.9; EXPRESSED IN HELA, SIGNAL = 8.5; EXPRESSED IN BRAIN, SIGNAL = 4.7; SWISSPROT HIT: Q10022, EVALUE 6.50e-02; NT HIT: gi15309022, EVALUE 0.00e+00; EST_HUMAN HIT: BF685306.1, EVALUE 0.00e+00
cacctggcctcggtgacatcagcagggtttcccctgcacaccttctccagctgcacatagaccgagcagttgacccggctccagtcggggtcgcagacggctaggaagttgggcctcagacgcccaatcatgtacttggccaggtctgtcagagactggctcacggcagccccaaacaggaaggtccccagcaccttgtatacagcagccacgtagttgttgaagtccgagcgagaatagagccggtctgtgtacaccaggtaggcttc

SEQ ID NO: 16565 - DNA, 267 bp, Homo sapiens
  MAP TO AP000850.3; EXPRESSED IN BRAIN, SIGNAL = 0.82; EXPRESSED IN ADULT LIVER, SIGNAL = 0.66; EXPRESSED IN BONE MARROW, SIGNAL = 0.9; EXPRESSED IN FETAL LIVER, SIGNAL = 0.67; EST_HUMAN HIT: BG115475.1, EVALUE 6.00e-03; SWISSPROT HIT: P11487, EVALUE 2.00e-47; NT HIT: X14445.1, EVALUE 0.00e+00
actctgtagctgccgcaccatctcgtggtccctgtggtccagcacgcggggcaggaacagggaggacttctgtgtgcggcgggtcttgaagcccctgcggggccggcccttgccgttcacagacacgtaccacagtctctcggcgctgggctgccggcgggccccaggcgtactagacaccgtccggtacagccgggaggcatacgtattatagcccagctcgtggatccgctccacaaactcgcactcggcgctgtagtgctcctg

SEQ ID NO: 16566 - DNA, 380 bp, Homo sapiens
  MAP TO CHR22.1; EXPRESSED IN PLACENTA, SIGNAL = 7.4; EXPRESSED IN FETAL LIVER, SIGNAL = 6.2; EXPRESSED IN LUNG, SIGNAL = 2.6; EXPRESSED IN HELA, SIGNAL = 6.2; EXPRESSED IN BRAIN, SIGNAL =   6; EXPRESSED IN HEART, SIGNAL = 3.3; EXPRESSED IN BONE MARROW, SIGNAL = 5.2; EST_HUMAN HIT: BF732879.1, EVALUE 0.00e+00; SWISSPROT HIT: Q9P2J3, EVALUE 5.00e-11
cttggctttgcaggtggcctgctacagctgcacgtctggacagtggtcatctgtctgcccactccctgctgggcacggtgagcctggcattgctgtgctggacaacaggatctatgtgttaggtggccgctcacacaaccgcggcagccgcacaggctacgtgcacatttacgatgtggagaaggactgctgggaggaagggccccagctggacaactccatctcaggcctggcggcctgtgtgctcaccctgccccgctccctgctccttgagccgccccgcgggacccctgaccgcagccaggccgacccggactttgcctctgaggtgatgagtgtgtctgactgggaggagtttgacaactccagtgaggactagg

SEQ ID NO: 16567 - DNA, 151 bp, Homo sapiens
  MAP TO CHR17.1; EXPRESSED IN BRAIN, SIGNAL = 0.58; EXPRESSED IN ADULT LIVER, SIGNAL = 1.3; EXPRESSED IN BONE MARROW, SIGNAL = 0.53; EXPRESSED IN HEART, SIGNAL =   1; EXPRESSED IN FETAL LIVER, SIGNAL = 0.63; EXPRESSED IN LUNG, SIGNAL = 1.2; EST_HUMAN HIT: BF352092.1, EVALUE 5.00e-48; SWISSPROT HIT: O25242, EVALUE 4.50e+00
cctagaattggtttaactatgttttcaaaatttttgacagttcagacactgatacgtgactgtcaagttatcagagagactaaagaagaccagattgcagagctgaaaaagatatgtgaacaaagtacggaatctctaaataatgactggg

SEQ ID NO: 16568 - DNA, 262 bp, Homo sapiens
  MAP TO CHR11.1; EXPRESSED IN BONE MARROW, SIGNAL = 0.85; EXPRESSED IN HEART, SIGNAL = 0.58; EXPRESSED IN ADULT LIVER, SIGNAL = 0.63; EXPRESSED IN FETAL LIVER, SIGNAL = 0.87; EXPRESSED IN HELA, SIGNAL = 1.2; EXPRESSED IN LUNG, SIGNAL = 0.97; EXPRESSED IN BRAIN, SIGNAL =   1; EST_HUMAN HIT: BE783553.1, EVALUE 0.00e+00; NT HIT: gi14767287, EVALUE 0.00e+00; SWISSPROT HIT: O02626, EVALUE 7.00e-20
cccagggttgccatggtacggttcttcaattccgccaacgtgctgcagggatttcagatgcacacgcgtaccctgcgcctctttcctcggcctgtggtagcttttcaagctggctcctttctagcctcacgtccccggcagactccttttgccgagaaattggccaggactcaggctgtggagtactttggggaatggatccttaaccccaccaactatgcctttcagcgaattcacaacagtgagtctacctgccctctgc

SEQ ID NO: 16569 - DNA, 187 bp, Homo sapiens
  MAP TO CHR1.1; EXPRESSED IN FETAL LIVER, SIGNAL = 0.44; EXPRESSED IN BRAIN, SIGNAL = 0.49; EXPRESSED IN BONE MARROW, SIGNAL = 0.55; EST_HUMAN HIT: BF311007.1, EVALUE 3.80e+00; NT HIT: gi14745063, EVALUE 5.00e-91; SWISSPROT HIT: P25480, EVALUE 1.90e+00
ggaactgctccctcaccttcacaaaagggaaggctggcccgggactgaagggttcgttctcatgttccagctggtagcgcacgtactcctccacgccctgctccgtgtagatctgctgctcctcgtccatgcgaaacaaggctcgggaggacacagcgatggtgactgcattctgaggcttgggctg

SEQ ID NO: 16570 - DNA, 364 bp, Homo sapiens
  MAP TO CHR5.1; EXPRESSED IN FETAL LIVER, SIGNAL = 1.5; EXPRESSED IN LUNG, SIGNAL = 0.88; EXPRESSED IN HELA, SIGNAL = 1.8; EXPRESSED IN BRAIN, SIGNAL = 1.6; EXPRESSED IN HEART, SIGNAL = 1.2; EXPRESSED IN BONE MARROW, SIGNAL = 1.5; EST_HUMAN HIT: AW770109.1, EVALUE 2.00e-65; NT HIT: gi11417364, EVALUE 0.00e+00; SWISSPROT HIT: O60383, EVALUE 1.00e-70
cagcttccttcaatctgagtgaatacttcagacaatttcttcttccccaaaatgagtgtgagctccatgactttagacttagctttagtcagctgaagtgggacaactggattgtggctccgcacaggtacaaccctcgatactgtaaaggggactgtccaagggcagttggacatcggtatggctctccagttcacaccatggtacagaacatcatctatgagaagctggactcctcagtgccaagaccgtcatgtgtacctgccaaatacagccccttgagtgttttgaccattgagcccgatggctcaattgcctataaagagtacgaagatatgatagctacaaagtgcacctgtcgtta

SEQ ID NO: 16571 - DNA, 170 bp, Homo sapiens
  MAP TO CHR11.1; EXPRESSED IN FETAL LIVER, SIGNAL = 0.36; EXPRESSED IN BRAIN, SIGNAL = 0.31; EXPRESSED IN BONE MARROW, SIGNAL = 0.34; EST_HUMAN HIT: BF029215.1, EVALUE 2.20e-01
tacatcttgtaggcccagaatgctctctgacacatcttcctccagttaatatgagttttgattctgcttaagtcacacagctgcagtggcatgctgtctagaaatagtttgtgttggtattcaagctgaacaaaccctgatttctatttatgacactcccttctgactct

SEQ ID NO: 16572 - DNA, 281 bp, Homo sapiens
  MAP TO CHR11.1; EXPRESSED IN HELA, SIGNAL = 0.51; EXPRESSED IN BRAIN, SIGNAL = 0.75; EXPRESSED IN BONE MARROW, SIGNAL = 0.76; EXPRESSED IN ADULT LIVER, SIGNAL = 0.67; EXPRESSED IN FETAL LIVER, SIGNAL = 0.56; SWISSPROT HIT: P12109, EVALUE 2.40e+00; NT HIT: AF091492.1, EVALUE 0.00e+00; EST_HUMAN HIT: BF846775.1, EVALUE 9.60e-02
tcccaggtacacacctgtgagccctgagtgggagtcaggggagacagagcttgacaagctgggaggagagctgtctgtctgcctgtctgtcttccaagtggaagcttggggtggagcaggcaggtagaggctgcctcacttgtcagaattagcaagttccacagttgggcaacactcagccacacatcagatacagacacacgtgtgcacacgcgtcctgcctccagactgatagggtcacacctgcacttacacaggctgcatggtgacatgagtacaca

SEQ ID NO: 16573 - DNA, 164 bp, Homo sapiens
  MAP TO AP001267.3; EXPRESSED IN HELA, SIGNAL = 3.9; EXPRESSED IN BRAIN, SIGNAL = 2.6; EXPRESSED IN BONE MARROW, SIGNAL = 4.4; EXPRESSED IN PLACENTA, SIGNAL = 3.6; EXPRESSED IN FETAL LIVER, SIGNAL = 2.9; EXPRESSED IN LUNG, SIGNAL = 1.2; NT HIT: gi16183763, EVALUE 1.00e-78; EST_HUMAN HIT: AW771081.1, EVALUE 2.00e-78; SWISSPROT HIT: Q14139, EVALUE 1.00e-22
tcctcttcctcaccttgattctctctgccaagttgctgaaagccataatcatattcccaggcttatttattttcttcaagactcgaactgtctgtgcaaagagagttggggaataggaacgtccatccttgggcacagtggcacagaaattctcctcatccctg

SEQ ID NO: 16574 - DNA, 247 bp, Homo sapiens
  MAP TO CHR11.1; EXPRESSED IN HELA, SIGNAL = 0.48; EXPRESSED IN BRAIN, SIGNAL = 0.49; EXPRESSED IN BONE MARROW, SIGNAL = 0.52; EXPRESSED IN HEART, SIGNAL = 0.59; NT HIT: gi7549780, EVALUE 6.00e-73; EST_HUMAN HIT: BF745458.1, EVALUE 8.40e-02; SWISSPROT HIT: Q11098, EVALUE 8.50e-02
agtcacagtccagcacacaaatactacctggccacagaccccatgagtggggccgtcttcctttctgacagcaacagccggcgggtctttaaaatcaagtccactgtggtggtgaaggaccttgtcaagaactctgaggtggttgcggggacaggtgaccagtgcctcccctttgatgacactcgctgcggggatggtgggaaggccacagaagccacactcaccaatcccaggggtaaggccttgc

SEQ ID NO: 16575 - DNA, 236 bp, Homo sapiens
  MAP TO CHR11.1; EXPRESSED IN BONE MARROW, SIGNAL = 1.1; EXPRESSED IN PLACENTA, SIGNAL =   2; EXPRESSED IN HELA, SIGNAL = 1.7; EXPRESSED IN FETAL LIVER, SIGNAL = 1.5; EXPRESSED IN LUNG, SIGNAL = 2.7; EXPRESSED IN BRAIN, SIGNAL = 1.2; EXPRESSED IN HEART, SIGNAL = 2.6; NT HIT: AF162137.2, EVALUE 7.00e-57; EST_HUMAN HIT: BE122650.1, EVALUE 1.00e-31; SWISSPROT HIT: P11369, EVALUE 1.00e-12
ttctgtaaggcaaaggacactgtcaataggacaaaactgtcaataggaaccaacagattgggaaaagatcttcaccaatcctacatctgatagaggactaatatccaatctacacaaagaactcaagaaattaagactccagtgaaccaaataaccctattaaaaaatggggtacagaactaaacaaagaattctcaactgaggaatatctaatggctgagaagcacctaaagaaa

SEQ ID NO: 16576 - DNA, 220 bp, Homo sapiens
  MAP TO CHR17.1; EXPRESSED IN FETAL LIVER, SIGNAL = 0.37; EXPRESSED IN BRAIN, SIGNAL = 0.43; EXPRESSED IN BONE MARROW, SIGNAL = 0.43; NT HIT: Y12488.1, EVALUE 3.00e-68; SWISSPROT HIT: Q02499, EVALUE 3.00e+00
attgccccacactggcatgggatggaggagttttaaaggagaaagaaaagagccccagagcagccaggcagctcccaggagtcaccaggcaagacagagcaagtggctgcccagcgcccagctccatccacctgcagcctggcactgagacaggccctgcctgtggagcaggttctgcacccggctctctggcactggccctgatctcagccaagccagg

SEQ ID NO: 16577 - DNA, 177 bp, Homo sapiens
  MAP TO CHR5.1; EXPRESSED IN BONE MARROW, SIGNAL = 0.45; EXPRESSED IN FETAL LIVER, SIGNAL = 0.36; EXPRESSED IN BRAIN, SIGNAL = 0.51; EXPRESSED IN LUNG, SIGNAL = 0.66; EST_HUMAN HIT: H10604.1, EVALUE 3.00e-13; SWISSPROT HIT: P38776, EVALUE 5.70e+00; NT HIT: AF389851.1, EVALUE 1.00e-02
aaggggcaaaagggaattagttgttcaaggttgagtgtccagtaagaagtaaaaatgttacattaaggaagcgattgcttaacacgctgcttaaggtggtagccagacaaatccttaactgcagcattaaggccataccaagtttatacatatatacaaagaaatttccatataaaa

SEQ ID NO: 16578 - DNA, 204 bp, Homo sapiens
  MAP TO CHR5.1; EXPRESSED IN FETAL LIVER, SIGNAL = 0.42; EXPRESSED IN BRAIN, SIGNAL = 0.5; EXPRESSED IN LUNG, SIGNAL = 0.61; EXPRESSED IN BONE MARROW, SIGNAL = 0.57; EST_HUMAN HIT: AA309413.1, EVALUE 1.10e+00; SWISSPROT HIT: P32634, EVALUE 4.20e+00; NT HIT: L28703.1, EVALUE 1.80e-01
ccgtgacctatatggaatgaaacgctagaggcaactggtctttgaggttttgtctgctatttctctcgtttacacatctctgtgcatgatttatcctaggagacaatactggggattctatctaattcacattcaaagctgaggtttttccagggcattttctctcattccatttggcacagtagtaactgtgtttgacaacat

SEQ ID NO: 16579 - DNA, 157 bp, Homo sapiens
  MAP TO CHR5.1; EXPRESSED IN LUNG, SIGNAL = 0.61; EXPRESSED IN BRAIN, SIGNAL = 0.46; EXPRESSED IN BONE MARROW, SIGNAL = 0.55; EXPRESSED IN HEART, SIGNAL = 0.65; SWISSPROT HIT: P39081, EVALUE 1.00e+01; NT HIT: AE007673.1, EVALUE 5.40e-01; EST_HUMAN HIT: AI146500.1, EVALUE 3.10e+00
aagcaatctggcagccctttttagtaataggaggtaaatcattctgacgttccttgctatccaaagcattaatcatgttgaattcctttgttgttctggggtctggatcaactgtaattctacaggaattccattgtaatctagtattaattaatct

SEQ ID NO: 16580 - DNA, 226 bp, Homo sapiens
  MAP TO CHR18.1; EXPRESSED IN HEART, SIGNAL = 0.69; EXPRESSED IN HELA, SIGNAL = 0.58; EXPRESSED IN BRAIN, SIGNAL = 0.63; SWISSPROT HIT: P23152, EVALUE 4.30e+00; NT HIT: AE006085.1, EVALUE 5.20e-02; EST_HUMAN HIT: BF107754.1, EVALUE 1.20e+00
cactctggaattggatttgatgtagccctctggactcgagctaacttttggggagtagttttcttgggagcctgccagtccaattcctccctcatgaacactaattaccgcacagaccttctccatgaaatcggtgctgaagccatttccatccaggcggctctccaagacgaaatttttctactgggaaccgacagccgcaaataaacctaccatctacttagca

SEQ ID NO: 16581 - DNA, 203 bp, Homo sapiens
  MAP TO CHR12.1; EXPRESSED IN BRAIN, SIGNAL = 0.63; EXPRESSED IN LUNG, SIGNAL =   1; EXPRESSED IN BONE MARROW, SIGNAL = 0.69; EXPRESSED IN HEART, SIGNAL = 0.75; NT HIT: gi14755128, EVALUE 1.00e-108; EST_HUMAN HIT: AI827707.1, EVALUE 1.00e-108; SWISSPROT HIT: Q03253, EVALUE 6.40e-01
aggtgtggcttacattctaaagcttttggatcagtatcgggagtttgattcacttcactggttccagtctgttagagagaaatacctgaaggagataagagcagttgctaagcaacagaatgtacagtcagccagtcaagatgaaaaactcttacaaaccatgaatctcactcagaagcgactggatgtctatctacaggtag

SEQ ID NO: 16582 - DNA, 171 bp, Homo sapiens
  MAP TO CHR5.1; EXPRESSED IN BONE MARROW, SIGNAL = 0.66; EXPRESSED IN BRAIN, SIGNAL = 0.73; NT HIT: gi13655336, EVALUE 4.00e-82; EST_HUMAN HIT: BG719489.1, EVALUE 4.00e-83; SWISSPROT HIT: Q16566, EVALUE 5.00e-24
accttaagcttacgccgggcattgaattcttggagcttcttttgagcggtatccatgtgtacaaaattggctgctttacctgtgacccacggatgctggagagcttgaaatgtagtcagccgtttctttggatccaaaacaattaattttctgacctgaaataataaagaa

SEQ ID NO: 16583 - DNA, 259 bp, Homo sapiens
  MAP TO CHR7.1; EXPRESSED IN ADULT LIVER, SIGNAL = 0.46; EXPRESSED IN BONE MARROW, SIGNAL = 0.7; EXPRESSED IN FETAL LIVER, SIGNAL = 0.52; EXPRESSED IN BRAIN, SIGNAL = 0.61; EXPRESSED IN LUNG, SIGNAL = 0.93; EXPRESSED IN HEART, SIGNAL = 0.77; NT HIT: AF132485.1, EVALUE 2.00e-29; EST_HUMAN HIT: BF106304.1, EVALUE 1.00e-126; SWISSPROT HIT: P27019, EVALUE 3.00e-01
atggtccactttcctgataaaaattgcaccatatgttttttggataattcattttctttgtggaaaaagggagtgagctgaagaatctggatagtgtaaagaccaacttctatttcacccaagaaacaagctgtgttatacatgtcatatcgtctctgggacttctgtggtgaccagttctcggtttcatagtttttactatcagtttgcctttgggattctttgaaagctcttgaggctttttccgcagcttctagga

SEQ ID NO: 16584 - DNA, 168 bp, Homo sapiens
  MAP TO CHR12.1; EXPRESSED IN ADULT LIVER, SIGNAL =   5; EXPRESSED IN BONE MARROW, SIGNAL = 6.1; EXPRESSED IN PLACENTA, SIGNAL = 5.7; EXPRESSED IN HELA, SIGNAL = 6.4; EXPRESSED IN BRAIN, SIGNAL = 5.6; EXPRESSED IN LUNG, SIGNAL = 3.1; EXPRESSED IN HEART, SIGNAL = 2.9; NT HIT: X14531.1, EVALUE 2.30e+00; EST_HUMAN HIT: BF809611.1, EVALUE 5.50e-02; SWISSPROT HIT: P08169, EVALUE 1.10e+00
ggagtctgggccaaggccagaggtgtctccctggggagtcctcggagcgggcagccggacgtcgctccatccttcccgcctgacggatgcgtctgctgcgcaggcacaagctgtcgggccaggccctgccaaggcagaacagtggcgcttctgtgcgcgctgctccgc

SEQ ID NO: 16585 - DNA, 239 bp, Homo sapiens
  MAP TO CHR20.1; EXPRESSED IN PLACENTA, SIGNAL = 1.5; EXPRESSED IN LUNG, SIGNAL = 1.4; EXPRESSED IN BRAIN, SIGNAL = 1.1; EXPRESSED IN BONE MARROW, SIGNAL = 1.4; EXPRESSED IN HEART, SIGNAL = 1.1; NT HIT: gi14772423, EVALUE 6.00e-39; EST_HUMAN HIT: BE743445.1, EVALUE 1.00e-118; SWISSPROT HIT: P48038, EVALUE 1.70e+00
aagagtcccttgagttttatagccaggattcaaacctggctctgaatgatgccaaaagtcatgttctcatccaagaccctgtactggttcccgagaaagctgcttcaaatgttgcagagagatgccttctgacctgatggtgtgggacagggccaggattcccagcacgaagaaatacatggacagcaggaggttgatgtactcctgggagaatatctgaggcagaaatacaaagagaa

SEQ ID NO: 16586 - DNA, 297 bp, Homo sapiens
  MAP TO CHR9.1; EXPRESSED IN PLACENTA, SIGNAL = 1.9; EXPRESSED IN LUNG, SIGNAL = 1.2; EXPRESSED IN FETAL LIVER, SIGNAL = 1.1; EXPRESSED IN BRAIN, SIGNAL =   1; SWISSPROT HIT: Q14249, EVALUE 1.00e-47; NT HIT: gi4758269, EVALUE 0.00e+00; EST_HUMAN HIT: AL522870.1, EVALUE 0.00e+00
ctccaccctcacttactgcccgccgtgatggccttgaggctgcctgcccgcgccaggatgtttggcacaaagagcagccccgaagcccgctcaatgctctcgatgggcaccaggaagcgctccagtgggatggcctcatccacaggtgcgttgggcatcacgtaggtgcggagctcaatttgcccacctgctgcctccaggatcagcaccttgaagaagtgtgtgggcactgccacgtggttcttgccgatgacctggtactttacgtaggatttcccatcagcctctgtcctgtgg

SEQ ID NO: 16587 - DNA, 337 bp, Homo sapiens
  MAP TO CHR5.1; EXPRESSED IN LUNG, SIGNAL = 0.69; EXPRESSED IN FETAL LIVER, SIGNAL = 0.67; EXPRESSED IN HELA, SIGNAL = 0.55; EXPRESSED IN BRAIN, SIGNAL = 0.66; EST_HUMAN HIT: AI969295.1, EVALUE 0.00e+00; SWISSPROT HIT: Q9Y5H8, EVALUE 5.00e-58; NT HIT: gi14165409, EVALUE 0.00e+00
ggcgcgttgtcattaatgtccttcacttccacctccacatggaaaacctgcagcggcctgtccacgatcacctccaggtggatgctgcactccgcgctccgcccgcacagttcctcgcggtctatccgagaattcacaaacaaaatgccattctgcagatttacctccagaaggtccccgtgtcttttggacgccacccggaacaggcgcggcaccagctccgccagctccagccccaggtcctgcgcgatgcggcccacgaaggtgccatgcttggcctcctcagagacggagtagtggagctggccgctccccacctccgaggctgcgaggagca

SEQ ID NO: 16588 - DNA, 157 bp, Homo sapiens
  MAP TO CHR2.1; EXPRESSED IN LUNG, SIGNAL =   1; EXPRESSED IN BRAIN, SIGNAL = 0.9; EXPRESSED IN HEART, SIGNAL = 0.94; EXPRESSED IN BONE MARROW, SIGNAL = 0.75; NT HIT: AB046812.1, EVALUE 3.00e-76; EST_HUMAN HIT: AW504958.1, EVALUE 5.00e-76; SWISSPROT HIT: P75586, EVALUE 1.50e-02
cccacagggaagtcccacctggccatcgtgcagaaggtaaacaacgagggtgagggtgaccccttctacgaggtcctgggcctggtcaccctggaggacgtgatcgaggagatcatcaagtcggagatcctggacgagtccgacatgtacagtgagt

SEQ ID NO: 16589 - DNA, 111 bp, Homo sapiens
  MAP TO CHR14.1; EXPRESSED IN BONE MARROW, SIGNAL = 3.9; EXPRESSED IN ADULT LIVER, SIGNAL = 1.8; EXPRESSED IN PLACENTA, SIGNAL = 4.4; EXPRESSED IN FETAL LIVER, SIGNAL =   3; EXPRESSED IN LUNG, SIGNAL =   3; EXPRESSED IN BRAIN, SIGNAL = 2.4; EXPRESSED IN HEART, SIGNAL = 1.8; NT HIT: X58333.1, EVALUE 5.00e-56; SWISSPROT HIT: P01739, EVALUE 3.50e+00
tacagtggtatagacaaaattcaggtagaggccttgtccacctaattttaatacgttcaaatgaaagagagaaacacagtggaagattaagagtcacgcttgacacttcca

SEQ ID NO: 16590 - DNA, 201 bp, Homo sapiens
  MAP TO CHR17.1; EXPRESSED IN BRAIN, SIGNAL = 1.3; EXPRESSED IN HEART, SIGNAL = 1.6; EXPRESSED IN ADULT LIVER, SIGNAL = 4.9; EXPRESSED IN PLACENTA, SIGNAL = 8.5; EXPRESSED IN LUNG, SIGNAL = 3.3; EST_HUMAN HIT: AA936972.1, EVALUE 2.00e-97; NT HIT: AF001689.1, EVALUE 1.00e-100; SWISSPROT HIT: P29316, EVALUE 1.00e-11
tctcccagctcctgcccctcctaaagctgaagccaaagcgaaggctttaaaggccaagaaggcagtgttgaaaggtgtccacagccacaaaaagaagaagatccgcacgtcacccacccttccggcgggccgaagacactgcgactccggagacagcccaaatatcctcggaagagcgctcccaggagaaacaagtcagta

SEQ ID NO: 16591 - DNA, 234 bp, Homo sapiens
  MAP TO CHR17.1; EXPRESSED IN PLACENTA, SIGNAL = 1.4; EXPRESSED IN FETAL LIVER, SIGNAL = 1.1; EXPRESSED IN BONE MARROW, SIGNAL = 1.3; EXPRESSED IN ADULT LIVER, SIGNAL = 0.91; EXPRESSED IN LUNG, SIGNAL = 1.1; EXPRESSED IN HEART, SIGNAL = 1.1; EXPRESSED IN BRAIN, SIGNAL = 1.3; EXPRESSED IN HELA, SIGNAL = 1.4; EST_HUMAN HIT: BG394326.1, EVALUE 1.00e-115; NT HIT: AF407579.1, EVALUE 3.00e-74; SWISSPROT HIT: P51954, EVALUE 6.30e-02
gtgccttcacagaacttgccagcactggtgctgaagatcatgagtggcacctttgcacctatctctgaccggtacagccctgagcttcgccagctggtcctgagtctactcagcctggagcctgcccagcggccaccactcagccacatcatggcacagcccctctgcatccgtgccctcctcaacctccacaccgacgtgggcagtgtccgcatgcggaggcctgtgcaggga

SEQ ID NO: 16592 - DNA, 247 bp, Homo sapiens
  MAP TO CHR18.1; EXPRESSED IN HEART, SIGNAL = 3.8; EXPRESSED IN FETAL LIVER, SIGNAL = 7.5; EXPRESSED IN LUNG, SIGNAL = 3.2; EXPRESSED IN BRAIN, SIGNAL = 6.8; EXPRESSED IN BONE MARROW, SIGNAL = 8.3; EXPRESSED IN ADULT LIVER, SIGNAL = 6.8; EXPRESSED IN PLACENTA, SIGNAL = 6.8; EXPRESSED IN HELA, SIGNAL = 7.7; EST_HUMAN HIT: AL534978.1, EVALUE 1.00e-83; SWISSPROT HIT: P93471, EVALUE 7.00e-06; NT HIT: AF151110.1, EVALUE 6.00e-79
cccatctgctttgatatgattgaagaggcatacacgacaaaataaggccacagcttttgctataagtagattcactagagttcggaggacaataatatatgtaccaagtataactatgttgtggacaatactaaccatctgtttcctaatttgttggtgaatgagctcattctcaaacagaagcaaagatttgaggaagaggttcaaattggaccactcagtgagtagcaccaatggccacaggtgg

SEQ ID NO: 16593 - DNA, 119 bp, Homo sapiens
  MAP TO CHR14.1; EXPRESSED IN FETAL LIVER, SIGNAL = 6.1; EXPRESSED IN PLACENTA, SIGNAL = 7.1; EXPRESSED IN LUNG, SIGNAL = 3.2; EXPRESSED IN BRAIN, SIGNAL =   6; EXPRESSED IN HELA, SIGNAL = 7.1; EXPRESSED IN HEART, SIGNAL =   3; EXPRESSED IN BONE MARROW, SIGNAL = 6.8; EXPRESSED IN ADULT LIVER, SIGNAL = 6.1; EST_HUMAN HIT: AA889944.1, EVALUE 5.80e-01
atttgtaataaaatttctaatgacagtctttccacaacttagctggaaaatatatggtggtgtctgagtctgcagaggttgcttataaaaacagaaatgagcttagtgaatcatttttc

SEQ ID NO: 16594 - DNA, 142 bp, Homo sapiens
  MAP TO CHR7.1; EXPRESSED IN LUNG, SIGNAL = 0.78; EXPRESSED IN HELA, SIGNAL = 0.83; EXPRESSED IN BRAIN, SIGNAL = 0.69; EXPRESSED IN BONE MARROW, SIGNAL = 0.7; SWISSPROT HIT: P07942, EVALUE 5.00e-24; NT HIT: M61918.1, EVALUE 2.00e-74; EST_HUMAN HIT: BI195724.1, EVALUE 4.00e-73
taccattttcagattgccaccaaatcttaaggcggtttggagcaaatgtagtgaccacattttcaatgagatggctgtcaggattcagggtctcatgataaggatcttgggaattgcatatgaagcattttttgtcctccta

SEQ ID NO: 16595 - DNA, 186 bp, Homo sapiens
  MAP TO CHR17.1; EXPRESSED IN LUNG, SIGNAL = 0.59; EXPRESSED IN BRAIN, SIGNAL = 0.42; EXPRESSED IN HEART, SIGNAL = 0.69; NT HIT: gi16164950, EVALUE 1.00e-88; EST_HUMAN HIT: BF794728.1, EVALUE 2.00e-88; SWISSPROT HIT: P13369, EVALUE 2.90e-01
agagaattacctgcatgggcgctccgcaactgttgcaacagaatgcttcccacctgggccctgcagccatcctgtgtgcctcagtttgacaagctggacaggcgcagtcaaagaaatactgagacctcagcttctgctgcctttcggcaacccccatccggctcttgtgaggccctggagggagat

SEQ ID NO: 16596 - DNA, 132 bp, Homo sapiens
  MAP TO CHR10.1; EXPRESSED IN LUNG, SIGNAL = 1.6; EXPRESSED IN PLACENTA, SIGNAL = 1.3; EXPRESSED IN FETAL LIVER, SIGNAL = 0.95; EXPRESSED IN HELA, SIGNAL = 1.6; EXPRESSED IN BRAIN, SIGNAL = 0.59; EXPRESSED IN BONE MARROW, SIGNAL = 0.64; EST_HUMAN HIT: AU120604.1, EVALUE 2.00e-68; NT HIT: gi14739282, EVALUE 1.00e-66; SWISSPROT HIT: Q99612, EVALUE 5.00e-23
tacctgtcacagtgggagcatttaaaaggcttggccccggtgtgctttcggaagtgcctggttaactcatcacttcttgcaaaacgccactcacacccttcccatgagcatctgtaaggcttttctcctggg

SEQ ID NO: 16597 - DNA, 206 bp, Homo sapiens
  MAP TO CHRX.1; EXPRESSED IN ADULT LIVER, SIGNAL = 1.1; EXPRESSED IN BONE MARROW, SIGNAL = 1.4; EXPRESSED IN PLACENTA, SIGNAL = 1.7; EXPRESSED IN FETAL LIVER, SIGNAL = 1.3; EXPRESSED IN LUNG, SIGNAL = 1.5; EXPRESSED IN HELA, SIGNAL = 1.4; EXPRESSED IN BRAIN, SIGNAL = 1.2; EXPRESSED IN HEART, SIGNAL = 1.4; NT HIT: gi14757195, EVALUE 5.00e-76; SWISSPROT HIT: Q13474, EVALUE 1.00e-23
accggttctcatcttccaagtgggccaggatcttctgtagctcccctttgctttctgtggccacactgcatggagcctgctgtccaaaggctggctcccggtctgtgatggggctggagtgccgcagcaggtactggtcctcgtctctgcatgggtgtggggaaagcagagtaggtgaccagttgttgaacagagaaacaactcag

SEQ ID NO: 16598 - DNA, 139 bp, Homo sapiens
  MAP TO CHR11.1; EXPRESSED IN FETAL LIVER, SIGNAL = 7.9; EXPRESSED IN LUNG, SIGNAL = 4.7; EXPRESSED IN HELA, SIGNAL = 6.9; EXPRESSED IN BRAIN, SIGNAL = 7.5; EXPRESSED IN BONE MARROW, SIGNAL = 8.8; EXPRESSED IN ADULT LIVER, SIGNAL = 6.4; EXPRESSED IN PLACENTA, SIGNAL = 9.2; EXPRESSED IN HEART, SIGNAL = 5.4; EST_HUMAN HIT: BI520098.1, EVALUE 6.00e-66; NT HIT: AF134404.1, EVALUE 4.00e-66; SWISSPROT HIT: Q50612, EVALUE 1.20e+00
ccagcctcttccccaggatgccgagacacaactacagccgggtggccccgctggtcaagtcgctgtgtgccaagcacggcctcagctacgaagtgaagcccttcctcaccgcgctggtggacatcgtcaggtgaggctg

SEQ ID NO: 16599 - DNA, 143 bp, Homo sapiens
  MAP TO CHR9.1; EXPRESSED IN BONE MARROW, SIGNAL = 0.39; EXPRESSED IN FETAL LIVER, SIGNAL = 0.34; EXPRESSED IN BRAIN, SIGNAL = 0.38; EST_HUMAN HIT: BG945171.1, EVALUE 1.00e-67; NT HIT: gi4826873, EVALUE 7.00e-68; SWISSPROT HIT: P35658, EVALUE 3.00e-19
tagattaattgggaatcttggctactggaggattctagtcgagctgaattgcctgtgacagacaagagtgatgactccttgcccatgggagttgtcgtagactatacaaaccaagtggaaatcaccatcagtaagtgtagcct

SEQ ID NO: 16600 - DNA, 334 bp, Homo sapiens
  MAP TO CHR2.1; EXPRESSED IN BRAIN, SIGNAL = 0.35; EXPRESSED IN HEART, SIGNAL = 0.63; SWISSPROT HIT: Q02173, EVALUE 3.00e-20; EST_HUMAN HIT: AA629026.1, EVALUE 0.00e+00; NT HIT: X92412.1, EVALUE 0.00e+00
ctgtcttgctgcaggtattcctggacccccagaaacattacagatatttgatgtttcccgtgatggcatgacacttacttggtacccaccagaggatgacggtggctcccaagtgactggatatattgtggagcgcaaagaagtgagagcagatcgatgggtccgtgtaaataaagtacctgtgacaatgacacggtaccgctccactggccttactgaaggcttagaatatgaacaccgtgtcacagccattaatgcaagagggtctgggaaaccaagtcgtccttccaaacccatcgttgccatggatccaattggtaaggacattttgtat

SEQ ID NO: 16601 - DNA, 178 bp, Homo sapiens
  MAP TO CHR13.1; EXPRESSED IN FETAL LIVER, SIGNAL = 2.4; EXPRESSED IN HELA, SIGNAL = 2.6; EXPRESSED IN BRAIN, SIGNAL = 2.6; EXPRESSED IN HEART, SIGNAL = 1.2; EXPRESSED IN ADULT LIVER, SIGNAL = 2.2; EXPRESSED IN PLACENTA, SIGNAL = 2.3; SWISSPROT HIT: P57257, EVALUE 4.30e+00; NT HIT: gi14783833, EVALUE 1.00e-94; EST_HUMAN HIT: AL544016.1, EVALUE 3.00e-93
accacccgtatccccttctctcctggaccttgtcatgttgcgagacacagcactggggacaccttttgaggtagtggcttgtgaagaaggctgatttgcagttaaagtccatgcgagtcgtgaccccaactgctgtcgaaggcaatctcctactcctggagcttgattagactgtcta

SEQ ID NO: 16602 - DNA, 225 bp, Homo sapiens
  MAP TO CHR17.1; EXPRESSED IN HEART, SIGNAL = 0.63; EXPRESSED IN FETAL LIVER, SIGNAL = 0.48; EXPRESSED IN BRAIN, SIGNAL = 0.37; EXPRESSED IN LUNG, SIGNAL = 0.66; SWISSPROT HIT: P25439, EVALUE 3.30e+00; NT HIT: gi13652907, EVALUE 1.00e-111; EST_HUMAN HIT: BE171037.1, EVALUE 1.00e-111
cccctcacctcagtggccagctggtgcaggttcgcctgttcaatgtccatgtgccagtctccatggaacagaagacggctcttgtcccaccagggcaaaggtgggctggggtcagctgagggcttggtcaagaggtccacacactggccaattagtgtccaggctggatcccagcatgggccccacaccactgtgtactggaatatttccgctggggtagaggaa

SEQ ID NO: 16603 - DNA, 149 bp, Homo sapiens
  MAP TO CHR1.1; EXPRESSED IN FETAL LIVER, SIGNAL = 0.86; EXPRESSED IN BRAIN, SIGNAL = 0.8; EXPRESSED IN LUNG, SIGNAL = 1.4; EXPRESSED IN HEART, SIGNAL = 1.2; EXPRESSED IN BONE MARROW, SIGNAL = 0.68; NT HIT: AF194421.1, EVALUE 7.90e+00; SWISSPROT HIT: P06308, EVALUE 7.70e+00
cctgcagatgtttccagtttgcagacagcatagagttcacgttggtcatttgttccatttgctcagaaacaacagctagcattattggcaggaaatggagagggcgccaactccgagataacacaaaaagccctagtcatgggcactag

SEQ ID NO: 16604 - DNA, 186 bp, Homo sapiens
  MAP TO AL162413.6; EXPRESSED IN LUNG, SIGNAL = 1.5; EXPRESSED IN BRAIN, SIGNAL = 1.1; EXPRESSED IN BONE MARROW, SIGNAL = 0.8; EXPRESSED IN HEART, SIGNAL = 0.75; EXPRESSED IN FETAL LIVER, SIGNAL = 0.62; NT HIT: AJ223786.1, EVALUE 3.00e-58; SWISSPROT HIT: O55131, EVALUE 8.00e-21; EST_HUMAN HIT: BF979841.1, EVALUE 4.00e-71
tagaattgcaacttaattgtttatttgcattctatagctggcagcctgttatcgattacattgatagtaaatttgaggactacctaaatgcagaatcatgcgtgaacagacatcagatgcctgataacagggtgcagtgttgttcatacttcattgctccttcaggacatgggtcagtaccttgat

SEQ ID NO: 16605 - DNA, 148 bp, Homo sapiens
  MAP TO CHR7.1; EXPRESSED IN HELA, SIGNAL = 2.8; EXPRESSED IN LUNG, SIGNAL = 1.5; EXPRESSED IN BRAIN, SIGNAL = 1.7; EXPRESSED IN HEART, SIGNAL = 2.2; EXPRESSED IN ADULT LIVER, SIGNAL = 0.77; EXPRESSED IN BONE MARROW, SIGNAL = 1.8; EXPRESSED IN PLACENTA, SIGNAL = 2.7; EXPRESSED IN FETAL LIVER, SIGNAL = 1.7; EST_HUMAN HIT: BG002495.1, EVALUE 2.00e-59; NT HIT: U48726.1, EVALUE 1.00e-60; SWISSPROT HIT: P00533, EVALUE 2.00e-19
caccttcctttcatgctctcttccccaggtaattatgtggtgacagatcacggctcgtgcgtccgagcctgtggggccgacagctatgagatggaggaagacggcgtccgcaagtgtaagaagtgcgaagggccttgccgcaaaggta

SEQ ID NO: 16606 - DNA, 169 bp, Homo sapiens
  MAP TO CHR7.1; EXPRESSED IN HEART, SIGNAL = 0.84; EXPRESSED IN BONE MARROW, SIGNAL = 0.72; EXPRESSED IN FETAL LIVER, SIGNAL = 0.84; EXPRESSED IN BRAIN, SIGNAL = 0.76; EST_HUMAN HIT: AA971538.1, EVALUE 3.00e-90; NT HIT: gi14781688, EVALUE 2.00e-90; SWISSPROT HIT: Q99996, EVALUE 7.00e-07
aggatctgaagttttcacttgagagtcagaaacaaaggaatcttcagctaaatctacttttggaacaacagaaacaactactgaacgaatcccagcaaaaaatagaatcacagagaatgctatatgatgcccagttgtcagaagaacaaggtcgaaacttagagcttca

SEQ ID NO: 16607 - DNA, 190 bp, Homo sapiens
  MAP TO CHR4.1; EXPRESSED IN FETAL LIVER, SIGNAL = 0.45; EXPRESSED IN BRAIN, SIGNAL = 0.4; EXPRESSED IN HEART, SIGNAL = 0.59; SWISSPROT HIT: P22599, EVALUE 1.50e+00
aagacccagattaaaggcaatgcccaggagcccactgatagcttttagattgtacttccccagaggctgatgagctgacagagatagaacactcctattcagcaccaccttttgagagatacattgcatctttactttcagatgtgggatcaagagcataaaagtcacatttgaactaacatctgatgtc

SEQ ID NO: 16608 - DNA, 396 bp, Homo sapiens
  MAP TO CHR3.1; EXPRESSED IN FETAL LIVER, SIGNAL = 0.49; EXPRESSED IN HELA, SIGNAL = 0.44; EXPRESSED IN BRAIN, SIGNAL = 0.33; EXPRESSED IN HEART, SIGNAL = 0.64; EXPRESSED IN BONE MARROW, SIGNAL = 0.41; SWISSPROT HIT: O75030, EVALUE 4.00e-51; EST_HUMAN HIT: BG569995.1, EVALUE 0.00e+00; NT HIT: gi13644216, EVALUE 0.00e+00
atgcaggctcgagctcatggactttcccttattccatccacgggtctctgctctccagatttggtgaatcggatcatcaagcaagaacccgctcttgagaactgcagccaagacctccttcagcatcatgcagacctaacctgtacaacaactctcgatctcacggatggcaccatcaccttcaacaacaacctcggaactgggactgaggccaaccaagcctatagtgtccccacaaaaatgggatccaaactggaagacatcctgatggacgacaccctttctcccgtcggtgtcactgatccactcctttcctcagtgtcccccggagcttccaaaacaagcagccggaggagcagtatgagcatggaagagacggagcacacttgttagcga

SEQ ID NO: 16609 - DNA, 146 bp, Homo sapiens
  MAP TO CHR17.1; EXPRESSED IN HELA, SIGNAL = 0.51; EXPRESSED IN BRAIN, SIGNAL = 0.66; EXPRESSED IN LUNG, SIGNAL =   1; EXPRESSED IN HEART, SIGNAL = 0.82; EXPRESSED IN FETAL LIVER, SIGNAL = 1.2; NT HIT: gi14770103, EVALUE 3.00e-70; EST_HUMAN HIT: BF316153.1, EVALUE 1.00e-64
gctcaccaggacaggcagaggtcagcatgggcagggtgcgttcctcctcactgtgctggcgatagacgcacgaattctttttgactctccaggatactaaaatccgcagctatcgtcgtatcaaatacatagtgcacccctgcagg

SEQ ID NO: 16610 - DNA, 150 bp, Homo sapiens
  MAP TO CHR5.1; EXPRESSED IN LUNG, SIGNAL = 7.5; EXPRESSED IN BRAIN, SIGNAL = 8.7; EXPRESSED IN HEART, SIGNAL = 9.8; EXPRESSED IN ADULT LIVER, SIGNAL = 7.3; EXPRESSED IN BONE MARROW, SIGNAL =  12; EXPRESSED IN FETAL LIVER, SIGNAL = 9.7; SWISSPROT HIT: O60014, EVALUE 5.80e+00; NT HIT: gi15604717, EVALUE 8.00e+00
tctgcagaggaattcatcaccagaaatactgcacatgaggatataatatacaaaatatctgtacaatacagcttcttaagcaattatcctgtaccgctgggtcacattatgcaacttaatatttcccataacaaaaatagagttctggga

SEQ ID NO: 16611 - DNA, 211 bp, Homo sapiens
  MAP TO CHR6.1; EXPRESSED IN ADULT LIVER, SIGNAL = 1.9; EXPRESSED IN BONE MARROW, SIGNAL = 2.1; EXPRESSED IN PLACENTA, SIGNAL = 1.2; EXPRESSED IN FETAL LIVER, SIGNAL = 1.6; EXPRESSED IN BRAIN, SIGNAL = 1.8; EXPRESSED IN LUNG, SIGNAL = 2.6; EXPRESSED IN HEART, SIGNAL = 2.4; NT HIT: gi14761775, EVALUE 1.00e-115; SWISSPROT HIT: P05066, EVALUE 7.20e+00; EST_HUMAN HIT: AI554763.1, EVALUE 1.00e-115
taagaagggagctcagagaagtactttcagcataggaatgaacagtattctcaaatcgcagaataccgagttcccctccctcagacgagggctatatgtaacaaaaataacaataagcataggtatagtttaagagccttttacgtagtaattcttccaggccataaccatacaaatctgatcatttagacatgacaaatttctatataca

SEQ ID NO: 16612 - DNA, 209 bp, Homo sapiens
  MAP TO CHR19.1; EXPRESSED IN HEART, SIGNAL =  14; EXPRESSED IN BONE MARROW, SIGNAL =  12; EXPRESSED IN ADULT LIVER, SIGNAL =  30; EXPRESSED IN PLACENTA, SIGNAL =  17; EXPRESSED IN FETAL LIVER, SIGNAL =  12; EXPRESSED IN BRAIN, SIGNAL =  18; EXPRESSED IN LUNG, SIGNAL = 5.7; NT HIT: gi15308521, EVALUE 1.00e-114; SWISSPROT HIT: P91623, EVALUE 2.80e-01; EST_HUMAN HIT: BI457958.1, EVALUE 1.00e-114
tcccgggagccctacatgtgtgcacagtgcaagacggacttcacgtgccgctggcgggaggagaagagcggcgccatcatgtgtgagaactgcatgacaaccaaccagaagaaggcgctcaaggtggagcacaccagccggctgaaggccgcctttgtgaaggcgctgcagcaggaacaggagattgagcagcggctcctgcagcaggg

SEQ ID NO: 16613 - DNA, 369 bp, Homo sapiens
  MAP TO CHR11.1; EXPRESSED IN ADULT LIVER, SIGNAL = 2.3; EXPRESSED IN FETAL LIVER, SIGNAL = 1.6; EXPRESSED IN LUNG, SIGNAL = 3.2; EXPRESSED IN PLACENTA, SIGNAL = 2.3; EXPRESSED IN BRAIN, SIGNAL = 1.7; EXPRESSED IN BONE MARROW, SIGNAL = 1.8; EXPRESSED IN HEART, SIGNAL = 2.1; EST_HUMAN HIT: BF982807.1, EVALUE 3.00e-42; NT HIT: gi4759287, EVALUE 0.00e+00; SWISSPROT HIT: Q14139, EVALUE 1.00e-64
cctacctctcatgtgtacatttttaatttttcgttcttcatcattcaactccttgagggcacagtatgtgggattaaaggtgaggagccgagaggatctgggtttgcaaaatggctggcatagcttcaggagagcagcacccagattcagaaagaaagcatctgaggcatacatttggaaaaagatttctggcatctgattggcccaaatcttggtgcggcctgcatttgcatgcaaacagtttccaagccaggacaagatacagtgtttggtttctggagagagctggagtaagttcttcagcatctggtagatcttttcgtggaactgagccatgaactgttcaaccagaaaacacaaccacagaac

SEQ ID NO: 16614 - DNA, 170 bp, Homo sapiens
  MAP TO CHR9.1; EXPRESSED IN FETAL LIVER, SIGNAL =   2; EXPRESSED IN LUNG, SIGNAL = 2.4; EXPRESSED IN HELA, SIGNAL = 1.7; EXPRESSED IN BRAIN, SIGNAL =   2; EXPRESSED IN HEART, SIGNAL =   2; EXPRESSED IN BONE MARROW, SIGNAL =   2; EST_HUMAN HIT: AA143112.1, EVALUE 8.70e-01; NT HIT: AB043692.1, EVALUE 1.50e-01
ggctttagtccaaccacctgggtaaaacaggctcttgatttaagctgatgataaatgcagagccaacaaccaaaggaagcttcccttctcacactctgaagtttgtgtcagctgcactaggcttgttcccacatggccttttagtgtcctccagccaaaaaacagcaagc

SEQ ID NO: 16615 - DNA, 153 bp, Homo sapiens
  MAP TO CHR11.1; EXPRESSED IN PLACENTA, SIGNAL =   6; EXPRESSED IN FETAL LIVER, SIGNAL =   4; EXPRESSED IN LUNG, SIGNAL = 5.6; EXPRESSED IN HELA, SIGNAL = 4.6; EXPRESSED IN BRAIN, SIGNAL = 4.1; EXPRESSED IN BONE MARROW, SIGNAL = 4.3; EXPRESSED IN HEART, SIGNAL = 4.5; EST_HUMAN HIT: AW897829.1, EVALUE 2.00e-01; SWISSPROT HIT: P31695, EVALUE 4.40e+00; NT HIT: D11457.1, EVALUE 5.20e-01
ggaggttgagatgcaagagtgactcagctggcatcagctctgtagcagtctcagcctgcaggccttcaggaagtaagtcctccaggcctgcatctccctctgtggcaaattgccactaaactctgctgtttatcaacccagtaccaaacacag

SEQ ID NO: 16616 - DNA, 189 bp, Homo sapiens
  MAP TO CHR17.1; EXPRESSED IN BRAIN, SIGNAL = 1.2; EXPRESSED IN HEART, SIGNAL = 0.99; EXPRESSED IN ADULT LIVER, SIGNAL = 1.5; EXPRESSED IN BONE MARROW, SIGNAL = 1.3; EXPRESSED IN PLACENTA, SIGNAL = 1.4; EXPRESSED IN FETAL LIVER, SIGNAL = 1.2; EXPRESSED IN LUNG, SIGNAL = 0.71; SWISSPROT HIT: Q9Z123, EVALUE 7.40e+00; NT HIT: AF020538.1, EVALUE 1.70e-01; EST_HUMAN HIT: BF684159.1, EVALUE 6.30e-02
ataaatcatctatttccacactgaaactgaaactgacaactgctgagagcgtctgccaaagggtgtgtcatagccaaaggcagttagagtccctaccagcatcctgttctcagacttggggacctgagataccactggaatttgcctaaatgccagaatcaataacagagctcccagtggaaagttcag

SEQ ID NO: 16617 - DNA, 194 bp, Homo sapiens
  MAP TO CHR19.1; EXPRESSED IN FETAL LIVER, SIGNAL = 3.2; EXPRESSED IN LUNG, SIGNAL = 1.5; EXPRESSED IN BRAIN, SIGNAL = 2.1; EXPRESSED IN BONE MARROW, SIGNAL = 1.8; EXPRESSED IN ADULT LIVER, SIGNAL = 3.4; SWISSPROT HIT: Q63570, EVALUE 1.00e-21; NT HIT: gi14763816, EVALUE 1.00e-103; EST_HUMAN HIT: BI030837.1, EVALUE 1.00e-105
cacctgtggtagagcccacgatggctgtattctgatccacagcctccagaaattgtccgatgaccagcgggatgctttggattcgcttcacctcctcctgggcatggagaaattcctttttcaggttcttttgctcatctttgatgtattcctcctgcacctccaggaactccagctcttgctgcagcttctgc

SEQ ID NO: 16618 - DNA, 172 bp, Homo sapiens
  MAP TO CHR7.1; EXPRESSED IN HELA, SIGNAL = 6.6; EXPRESSED IN BRAIN, SIGNAL = 8.8; EXPRESSED IN HEART, SIGNAL = 8.5; EXPRESSED IN ADULT LIVER, SIGNAL =  13; EXPRESSED IN BONE MARROW, SIGNAL = 7.6; EXPRESSED IN PLACENTA, SIGNAL = 8.9; EXPRESSED IN FETAL LIVER, SIGNAL = 7.2; EXPRESSED IN LUNG, SIGNAL = 8.1; SWISSPROT HIT: O95178, EVALUE 4.00e-25; NT HIT: gi4758777, EVALUE 1.00e-76; EST_HUMAN HIT: BE708261.1, EVALUE 1.00e-83
tttgtcttgcagtgccggtggtggtgtgcacattgagccccggtatagacagttcccccagctgaccagatcccaggtgttccagagcgagttcttcagcggactcatgtggttctggattctctggcgcttttggcatgactcagaagaggtgctggtaagtgcaggagaa

SEQ ID NO: 16619 - DNA, 126 bp, Homo sapiens
  MAP TO CHRX.1; EXPRESSED IN HELA, SIGNAL = 4.3; EXPRESSED IN BRAIN, SIGNAL = 5.1; EXPRESSED IN PLACENTA, SIGNAL = 5.9; EXPRESSED IN LUNG, SIGNAL = 5.6; EXPRESSED IN HEART, SIGNAL = 4.5; EXPRESSED IN BONE MARROW, SIGNAL = 6.2; EXPRESSED IN ADULT LIVER, SIGNAL = 2.4; EXPRESSED IN FETAL LIVER, SIGNAL = 4.7; SWISSPROT HIT: O15550, EVALUE 2.00e-08; NT HIT: gi14762134, EVALUE 1.00e-62; EST_HUMAN HIT: BE836539.1, EVALUE 2.00e-62
tcttcaccatcttcagccatttcaacagcaaccccttctccaaaatccactgagcagacaaccacaaacagtgttaccagccttaacagccctcacagtgggctacacacaattaatggagaaggg

SEQ ID NO: 16620 - DNA, 216 bp, Homo sapiens
  MAP TO CHR19.1; EXPRESSED IN HELA, SIGNAL =   6; EXPRESSED IN BRAIN, SIGNAL = 6.3; EXPRESSED IN LUNG, SIGNAL = 2.9; EXPRESSED IN HEART, SIGNAL =   3; EXPRESSED IN ADULT LIVER, SIGNAL = 5.1; EXPRESSED IN BONE MARROW, SIGNAL = 6.8; EXPRESSED IN PLACENTA, SIGNAL = 5.5; EXPRESSED IN FETAL LIVER, SIGNAL = 5.3; EST_HUMAN HIT: BG419149.1, EVALUE 7.20e-02; SWISSPROT HIT: Q92072, EVALUE 1.50e-01; NT HIT: AE004675.1, EVALUE 7.70e-01
agcacccagctcaccctgacacagggcctggctcagagccacccactcctcctccgtcaaagccttgctaagcacctcggccaatttaccctgcatgaccttggtgagttccgcccgcagctcgccccgggacagggctcgggacagggtcaggcgcagctcactccaggacagcgccttcaccagcgccatgctcagcatgctctggggcagggc

SEQ ID NO: 16621 - DNA, 257 bp, Homo sapiens
  MAP TO CHR17.1; EXPRESSED IN LUNG, SIGNAL = 2.7; EXPRESSED IN BRAIN, SIGNAL = 5.6; EXPRESSED IN PLACENTA, SIGNAL = 4.2; EXPRESSED IN FETAL LIVER, SIGNAL =   8; EXPRESSED IN HELA, SIGNAL = 5.9; EXPRESSED IN HEART, SIGNAL = 2.6; EXPRESSED IN BONE MARROW, SIGNAL = 6.6; EXPRESSED IN ADULT LIVER, SIGNAL = 3.1; EST_HUMAN HIT: AA652463.1, EVALUE 0.00e+00; SWISSPROT HIT: P13628, EVALUE 1.20e-02; NT HIT: gi14770105, EVALUE 0.00e+00
tcaccacttgatgtccaggctgtgtgtgccacgctcctggctctggtacgtggtatgcagcacctctcgggccttgggggagttgatcccctccagccactcctggtacagctcctgcacgtgtgcactggactccggacgccgcacagggatgtcagcgtaaatgccttccatctgccgcagcagggccttatccgcatgtccgtctggagtctgggcttgcctctgccatttaagcatcctgaaagataaacaca

SEQ ID NO: 16622 - DNA, 162 bp, Homo sapiens
  MAP TO CHR11.1; EXPRESSED IN HEART, SIGNAL = 0.83; EXPRESSED IN BONE MARROW, SIGNAL = 0.49; EXPRESSED IN FETAL LIVER, SIGNAL = 0.56; EXPRESSED IN LUNG, SIGNAL = 0.87; EXPRESSED IN BRAIN, SIGNAL = 0.58; EST_HUMAN HIT: BE539330.1, EVALUE 8.20e-01; SWISSPROT HIT: O27346, EVALUE 4.40e+00; NT HIT: AF082296.1, EVALUE 2.20e+00
ttttctggttcctaattggcttgggttatccatctgttcctgtcctagtggaatgttgtttaaaggagcctggtgactccccgctgaggctgctggagttaagccagagtatacatatctgaactgcccagccaggggcagctgcatccgggcagcgccccc

SEQ ID NO: 16623 - DNA, 239 bp, Homo sapiens
  MAP TO CHR5.1; EXPRESSED IN BONE MARROW, SIGNAL = 4.6; EXPRESSED IN ADULT LIVER, SIGNAL = 3.3; EXPRESSED IN PLACENTA, SIGNAL = 3.8; EXPRESSED IN FETAL LIVER, SIGNAL = 4.3; EXPRESSED IN BRAIN, SIGNAL =   5; EXPRESSED IN HELA, SIGNAL = 4.5; EXPRESSED IN LUNG, SIGNAL = 2.5; EST_HUMAN HIT: AI698086.1, EVALUE 1.00e-93; SWISSPROT HIT: Q05319, EVALUE 4.00e-14; NT HIT: AB049453.1, EVALUE 4.00e-03
gctctcaggactggtgggccaggctgtgctgggggcggcaggggcaggagccatggtgggggccagaggcatgctggctttggtggtggcctccaggatccagtcacgtagcctggtgactcgggcatagacccctggacgccgggcttccgcacacccgattccccagctcacgatgccagccagaaagaaccggccagagggctcctcgcagaccaggggtcctcctgagtcaccct

SEQ ID NO: 16624 - DNA, 199 bp, Homo sapiens
  MAP TO CHR17.1; EXPRESSED IN ADULT LIVER, SIGNAL = 1.6; EXPRESSED IN FETAL LIVER, SIGNAL = 1.9; EXPRESSED IN LUNG, SIGNAL =   1; EXPRESSED IN PLACENTA, SIGNAL = 1.9; EXPRESSED IN BRAIN, SIGNAL = 2.1; EXPRESSED IN HELA, SIGNAL =   2; EXPRESSED IN HEART, SIGNAL = 1.1; EXPRESSED IN BONE MARROW, SIGNAL = 2.3; SWISSPROT HIT: P51973, EVALUE 9.50e+00; NT HIT: M88280.1, EVALUE 1.80e-01; EST_HUMAN HIT: AW170245.1, EVALUE 4.00e-03
aaatctaaataaataaagtagggctacaagacttcagttgaaaccagaaccagttgtccaagtgccttatcaggaatgatccgagccccgagatggaggtgaagtgaatgaagtaagcgagctagaaaatcagatcctcagaacaggcaaatctacccttctcaggttcttatgcatttggaaaaggtctactgcattt

SEQ ID NO: 16625 - DNA, 119 bp, Homo sapiens
  MAP TO CHR14.1; EXPRESSED IN HELA, SIGNAL = 2.7; EXPRESSED IN BRAIN, SIGNAL = 2.6; EXPRESSED IN HEART, SIGNAL = 0.93; EXPRESSED IN ADULT LIVER, SIGNAL = 2.4; EXPRESSED IN BONE MARROW, SIGNAL =  14; EXPRESSED IN PLACENTA, SIGNAL = 2.8; EXPRESSED IN FETAL LIVER, SIGNAL = 2.1; EXPRESSED IN LUNG, SIGNAL = 9.2; SWISSPROT HIT: P01743, EVALUE 1.00e-05; NT HIT: M99637.1, EVALUE 1.00e-56; EST_HUMAN HIT: AI791363.1, EVALUE 2.00e-41
cttctcccctagggtttctgactctctgaggatgtggtttttcacactgtgcctctcgcacagtaatacacggccgtgtcctcagatctcaggctgctcagctccatgtaggctgtgct

SEQ ID NO: 16626 - DNA, 235 bp, Homo sapiens
  MAP TO CHR7.1; EXPRESSED IN BRAIN, SIGNAL = 0.93; EXPRESSED IN LUNG, SIGNAL = 0.62; EXPRESSED IN HEART, SIGNAL = 0.74; EXPRESSED IN ADULT LIVER, SIGNAL = 0.96; SWISSPROT HIT: O81345, EVALUE 3.60e+00
gcctcagagactcctttaatttgacatcctgaatacgtagcatgtttaagagtagttctcaggggtagttccacaatctattccatttgtataaacctccagaacttcactgagacaataggagtatgtaaaggaataacttgcttccatgaagaacaaatatttactgcatttgcttgcattgtttctcaactttttagtaaatattttatttctgaaatgaaagaactgtttt

SEQ ID NO: 16627 - DNA, 231 bp, Homo sapiens
  MAP TO CHR19.1; EXPRESSED IN FETAL LIVER, SIGNAL = 5.2; EXPRESSED IN BRAIN, SIGNAL = 5.9; EXPRESSED IN LUNG, SIGNAL = 2.4; EXPRESSED IN HEART, SIGNAL = 2.9; EXPRESSED IN BONE MARROW, SIGNAL = 6.7; NT HIT: gi14757379, EVALUE 1.00e-116; SWISSPROT HIT: P31007, EVALUE 4.00e-10; EST_HUMAN HIT: BF438098.1, EVALUE 1.00e-116
ccactcaccacaccgttcaccgacaacagttgatccccacgcttgaggcctccatggcggtcagccacaccccctgggatgacccgggagatgtagatgggcgagttttgctctttgccacccatgatgttgaagcctaggccctcatccgtcttgggtagctccactaccctgggatgtgcgtggccctcgctggctgtgaaggcagccactgtggcctgggagagagaa

SEQ ID NO: 16628 - DNA, 218 bp, Homo sapiens
  MAP TO CHR7.1; EXPRESSED IN FETAL LIVER, SIGNAL = 1.6; EXPRESSED IN LUNG, SIGNAL = 1.2; EXPRESSED IN BRAIN, SIGNAL =   1; EXPRESSED IN HEART, SIGNAL = 1.2; EXPRESSED IN BONE MARROW, SIGNAL = 1.5; EXPRESSED IN ADULT LIVER, SIGNAL = 2.9; SWISSPROT HIT: P21439, EVALUE 8.00e-28; NT HIT: M23234.1, EVALUE 1.00e-111; EST_HUMAN HIT: BF969062.1, EVALUE 1.00e-03
acctttccagcagcttccagttcttttttatctcttttggcatttccagccaacaatttcatttcaacaattcctgacacagcaataattggaacaactgctaatagcaatagggttaactgccaaccgtagataaatgatatgataataccagttccaaggttagctatattctgtgcaattaaagccaacctggttcctgtggcctgggagagaaa

SEQ ID NO: 16629 - DNA, 241 bp, Homo sapiens
  MAP TO CHR18.1; EXPRESSED IN FETAL LIVER, SIGNAL = 3.3; EXPRESSED IN LUNG, SIGNAL = 2.4; EXPRESSED IN BRAIN, SIGNAL =   3; EXPRESSED IN HEART, SIGNAL = 3.4; EXPRESSED IN ADULT LIVER, SIGNAL = 2.6; EXPRESSED IN BONE MARROW, SIGNAL = 2.9; EST_HUMAN HIT: BG055295.1, EVALUE 1.00e-110; NT HIT: gi16163935, EVALUE 0.00e+00; SWISSPROT HIT: O95948, EVALUE 8.00e-41
tacctgccaggcgtaaggcggacatgcgctggaactcgggctcctgaagccacttccacatcctgcggaaggtctccctgccagatttgagtttactccacggttttggattccggagcaggtcggagagagtcccctgagaccggcacagcaccctctgcgcaaagatcgcctgggggatactgtagcgcttcagctccgctgtgatgcgctgggccacctctttggtgttgatttcttc

SEQ ID NO: 16630 - DNA, 302 bp, Homo sapiens
  MAP TO CHR19.1; EXPRESSED IN HELA, SIGNAL =   6; EXPRESSED IN BRAIN, SIGNAL = 8.7; EXPRESSED IN LUNG, SIGNAL = 4.5; EXPRESSED IN HEART, SIGNAL = 4.7; EXPRESSED IN ADULT LIVER, SIGNAL = 8.1; EXPRESSED IN BONE MARROW, SIGNAL = 9.6; EXPRESSED IN PLACENTA, SIGNAL = 6.8; EXPRESSED IN FETAL LIVER, SIGNAL = 7.3; EST_HUMAN HIT: BG992788.1, EVALUE 1.00e-104; NT HIT: gi16163229, EVALUE 0.00e+00; SWISSPROT HIT: P57999, EVALUE 1.00e-15
cctcccaggtgaacggtgtggacatgaagctgcccgtggtgctggccaacggccagatccgtgcctcccagcatggttcagatgttgtgattgagaccgacttcggcctgcgtgtggcctacgaccttgtgtactatgtgcgggtcaccgtccccggaaactactaccagcagatgtgtggcctgtgtgggaactacaacggcgaccccaaggatgacttccagaagcccaatggctcacaggcaggcaacgccaatgagttcggcaactcctgggaggaggtggtgcccgactctccctgc

SEQ ID NO: 16631 - DNA, 200 bp, Homo sapiens
  MAP TO CHR17.1; EXPRESSED IN LUNG, SIGNAL = 0.71; EXPRESSED IN HELA, SIGNAL = 2.1; EXPRESSED IN BRAIN, SIGNAL = 1.3; EXPRESSED IN PLACENTA, SIGNAL =   2; EXPRESSED IN FETAL LIVER, SIGNAL = 1.4; EXPRESSED IN HEART, SIGNAL = 0.49; EXPRESSED IN BONE MARROW, SIGNAL = 1.7; EXPRESSED IN ADULT LIVER, SIGNAL = 0.89; SWISSPROT HIT: P18168, EVALUE 2.50e+00; EST_HUMAN HIT: BI913280.1, EVALUE 3.00e-50; NT HIT: AB040956.1, EVALUE 2.00e-50
ctcccagcttcctggctggctcacctgtcccgatgtagagggttcgatagcacatgttcacagctcctcccaaccctaagagggggtagaacacagctcgggcctgtacctcctttctttgcactacaagacaaacataggaataggatcattcagaaactcagatcctgtgatccaaacataaaccaacaaaatctgga

SEQ ID NO: 16632 - DNA, 301 bp, Homo sapiens
  MAP TO CHR2.1; EXPRESSED IN ADULT LIVER, SIGNAL = 1.9; EXPRESSED IN PLACENTA, SIGNAL = 3.6; EXPRESSED IN BRAIN, SIGNAL = 1.8; EXPRESSED IN LUNG, SIGNAL = 2.6; EXPRESSED IN BONE MARROW, SIGNAL = 2.7; EXPRESSED IN HEART, SIGNAL =   2; NT HIT: M15918.1, EVALUE 0.00e+00; SWISSPROT HIT: P08578, EVALUE 3.00e-16; EST_HUMAN HIT: AL561119.1, EVALUE 1.00e-120
ctagctggagacactttgtagcagaggaatacctccttttagcatgatccgacccagttgttttcttgactttgttttagaatgaatctcttccgcatcatctaataacaaggttcgtatactcattaaaaccaatgatacagccttctgtccgcatattcacttgctcatagagccacacctgaatctgcgatctattttgtaagtatctgaagatgaggttgatgggcgcatcttcaccttctgcactttctggccctggccatggtatgccatggtggaatttcacaaagagcacacc

SEQ ID NO: 16633 - DNA, 179 bp, Homo sapiens
  MAP TO CHR7.1; EXPRESSED IN HEART, SIGNAL = 0.61; EXPRESSED IN ADULT LIVER, SIGNAL = 1.6; EXPRESSED IN BONE MARROW, SIGNAL = 0.63; EXPRESSED IN FETAL LIVER, SIGNAL = 1.8; EXPRESSED IN BRAIN, SIGNAL = 0.81; EXPRESSED IN LUNG, SIGNAL = 0.57; NT HIT: U51691.1, EVALUE 2.00e-96; SWISSPROT HIT: Q16850, EVALUE 3.00e-30; EST_HUMAN HIT: BF792081.1, EVALUE 5.00e-92
catcttaccagctccaaatggcacataggcaaacttttcccctgatgctgggttatcctgtaagtagcgatcaggattaaagtccaggcgttctacccatgagtctttaagtctttgattgacagtgggagaaacacacacctgatgtcctggaggaatggtataccctgccacagtct

SEQ ID NO: 16634 - DNA, 201 bp, Homo sapiens
  MAP TO CHR7.1; EXPRESSED IN FETAL LIVER, SIGNAL = 5.9; EXPRESSED IN LUNG, SIGNAL = 3.4; EXPRESSED IN BRAIN, SIGNAL = 6.3; EXPRESSED IN HELA, SIGNAL = 5.7; EXPRESSED IN HEART, SIGNAL = 3.5; EXPRESSED IN ADULT LIVER, SIGNAL = 5.5; EXPRESSED IN BONE MARROW, SIGNAL = 7.6; EXPRESSED IN PLACENTA, SIGNAL =   4; SWISSPROT HIT: P76547, EVALUE 1.70e-01; EST_HUMAN HIT: AA835532.1, EVALUE 2.60e-01
ttaacattccatccatctttcaagttccatttcaaattccatttggagaaattaggaaacaccttctggaggagctggcattcatctcttcccctcagctcccacaagtctttataattttattatggcatttatcacattccatcctgtcctgtagttataggccatctatctctttcactgcacagtaactttcctgag

SEQ ID NO: 16635 - DNA, 372 bp, Homo sapiens
  MAP TO CHR7.1; EXPRESSED IN HEART, SIGNAL = 2.2; EXPRESSED IN ADULT LIVER, SIGNAL = 3.9; EXPRESSED IN BONE MARROW, SIGNAL = 4.2; EXPRESSED IN FETAL LIVER, SIGNAL = 3.2; EXPRESSED IN PLACENTA, SIGNAL = 3.6; EXPRESSED IN LUNG, SIGNAL =   2; EXPRESSED IN BRAIN, SIGNAL =   4; EXPRESSED IN HELA, SIGNAL = 3.5; NT HIT: AB051545.1, EVALUE 0.00e+00; SWISSPROT HIT: P49746, EVALUE 6.80e-02; EST_HUMAN HIT: AI274589.1, EVALUE 3.00e-39
ttcaatccctttacctgatgctgttaccaggaggctgtctgaggcacctggtctacaggatgaggcactaacggggtttatggaagagcaaaaggcaatggtggtaggaatgacaagggaactgtctgaacatgcaggttggttcagtccgggggttgcagcaggccaggcacccacctgagacgtggccagggctgaaacggcacagcctgcaggtgccacagttaaatctatggatggttttggtggcagctgaggggaggatgacttaggaaggttctcctcattgatcaccctgttcccttgtggcaaactggaaggagtcgaagccacagttttgttatcaactttggcccctgtgttcgaggccct

SEQ ID NO: 16636 - DNA, 231 bp, Homo sapiens
  MAP TO CHR19.1; EXPRESSED IN HEART, SIGNAL = 1.2; EXPRESSED IN ADULT LIVER, SIGNAL = 1.2; EXPRESSED IN BONE MARROW, SIGNAL = 2.1; EXPRESSED IN PLACENTA, SIGNAL = 1.8; EXPRESSED IN FETAL LIVER, SIGNAL = 1.6; EXPRESSED IN BRAIN, SIGNAL = 1.9; EXPRESSED IN LUNG, SIGNAL =   1; EST_HUMAN HIT: BF204582.1, EVALUE 1.00e-125; SWISSPROT HIT: O00268, EVALUE 8.00e-02; NT HIT: AF305781.1, EVALUE 1.00e-39
caccgcggcagaaggcacggtgccggattcaaggtgacggcagtgcctggctccattctcctcaagttgccatagcagcctctctcccaacaagcagcttctccgggagccctcagccgggagggacgtcattgttctctcctgcccgtgtggtgcaaggagacccaccggacagagaactttcccgagcccggggtccgctgaccacgtgggtgcacccatgctgcctgg

SEQ ID NO: 16637 - DNA, 195 bp, Homo sapiens
  MAP TO CHR19.1; EXPRESSED IN LUNG, SIGNAL =   1; EXPRESSED IN BRAIN, SIGNAL = 1.1; EXPRESSED IN HEART, SIGNAL = 1.2; EXPRESSED IN ADULT LIVER, SIGNAL = 1.7; EXPRESSED IN BONE MARROW, SIGNAL = 1.2; EST_HUMAN HIT: AI206718.1, EVALUE 1.00e-105; SWISSPROT HIT: O14753, EVALUE 3.00e-18; NT HIT: Z23102.1, EVALUE 9.00e-96
cggcccttccgctgcagtgcttgcgggaaagcgtttacgcagcgctgctccctggaagctcaccttgctaaggtgcatggacagccggccagctacgcttaccgtgagcgccgcgagaagctgcacgtgtgcgaggactgcggcttcaccagctcccggcccgacacctacgcacagcaccgcgccctgcaccgc

SEQ ID NO: 16638 - DNA, 358 bp, Homo sapiens
  MAP TO CHR2.1; EXPRESSED IN BRAIN, SIGNAL = 0.76; EXPRESSED IN BONE MARROW, SIGNAL = 0.81; EST_HUMAN HIT: BG250862.1, EVALUE 0.00e+00; NT HIT: gi16159438, EVALUE 0.00e+00; SWISSPROT HIT: P28199, EVALUE 3.60e+00
tgaagaaggaagaaatgttgtatcagtgagtttttgttttcctaccaaaattagtaatagttggtctgtcaagaaacatatcccttttggtctttcagtgttctctaatcgaatttgctggatgtttgggactgaagatggaatgacagagtagatcaaaattatattacaagtgttggaagccactgccactacgtgggctttaagattaaatgctatcagatcaggaaccagaatgcctggaatagtgacttttctcgtcatggtaactgccttcttaaaggtcacaaggaccaaatgtgaagaatcttggccagttcctgtcaagtagtccttttttcttagacaaataagagaa

SEQ ID NO: 16639 - DNA, 136 bp, Homo sapiens
  MAP TO CHR3.1; EXPRESSED IN ADULT LIVER, SIGNAL = 3.8; EXPRESSED IN PLACENTA, SIGNAL =   3; EXPRESSED IN FETAL LIVER, SIGNAL = 3.8; EXPRESSED IN HELA, SIGNAL = 3.8; EXPRESSED IN BRAIN, SIGNAL =   4; EXPRESSED IN BONE MARROW, SIGNAL = 3.7; EXPRESSED IN HEART, SIGNAL = 2.5; SWISSPROT HIT: P11369, EVALUE 4.00e-16; EST_HUMAN HIT: AL042368.1, EVALUE 3.00e-49; NT HIT: AF003528.1, EVALUE 7.00e-40
agggatggtttaacatatgcaagtcaataaatgtgatacatcacataaacagaattaaaaacaaaaatcacatgatcatctcaatagaggcagaaaaagcatttgacaaaatccagcattgctttatgattaaaac

SEQ ID NO: 16640 - DNA, 293 bp, Homo sapiens
  MAP TO CHR7.1; EXPRESSED IN HEART, SIGNAL = 2.1; EXPRESSED IN LUNG, SIGNAL = 1.9; EXPRESSED IN BONE MARROW, SIGNAL = 4.8; EXPRESSED IN ADULT LIVER, SIGNAL = 4.8; EXPRESSED IN FETAL LIVER, SIGNAL = 4.5; EXPRESSED IN PLACENTA, SIGNAL = 4.7; EXPRESSED IN BRAIN, SIGNAL = 3.9; EXPRESSED IN HELA, SIGNAL = 3.7; NT HIT: gi16161900, EVALUE 0.00e+00; SWISSPROT HIT: P47898, EVALUE 6.00e-53; EST_HUMAN HIT: BI603546.1, EVALUE 0.00e+00
tggaacctgctggtgctggcgaccatcctccgtgtacgcaccttccaccgcgtgccccacaacctggtggcatccatggccgtctcggatgtcctggtggccgcgctggtcatgccgctgagcctggtgcacgagctgtccgggcgccgctggcagctaggtcggaggctgtgccagctttggatcgcgtgcgacgtgctttgctgcacggccagcatctggaacgtgacggccatagccctggaccgctactggtccatcacgcgccacatggaatacacgctccgcacccg

SEQ ID NO: 16641 - DNA, 220 bp, Homo sapiens
  MAP TO CHR14.1; EXPRESSED IN BRAIN, SIGNAL = 0.97; EXPRESSED IN LUNG, SIGNAL =   1; EXPRESSED IN HEART, SIGNAL = 0.75; EXPRESSED IN ADULT LIVER, SIGNAL = 1.2; EXPRESSED IN PLACENTA, SIGNAL = 2.5; NT HIT: AF111170.3, EVALUE 1.00e-121; EST_HUMAN HIT: AA912293.1, EVALUE 1.00e-120
aggtctggagtgggactgactggctccagacagaccatgttctacacagaggtgacagatgcccagcgtagcggtccaggtgggggcctggtggaggagggtgagctcattgaggtggtgcacctgcccctggaaggcgcccaggcctttgcagacgacccggacatccccaagaccctcggcgtcatctttggtgtctcatggttcctcagccaggtgg

SEQ ID NO: 16642 - DNA, 236 bp, Homo sapiens
  MAP TO CHR5.1; EXPRESSED IN LUNG, SIGNAL = 1.7; EXPRESSED IN BRAIN, SIGNAL = 1.8; EXPRESSED IN HELA, SIGNAL =   4; EXPRESSED IN HEART, SIGNAL = 1.7; EXPRESSED IN ADULT LIVER, SIGNAL = 2.7; EXPRESSED IN BONE MARROW, SIGNAL = 2.7; EXPRESSED IN PLACENTA, SIGNAL = 2.2; EXPRESSED IN FETAL LIVER, SIGNAL = 2.6; SWISSPROT HIT: O76082, EVALUE 3.00e-24; NT HIT: AB016625.1, EVALUE 1.00e-130; EST_HUMAN HIT: BI552541.1, EVALUE 3.00e-72
ccagctggttatctgtcactctccttttcttcccaggtttggccggaagaatgtgctgttcgtgaccatgggcatgcagacaggcttcagcttcctgcagatcttctcgaagaattttgagatgtttgtcgtgctgtttgtccttgtaggcatgggccagatctccaactatgtggcagcatttgtcctgggtatggccatcaggttggagttgagtacttgatcctgtatttcac

SEQ ID NO: 16643 - DNA, 337 bp, Homo sapiens
  MAP TO CHR18.1; EXPRESSED IN ADULT LIVER, SIGNAL = 2.5; EXPRESSED IN PLACENTA, SIGNAL = 2.6; EXPRESSED IN FETAL LIVER, SIGNAL = 2.4; EXPRESSED IN LUNG, SIGNAL = 1.4; EXPRESSED IN HELA, SIGNAL = 2.8; EXPRESSED IN BRAIN, SIGNAL = 2.7; EXPRESSED IN HEART, SIGNAL = 1.7; EST_HUMAN HIT: BE091224.1, EVALUE 4.00e-57; SWISSPROT HIT: P44936, EVALUE 5.60e+00; NT HIT: gi14764610, EVALUE 0.00e+00
ataggtcctgatcaggtacctctcagggaagaatttgagcaaattatgctgaaagctatgcaagaatttactctgagagaaagagccctgcagataggtgctcagtgtgtccctgtgtcaccaggacaactcccctggcttgctagattaattgccagcgtatctcaagacttggttcatgtggttgtgacccagaactctttggcggagggcatttcagagaccttaaggactctcagtgaaatgagacactatcaaaggctgccagattatgtggtggtaatttgtgcatcgaaaatcagaggaaatgaattttgtgtggtagtgttaggtgagt

SEQ ID NO: 16644 - DNA, 238 bp, Homo sapiens
  MAP TO CHR19.1; EXPRESSED IN FETAL LIVER, SIGNAL = 3.2; EXPRESSED IN HELA, SIGNAL = 2.7; EXPRESSED IN BRAIN, SIGNAL = 4.1; EXPRESSED IN LUNG, SIGNAL = 1.9; EXPRESSED IN HEART, SIGNAL = 1.8; EXPRESSED IN ADULT LIVER, SIGNAL = 3.6; EXPRESSED IN BONE MARROW, SIGNAL = 3.8; EXPRESSED IN PLACENTA, SIGNAL = 2.3; EST_HUMAN HIT: AL534605.1, EVALUE 1.00e-123; SWISSPROT HIT: O95897, EVALUE 2.00e-35; NT HIT: gi15302126, EVALUE 1.00e-123
agggccaaggcatacccagcttctgggcgcaggcgtggagccgggcctccagggccatcacccgttgctgcaggtcctcatacccgtaggcacccatctcctcctgaatggccgccagactgccggagagattcctcacctcctcccgcaagcgtacaatggtccgcgtgtctgccttgtactgctccaggaccgagctcaggggcaacagttccgtcatcctgtccttcagctcctg

SEQ ID NO: 16645 - DNA, 223 bp, Homo sapiens
  MAP TO CHR4.1; EXPRESSED IN BONE MARROW, SIGNAL = 1.8; EXPRESSED IN HEART, SIGNAL = 0.68; EXPRESSED IN ADULT LIVER, SIGNAL = 1.6; EXPRESSED IN PLACENTA, SIGNAL = 2.3; EXPRESSED IN FETAL LIVER, SIGNAL = 1.7; EXPRESSED IN HELA, SIGNAL = 2.7; EXPRESSED IN BRAIN, SIGNAL = 1.7; EST_HUMAN HIT: N53485.1, EVALUE 1.00e-122; SWISSPROT HIT: P40222, EVALUE 1.10e+00; NT HIT: AF312033.1, EVALUE 8.00e-01
gaggacagggcagtgagtacctttctaaaagagagagatttagcgggactaaaggtctgctctgtaagctcgagcccttcgatagtttccgtacagtcagagagaggtgcatcctgaaacagtaaactgagtcaccagagcacaccaggcccagcctgtgaaatatcagctgagagcacaggatggagctggctaagagcatgcagcagggacagctgtcaac

SEQ ID NO: 16646 - DNA, 111 bp, Homo sapiens
  MAP TO CHR12.1; EXPRESSED IN HEART, SIGNAL = 0.65; EXPRESSED IN ADULT LIVER, SIGNAL = 0.77; EXPRESSED IN FETAL LIVER, SIGNAL = 0.74; EXPRESSED IN HELA, SIGNAL = 0.52; EXPRESSED IN BRAIN, SIGNAL = 0.66; EXPRESSED IN LUNG, SIGNAL = 0.59; NT HIT: gi14763485, EVALUE 2.00e-52; EST_HUMAN HIT: AI240387.1, EVALUE 9.00e-06
ttttttaggtgcacttttcaaggagattgtgtacattcagagaacttagaaaactggctggatatttcgtctggagcaaaaaagtgccctaaaattcagataattcgaagc

SEQ ID NO: 16647 - DNA, 163 bp, Homo sapiens
  MAP TO CHR7.1; EXPRESSED IN LUNG, SIGNAL = 0.82; EXPRESSED IN BRAIN, SIGNAL = 0.64; EXPRESSED IN HEART, SIGNAL =   1; EXPRESSED IN BONE MARROW, SIGNAL = 0.56; NT HIT: AF132734.1, EVALUE 2.00e-84; EST_HUMAN HIT: AA682992.1, EVALUE 2.00e-84; SWISSPROT HIT: P04026, EVALUE 2.60e+00
tttaccttatgaaatcttcttcctcctctctttttggcctcagctgtttgggttgagccatattcatccagtttggtagagatttcaagagtctgctgatatcatcatcttttgcccaggatgcactgatgacaagtttttcttctgactggacaatacccct

SEQ ID NO: 16648 - DNA, 142 bp, Homo sapiens
  MAP TO CHR13.1; EXPRESSED IN BRAIN, SIGNAL = 0.65; EXPRESSED IN BONE MARROW, SIGNAL = 0.57; EXPRESSED IN HEART, SIGNAL = 1.1; EXPRESSED IN ADULT LIVER, SIGNAL = 0.63; EXPRESSED IN FETAL LIVER, SIGNAL = 0.75; EXPRESSED IN LUNG, SIGNAL = 1.2; EST_HUMAN HIT: BE901003.1, EVALUE 7.10e-01
tgcctagccaaatgatgacagtcacagatgggccccgcgaagggggtccagtgagatccttggtgaggtccaagcacatgaatgtgtgcacatagcatccctggatggggaactttccttcccaatagtccactgcaaaata

SEQ ID NO: 16649 - DNA, 148 bp, Homo sapiens
  MAP TO CHR19.1; EXPRESSED IN HELA, SIGNAL = 1.2; EXPRESSED IN BRAIN, SIGNAL =   1; EXPRESSED IN LUNG, SIGNAL = 0.67; EXPRESSED IN BONE MARROW, SIGNAL = 0.93; EXPRESSED IN HEART, SIGNAL = 0.7; EXPRESSED IN ADULT LIVER, SIGNAL = 0.93; EXPRESSED IN FETAL LIVER, SIGNAL =   1; SWISSPROT HIT: P35269, EVALUE 8.00e-19; NT HIT: gi16175535, EVALUE 1.00e-75; EST_HUMAN HIT: BE349278.1, EVALUE 2.00e-75
ctcacctctcccactcctcctcggcctcctcggcagtgagcgtgcgatgccgggccagcggtgtgaaattgtaccagttgtgcacggggaaggcctcgaaggccccgtcggggcactgggtgaagatgtagtaggacgtgttctctgt

SEQ ID NO: 16650 - DNA, 191 bp, Homo sapiens
  MAP TO CHR12.1; EXPRESSED IN PLACENTA, SIGNAL = 9.5; EXPRESSED IN HELA, SIGNAL =  12; EXPRESSED IN FETAL LIVER, SIGNAL =  10; EXPRESSED IN BRAIN, SIGNAL =  10; EXPRESSED IN LUNG, SIGNAL = 4.4; EXPRESSED IN HEART, SIGNAL = 5.7; EXPRESSED IN ADULT LIVER, SIGNAL =  11; EXPRESSED IN BONE MARROW, SIGNAL = 8.2; EST_HUMAN HIT: BE221868.1, EVALUE 1.00e-101; SWISSPROT HIT: P02834, EVALUE 4.30e+00; NT HIT: U83999.1, EVALUE 4.30e-02
aattatgatatgggaaagaggagcaggatttatagagctgaactctcagtgtatgaatgtttgagacttgcgggaggaagaaaaggcaagagctcgccaaggcgagccttggtctctgagatctctcgtcggctgctggggctccggctcagcctggcagatccgctgtggcctctctgggacctcgcccc

SEQ ID NO: 16651 - DNA, 161 bp, Homo sapiens
  MAP TO CHR7.1; EXPRESSED IN BRAIN, SIGNAL = 0.82; EXPRESSED IN FETAL LIVER, SIGNAL = 0.61; EXPRESSED IN HELA, SIGNAL = 0.72; EST_HUMAN HIT: BE536401.1, EVALUE 1.00e-64; SWISSPROT HIT: O00291, EVALUE 3.00e-16; NT HIT: AF052286.1, EVALUE 1.00e-85
aaaggctacctgtctcttcgatctgtgatttgccggaaatggttgaggccacaacgccggcagtggcctggttcactccccgagaggcctgctgcagctgggctaggttggggctgtccttatcagctttcacctaccaggacaaagcagatttaggttca

SEQ ID NO: 16652 - DNA, 146 bp, Homo sapiens
  MAP TO CHR7.1; EXPRESSED IN BRAIN, SIGNAL = 0.85; EXPRESSED IN HEART, SIGNAL = 1.6; EXPRESSED IN ADULT LIVER, SIGNAL = 1.4; EXPRESSED IN FETAL LIVER, SIGNAL = 0.97; EXPRESSED IN LUNG, SIGNAL = 1.8; EXPRESSED IN HELA, SIGNAL = 0.73; EST_HUMAN HIT: AI692194.1, EVALUE 2.00e-56; SWISSPROT HIT: Q09461, EVALUE 1.30e-01; NT HIT: gi10047121, EVALUE 2.00e-56
agcaatgtactggtataactatgaaattttaaagaagtggttatgtgagaaatctggtttatatgagccaacatttatgatcaactttacttcaggggcattgtctggttctgtaagtttattcttttgttgttaatattccagaa

SEQ ID NO: 16653 - DNA, 210 bp, Homo sapiens
  MAP TO CHR2.1; EXPRESSED IN FETAL LIVER, SIGNAL =   2; EXPRESSED IN LUNG, SIGNAL = 0.69; EXPRESSED IN HELA, SIGNAL = 2.3; EXPRESSED IN BRAIN, SIGNAL = 1.9; EXPRESSED IN HEART, SIGNAL = 0.71; EXPRESSED IN BONE MARROW, SIGNAL = 1.9; EXPRESSED IN PLACENTA, SIGNAL = 2.2; NT HIT: gi13638071, EVALUE 1.00e-100; SWISSPROT HIT: O95754, EVALUE 2.00e-31
tgtcaccccagggggacctcgggggccggaagaccctccagcagagatggacgacgtttttgaaagctgacctgctctgtccagggcctgagcatggccgggcctccagtgtcctgcaggatgttgctgtgcttcgacctgagcttggggcagggactcccatcttttatggcatcttttcttcccagtggtgaggggtcttggtgtgga

SEQ ID NO: 16654 - DNA, 289 bp, Homo sapiens
  MAP TO CHR16.1; EXPRESSED IN HELA, SIGNAL = 1.9; EXPRESSED IN BRAIN, SIGNAL = 1.6; EXPRESSED IN BONE MARROW, SIGNAL = 1.8; EXPRESSED IN HEART, SIGNAL = 1.1; EXPRESSED IN ADULT LIVER, SIGNAL = 1.8; EXPRESSED IN PLACENTA, SIGNAL = 1.6; SWISSPROT HIT: Q9P2Y4, EVALUE 2.00e-05; NT HIT: gi4503654, EVALUE 0.00e+00; EST_HUMAN HIT: AL120228.1, EVALUE 0.00e+00
ctcaggtgggttcgggcttcaccgcctggccctctgtggtcacagaggggctcggtggcccaggtggtggttccgcctccaggggcagggccttgtcctgggtctgtgtcagcgggtgcaccatggacatgtgtacattgaggttgtgggccttctcaaaccgccggccacactggtcacaggcaaagtccagctcagtctcagccttgtgtttggtcatgtggtacttgagggatgcccgctgcctgcactggaacccacagacctcacacctgggggacagaggcag

SEQ ID NO: 16655 - DNA, 247 bp, Homo sapiens
  MAP TO CHR17.1; EXPRESSED IN LUNG, SIGNAL = 1.2; EXPRESSED IN BRAIN, SIGNAL = 0.7; EXPRESSED IN HEART, SIGNAL =   1; EXPRESSED IN BONE MARROW, SIGNAL = 0.61; SWISSPROT HIT: Q01202, EVALUE 6.20e-01; NT HIT: X80388.1, EVALUE 2.30e-01; EST_HUMAN HIT: BI034356.1, EVALUE 1.30e+00
aggtgcagatgattgtgaatgagttcaaggcatccactctgaccattggctggcgagcccaagagatgtcagagaagctgctggtacgcattagtggcaaacgggtatacagggacctggaatttgaagaggaccaaagagagcatcgggcagctgtacagcagaaattgatgaacctgcaccaggatgtggtgaccatcatgaccaactcctatgaggtcttcaagaatgatggtcctgaggtagg

SEQ ID NO: 16656 - DNA, 238 bp, Homo sapiens
  MAP TO CHR7.1; EXPRESSED IN PLACENTA, SIGNAL = 1.4; EXPRESSED IN HELA, SIGNAL = 0.97; EXPRESSED IN BRAIN, SIGNAL = 0.67; EXPRESSED IN LUNG, SIGNAL = 0.94; EXPRESSED IN BONE MARROW, SIGNAL = 0.68; EST_HUMAN HIT: BF759868.1, EVALUE 1.00e-122; SWISSPROT HIT: P42575, EVALUE 1.30e+00; NT HIT: gi16161685, EVALUE 1.00e-122
tacctgtaggagaggccgctgcactcccagcaccttcatggtgtctgcgttggccagaatcttcaaagggtcagatgttttagtgactccttcaatctccttgttgatctcagccaagacttgattgagaaagatgtttttgatgtacacggtgagaaactctcgaagaggacactgtttggctgggccaagacccagagcatgctcaatctcctgaataaatctggaggacaaacag

SEQ ID NO: 16657 - DNA, 179 bp, Homo sapiens
  MAP TO CHR13.1; EXPRESSED IN HEART, SIGNAL = 0.68; EXPRESSED IN BONE MARROW, SIGNAL = 0.49; EXPRESSED IN HELA, SIGNAL = 0.39; EXPRESSED IN FETAL LIVER, SIGNAL = 0.59; EXPRESSED IN LUNG, SIGNAL = 0.72; EXPRESSED IN BRAIN, SIGNAL = 0.44; EST_HUMAN HIT: AA765738.1, EVALUE 2.00e-88; SWISSPROT HIT: P51587, EVALUE 3.00e-25; NT HIT: X95173.1, EVALUE 2.00e-96
cttaaatggtcacagggttatttcagtgaagagcagttaagagccttgaataatcacaggcaaatgttgaatgataagaaacaagctcagatccagttggaaattaggaaggccatggaatctgctgaacaaaaggaacaaggtttatcaagggatgtcacaaccgtgtggaagttgcg

SEQ ID NO: 16658 - DNA, 178 bp, Homo sapiens
  MAP TO CHR17.1; EXPRESSED IN HEART, SIGNAL = 2.2; EXPRESSED IN LUNG, SIGNAL = 2.3; EXPRESSED IN BRAIN, SIGNAL = 2.3; EXPRESSED IN BONE MARROW, SIGNAL = 2.3; EXPRESSED IN ADULT LIVER, SIGNAL = 2.1; EXPRESSED IN FETAL LIVER, SIGNAL = 2.8; EXPRESSED IN PLACENTA, SIGNAL = 2.3; EXPRESSED IN HELA, SIGNAL = 2.8; EST_HUMAN HIT: BF672049.1, EVALUE 3.00e-90; SWISSPROT HIT: O43502, EVALUE 4.00e-26; NT HIT: AF029669.1, EVALUE 8.00e-90
cagtatgcagttggcagtagatgtgcagataccagaatgttttggaggagtggcaggtgaagcagtttttattgatacagagggaagttttatggttgatagagtggtagaccttgctactgcctgcattcagcaccttcagcttatagcagaaaaacacaagggagagggtaagtta

SEQ ID NO: 16659 - DNA, 199 bp, Homo sapiens
  MAP TO CHR5.1; EXPRESSED IN LUNG, SIGNAL = 0.84; EXPRESSED IN HELA, SIGNAL = 1.2; EXPRESSED IN BRAIN, SIGNAL = 1.4; EXPRESSED IN BONE MARROW, SIGNAL = 1.5; EST_HUMAN HIT: AA428395.1, EVALUE 1.00e-101; SWISSPROT HIT: O76082, EVALUE 3.00e-23; NT HIT: gi14781268, EVALUE 1.00e-101
ctcttttccagattattacttcttatccattggtctggtcatgctgggaaaatttgggatcacctctgctttctccatgctgtatgtcttcactgctgagctctacccaaccctggtcaggaacatggcggtgggggtcacatccacggcctccagagtgggcagcatcattgccccctactttgtttacctcggtgag

SEQ ID NO: 16660 - DNA, 292 bp, Homo sapiens
  MAP TO CHR6.1; EXPRESSED IN LUNG, SIGNAL = 1.5; EXPRESSED IN HELA, SIGNAL =   3; EXPRESSED IN BRAIN, SIGNAL = 3.3; EXPRESSED IN ADULT LIVER, SIGNAL = 1.7; EXPRESSED IN BONE MARROW, SIGNAL = 3.5; EXPRESSED IN HEART, SIGNAL = 1.7; EXPRESSED IN FETAL LIVER, SIGNAL = 2.7; EXPRESSED IN PLACENTA, SIGNAL = 3.3; SWISSPROT HIT: P31695, EVALUE 7.00e-37; NT HIT: gi14782530, EVALUE 0.00e+00
cccacagtccagcctatgaccagtactgccatgatcacttccacaacgggcactgtgagaaaggctgcaacactgcagagtgtggctgggatggaggtgactgcaggcctgaagatggggacccagagtgggggccctccctggccctgctggtggtactgagccccccagccctagaccagcagctgtttgccctggcccgggtgctgtccctgactctgagggtaggactctgggtaaggaaggatcgtgatggcagggacatggtgtacccctatcctggggcccgggc

SEQ ID NO: 16661 - DNA, 220 bp, Homo sapiens
  MAP TO CHR6.1; EXPRESSED IN HEART, SIGNAL = 2.6; EXPRESSED IN ADULT LIVER, SIGNAL = 4.4; EXPRESSED IN HELA, SIGNAL = 3.1; EXPRESSED IN BRAIN, SIGNAL = 4.2; EXPRESSED IN BONE MARROW, SIGNAL = 4.4; EXPRESSED IN FETAL LIVER, SIGNAL = 3.5; EXPRESSED IN PLACENTA, SIGNAL =   3; EXPRESSED IN LUNG, SIGNAL = 2.5; SWISSPROT HIT: P22004, EVALUE 2.00e-18; NT HIT: M60315.1, EVALUE 1.00e-108; EST_HUMAN HIT: R67103.1, EVALUE 1.00e-99
cacctgaagcactggagacccgcgccacgtcctgggactgggtagagcgattacgactctgttgtcggcgccggctggaggctgacctggtggtgcgcacgtggacctcactcactttgaagaaagccaccatgaagggctgcttatcgtaagggccgtctctgcccaccaggcctgcggctcgggggtggacgtggactcctttaatgcaaatcaaagc

SEQ ID NO: 16662 - DNA, 498 bp, Homo sapiens
  MAP TO CHR7.1; EXPRESSED IN HEART, SIGNAL = 6.4; EXPRESSED IN FETAL LIVER, SIGNAL = 5.9; EXPRESSED IN BONE MARROW, SIGNAL = 7.1; EXPRESSED IN ADULT LIVER, SIGNAL = 4.9; EXPRESSED IN PLACENTA, SIGNAL = 4.1; EXPRESSED IN LUNG, SIGNAL = 4.5; EXPRESSED IN BRAIN, SIGNAL =   7; EXPRESSED IN HELA, SIGNAL =   4; SWISSPROT HIT: Q9UDV7, EVALUE 2.00e-46; NT HIT: AB033111.1, EVALUE 0.00e+00; EST_HUMAN HIT: BF568251.1, EVALUE 0.00e+00
taccttgggaacttctccattgctgccggggggcagccgcaggatccagaaatttctgtttttcagcaggttctccatgttctccagccgcctctgcagcagcccatactcctgcagcagggtccccaacacgacccacttgctctccagatggttcgcgaactccacggctgtcttctcgcagtcggctatcttcttttcatttgtccccgtcctgccttccagggtcagtagcctcatggcctgggcctccagcttcctctccactgcttggacggcagcccacacagccaagcgggtgatctctgccgtggggagcggctgttccttctggactgcagaagagatctggaaaggggtgtccttttgggaaaccgggctctggagcagcgggtccatgtcagtctcgggaactgttggggaaagggtcagggggtctttctcaggagcttcaggggagtgaacgggggcttcctggtggtggggggagtgggagag

SEQ ID NO: 16663 - DNA, 407 bp, Homo sapiens
  MAP TO CHR19.1; EXPRESSED IN ADULT LIVER, SIGNAL = 0.57; EXPRESSED IN BONE MARROW, SIGNAL = 0.8; EXPRESSED IN FETAL LIVER, SIGNAL = 0.74; EXPRESSED IN HELA, SIGNAL = 0.64; EXPRESSED IN BRAIN, SIGNAL = 0.89; EXPRESSED IN HEART, SIGNAL =   1; EST_HUMAN HIT: BI520246.1, EVALUE 0.00e+00; SWISSPROT HIT: Q05469, EVALUE 2.00e-59; NT HIT: gi4885450, EVALUE 0.00e+00
tgggtgtggcgcacctctttgacctggacccagagacaccggccaacgggtaccgcagcctagtgcacacagcccgctgctgcctggcgcacctcctgcacaaatcccgctatgtggcctccaaccgccgcagcatcttcttccgcaccagccacaacctggccgagctggaggcctacctggctgccctcacccagctccgcgctctggtctactacgcccagcgcctgctggttaccaatcggccgggggtactcttctttgagggcgacgaggggctcaccgccgacttcctccgggagtatgtcacgctgcataagggatgcttctatggccgctgcctgggcttccaggtgagccccctgccccgtgcccctctgggcccacaatgaaggcacctggtggcc

SEQ ID NO: 16664 - DNA, 181 bp, Homo sapiens
  MAP TO CHR7.1; EXPRESSED IN LUNG, SIGNAL = 0.65; EXPRESSED IN ADULT LIVER, SIGNAL = 2.6; EXPRESSED IN BONE MARROW, SIGNAL = 0.71; EXPRESSED IN BRAIN, SIGNAL = 0.69; EST_HUMAN HIT: BF666559.1, EVALUE 3.00e-87; SWISSPROT HIT: P34535, EVALUE 2.00e-07; NT HIT: AF402318.1, EVALUE 2.00e-87
ataaacctcaggattacctagggccttgaaaagttcttctcgaactgcagaggtgaattttcggaccagacacaatgttgtcacaatagcaaaaagcaaattgtaggataatacaatatagaaatttcccagccaattaaaccttccaaagtcgccaagtagatcaaatctagtgattcct

SEQ ID NO: 16665 - DNA, 190 bp, Homo sapiens
  MAP TO CHR7.1; EXPRESSED IN LUNG, SIGNAL = 0.67; EXPRESSED IN HELA, SIGNAL = 0.86; EXPRESSED IN BRAIN, SIGNAL = 1.5; EST_HUMAN HIT: AI370936.1, EVALUE 1.00e-83; SWISSPROT HIT: P42658, EVALUE 5.00e-28; NT HIT: M96859.1, EVALUE 8.00e-84
ttctctactctgttttcccttagaggagattttgaagacacacatcgcacactggtggtctccggatggcacgagactcgcctacgccgccatcaatgattcccgtgtccccatcatggagctcccaacttacaccggctccatctaccccaccgtgaagccctaccactatcccaaggtaggcaaaggg

SEQ ID NO: 16666 - DNA, 227 bp, Homo sapiens
  MAP TO CHR1.1; EXPRESSED IN LUNG, SIGNAL = 2.4; EXPRESSED IN HEART, SIGNAL = 2.4; EXPRESSED IN ADULT LIVER, SIGNAL = 4.1; EXPRESSED IN BRAIN, SIGNAL = 4.4; EXPRESSED IN HELA, SIGNAL = 3.1; EXPRESSED IN BONE MARROW, SIGNAL = 5.1; EXPRESSED IN FETAL LIVER, SIGNAL = 3.8; EXPRESSED IN PLACENTA, SIGNAL = 3.7; SWISSPROT HIT: Q60596, EVALUE 6.70e-01; NT HIT: gi6678763, EVALUE 3.00e-34; EST_HUMAN HIT: AA642831.1, EVALUE 3.00e-38
acgttaaagagtccttctttgttcagccccagtcggggacgcagggcgcggtgttcctccgcgctcgccgcgcagtccctgcccccccgcggctttggagagctgccattcggcaccggagtcgctccgcgctcccagaatgcaccggcagtccgcgggaaaccaaaatggcgaggggctgtattgaagtgggctgtgtttgaggccggtgtaagaacgctcattct

SEQ ID NO: 16667 - DNA, 194 bp, Homo sapiens
  MAP TO CHR16.1; EXPRESSED IN BRAIN, SIGNAL = 0.61; EXPRESSED IN BONE MARROW, SIGNAL = 0.65; EXPRESSED IN HEART, SIGNAL = 0.72; EXPRESSED IN LUNG, SIGNAL = 0.65; SWISSPROT HIT: O82922, EVALUE 5.70e-02; NT HIT: AB023148.1, EVALUE 4.00e-95; EST_HUMAN HIT: AU135447.1, EVALUE 3.00e-62
gctatggatagctttgcagagggggtgggagctgtgtatggcatgtttgatggagaccgaaatgaggagctcccgcgcctgctgcagtgtacgatggcagatgtgcttttagaagaggtacagcagtcaactaatgacacagttttcatggctaacaccttcttggtatctcacaggtaagcaggtgggttgaa

SEQ ID NO: 16668 - DNA, 117 bp, Homo sapiens
  MAP TO CHR7.1; EXPRESSED IN BONE MARROW, SIGNAL = 0.58; EXPRESSED IN FETAL LIVER, SIGNAL = 0.53; EXPRESSED IN LUNG, SIGNAL = 0.64; EXPRESSED IN HELA, SIGNAL = 0.51; EXPRESSED IN BRAIN, SIGNAL = 0.62; EXPRESSED IN HEART, SIGNAL = 0.77; NT HIT: AP003132.2, EVALUE 6.00e+00; EST_HUMAN HIT: BE146746.1, EVALUE 1.00e-29
gccctgcctctctctgtgtggtggttttcctcataatgtatattccattagcacagtgaagattgagttcagtccaccagaggggttaatttcaggattttaagtgcttttgaagat

SEQ ID NO: 16669 - DNA, 192 bp, Homo sapiens
  MAP TO CHR17.1; EXPRESSED IN LUNG, SIGNAL = 0.99; EXPRESSED IN BRAIN, SIGNAL = 0.65; EXPRESSED IN HEART, SIGNAL = 0.82; EXPRESSED IN BONE MARROW, SIGNAL = 0.78; EST_HUMAN HIT: BI333114.1, EVALUE 8.00e-94; SWISSPROT HIT: P42229, EVALUE 2.00e-27; NT HIT: L41142.1, EVALUE 5.00e-94
ctgtctccagtgcagctctccggctgggatcctggttgacgccatgtcccagaagcaccttcagatcaaccagacatttgaggagctgcgactggtcacgcaggacacagagaatgagctgaagaaactgcagcagactcaggagtacttcatcatccagtaccaggagagcctgaggatccaaggtgaggc

SEQ ID NO: 16670 - DNA, 229 bp, Homo sapiens
  MAP TO CHR19.1; EXPRESSED IN PLACENTA, SIGNAL = 1.7; EXPRESSED IN FETAL LIVER, SIGNAL = 1.9; EXPRESSED IN LUNG, SIGNAL = 2.3; EXPRESSED IN HELA, SIGNAL = 2.7; EXPRESSED IN BRAIN, SIGNAL = 2.1; EXPRESSED IN HEART, SIGNAL = 2.6; EXPRESSED IN ADULT LIVER, SIGNAL = 1.7; EXPRESSED IN BONE MARROW, SIGNAL = 1.7; EST_HUMAN HIT: BI490718.1, EVALUE 1.00e-120; SWISSPROT HIT: Q9ZCI1, EVALUE 2.00e-04; NT HIT: AF361481.1, EVALUE 1.00e-126
caggtgtggggacccgtccacagatcccccgctgctgacccgagcaaggcaccagcaccacctccagggttgcctggatgccctcggccactacaagcagtcaaaagacctggccctggcggcagaggcgctgcgggtggcccggggtcacctgacccggctcacaggtggagggggtaccgaggagatcctggacatcatcttccaggacttctgtgtgggcaagtga

SEQ ID NO: 16671 - DNA, 208 bp, Homo sapiens
  MAP TO CHRX.1; EXPRESSED IN BRAIN, SIGNAL = 0.87; EXPRESSED IN HEART, SIGNAL = 0.9; EXPRESSED IN BONE MARROW, SIGNAL = 0.78; EXPRESSED IN FETAL LIVER, SIGNAL =   1; EXPRESSED IN HELA, SIGNAL =   1; EXPRESSED IN LUNG, SIGNAL = 1.1; EST_HUMAN HIT: BG696781.1, EVALUE 1.00e-110; SWISSPROT HIT: P70398, EVALUE 1.00e-35; NT HIT: gi14764088, EVALUE 1.00e-110
aaaaggtgaaggacatggcccatcttgcaaggaaaaatgtgcaataaagactataagttttgcaaacgcacccctcacttctgcactagggcactccagaaggtattcggagaagcgatttgaaacattaaaaaggacgttatgagcaaaccaaaaacgtacattcttgctgtgacgaaggagaatacacaatgcatcatacctaaaa

SEQ ID NO: 16672 - DNA, 227 bp, Homo sapiens
  MAP TO CHR19.1; EXPRESSED IN PLACENTA, SIGNAL = 4.7; EXPRESSED IN FETAL LIVER, SIGNAL = 1.3; EXPRESSED IN HEART, SIGNAL = 1.5; EXPRESSED IN LUNG, SIGNAL = 1.6; EXPRESSED IN BRAIN, SIGNAL = 1.3; EXPRESSED IN HELA, SIGNAL = 1.4; EXPRESSED IN BONE MARROW, SIGNAL = 1.1; EXPRESSED IN ADULT LIVER, SIGNAL = 0.82; NT HIT: AF207640.1, EVALUE 1.00e-119; EST_HUMAN HIT: AW953035.1, EVALUE 1.00e-119; SWISSPROT HIT: Q96348, EVALUE 7.00e-24
accttgaggccggagccaatgaggaagtccacaagcacggacttgactttggtctggcctgacttgaagtcatctccgcccacaaaaacccggtgctgccacgcgagctcaagagctccgggcaccagggtgttctgcggagacccattgaggaaggcacagccctccaggatgctggccacggcgaagagcgtggagggcgacacctccagaccgagctgtgggca

SEQ ID NO: 16673 - DNA, 169 bp, Homo sapiens
  MAP TO CHR14.1; EXPRESSED IN HEART, SIGNAL = 0.89; EXPRESSED IN BONE MARROW, SIGNAL = 0.57; EXPRESSED IN ADULT LIVER, SIGNAL = 0.6; EXPRESSED IN LUNG, SIGNAL = 0.84; EXPRESSED IN HELA, SIGNAL = 0.66; EXPRESSED IN BRAIN, SIGNAL = 0.55; SWISSPROT HIT: P20186, EVALUE 2.60e+00; NT HIT: gi13631906, EVALUE 1.00e-85; EST_HUMAN HIT: BF129196.1, EVALUE 2.00e-85
ggcccgcagcaggtgctgttcccactgccgacgcctctgtccgtgttcgcgctgctgaccgggccaggctctgagctgcccgctgtgtgcatcggcgtgagccccgggcggccggggaagtcggtgctcttccacacggtgcgctttggcgcgctctcttgctggctgg

SEQ ID NO: 16674 - DNA, 145 bp, Homo sapiens
  MAP TO CHR19.1; EXPRESSED IN BRAIN, SIGNAL = 0.31; EXPRESSED IN HEART, SIGNAL = 0.64; EXPRESSED IN BONE MARROW, SIGNAL = 0.37; EXPRESSED IN FETAL LIVER, SIGNAL = 0.3; SWISSPROT HIT: P15621, EVALUE 2.00e-19; NT HIT: U09367.1, EVALUE 1.00e-23; EST_HUMAN HIT: AA730339.1, EVALUE 6.00e-17
aagggttttccacattctttacattcatagggtttctctccagtatgaattcgttcatgtatatgaatataactggaactactgaaggctttaccacactgtttacattcataaggtttctctccagtgtgggttctttcatgta

SEQ ID NO: 16675 - DNA, 155 bp, Homo sapiens
  MAP TO CHR2.1; EXPRESSED IN BRAIN, SIGNAL = 1.7; EXPRESSED IN LUNG, SIGNAL = 1.4; EXPRESSED IN HEART, SIGNAL = 1.6; EXPRESSED IN ADULT LIVER, SIGNAL = 2.5; EXPRESSED IN BONE MARROW, SIGNAL =   2; EXPRESSED IN PLACENTA, SIGNAL = 1.6; EXPRESSED IN FETAL LIVER, SIGNAL = 2.3; EST_HUMAN HIT: BG104295.1, EVALUE 3.00e-80; SWISSPROT HIT: P52789, EVALUE 5.00e-24; NT HIT: Z46604.1, EVALUE 4.00e-82
cagaacacggagagttcctggctctggatcttggagggaccaacttccgtgtgctttgggtgaaagtaacggacaatgggctccagaaggtggagatggagaatcagatctatgccatccctgaggacatcatgcgaggcagtggcacccaggta

SEQ ID NO: 16676 - DNA, 187 bp, Homo sapiens
  MAP TO CHR12.1; EXPRESSED IN ADULT LIVER, SIGNAL = 0.96; EXPRESSED IN HELA, SIGNAL = 1.2; EXPRESSED IN FETAL LIVER, SIGNAL = 0.96; EXPRESSED IN LUNG, SIGNAL = 0.99; EXPRESSED IN BRAIN, SIGNAL = 0.94; EXPRESSED IN HEART, SIGNAL = 1.3; EST_HUMAN HIT: AI376898.1, EVALUE 2.00e-26; SWISSPROT HIT: O43306, EVALUE 2.00e-28; NT HIT: gi10947059, EVALUE 5.00e-85
tttgcagttcacctgtaaccacacccccatacggagctgtgcagcccggatgctgaatttaacacctgctgacatcactgcctgccacctgcagcagctcaattactctctgggcctggatgctcccctgtgtgagggcaccatgcccacctgcagctttcctgaggtgttcgagcagtgctcaggc

SEQ ID NO: 16677 - DNA, 151 bp, Homo sapiens
  MAP TO CHR19.1; EXPRESSED IN LUNG, SIGNAL = 1.5; EXPRESSED IN HEART, SIGNAL = 1.7; EXPRESSED IN PLACENTA, SIGNAL = 3.1; EXPRESSED IN FETAL LIVER, SIGNAL = 2.7; EXPRESSED IN HELA, SIGNAL = 2.8; EXPRESSED IN BRAIN, SIGNAL = 2.9; EST_HUMAN HIT: BG115017.1, EVALUE 2.00e-72; SWISSPROT HIT: Q11122, EVALUE 2.00e-04; NT HIT: AF305734.1, EVALUE 2.00e-77
gtactcaccatgactccagtgcacaggcagacgatcttgccccacatggtgcccggcaccacgtcaccatagccgatggtcaggaatgtgatggggatcagccaaagtgtgtctgaaaggtgcccagtggcattaacagcctgcctatggg

SEQ ID NO: 16678 - DNA, 228 bp, Homo sapiens
  MAP TO CHR20.1; EXPRESSED IN BRAIN, SIGNAL = 0.67; EXPRESSED IN HEART, SIGNAL = 0.67; EXPRESSED IN BONE MARROW, SIGNAL = 0.71; EST_HUMAN HIT: T08816.1, EVALUE 1.20e+00; SWISSPROT HIT: Q99717, EVALUE 2.00e+00
gtccctgggctagtgagcagtgaccgggttatgcttatgtgcttgagtgagcaggaacacaaaacagggcactgcctcccagcggcaacctccactgacatgttggacaagacgttcaaccccttccccgaggccaaaatgacacttgtcctccaaaaccagccccttctcagtatggaaacctccccatggggtcacaagatgggtaaatggcacatgattgaaacg

SEQ ID NO: 16679 - DNA, 426 bp, Homo sapiens
  MAP TO CHR6.1; EXPRESSED IN ADULT LIVER, SIGNAL = 0.97; EXPRESSED IN PLACENTA, SIGNAL = 2.3; EXPRESSED IN FETAL LIVER, SIGNAL = 1.3; EXPRESSED IN LUNG, SIGNAL =   1; EXPRESSED IN HEART, SIGNAL = 0.53; EXPRESSED IN BRAIN, SIGNAL = 1.1; EXPRESSED IN HELA, SIGNAL = 3.1; EXPRESSED IN BONE MARROW, SIGNAL = 1.2; EST_HUMAN HIT: AI765855.1, EVALUE 0.00e+00; SWISSPROT HIT: P19474, EVALUE 3.00e-28; NT HIT: gi4508004, EVALUE 0.00e+00
ggagcctggaagaggaggtgacctgctccatctgtcttgattacctgcgggaccctgtgaccattgactgtggccacgtcttctgccgcagctgcaccacagacgtccgccccatctcagggagccgccccgtctgcccactctgcaagaagccttttaagaaggagaacatccgacccgtgtggcaactggccagcctggtggagaacattgagcggctgaaggtggacaagggcaggcagccgggagaggtgacccgggagcagcaggatgcaaagttgtgcgagcgacaccgagagaagctgcactactactgtgaggacgacgggaagctgctgtgcgtgatgtgccgggagtcccgggagcacaggccccacacggccgtcctcatggagaaggccgcccagccccacagggtaagccctc

SEQ ID NO: 16680 - DNA, 131 bp, Homo sapiens
  MAP TO CHR10.1; EXPRESSED IN ADULT LIVER, SIGNAL = 7.3; EXPRESSED IN PLACENTA, SIGNAL = 4.1; EXPRESSED IN LUNG, SIGNAL = 3.1; EXPRESSED IN BRAIN, SIGNAL = 2.8; EXPRESSED IN HEART, SIGNAL = 5.4; NT HIT: gi14744534, EVALUE 6.00e-68; EST_HUMAN HIT: BE797066.1, EVALUE 9.00e-68; SWISSPROT HIT: P18669, EVALUE 3.00e-17
ccttcacttcttggccttgccctgggcagccacagcttccatggctttgcgcaccgtctcttcatcccccagaaactgcatgggcttgataggcttcaagttcttgtccaattcatagacaatgggaatac

SEQ ID NO: 16681 - DNA, 168 bp, Homo sapiens
  MAP TO CHR1.1; EXPRESSED IN BRAIN, SIGNAL = 0.98; EXPRESSED IN HEART, SIGNAL = 6.6; EXPRESSED IN BONE MARROW, SIGNAL = 0.39; SWISSPROT HIT: P23297, EVALUE 1.00e-09; NT HIT: gi16159802, EVALUE 4.00e-82; EST_HUMAN HIT: BE612852.1, EVALUE 1.00e-83
tgggtaggtgcactgctgcaatgggctctgagctggagacggcgatggagaccctcatcaacgtgttccacgcccactcgggcaaagagggggacaagtacaagctgagcaagaaggagctgaaagagctgctgcagacggagctctctggcttcctggatgtgagca

SEQ ID NO: 16682 - DNA, 214 bp, Homo sapiens
  MAP TO CHR22.1; EXPRESSED IN HELA, SIGNAL = 0.78; EXPRESSED IN BRAIN, SIGNAL = 0.81; EXPRESSED IN LUNG, SIGNAL = 0.84; EXPRESSED IN HEART, SIGNAL = 1.2; SWISSPROT HIT: O00192, EVALUE 7.00e-31; NT HIT: gi4502246, EVALUE 1.00e-109; EST_HUMAN HIT: BE869016.1, EVALUE 1.00e-108
cctgcccctcagggagctacgccatggctgagcttgtgcggaatgtgcgcaatgcacaggctccgccgcgaccgggggcctgcctggaggaagacaccgtggtggcggtgctcaacaccatccacgaaatcgtgtccgacagcctggataacgcgcgctcgctcctgcaggcacgcggggtgccagcgttggtggctctcgtggcctccaggtg

SEQ ID NO: 16683 - DNA, 234 bp, Homo sapiens
  MAP TO CHR17.1; EXPRESSED IN BRAIN, SIGNAL = 0.63; EST_HUMAN HIT: BG182681.1, EVALUE 7.00e-24; SWISSPROT HIT: P02446, EVALUE 9.00e-19; NT HIT: gi13994361, EVALUE 2.00e-26
ttgttgagcagtcaacaggatggcacataggagtcaggcatgcagccaggcaggggccaggttcacagcaggtgggctgaaggaggctgatctcatgaggacaggtgctgggtaggcagacttcacattgacagcttatgtcagaggggcagatagtggtggccaggccagtggggacgctgcagcatccttggagataggaatcacagcaagacatagtgacagtggaccagg

SEQ ID NO: 16684 - DNA, 318 bp, Homo sapiens
  MAP TO CHR6.1; EXPRESSED IN PLACENTA, SIGNAL =  46; EXPRESSED IN LUNG, SIGNAL =  26; EXPRESSED IN BRAIN, SIGNAL = 4.2; EST_HUMAN HIT: AW162462.1, EVALUE 0.00e+00; SWISSPROT HIT: P46776, EVALUE 1.00e-55; NT HIT: gi14760223, EVALUE 0.00e+00
aagccaccaggacacaggcccccccaacactcttaatcttctcctcagctcttctgctgaagaatttggcctgcacggtgacagcctgcttggggagctttccctttcccagaactttgtagtagccagatcgcaccacatcaatgatgggagcagccccagtcttgtttttagcagcattcacccgtgtctgttcactgaccaaagtccacaatttgtcaaggttgacagttgggcagaagctctggttcctctttaagtggtaatgcttcataccaactttcccaaagtagcctgggtggtatttgtcgaagttga

SEQ ID NO: 16685 - DNA, 258 bp, Homo sapiens
  MAP TO CHR5.1; EXPRESSED IN HEART, SIGNAL = 0.55; EXPRESSED IN BONE MARROW, SIGNAL =   1; EXPRESSED IN FETAL LIVER, SIGNAL = 0.88; EXPRESSED IN BRAIN, SIGNAL = 0.89; EST_HUMAN HIT: BG822174.1, EVALUE 6.00e-46; SWISSPROT HIT: Q9Y5E6, EVALUE 4.00e-16; NT HIT: gi14724434, EVALUE 0.00e+00
gcagatccgctactctattcccgaggagctggagaaaggctccttcgtaggcaacatcgtcaaggatctgggactggagccccaggagttggcggagcacggagtccgcatcgtctccagaggtaggatgcagcttttctctctgaatccgcgaaacggcagcttggtcaccgcgggtaggatagaccgcgaggagctctgtgctcagagcccgcggtgtctggtgagttttaacatccttgtcgaggataaactgaa

SEQ ID NO: 16686 - DNA, 278 bp, Homo sapiens
  MAP TO CHR9.1; EXPRESSED IN FETAL LIVER, SIGNAL = 0.76; EXPRESSED IN BRAIN, SIGNAL = 0.62; EXPRESSED IN LUNG, SIGNAL = 0.57; EXPRESSED IN HEART, SIGNAL = 0.68; EXPRESSED IN BONE MARROW, SIGNAL = 0.88; EST_HUMAN HIT: BE731749.1, EVALUE 2.00e-03; SWISSPROT HIT: Q64249, EVALUE 7.00e-44; NT HIT: gi15451845, EVALUE 0.00e+00
ctcacctgtgtagttcttcatcggagggcgagtacttggcagtgacatcagccagttccccaaagatctgcttgctgtaaacggtgagggaagacagcaggattagctcctgccacgtagagctcaagaggcacgtgtaatccttgattgagagctcgcagaagaaaggcagtttcttgatccaggcaatctgcctaaagagcagctcgtcggccaggcggcaaagcagggcaaatagttctgcctgtgtcacagcgtatctgaggggcagggacagg

SEQ ID NO: 16687 - DNA, 233 bp, Homo sapiens
  MAP TO CHR12.1; EXPRESSED IN HELA, SIGNAL = 1.9; EXPRESSED IN BRAIN, SIGNAL = 2.6; EXPRESSED IN LUNG, SIGNAL = 2.6; EXPRESSED IN HEART, SIGNAL = 2.5; EXPRESSED IN BONE MARROW, SIGNAL =   3; EXPRESSED IN ADULT LIVER, SIGNAL = 0.65; EXPRESSED IN PLACENTA, SIGNAL = 2.1; NT HIT: U77700.1, EVALUE 1.00e-110; EST_HUMAN HIT: BG403735.1, EVALUE 1.00e-110; SWISSPROT HIT: P49452, EVALUE 1.20e+00
cagccagcaaacaaggactaacccaaagccttgagcctagagggcatgacacaggcagccaaggacaagaaggggttcttgatcctgggagcagccaggggagacttcagcaagggcagaaaagagtcgaccaaaacagggatgtactgggtcaggccggacgggttcttggccaggatgatgtccagcagtccaagcgccgcctccagctccccatccagctgcaagcagag

SEQ ID NO: 16688 - DNA, 106 bp, Homo sapiens
  MAP TO CHR22.1; EXPRESSED IN BONE MARROW, SIGNAL = 0.51; EXPRESSED IN HEART, SIGNAL = 0.82; EXPRESSED IN LUNG, SIGNAL = 0.78; EXPRESSED IN BRAIN, SIGNAL = 0.49; SWISSPROT HIT: P31367, EVALUE 4.70e+00; NT HIT: L77570.1, EVALUE 4.00e-53; EST_HUMAN HIT: AW250122.1, EVALUE 1.00e-47
agatgtgactccagccacatttgaaacccctgaggtgcatgcaggcactggagtggtgggcaacaagcccaggccccgcggccgaggcctggaggatggtgagtga

SEQ ID NO: 16689 - DNA, 211 bp, Homo sapiens
  MAP TO CHR3.1; EXPRESSED IN LUNG, SIGNAL = 0.77; EXPRESSED IN BRAIN, SIGNAL = 0.77; EXPRESSED IN HEART, SIGNAL =   1; EXPRESSED IN BONE MARROW, SIGNAL = 0.86; SWISSPROT HIT: Q09332, EVALUE 4.80e-01; NT HIT: gi14732944, EVALUE 3.00e-03; EST_HUMAN HIT: BI601470.1, EVALUE 5.00e-03
cactgtacctaagaaatgtcccctgagttggtctgaggaggaatgaacatttttcttgatgtccattagtaaatggattagcgatgctaacaggtgcgtcctccagcttcctcgagcccaggtcctgctggcagagagggcagcactggggcacactgaagctgtagatgtatttctcacagtggttgaatttaattaaagccttcccagc

SEQ ID NO: 16690 - DNA, 359 bp, Homo sapiens
  MAP TO CHR5.1; EXPRESSED IN BONE MARROW, SIGNAL = 0.71; EXPRESSED IN FETAL LIVER, SIGNAL = 0.64; EXPRESSED IN HELA, SIGNAL = 0.6; EXPRESSED IN BRAIN, SIGNAL = 0.85; SWISSPROT HIT: Q9Y5I2, EVALUE 3.00e-59; NT HIT: gi14727831, EVALUE 0.00e+00; EST_HUMAN HIT: AI651536.1, EVALUE 0.00e+00
ggcgggttgtcgttaatgtccttcacttccacgtccacatggaaaacctgcagcggcctgtccacgatcacctccaggtggatgctgcactccacgctccgcccgcacagctcctcgcggtcaatccgagaattcacaaacaaaatgccattctgcagatttacctccagaaggtccccgtgtcttttggacgccacccggaacaggcgctgcaccagctccgccagctccagccccaggtcctgcgcgatgcggcccacgaaggtgccgtgtctggcctcctcgtagactgagtagtggagctggccgctccccacctcccaggctgcgaggagaagaagcgagagcagcagacactg

SEQ ID NO: 16691 - DNA, 192 bp, Homo sapiens
  MAP TO CHR19.1; EXPRESSED IN PLACENTA, SIGNAL = 5.9; EXPRESSED IN LUNG, SIGNAL = 3.8; EXPRESSED IN BRAIN, SIGNAL = 4.3; EXPRESSED IN HEART, SIGNAL =   5; EST_HUMAN HIT: AW955165.1, EVALUE 3.00e-96; SWISSPROT HIT: P34248, EVALUE 3.00e-05; NT HIT: AB040965.1, EVALUE 3.00e-86
ctctgtccccacagcctatggcgttggcctccttgtgacattcgtggcactggccctgatgcagcgtggccagcccgctctcctctacctggtgccctgcacgctggtgacgagctgcgctgtggcgctctggcgccgggagctgggcgtgttctggacgggcagcggctttgcggtgaataccagtttgct

SEQ ID NO: 16692 - DNA, 177 bp, Homo sapiens
  MAP TO AP001878.2; EXPRESSED IN BONE MARROW, SIGNAL =  12; EXPRESSED IN HEART, SIGNAL =   6; EXPRESSED IN ADULT LIVER, SIGNAL = 7.8; EXPRESSED IN HELA, SIGNAL = 5.9; EXPRESSED IN BRAIN, SIGNAL = 9.5; EXPRESSED IN LUNG, SIGNAL = 5.7; EST_HUMAN HIT: BG618947.1, EVALUE 4.00e-80; SWISSPROT HIT: Q63028, EVALUE 5.00e-24; NT HIT: gi14781056, EVALUE 7.00e-81
tactcactgtgatatgattgtagataagctgagaccacccaaagagatctgctagtctataaaacgctgccaatttacaccgtaataacttctctcctttgtcatacgcaatagaatcagatcctctaagatcgttcacaggagtcaccataccaagacctgaaataaagaaaaaca

SEQ ID NO: 16693 - DNA, 193 bp, Homo sapiens
  MAP TO CHR7.1; EXPRESSED IN HELA, SIGNAL = 1.4; EXPRESSED IN BRAIN, SIGNAL = 0.65; EXPRESSED IN LUNG, SIGNAL = 0.64; EST_HUMAN HIT: BE870509.1, EVALUE 5.00e-95; SWISSPROT HIT: P08581, EVALUE 2.00e-29; NT HIT: U11813.1, EVALUE 1.00e-100
tttctttttggaacagatatgaagtaatgctaaaatgctggcaccctaaagccgaaatgcgcccatccttttctgaactggtgtcccggatatcagcgatcttctctactttcattggggagcactatgtccatgtgaacgctacttatgtgaacgtaaaatgtgtcgctccgtatccttctctgttgtcatc

SEQ ID NO: 16694 - DNA, 348 bp, Homo sapiens
  MAP TO CHR22.1; EXPRESSED IN LUNG, SIGNAL = 3.2; EXPRESSED IN HELA, SIGNAL = 3.7; EXPRESSED IN BRAIN, SIGNAL = 3.9; EXPRESSED IN HEART, SIGNAL = 2.5; EXPRESSED IN BONE MARROW, SIGNAL = 3.7; EST_HUMAN HIT: BI861635.1, EVALUE 0.00e+00; SWISSPROT HIT: Q9Y6J0, EVALUE 7.00e-62; NT HIT: gi6912457, EVALUE 0.00e+00
acccggtgggtcttgctgtaggtgtagaggaaggccagacggtagagactcttatagtgctgggggaagcggctcaggcacaggcggaaggaggcgatgcactgctctgtgagaaactgccgctgctcctcagcaccagccggcagcccctgggggaaggccactggctcccctgggaggtcccctctcttcttcccatcccacagggtgggtgtggatgctgagggcttgccagggatgcaagcagaggctggggtttctgcagcaggcttctggacaccttgctctgcagcccggaagccttctgtactctccaatgactcctcgttttttcctacagttgagaag

SEQ ID NO: 16695 - DNA, 181 bp, Homo sapiens
  MAP TO CHR4.1; EXPRESSED IN FETAL LIVER, SIGNAL = 0.52; EXPRESSED IN BRAIN, SIGNAL = 0.63; EXPRESSED IN ADULT LIVER, SIGNAL = 0.88; EXPRESSED IN BONE MARROW, SIGNAL = 0.69; SWISSPROT HIT: P42680, EVALUE 1.00e-30; NT HIT: gi16157280, EVALUE 1.00e-94; EST_HUMAN HIT: AV714704.1, EVALUE 6.00e-76
acttacccatatttatctcttgctctccaccaatgaacatcattcttttctaaaatgagatactcttggcctctctctaatctgagatcatgtccttctgctgcttggaaatcatacatggctacaacgatttcttcactattatcttcttcttctagtggaattggtgggggaggccttc

SEQ ID NO: 16696 - DNA, 149 bp, Homo sapiens
  MAP TO CHR8.1; EXPRESSED IN HELA, SIGNAL = 0.82; EXPRESSED IN BRAIN, SIGNAL = 0.94; EXPRESSED IN BONE MARROW, SIGNAL = 0.98; EXPRESSED IN HEART, SIGNAL = 1.1; EXPRESSED IN ADULT LIVER, SIGNAL = 0.94; EXPRESSED IN FETAL LIVER, SIGNAL = 0.9; EXPRESSED IN LUNG, SIGNAL = 0.89; SWISSPROT HIT: O83544, EVALUE 3.40e+00
ggcaggtttggtaataacacagctactgacttgcaaacactccaaaaatgcttgctgaactgaattaaatagttcacagcttgaagtaggaaaaaccatgatgagcaagactggaaaaggtggtacctctaatctgtaaaaataataac

SEQ ID NO: 16697 - DNA, 210 bp, Homo sapiens
  MAP TO CHR2.1; EXPRESSED IN BRAIN, SIGNAL = 0.82; EXPRESSED IN HELA, SIGNAL = 0.58; EXPRESSED IN BONE MARROW, SIGNAL = 0.78; EXPRESSED IN HEART, SIGNAL = 1.2; EXPRESSED IN LUNG, SIGNAL = 0.93; SWISSPROT HIT: P08620, EVALUE 9.00e-28; NT HIT: J02986.1, EVALUE 1.00e-115; EST_HUMAN HIT: AW340506.1, EVALUE 1.00e-113
cagcccttcttcaccgatgagtgcacgttcaaggagattctccttcccaacaactacaacgcctacgagtcctacaagtaccccggcatgttcatcgccctgagcaagaatgggaagaccaagaaggggaaccgagtgtcgcccaccatgaaggtcacccacttcctccccaggctgtgaccctccagaggacccttgcctcagcctcgg

SEQ ID NO: 16698 - DNA, 155 bp, Homo sapiens
  MAP TO CHR3.1; EXPRESSED IN PLACENTA, SIGNAL = 5.5; EXPRESSED IN LUNG, SIGNAL = 9.2; EXPRESSED IN BRAIN, SIGNAL = 2.7; EXPRESSED IN HEART, SIGNAL = 3.9; EST_HUMAN HIT: BE388148.1, EVALUE 5.00e-82; SWISSPROT HIT: Q9QUI0, EVALUE 5.00e-24; NT HIT: gi15294693, EVALUE 4.00e-82
tgctttccatccacctcgatatctgccacatagttctcaaacactgtgggcacatacacctctgggaactggtccttgctgaagactatgagcaagcatgtctttccacaggctccatcaccaacaatcaccagtttcttccggatggcagccat

SEQ ID NO: 16699 - DNA, 227 bp, Homo sapiens
  MAP TO CHRX.1; EXPRESSED IN LUNG, SIGNAL = 0.94; EXPRESSED IN HELA, SIGNAL = 1.1; EXPRESSED IN BRAIN, SIGNAL = 0.83; EXPRESSED IN BONE MARROW, SIGNAL = 0.95; EXPRESSED IN PLACENTA, SIGNAL = 1.1; SWISSPROT HIT: Q26721, EVALUE 2.00e+00; NT HIT: gi13649009, EVALUE 1.00e-121
tacctgctgtcaaatgacacctcaggaggaatgacatgagtactgtccttgccaatgaggaatttgattcgatcataaaaaagtcttgaagtgtgctgagagaagagagtttggctttgctgaatgaggtcaagaggatctggtgagccctggcagagaggacttatataacagttgctttgttgacaacagtcaggatccacacagtcggttaaaccatctggaaa

SEQ ID NO: 16700 - DNA, 199 bp, Homo sapiens
  MAP TO CHR17.1; EXPRESSED IN BONE MARROW, SIGNAL = 0.53; EXPRESSED IN ADULT LIVER, SIGNAL = 0.59; EXPRESSED IN FETAL LIVER, SIGNAL = 0.54; EXPRESSED IN BRAIN, SIGNAL = 0.57; EXPRESSED IN LUNG, SIGNAL = 0.57; EXPRESSED IN HEART, SIGNAL = 0.49; EST_HUMAN HIT: AL589307.1, EVALUE 1.00e-108; SWISSPROT HIT: Q9JHD2, EVALUE 1.00e-30; NT HIT: gi11426182, EVALUE 1.00e-98
ccctggctgggcctacctggtgtaattgaccttgtaggtagccacgtcctcagcctgagacctctgccgaaactgggcaggtgtctcaagcttccagtagttaaggcagagcaagaacatctttgagagctcgaacatcgtctgccgctcccggggagccaggtgactaaacttgtactgcacaaagttcagcacaccc

SEQ ID NO: 16701 - DNA, 108 bp, Homo sapiens
  MAP TO CHR16.1; EXPRESSED IN BRAIN, SIGNAL = 0.56; EXPRESSED IN BONE MARROW, SIGNAL = 0.53; EXPRESSED IN HELA, SIGNAL = 0.43; EST_HUMAN HIT: AU121007.1, EVALUE 2.00e+00
cagcagccaaattatagtcctttataaatagggtagtaacttacacaacaaccaatttatttgcgataccctgctgtacataagaaaaacaccatgcactctaatata

SEQ ID NO: 16702 - DNA, 165 bp, Homo sapiens
  MAP TO CHR13.1; EXPRESSED IN HELA, SIGNAL =   1; EXPRESSED IN BRAIN, SIGNAL = 0.99; EXPRESSED IN BONE MARROW, SIGNAL = 1.2; EXPRESSED IN ADULT LIVER, SIGNAL = 0.87; EXPRESSED IN FETAL LIVER, SIGNAL = 0.84; EXPRESSED IN LUNG, SIGNAL = 1.4; EST_HUMAN HIT: BG036901.1, EVALUE 6.00e-88
acaaacctgaaactgtggaatcgtcatttcaaagcacttggtctttacttggcctgaatgatctgccacttttagcatcactgcaacgtaaggatacttaagagatctgcaagtgtctgagctcacagccatacccagtttccactgaaaatctacaagctttaa

SEQ ID NO: 16703 - DNA, 247 bp, Homo sapiens
  MAP TO CHR11.1; EXPRESSED IN LUNG, SIGNAL = 0.91; EXPRESSED IN HELA, SIGNAL = 0.71; EXPRESSED IN BRAIN, SIGNAL = 0.77; EXPRESSED IN BONE MARROW, SIGNAL = 0.81; EXPRESSED IN HEART, SIGNAL = 0.83; EXPRESSED IN ADULT LIVER, SIGNAL = 0.92; EST_HUMAN HIT: AA704766.1, EVALUE 1.00e-130; SWISSPROT HIT: Q03164, EVALUE 3.00e-45; NT HIT: Z69749.1, EVALUE 0.00e+00
cacttacttgcagcactgcttctttatattgcgaccaccaaacttgggcttatctaagcaattagtacaaacaccacagtcctcaggcacctggcagccgggacactgcccacaccgcctcgatcgacgtcctttctttactggaggttcctggggtgccttgtttctagtgacaggtttaattggtttgatgggtggagcaagaggttcagcatcttctgagccagcaattgatgacttgtctgtt

SEQ ID NO: 16704 - DNA, 203 bp, Homo sapiens
  MAP TO CHR5.1; EXPRESSED IN LUNG, SIGNAL = 0.77; EXPRESSED IN BRAIN, SIGNAL = 0.65; EXPRESSED IN HEART, SIGNAL = 0.52; EXPRESSED IN ADULT LIVER, SIGNAL = 1.1; EXPRESSED IN BONE MARROW, SIGNAL = 0.65; EST_HUMAN HIT: AL520652.1, EVALUE 3.00e-96; SWISSPROT HIT: P24173, EVALUE 2.50e+00; NT HIT: gi14781185, EVALUE 2.00e-96
tcactcacctctgatattgtgataggcaactgcaatttgggaaacaatatacgagctcttagagaagcccacatcaatgagattctgatacttttgcagggcctcctctatcaactgcaactctgtgtatatatgagccagaaaaaactctttcatccaggtgtctggcaaagacaggaacttcagctggcagcaggagagag

SEQ ID NO: 16705 - DNA, 169 bp, Homo sapiens
  MAP TO CHR7.1; EXPRESSED IN FETAL LIVER, SIGNAL = 2.1; EXPRESSED IN HELA, SIGNAL = 1.9; EXPRESSED IN BRAIN, SIGNAL = 2.5; EXPRESSED IN HEART, SIGNAL = 3.2; EXPRESSED IN BONE MARROW, SIGNAL = 2.5; EXPRESSED IN LUNG, SIGNAL = 3.4; NT HIT: gi14752053, EVALUE 4.00e-85; EST_HUMAN HIT: BG108643.1, EVALUE 2.00e-23; SWISSPROT HIT: Q9ULJ8, EVALUE 1.00e-23
tagacttgaatgaagcagtcccagagacagagcgcctggattcaaaagcactgaaaactcgagcccagctctctgtgaagaacagacgccagagaccctctaggacaagactgtatgatagtgttagttccacagatggggaggacagtctagagagaaaggtgagcac

SEQ ID NO: 16706 - DNA, 371 bp, Homo sapiens
  MAP TO CHR19.1; EXPRESSED IN FETAL LIVER, SIGNAL = 0.35; EXPRESSED IN BRAIN, SIGNAL = 0.54; EXPRESSED IN HEART, SIGNAL = 0.63; SWISSPROT HIT: Q63425, EVALUE 3.00e-49; NT HIT: gi14787060, EVALUE 0.00e+00; EST_HUMAN HIT: BE185671.1, EVALUE 8.00e+00
ctgaggtgaaactcccgaaggtgcccgagatggctgtgcccgatgtgcacctcccggaagtgcagctcccgaaagtcccagagatgaaactccctaaaatgcctgagatggctgtgccagaggttcgactccccgaggtgcagctgccaaaagtctcagagatgaaactccccaaggtgcctgaaatggccgtgcccgatgtgcacctcccagaggtgcagctgcccaaagtctgtgaaatgaaagtccctgacatgaagctcccagagataaaactccccaaggtgcctgagatggctgtgcccgatgtgcacctccccgaggtgcagctgccgaaagtgtcagagattcggctgccggaaatgcaagtg

SEQ ID NO: 16707 - DNA, 218 bp, Homo sapiens
  MAP TO CHR1.1; EXPRESSED IN HEART, SIGNAL = 0.91; EXPRESSED IN PLACENTA, SIGNAL = 1.3; EXPRESSED IN LUNG, SIGNAL = 0.73; EXPRESSED IN BRAIN, SIGNAL = 0.77; EST_HUMAN HIT: BE540926.1, EVALUE 1.00e-113; SWISSPROT HIT: O14896, EVALUE 7.00e-38; NT HIT: gi13635795, EVALUE 1.00e-113
ctcaggcctgggctgtagagacagggaagtaccaggaaggggtggatgaccctgacccagctaaatggaaggcccagctgcgctgtgctctcaataagagcagagaattcaacctgatgtatgatggcaccaaggaggtgcccatgaacccagtgaagatatatcaagtgtgtgacatccctcagccccagggctcgatcattaacccaggtgaggcc

SEQ ID NO: 16708 - DNA, 382 bp, Homo sapiens
  MAP TO CHR17.1; EXPRESSED IN FETAL LIVER, SIGNAL = 0.69; EXPRESSED IN HELA, SIGNAL = 0.64; EXPRESSED IN BRAIN, SIGNAL = 0.62; EST_HUMAN HIT: AW819796.1, EVALUE 0.00e+00; SWISSPROT HIT: P70478, EVALUE 9.20e-02; NT HIT: AB018275.2, EVALUE 0.00e+00
gtctgcaaacgtcgtccaggctgatagatctgcaggtcgggtttctttgttcttttgataatttttagactacgatcctcttgtccagcagtcctaggaaaggattcttgtccccgattattttctgggtctataggaccattctgctcttggttgttcagttccttgcagacatctttaacgggctgtgtaccattttcaacagcagagcaatctcggtcattaacaatttcatctttgaattcctcactcccagggggttccttgattttgggcttgttccttagccgagaaaggccaggcttatagatttccagatctggacgcctgttatctttgcgcggcctggcctcctttaattccttcatgttttctgttatgt

SEQ ID NO: 16709 - DNA, 206 bp, Homo sapiens
  MAP TO CHR3.1; EXPRESSED IN BONE MARROW, SIGNAL = 0.91; EXPRESSED IN FETAL LIVER, SIGNAL = 0.61; EXPRESSED IN BRAIN, SIGNAL = 0.52; EXPRESSED IN LUNG, SIGNAL = 0.87; EXPRESSED IN HEART, SIGNAL = 0.83; EST_HUMAN HIT: BG185165.1, EVALUE 1.00e-110; SWISSPROT HIT: P46976, EVALUE 1.00e-27; NT HIT: AF065481.1, EVALUE 1.00e-112
tgtgttcacagaaaaatgcagtgtttctactggaggtaagtgtcaagtttcctcttgatgttgtcaaaggaatctgctcccatataatcagcctggccctgttcccatcgttccttccgttcttccgaggatacaaacggctgtgccatagctgggatctccccaagggacagatgtgatatggctcctgagacatcttcctagaa

SEQ ID NO: 16710 - DNA, 134 bp, Homo sapiens
  MAP TO CHR2.1; EXPRESSED IN HELA, SIGNAL = 0.67; EXPRESSED IN BRAIN, SIGNAL = 0.77; EXPRESSED IN HEART, SIGNAL = 1.3; EXPRESSED IN LUNG, SIGNAL =   1; EST_HUMAN HIT: BE151690.1, EVALUE 1.00e-30; SWISSPROT HIT: Q00653, EVALUE 7.00e-03; NT HIT: U05681.1, EVALUE 1.80e+00
accttatcctgtgcgttcaggtgggcgccacactcgatgaggtgctccaggcagtcggggtgccgggtgcgcactgccacgtgcaggggggtgctcccgatctgagagcaagtgggggtcagtgctgggtctgg

SEQ ID NO: 16711 - DNA, 144 bp, Homo sapiens
  MAP TO CHR12.1; EXPRESSED IN HEART, SIGNAL = 0.55; EXPRESSED IN HELA, SIGNAL = 1.6; EXPRESSED IN LUNG, SIGNAL = 0.82; EXPRESSED IN BRAIN, SIGNAL =   1; EST_HUMAN HIT: AL560563.1, EVALUE 4.00e-73; SWISSPROT HIT: P00973, EVALUE 3.00e-20; NT HIT: M11806.1, EVALUE 1.00e-75
tttcagggtggctcctcaggcaagggcaccaccctcagaggccgatctgacgctgacctggttgtcttcctcagtcctctcaccacttttcaggatcagttaaatcgccggggagagttcatccaggaaattaggagacagctg

SEQ ID NO: 16712 - DNA, 169 bp, Homo sapiens
  MAP TO CHR19.1; EXPRESSED IN LUNG, SIGNAL = 0.75; EXPRESSED IN FETAL LIVER, SIGNAL = 0.65; EXPRESSED IN BRAIN, SIGNAL = 0.61; EXPRESSED IN HEART, SIGNAL = 0.66; EXPRESSED IN ADULT LIVER, SIGNAL = 0.98; EST_HUMAN HIT: BE385141.1, EVALUE 1.00e-89; SWISSPROT HIT: P38681, EVALUE 5.00e-01; NT HIT: gi14763343, EVALUE 7.00e-90
acctggggaagcctgagcgcacatggagcccgtccacgttctggctgaccaggaagcggaggaggcccacgcgctccagctgcaccagcgccatgtgggtctgcgtgggccgcgcgctctcaaaggtggtgtcgaacttgggggccagacctcgctcctccatggtcca

SEQ ID NO: 16713 - DNA, 211 bp, Homo sapiens
  MAP TO CHR1.1; EXPRESSED IN BONE MARROW, SIGNAL = 0.49; EXPRESSED IN PLACENTA, SIGNAL = 1.3; EXPRESSED IN HELA, SIGNAL = 0.6; EXPRESSED IN LUNG, SIGNAL = 1.1; EXPRESSED IN BRAIN, SIGNAL = 0.6; EXPRESSED IN HEART, SIGNAL = 0.94; NT HIT: AB007932.1, EVALUE 1.00e-114; EST_HUMAN HIT: BI093605.1, EVALUE 1.00e-114; SWISSPROT HIT: P51805, EVALUE 4.00e-36
acctctccacccagctcttgtagctggggatgtccttggcatagagcagcttgttggagggggagtccttgcccagccggtgctctgacgttgaacaagagtccatgaaggtctgggccaccacagagaggcaggcgtccgtgatgctgcccttgtggatgtcaaacacgaactgggggttcttaatcacgttcacccagaagcgcagagg

SEQ ID NO: 16714 - DNA, 272 bp, Homo sapiens
  MAP TO CHR4.1; EXPRESSED IN BONE MARROW, SIGNAL = 0.85; EXPRESSED IN FETAL LIVER, SIGNAL = 0.84; EXPRESSED IN LUNG, SIGNAL =   1; EXPRESSED IN HELA, SIGNAL = 0.59; EXPRESSED IN BRAIN, SIGNAL = 0.81; EXPRESSED IN HEART, SIGNAL = 0.96; SWISSPROT HIT: P16234, EVALUE 7.00e-48; NT HIT: D50004.1, EVALUE 0.00e+00; EST_HUMAN HIT: AW605347.1, EVALUE 0.00e+00
aagtaccttttaaagcataaacattaaatgggatggtctggaacttctttcctttgacggtggcctcacagatatagggccctacagtgaaggtcccattaaagccctgtctgctgtcgtaggaggcaggtaccaccccctcactgttgtgtaaggttacaggagtctcgggatcagttgtgcgacaaggtataatggcagaatcatcatcctccacgatgactaaataatccgtcattcctagaggtacaaaggctacatctgggtctgtg

SEQ ID NO: 16715 - DNA, 203 bp, Homo sapiens
  MAP TO CHR14.1; EXPRESSED IN PLACENTA, SIGNAL = 1.3; EXPRESSED IN FETAL LIVER, SIGNAL = 1.4; EXPRESSED IN LUNG, SIGNAL = 1.3; EXPRESSED IN HELA, SIGNAL = 1.4; EXPRESSED IN BRAIN, SIGNAL = 1.6; EXPRESSED IN HEART, SIGNAL = 1.6; EXPRESSED IN ADULT LIVER, SIGNAL = 1.4; EXPRESSED IN BONE MARROW, SIGNAL = 1.7; SWISSPROT HIT: P26770, EVALUE 1.00e-21; NT HIT: gi9506372, EVALUE 8.00e-44; EST_HUMAN HIT: BG979930.1, EVALUE 3.00e-84
cccaactccctcctacccttctgacctctaaccaggttcctctgcacacccacatacacactcccaggagcatgaatgcatgcggatcaagatcctgggggactgttactactgtgtctctgggctgccactctcactgccagaccatgccatcaactgcgtgcgcatgggcctggacatgtgccgggccatcaggtcagctc

SEQ ID NO: 16716 - DNA, 155 bp, Homo sapiens
  MAP TO CHR11.1; EXPRESSED IN HELA, SIGNAL = 1.5; EXPRESSED IN BRAIN, SIGNAL = 1.9; EXPRESSED IN BONE MARROW, SIGNAL = 0.99; EXPRESSED IN HEART, SIGNAL = 1.3; EXPRESSED IN PLACENTA, SIGNAL = 1.3; EXPRESSED IN FETAL LIVER, SIGNAL = 1.4; EXPRESSED IN LUNG, SIGNAL = 1.6; EST_HUMAN HIT: BI490596.1, EVALUE 3.00e-62; SWISSPROT HIT: O23252, EVALUE 2.00e+00; NT HIT: gi15312470, EVALUE 2.00e-62
ttgcccctttcgacctgcaaagagaagcggtgtcggggccagatgcccccccacacccactgcatgtagctgaagagcacgatgacgctgaggaaggtgaagttgctggcaacacctatgaaggcgcaggtcatcgggaagttgtatagcaggta

SEQ ID NO: 16717 - DNA, 223 bp, Homo sapiens
  MAP TO CHR19.1; EXPRESSED IN FETAL LIVER, SIGNAL = 2.9; EXPRESSED IN LUNG, SIGNAL = 3.7; EXPRESSED IN HELA, SIGNAL = 2.2; EXPRESSED IN BRAIN, SIGNAL = 2.3; EXPRESSED IN BONE MARROW, SIGNAL =   2; EST_HUMAN HIT: BF881541.1, EVALUE 1.00e-117; SWISSPROT HIT: Q92692, EVALUE 1.00e-35; NT HIT: AF044963.1, EVALUE 1.00e-122
acactcacagcgtacagagagggtcacaggtatcagggctggttcctcgaagctctcatgctccactttgcaggtgaccgtgacaccatctgctcggcccgagggcaccaaggtgaagcggctggtgacagtgacagttccggccagggtccctgacacctgagtctctttggcttcccagtccagggatgagagccaggagatccgggcaggtgggcggccc

SEQ ID NO: 16718 - DNA, 167 bp, Homo sapiens
  MAP TO CHRX.1; EXPRESSED IN FETAL LIVER, SIGNAL = 2.1; EXPRESSED IN LUNG, SIGNAL = 4.3; EXPRESSED IN BRAIN, SIGNAL = 1.3; EXPRESSED IN HEART, SIGNAL = 0.99; EST_HUMAN HIT: BG115582.1, EVALUE 1.00e-79; SWISSPROT HIT: O70248, EVALUE 6.00e-04; NT HIT: gi14749511, EVALUE 1.00e-79
caggccgtttgaatggacgattaccatgcataaggatagcactggacatgttggttttatctttaaaaatggacaaataacatccatagtgaaagatagctctgcagccagaaatggtcttctcacagaacataacatctgtgaaatcaatggacagaatgtcattg

SEQ ID NO: 16719 - DNA, 161 bp, Homo sapiens
  MAP TO CHR5.1; EXPRESSED IN BRAIN, SIGNAL = 1.4; EXPRESSED IN HEART, SIGNAL = 1.1; EXPRESSED IN BONE MARROW, SIGNAL = 1.3; EXPRESSED IN ADULT LIVER, SIGNAL = 1.5; EXPRESSED IN FETAL LIVER, SIGNAL = 1.1; EXPRESSED IN LUNG, SIGNAL = 0.88; EST_HUMAN HIT: BG203547.1, EVALUE 1.30e-02; NT HIT: AJ290951.1, EVALUE 1.40e-01
gcctttcttcctctccctcttgcagagactgccccctgctgcgggtgttggctggtgaagttgttggtgaggaggcggagggctctttgccctggattgtctcatggctcttggaaggaaacaactacagtggcctacttcttcgcctggacccccaaggt

SEQ ID NO: 16720 - DNA, 120 bp, Homo sapiens
  MAP TO CHR6.1; EXPRESSED IN LUNG, SIGNAL = 1.8; EXPRESSED IN HELA, SIGNAL = 3.5; EXPRESSED IN BRAIN, SIGNAL = 3.2; EXPRESSED IN BONE MARROW, SIGNAL = 3.8; EXPRESSED IN PLACENTA, SIGNAL = 3.7; EXPRESSED IN FETAL LIVER, SIGNAL = 3.1
tttagaataagctcttgccatcatgttggtcagatagaagaagagccatctcatcttttgtttgttagagggtttcaattatttaataagagcaagtaattaagacattaagaattaaag

SEQ ID NO: 16721 - DNA, 194 bp, Homo sapiens
  MAP TO CHR5.1; EXPRESSED IN PLACENTA, SIGNAL =  14; EXPRESSED IN FETAL LIVER, SIGNAL =  12; EXPRESSED IN LUNG, SIGNAL =  12; EXPRESSED IN HELA, SIGNAL =  11; EXPRESSED IN BRAIN, SIGNAL =  15; EXPRESSED IN HEART, SIGNAL =  18; EXPRESSED IN BONE MARROW, SIGNAL =  17; SWISSPROT HIT: Q14155, EVALUE 2.00e-03; EST_HUMAN HIT: AA921834.1, EVALUE 1.00e-98; NT HIT: AB014521.1, EVALUE 9.00e-99
cttcctgtacagttcacccatctcaggagcctggctggttggaggggactctgaacggaaagactggcctcatccctgagaattacgtggagttcctctaaccgtgggccccagcagaactgctgagctttacatggtatccatgacaactgctgattccagtgtcgaggccatttctctttgccactgagaaa

SEQ ID NO: 16722 - DNA, 464 bp, Homo sapiens
  MAP TO CHR20.1; EXPRESSED IN PLACENTA, SIGNAL =  83; EXPRESSED IN LUNG, SIGNAL =  71; EXPRESSED IN BRAIN, SIGNAL = 7.6; EXPRESSED IN HEART, SIGNAL =   5; NT HIT: gi14771678, EVALUE 0.00e+00; EST_HUMAN HIT: BE739448.1, EVALUE 0.00e+00; SWISSPROT HIT: P02792, EVALUE 3.00e-69
ccatgagctcccagattcgtcaaaattattccaccgacgtggaggcagccgtcaacagcctggtcaatttgtacctgcaggcctcctacacctacctctctctgggcttctatttcgaccgcgatgatgcggctctggaaggcgtgagccacttcttccgcgaattgaccgaggagaagcgcgagggctacgagcgtctcctgaagatgcaaaaccagcgtggcggccgcgctctcttccaggacatcaagaagccagctgaagatgagtggggtaaaaccccagatgccatgaaagctgccatggccctggagaaaaagctgaaccaggcccttttggatcttcatgccctggattctgcccacatggacccccatctctgtgacttcctggagactcacttcctagatgaggaagtgaagctcatcaagaagatgggtgaccacctgacgaacctccacagg

SEQ ID NO: 16723 - DNA, 245 bp, Homo sapiens
  MAP TO CHR1.1; EXPRESSED IN FETAL LIVER, SIGNAL = 1.1; EXPRESSED IN HELA, SIGNAL = 0.88; EXPRESSED IN BRAIN, SIGNAL = 1.3; EXPRESSED IN LUNG, SIGNAL = 1.2; EXPRESSED IN HEART, SIGNAL = 1.4; EXPRESSED IN ADULT LIVER, SIGNAL = 0.77; SWISSPROT HIT: Q05856, EVALUE 9.40e-02; NT HIT: AF091107.1, EVALUE 0.00e+00; EST_HUMAN HIT: R06504.1, EVALUE 3.00e-60
ggtgacaccgttggcccccttccagggctgagggaagccagcgggggccccttcctggaagcccacctgcaggccggcttgctgggaaggggctgctctcgcagaggctcccgcccgccctgcagccgtttcctggaagcagtcgctgtgggtattctgttccttgtcagcactgtgcttgcaaagaaagcagacactgtgctccttgtccttagggagccccgctccatcacccaacacctggc

SEQ ID NO: 16724 - DNA, 215 bp, Homo sapiens
  MAP TO CHR7.1; EXPRESSED IN BRAIN, SIGNAL = 0.74; EXPRESSED IN ADULT LIVER, SIGNAL = 0.42; EXPRESSED IN BONE MARROW, SIGNAL = 0.74; EST_HUMAN HIT: BE263381.1, EVALUE 2.80e-01; SWISSPROT HIT: P26371, EVALUE 6.70e-02; NT HIT: gi13631241, EVALUE 1.00e-114
ttacctgggtttgctgaagtctgaaaagtacatctctgctagcaggtgccactggatgcccccattgttgctgtactgaaggaggacgccctcctctctgctgtcaggcttgttgcatgaagcactctctccgcctatctggatgtagaactggacaaagtccacccaagaagtatccaggtcccaactcaccagctgtcttttcccagcctttc

SEQ ID NO: 16725 - DNA, 190 bp, Homo sapiens
  MAP TO CHR14.1; EXPRESSED IN PLACENTA, SIGNAL = 3.1; EXPRESSED IN FETAL LIVER, SIGNAL = 4.5; EXPRESSED IN LUNG, SIGNAL = 6.4; EXPRESSED IN BRAIN, SIGNAL =  11; EXPRESSED IN HEART, SIGNAL =   9; EXPRESSED IN BONE MARROW, SIGNAL = 3.5; EXPRESSED IN ADULT LIVER, SIGNAL = 3.1; EST_HUMAN HIT: BG820177.1, EVALUE 1.00e-101; SWISSPROT HIT: P12277, EVALUE 5.00e-33; NT HIT: X15334.1, EVALUE 1.00e-103
gaaactctcttcaagtctaaggactatgagttcatgtggaaccctcacctgggctacatcctcacctgcccatccaacctgggcaccgggctgcgggcaggtgtgcatatcaagctgcccaacctgggcaagcatgagaagttctcggaggtgcttaagcggctgcgacttcagaagcgaggcacaggtg

SEQ ID NO: 16726 - DNA, 346 bp, Homo sapiens
  MAP TO CHR12.1; EXPRESSED IN HELA, SIGNAL = 3.1; EXPRESSED IN BRAIN, SIGNAL = 1.7; EXPRESSED IN BONE MARROW, SIGNAL = 1.5; EXPRESSED IN ADULT LIVER, SIGNAL = 2.4; EXPRESSED IN HEART, SIGNAL = 1.7; EXPRESSED IN LUNG, SIGNAL = 3.5; EXPRESSED IN FETAL LIVER, SIGNAL = 1.5; EXPRESSED IN PLACENTA, SIGNAL = 2.9; EST_HUMAN HIT: AU141516.1, EVALUE 0.00e+00; SWISSPROT HIT: P04275, EVALUE 1.00e-67; NT HIT: M25856.1, EVALUE 0.00e+00
actcaccacagaaatcaggtgtcctccagtcaacgcagaccccgttggtccgacagaggtgggcataagaggcgatcacctcacacacttgctcctggtggcaactgtcctgctggcagatggcatagaatgtggctggagccaggaccttgtggcattcagcaaacagtggtaagaggaggacctggcagtgggagctgtcggggacaagacactgctcctccaggatgggctggcacgtctgccctggccgctgcacagtccattcctgaacaagtgttttccagtctgtggtgactgtgccatccctcagcatgaagtcattggctccgttctcatcacagat

SEQ ID NO: 16727 - DNA, 167 bp, Homo sapiens
  MAP TO CHR7.1; EXPRESSED IN PLACENTA, SIGNAL = 3.2; EXPRESSED IN FETAL LIVER, SIGNAL = 2.9; EXPRESSED IN LUNG, SIGNAL = 3.6; EXPRESSED IN HELA, SIGNAL = 2.7; EXPRESSED IN BRAIN, SIGNAL = 2.8; EXPRESSED IN BONE MARROW, SIGNAL = 3.3; EST_HUMAN HIT: BE326609.1, EVALUE 5.50e-02; SWISSPROT HIT: P39814, EVALUE 4.40e+00; NT HIT: gi14758453, EVALUE 3.70e-02
ttggctttttatcaaggaatcaaatgcccaccctatgggccttctgggactttttccaacctaaatacatttctttcctgtgaatgtgtaatcatttgcaagtgagtacacagctgaaaacctgttgataggaaatgctagaagagccagttctttttctgtggtgc

SEQ ID NO: 16728 - DNA, 466 bp, Homo sapiens
  MAP TO CHR4.1; EXPRESSED IN LUNG, SIGNAL = 0.98; EXPRESSED IN HELA, SIGNAL = 0.82; EXPRESSED IN BRAIN, SIGNAL = 0.76; EXPRESSED IN HEART, SIGNAL = 0.9; EXPRESSED IN FETAL LIVER, SIGNAL = 0.81; EST_HUMAN HIT: AA984295.1, EVALUE 1.00e-102; SWISSPROT HIT: P23074, EVALUE 4.00e-18; NT HIT: AL163246.2, EVALUE 0.00e+00
gcaggagagttgatatacccctgaggtaggatagtaaaggtatattgctggctttgccagctgaaggcaaattgcttctggtgggtcttatggacaggaatggagaaaaagacatttgccaagtcagtggctgcataccaggtaccaggagatgtgttaatttgctcaagcaatgaaaccacatctggtacagcagctgcaattggagttgcctcttggttaagcttatgataatccactgtcattctccaagatccatctgtcttctgcacaggccaaatgggagagttgaaccggaatgtggtgggaatcaccacccctgcgtctttcaagtccttgatagtggcgctaatttccacaatccctccagggatgcaatattgtttttgatttactatttttctaggtagaggcagctttagtggcctccatttggccttttccaccataatagccctcaccctac

SEQ ID NO: 16729 - DNA, 148 bp, Homo sapiens
  MAP TO CHR20.1; EXPRESSED IN FETAL LIVER, SIGNAL = 0.69; EXPRESSED IN BRAIN, SIGNAL = 0.61; EXPRESSED IN HEART, SIGNAL = 0.69; EXPRESSED IN BONE MARROW, SIGNAL = 0.69; EXPRESSED IN ADULT LIVER, SIGNAL = 0.83; EXPRESSED IN LUNG, SIGNAL = 0.77; SWISSPROT HIT: P01549, EVALUE 4.50e+00; NT HIT: AF096998.1, EVALUE 5.00e-01
gtcaatgttaccactggctctttgtttgaacccaaatgaagtgtggatttttattttgatcaatgacagctttctgagatctgcagttatgcttgattgggacaggctgtgacagccaatgcagtagccggcagacaattctttaata

SEQ ID NO: 16730 - DNA, 227 bp, Homo sapiens
  MAP TO AC009789.19; EXPRESSED IN PLACENTA, SIGNAL = 6.1; EXPRESSED IN FETAL LIVER, SIGNAL = 5.7; EXPRESSED IN LUNG, SIGNAL = 4.5; EXPRESSED IN HELA, SIGNAL = 5.9; EXPRESSED IN BRAIN, SIGNAL = 6.3; EXPRESSED IN HEART, SIGNAL = 4.3; NT HIT: AF287967.1, EVALUE 1.00e-125; EST_HUMAN HIT: BF996393.1, EVALUE 1.00e-125; SWISSPROT HIT: P75556, EVALUE 4.40e+00
tattttgcaggaaaatttctcctcctgaaggggaaggtcatagtggtcctttgagcctgaaatcgaaagacccccttccccctcccggtcacgtgattcattaaataattaatgccgaggttgcagaatagatatgtattcgtcaggaaaatcgcaggctcggtctccctgtttctgacgtgcaattcaactgtcctttgaaaaacaagcctgtaccccgagaaaaa

SEQ ID NO: 16731 - DNA, 262 bp, Homo sapiens
  MAP TO CHR16.1; EXPRESSED IN BRAIN, SIGNAL = 0.58; EXPRESSED IN HEART, SIGNAL = 0.73; EXPRESSED IN LUNG, SIGNAL = 0.63; EXPRESSED IN FETAL LIVER, SIGNAL = 0.52; NT HIT: gi14779808, EVALUE 0.00e+00; EST_HUMAN HIT: BG105325.1, EVALUE 2.30e-02; SWISSPROT HIT: P49595, EVALUE 2.10e-02
gtcttcttttccttttctttctgaacaggaaattaggaatggctggccagaagttgggctcctccgctctcctgtgctacatccgccctgacactgccgatccagcaagtagctttagcttgactgtagccaatgttggcacgtgccaagcagtcctgtgccgaggtgggaagccagtgcccctctctaaagtcttcagcctggagcaggacccagaggaggctcaaagggtgaaggaccaaaaagccatcatcacagaggt

SEQ ID NO: 16732 - DNA, 267 bp, Homo sapiens
  MAP TO CHR19.1; EXPRESSED IN FETAL LIVER, SIGNAL = 0.94; EXPRESSED IN LUNG, SIGNAL = 0.82; EXPRESSED IN HELA, SIGNAL = 1.2; EXPRESSED IN BRAIN, SIGNAL = 1.6; EXPRESSED IN HEART, SIGNAL = 0.77; SWISSPROT HIT: P08124, EVALUE 1.10e-01; NT HIT: gi14757401, EVALUE 8.00e-97; EST_HUMAN HIT: BE294374.1, EVALUE 7.00e-95
tgggaaggggccagagggcctgactcttccctcacctgcccatggccccagatcctggcatatggcgacatgaaccacgagtgggtggggaacgactggctgcccagcctggggctgccccaataccgcagctacttcatggagtcgctggtggacgctcgaatgttagatcaccttaacaagaaggagctccggggccaactcaagatggtggacagctttcacaggtgggggctgcctggccagtggggacagtccaaagggaag

SEQ ID NO: 16733 - DNA, 234 bp, Homo sapiens
  MAP TO CHR17.1; EXPRESSED IN PLACENTA, SIGNAL = 3.3; EXPRESSED IN FETAL LIVER, SIGNAL = 3.2; EXPRESSED IN LUNG, SIGNAL = 3.1; EXPRESSED IN HELA, SIGNAL = 2.6; EXPRESSED IN BRAIN, SIGNAL = 3.7; EXPRESSED IN HEART, SIGNAL =   5; EXPRESSED IN ADULT LIVER, SIGNAL = 3.3; EXPRESSED IN BONE MARROW, SIGNAL = 3.2; EST_HUMAN HIT: BG035179.1, EVALUE 1.00e-129; SWISSPROT HIT: Q9HIX6, EVALUE 3.60e+00
gtgctcgccaccgtcacctgctggttggattccggaaacccactgtctgaagaccacagaggggtgtcgctgaccaccccaaatcggatacgtccagacctcaagctcccttcccctctctggctgccctctgctcttttcatctcttctctcaaccttttggggatttctgtgtcctgacaccacctccccatccaccaccaaagtagccggggtgagccccaaaccttactg

SEQ ID NO: 16734 - DNA, 243 bp, Homo sapiens
  MAP TO CHR7.1; EXPRESSED IN HELA, SIGNAL = 0.5; EXPRESSED IN BRAIN, SIGNAL = 0.65; EXPRESSED IN BONE MARROW, SIGNAL = 0.62; EXPRESSED IN FETAL LIVER, SIGNAL = 0.61; EST_HUMAN HIT: BF969667.1, EVALUE 1.00e-109; SWISSPROT HIT: P08183, EVALUE 1.00e-21; NT HIT: M29440.1, EVALUE 0.00e+00
tttagtttgactcaccttcccagaaccttctagttctttcttatctttcagtgcttgtccagacaacattttcatttcaacaactcctgctattgcaatgatgggtacaattgctaagagtaacagtgttagttgccaaccatagatgaaggatataattattcctgtcccaagatttgctatattctgggtaattacagcaagcctggaacctatagcctgcaaaacaaaacaaattagaga

SEQ ID NO: 16735 - DNA, 113 bp, Homo sapiens
  MAP TO CHR17.1; EXPRESSED IN BRAIN, SIGNAL = 0.53; EXPRESSED IN BONE MARROW, SIGNAL = 0.46; EST_HUMAN HIT: BE786213.1, EVALUE 5.40e-01; SWISSPROT HIT: P41990, EVALUE 9.10e-01
ttcttgcctcattgctctggggggaacaatggcccctgtttgtttaatctcagcccattgtggcagccttgactgcacagagctcacctgtgattcatgtgaatgtcacttga

SEQ ID NO: 16736 - DNA, 170 bp, Homo sapiens
  MAP TO CHR7.1; EXPRESSED IN HELA, SIGNAL = 1.4; EXPRESSED IN BRAIN, SIGNAL = 0.88; EXPRESSED IN BONE MARROW, SIGNAL =   1; EST_HUMAN HIT: BF333281.1, EVALUE 8.70e-01; NT HIT: U67461.1, EVALUE 1.00e-02
ctcatctagaaaatgtaaagatgaatactaacctgctttgatcaaaagcttgttacatgggggaaaaaatacatttgtaaaggtctttggaaaatacaaagagctatagaaatgttagataataaaggttttgtccaagcaagactggaatggctacttctcctcatttt

SEQ ID NO: 16737 - DNA, 211 bp, Homo sapiens
  MAP TO CHR5.1; EXPRESSED IN FETAL LIVER, SIGNAL = 0.53; EXPRESSED IN HELA, SIGNAL = 0.59; EXPRESSED IN BRAIN, SIGNAL = 0.72; EXPRESSED IN BONE MARROW, SIGNAL = 0.68; EXPRESSED IN ADULT LIVER, SIGNAL = 0.63; EST_HUMAN HIT: BE392387.1, EVALUE 1.10e+00; SWISSPROT HIT: P49217, EVALUE 7.20e+00
agccagacaaatcactgtcatggtccaaagaacagtgagaatcccatgggaatgcagcttccaagcagatcccatgagaacatctgggatgaagacactcacgccaggccctaaacccagattcattagtaagagtgcggcatttcttctcatttttaaatttatcttctcatacaccacaagtatgattttcttgccttctgcacatttt

SEQ ID NO: 16738 - DNA, 152 bp, Homo sapiens
  MAP TO CHR14.1; EXPRESSED IN FETAL LIVER, SIGNAL = 0.56; EXPRESSED IN BRAIN, SIGNAL = 0.46; EXPRESSED IN HEART, SIGNAL = 0.69; NT HIT: AB005530.1, EVALUE 1.30e-01; SWISSPROT HIT: P28577, EVALUE 1.50e+00
gcatctctggtcataaagtccttcctgcgtcacagggacccctcccagccgccaggatgtggggcggtaggtgaatgaatgatggatattgttcaggaggtgacctaagcacccaggaatgtggcagcagtgggctttaatgagccattcat

SEQ ID NO: 16739 - DNA, 190 bp, Homo sapiens
  MAP TO CHR6.1; EXPRESSED IN BRAIN, SIGNAL = 0.77; EXPRESSED IN HEART, SIGNAL =   1; EXPRESSED IN BONE MARROW, SIGNAL = 0.76; EXPRESSED IN LUNG, SIGNAL = 0.95; EXPRESSED IN FETAL LIVER, SIGNAL = 0.64; EST_HUMAN HIT: AI654230.1, EVALUE 5.00e-58; SWISSPROT HIT: Q06430, EVALUE 1.00e-33; NT HIT: L41607.1, EVALUE 1.00e-103
aaataccagctgggttgtatcgcagtttcactctgattgagggttctttcgcgatgcctcagttctaggcattccacagtaagggggtaggtattaagctcaaacttgttagcaaacaggcttggtgaattaaccagccactttaagtctccgtttccatagatacaaataccatgtacatagtggcctg

SEQ ID NO: 16740 - DNA, 192 bp, Homo sapiens
  MAP TO CHR1.1; EXPRESSED IN PLACENTA, SIGNAL = 1.7; EXPRESSED IN FETAL LIVER, SIGNAL = 0.8; EXPRESSED IN LUNG, SIGNAL = 0.88; EXPRESSED IN HELA, SIGNAL = 1.2; EXPRESSED IN BRAIN, SIGNAL =   1; EXPRESSED IN HEART, SIGNAL = 1.2; EXPRESSED IN BONE MARROW, SIGNAL = 0.97; EST_HUMAN HIT: BE251584.1, EVALUE 5.00e-86; SWISSPROT HIT: P12936, EVALUE 4.90e-01; NT HIT: gi14750076, EVALUE 3.00e-86
gggaggggaaggcctgactcaccattcggaactgtgcctgggcctgctgcagcaggctctcctgctcagactgggcaatgctgacgaagatgccaacctctgggttgaactgcaggatgctgccttgcaggcgggcgatgaaatgaccaaagctgcggatgcagcagatgcgcaccactgactgtggggaga

SEQ ID NO: 16741 - DNA, 223 bp, Homo sapiens
  MAP TO CHR7.1; EXPRESSED IN PLACENTA, SIGNAL = 3.3; EXPRESSED IN FETAL LIVER, SIGNAL =   3; EXPRESSED IN LUNG, SIGNAL = 2.4; EXPRESSED IN HELA, SIGNAL = 3.3; EXPRESSED IN BRAIN, SIGNAL = 3.5; EXPRESSED IN BONE MARROW, SIGNAL = 3.5; EXPRESSED IN ADULT LIVER, SIGNAL = 2.7; EST_HUMAN HIT: BI032159.1, EVALUE 1.00e-112; NT HIT: AB051545.1, EVALUE 1.00e-112; SWISSPROT HIT: P28964, EVALUE 7.10e+00
acatacctgctctggggaggggacagccatgcagtacagctttatttagcaagatgctgagagcagctttgaccacagcctgctgtccttggctagggtgtcttttagcagttgtctgcccaaagccaggttgtcttttcacagaggctcttgacaatattgcttcttgaactctgggtgcgatgacgccattccacagcttagacatccacctagcaggaga

SEQ ID NO: 16742 - DNA, 283 bp, Homo sapiens
  MAP TO CHR17.1; EXPRESSED IN BRAIN, SIGNAL = 0.79; EXPRESSED IN BONE MARROW, SIGNAL = 0.93; EXPRESSED IN LUNG, SIGNAL = 0.86; EST_HUMAN HIT: BE549944.1, EVALUE 0.00e+00; NT HIT: AJ224805.1, EVALUE 1.00e-86; SWISSPROT HIT: Q62981, EVALUE 2.00e-46
tttaatgagtatgaattctctggtgtctaatgtgatgcgacttttggctgaaagctttcccacattcactacactgataaggtttttcaccagtatggattctcatgtgcagagcaagggttgagaactgagaaaaggctttcccacattcattacaaccatagggtttctcacctgtatggcttctcatatgcacagtaagagatgagctttgacagaaggctttcccacagaccttacactcataaggcttatcacctgtatgaattctcacatgtacaat

SEQ ID NO: 16743 - DNA, 206 bp, Homo sapiens
  MAP TO CHR19.1; EXPRESSED IN HELA, SIGNAL = 0.87; EXPRESSED IN BRAIN, SIGNAL = 1.1; EXPRESSED IN HEART, SIGNAL = 0.96; EXPRESSED IN ADULT LIVER, SIGNAL = 0.72; EXPRESSED IN BONE MARROW, SIGNAL = 1.2; EXPRESSED IN FETAL LIVER, SIGNAL = 0.84; SWISSPROT HIT: O08838, EVALUE 3.00e-02
aaaggctggcagtgaggaagaggaggaggggctcaaagagggaagctctggtggccaagacatcctgcgggcctgagaggctgggggcttgagggatgcctcggaagtgagtcaggggctgggcactgggaggcagacagagggttggagggggcaggatgtcagcaccagtttgcagaggcgggtgttggagccaggaaggggaa

SEQ ID NO: 16744 - DNA, 165 bp, Homo sapiens
  MAP TO CHR14.1; EXPRESSED IN ADULT LIVER, SIGNAL = 4.4; EXPRESSED IN PLACENTA, SIGNAL = 7.5; EXPRESSED IN FETAL LIVER, SIGNAL =   4; EXPRESSED IN HELA, SIGNAL = 8.4; EXPRESSED IN BRAIN, SIGNAL = 5.3; EXPRESSED IN HEART, SIGNAL =   4; EXPRESSED IN BONE MARROW, SIGNAL = 4.3; EXPRESSED IN LUNG, SIGNAL = 2.9; SWISSPROT HIT: P01739, EVALUE 3.00e-11; EST_HUMAN HIT: BI906722.1, EVALUE 1.00e-30; NT HIT: U40776.1, EVALUE 3.00e-64
ctccaatggtgacaaagaagatggaaggtttacagcacagctcaataaagccagccagtatgtttctctgctcatcagagactcccagcccagtgattcagccacctacctctgtgccgtgaacacacagtgctccccagacacctgcagtctgtacccaaacct

SEQ ID NO: 16745 - DNA, 350 bp, Homo sapiens
  MAP TO CHR18.1; EXPRESSED IN PLACENTA, SIGNAL = 3.2; EXPRESSED IN FETAL LIVER, SIGNAL = 2.5; EXPRESSED IN HELA, SIGNAL = 2.5; EXPRESSED IN BRAIN, SIGNAL =   3; EXPRESSED IN LUNG, SIGNAL = 1.9; EXPRESSED IN ADULT LIVER, SIGNAL = 3.6; EXPRESSED IN HEART, SIGNAL = 2.3; NT HIT: gi15306844, EVALUE 0.00e+00; SWISSPROT HIT: P70030, EVALUE 7.00e-01; EST_HUMAN HIT: BE336624.1, EVALUE 6.00e-96
aggtaccccaggctgcacagcatggtcgtccgctgctatcttctcatccagcagtactctgaggccctgatggctctcaccaccatggcgtcactccgcgaccacagcacaccagaaacactcagcattatggatgacctcatcagctccccaggcaaaaacaaaagtgggaggggacacatgctcattatcagggtgccctcggtgcagctggcgatgttagccaaggagcggctacaggaggtgcgcgacaaactgggtctgcagtatcggtttgagatcatccttgggaacccggccaccgaactcagtgttgcaactcactttgtggcgcgattaaaggttagcaa

SEQ ID NO: 16746 - DNA, 301 bp, Homo sapiens
  MAP TO CHR11.1; EXPRESSED IN BRAIN, SIGNAL = 1.1; EXPRESSED IN HEART, SIGNAL = 1.4; EXPRESSED IN ADULT LIVER, SIGNAL = 1.9; EXPRESSED IN BONE MARROW, SIGNAL = 1.1; EXPRESSED IN PLACENTA, SIGNAL = 1.5; EXPRESSED IN LUNG, SIGNAL = 1.6; EST_HUMAN HIT: AI885622.1, EVALUE 0.00e+00; SWISSPROT HIT: P42852, EVALUE 4.10e-01; NT HIT: gi14773489, EVALUE 0.00e+00
cctgcaggagccctcgtactcggtgctggtcttctcttctctctccggtctgtgcgctcagtggtgcttcgagctggagggcagcaggtgaccctcaccactcatgccccctttggcttgggggcccatttcacagttcctttgaagcaggtatcttgcatggcccaccggggtgaagtccctgccatgctacctctgaaagtcaaaggccgacgcttctatttcctcttggacaaaactggacacttccctaacacaaaactctttgacaatactgtgggtgcctaccggagcttgtgaa

SEQ ID NO: 16747 - DNA, 245 bp, Homo sapiens
  MAP TO CHRX.1; EXPRESSED IN HEART, SIGNAL = 0.45; EXPRESSED IN ADULT LIVER, SIGNAL = 0.68; EXPRESSED IN FETAL LIVER, SIGNAL = 0.54; EXPRESSED IN BRAIN, SIGNAL = 0.59; NT HIT: L44140.1, EVALUE 0.00e+00; EST_HUMAN HIT: AU131481.1, EVALUE 1.00e-130; SWISSPROT HIT: P51805, EVALUE 4.00e-21
acaggtgctggtgggtggcctggagttctggctgggcaccctgcacatctcggcagagcgggcgctgaccctaccggccatgatggggctggcggcggggggtgggctcctgctgctggccatcacagccgtgctggtggcgtacaagcgcaagactcaggacgcggaccgtaccctcaagcgtctgcagctgcagatggacaacctggagtcccgtgtggccctggagtgcaaggaaggtgcct

SEQ ID NO: 16748 - DNA, 275 bp, Homo sapiens
  MAP TO CHR17.1; EXPRESSED IN BRAIN, SIGNAL = 0.41; EXPRESSED IN HEART, SIGNAL = 0.56; EXPRESSED IN BONE MARROW, SIGNAL = 0.35; NT HIT: gi14770914, EVALUE 2.00e-70; EST_HUMAN HIT: AA515579.1, EVALUE 1.50e+00; SWISSPROT HIT: Q15027, EVALUE 3.00e-02
tcctaggtccagttcctggtagatcatggggccatgatcgagcacgttgactacagtggaatgcgccctttggatagggcagtggggtgccggaacacttctgttgttgtcactcttctgaagaaaggagccaagataggtaggagaagggaagaggatgttggccatctgtgcccaggggccagactggtccagtggtctggctgccctgggtatttggtgtgagtgtatatagttccccctcctccctggcccaattattgtccaagtgaaca

SEQ ID NO: 16749 - DNA, 271 bp, Homo sapiens
  MAP TO CHR6.1; EXPRESSED IN PLACENTA, SIGNAL = 2.6; EXPRESSED IN FETAL LIVER, SIGNAL = 3.1; EXPRESSED IN BRAIN, SIGNAL = 3.4; EXPRESSED IN HELA, SIGNAL = 3.2; EXPRESSED IN LUNG, SIGNAL =   2; EXPRESSED IN HEART, SIGNAL = 1.8; EXPRESSED IN ADULT LIVER, SIGNAL = 4.8; EXPRESSED IN BONE MARROW, SIGNAL = 4.3; NT HIT: gi15304463, EVALUE 0.00e+00; EST_HUMAN HIT: AA774628.1, EVALUE 3.70e-01; SWISSPROT HIT: P46013, EVALUE 1.00e-03
gacatccaggcgatggtactggcagagcaagtcagcaaagagaatcaattcctggtccctcagacggtgactcaccccagggctcaaaaccttaggaggtctcaggatttgagtaccattaaggctcccacagtctcggaggataggtgccttgtcccaggctaagatttcaatctctgcatgttgtttggagatagatggaaagggcagggccacagagcagtcaggcattcggcctaccacattcttcccgaggtgtagtgggaaatct

SEQ ID NO: 16750 - DNA, 264 bp, Homo sapiens
  MAP TO CHR17.1; EXPRESSED IN LUNG, SIGNAL = 4.3; EXPRESSED IN PLACENTA, SIGNAL = 4.2; EXPRESSED IN FETAL LIVER, SIGNAL = 3.5; EXPRESSED IN BRAIN, SIGNAL = 4.6; EXPRESSED IN HEART, SIGNAL =   4; EXPRESSED IN ADULT LIVER, SIGNAL = 3.8; EXPRESSED IN BONE MARROW, SIGNAL = 5.2; SWISSPROT HIT: P45700, EVALUE 4.10e-01; NT HIT: AJ310932.1, EVALUE 2.40e-01; EST_HUMAN HIT: BI546006.1, EVALUE 0.00e+00
tgacttaccttcagctgctgctgccccctaatgggcctaatgggaaactctggtagaaagaggttgatgaactgaggcactggccactctggcagaggcttctctaccagtactggggctggctttagggattcctggtgcagatagtggtgcccccgtagttcccagagttcttccagatctgacctgatggttcccaaacctgtccagaggctcttccagcctcgggcccagggaccccggatgttgccaccctgctgagaa

SEQ ID NO: 16751 - DNA, 130 bp, Homo sapiens
  MAP TO CHR19.1; EXPRESSED IN BONE MARROW, SIGNAL = 1.6; EXPRESSED IN PLACENTA, SIGNAL = 1.4; EXPRESSED IN FETAL LIVER, SIGNAL = 1.6; EXPRESSED IN BRAIN, SIGNAL = 1.8; EXPRESSED IN HEART, SIGNAL = 1.8; SWISSPROT HIT: P31751, EVALUE 9.00e-18; NT HIT: gi6715585, EVALUE 2.00e-64; EST_HUMAN HIT: AI283491.1, EVALUE 2.00e-65
accttgatgtcgcggtataccacgtcccgcgagtgcaagtactcaagagccgagacaatctctgcaccataaaaccgggcccgctcctctgtgaagacacgctcccgggacaggtggaagaacagctgca

SEQ ID NO: 16752 - DNA, 130 bp, Homo sapiens
  MAP TO CHR13.1; EXPRESSED IN PLACENTA, SIGNAL = 1.4; EXPRESSED IN FETAL LIVER, SIGNAL = 1.4; EXPRESSED IN BRAIN, SIGNAL = 1.8; EXPRESSED IN HELA, SIGNAL = 1.6; EXPRESSED IN LUNG, SIGNAL = 0.86; EXPRESSED IN HEART, SIGNAL =   1; EXPRESSED IN ADULT LIVER, SIGNAL = 2.2; EXPRESSED IN BONE MARROW, SIGNAL =   2; EST_HUMAN HIT: BF765923.1, EVALUE 4.00e-67
ccaaatgtttattatatgtgcagatggctgtttctgttttgaatcttccattcttttatttccccatcgatttgtgtagatatgaacagttgctcccttaaggctttatcctgtgtaattagggttcctc

SEQ ID NO: 16753 - DNA, 181 bp, Homo sapiens
  MAP TO CHR15.1; EXPRESSED IN LUNG, SIGNAL = 2.6; EXPRESSED IN FETAL LIVER, SIGNAL = 2.2; EXPRESSED IN BRAIN, SIGNAL = 2.3; EXPRESSED IN HEART, SIGNAL = 2.5; EXPRESSED IN ADULT LIVER, SIGNAL = 1.8; EXPRESSED IN BONE MARROW, SIGNAL = 2.8; EST_HUMAN HIT: BE728883.1, EVALUE 1.00e-83; SWISSPROT HIT: P43487, EVALUE 2.00e-25; NT HIT: gi14777136, EVALUE 7.00e-84
gccacctactgtagtggttggcacagatcttcagggtcttgtccctccgcatgaggaggcggatggcccctttctccttgtgcttcaggagcttgacgtcaccagtgcctcgctccttccattctgggagatcgttctcagaggcaaatcggaacagttttgcccgcctgcaagaaaagcc

SEQ ID NO: 16754 - DNA, 180 bp, Homo sapiens
  MAP TO CHR5.1; EXPRESSED IN FETAL LIVER, SIGNAL = 0.77; EXPRESSED IN LUNG, SIGNAL = 0.73; EXPRESSED IN BRAIN, SIGNAL = 0.94; EXPRESSED IN BONE MARROW, SIGNAL = 0.99; NT HIT: gi14724279, EVALUE 5.00e-97; EST_HUMAN HIT: T05576.1, EVALUE 1.00e-89; SWISSPROT HIT: Q61282, EVALUE 1.10e+00
ccccaactacagtcaggggactttgccttattcctacaacctatgtgttgcacatacaggaaagacggagtttaatttcctaaaatgtagtgagcaattgagttcaggacaagacatactttgtggtgattcatctggggccttatttccactttgtaattccagcgagtcgacttccca

SEQ ID NO: 16755 - DNA, 172 bp, Homo sapiens
  MAP TO AC011772.3; EXPRESSED IN ADULT LIVER, SIGNAL = 1.9; EXPRESSED IN FETAL LIVER, SIGNAL = 1.4; EXPRESSED IN PLACENTA, SIGNAL = 8.5; EXPRESSED IN HELA, SIGNAL = 1.4; EXPRESSED IN BRAIN, SIGNAL = 1.4; EXPRESSED IN HEART, SIGNAL = 1.2; EXPRESSED IN BONE MARROW, SIGNAL = 0.95; NT HIT: gi4506310, EVALUE 3.00e-89; EST_HUMAN HIT: AU130535.1, EVALUE 4.00e-89; SWISSPROT HIT: P10586, EVALUE 2.00e-28
agtgactacatcaatgccaactacatcgatggctaccgcaagcagaatgcctacatcgccacgcagggccccctgcccgagaccatgggcgatttctggagaatggtgtgggaacagcgcacggccactgtggtcatgatgacacggctggaggagaagtcccgggtgaggc

SEQ ID NO: 16756 - DNA, 245 bp, Homo sapiens
  MAP TO CHR2.1; EXPRESSED IN HEART, SIGNAL = 6.9; EXPRESSED IN BONE MARROW, SIGNAL = 1.4; EXPRESSED IN PLACENTA, SIGNAL = 1.3; EXPRESSED IN FETAL LIVER, SIGNAL = 1.1; EXPRESSED IN LUNG, SIGNAL = 0.63; EXPRESSED IN HELA, SIGNAL = 1.2; EXPRESSED IN BRAIN, SIGNAL = 1.3; NT HIT: AJ277892.1, EVALUE 0.00e+00; EST_HUMAN HIT: AL596747.1, EVALUE 3.00e-94
taaagtgctgcctgttgttaatattgtttcagaagtaactataatggaagagaaagaaagggcttataccctagaagaagaagctgtttcagtacaacgggaagaagaatatgaggaatatgaagaatatgattataaagaatttgaggagtatgaaccaacagaagaatatgaccaatatgaagaatacgaggagcgggagtatgaacgatatgaagagcatgaagaatacatcacaggtatga

SEQ ID NO: 16757 - DNA, 206 bp, Homo sapiens
  MAP TO CHR19.1; EXPRESSED IN HELA, SIGNAL = 6.8; EXPRESSED IN BRAIN, SIGNAL = 5.2; EXPRESSED IN HEART, SIGNAL = 4.8; EXPRESSED IN ADULT LIVER, SIGNAL =  10; EXPRESSED IN BONE MARROW, SIGNAL =   5; EXPRESSED IN FETAL LIVER, SIGNAL = 5.7; EXPRESSED IN LUNG, SIGNAL = 3.6; EST_HUMAN HIT: BG741022.1, EVALUE 1.00e-108; SWISSPROT HIT: P43883, EVALUE 7.00e-09
actcacgctggggctgcaggtgctcgagcagcggctgggcgtggtccagggcacgggtggtcaggccgcacacgcagttctcagccaggcggcaggcggagcccagcagcgggtgcctgtccttggctgcactgtaaacatcgcagaccgcggtgcacgtggccctgaccaggggcagagccaccacacgctgcaccacgttctgc

SEQ ID NO: 16758 - DNA, 202 bp, Homo sapiens
  MAP TO CHR9.1; EXPRESSED IN PLACENTA, SIGNAL = 2.6; EXPRESSED IN LUNG, SIGNAL = 1.4; EXPRESSED IN HELA, SIGNAL = 3.5; EXPRESSED IN BRAIN, SIGNAL = 2.5; EXPRESSED IN HEART, SIGNAL = 2.1; EXPRESSED IN ADULT LIVER, SIGNAL = 3.4; EXPRESSED IN BONE MARROW, SIGNAL = 2.4; NT HIT: gi7305502, EVALUE 2.00e-38; EST_HUMAN HIT: AW160799.1, EVALUE 1.00e-98; SWISSPROT HIT: P89509, EVALUE 1.90e+00
tcacatggggaccatgacctctgaccccagtcctctccaaaagttggaatttcgctcttttccagcggagaacccaggtaatctctgtcctgaccctctggaaaggttgcctcgctctcaccctcagcaaaagggccccagtgccccgcgccgcgcgcgccagcatttcccaccgccgcagcgacctccggaaccaacgaga

SEQ ID NO: 16759 - DNA, 154 bp, Homo sapiens
  MAP TO CHR17.1; EXPRESSED IN BRAIN, SIGNAL = 0.55; EXPRESSED IN HEART, SIGNAL = 0.46; EXPRESSED IN BONE MARROW, SIGNAL = 0.55; SWISSPROT HIT: Q00234, EVALUE 2.60e+00; NT HIT: AF153809.1, EVALUE 7.00e-28; EST_HUMAN HIT: BG401592.1, EVALUE 5.00e-39
gaatgctctttagttaataataaaggaaagaaaagctccagacaccaagaacctgggttaaccattgacaccggtttgttcctacagttcctccctgggaatctacataggtagcccctggcgtcttatcaagcaagccatagccagtcagctg

SEQ ID NO: 16760 - DNA, 207 bp, Homo sapiens
  MAP TO CHR16.1; EXPRESSED IN ADULT LIVER, SIGNAL = 0.44; EXPRESSED IN FETAL LIVER, SIGNAL = 0.55; EXPRESSED IN BRAIN, SIGNAL = 0.59; EXPRESSED IN HEART, SIGNAL = 0.58; EST_HUMAN HIT: AL555556.1, EVALUE 1.00e-112; SWISSPROT HIT: P39219, EVALUE 3.00e-06; NT HIT: gi16165049, EVALUE 1.00e-112
ctccagcaggcatccagggagggcaggaaggggtcaggcgtgcagacctccacacactcggtgtccgtggggatgcgcaggtagaaagcgtgcagcatcattctgaacggccggtcctcccggcccgagacttctccgtaggtcaggtcgcccaccacggggtggcccagggcactgcagtgcacgcgcagctggtgtgtccggcct

SEQ ID NO: 16761 - DNA, 179 bp, Homo sapiens
  MAP TO CHR12.1; EXPRESSED IN BRAIN, SIGNAL = 0.66; EXPRESSED IN BONE MARROW, SIGNAL = 0.9; EXPRESSED IN FETAL LIVER, SIGNAL = 0.99; SWISSPROT HIT: Q03018, EVALUE 3.00e-06; EST_HUMAN HIT: AI458447.1, EVALUE 3.00e-96; NT HIT: gi13650991, EVALUE 2.00e-96
gcagagagacaggcaagccataggctataggtgcagccccaataagatacttgagtcggggagcttggcgggcctggtttacatagtagagaaggggggcccctgggcctgctccaagccagccttgcagcagagcttccgtgtagcggtcaatgtcgcggtcagtcacatcccagaga

SEQ ID NO: 16762 - DNA, 146 bp, Homo sapiens
  MAP TO CHR18.1; EXPRESSED IN HELA, SIGNAL = 0.7; EXPRESSED IN BRAIN, SIGNAL = 1.1; EXPRESSED IN HEART, SIGNAL =   1; EXPRESSED IN BONE MARROW, SIGNAL = 1.3; EXPRESSED IN ADULT LIVER, SIGNAL = 1.3; EXPRESSED IN FETAL LIVER, SIGNAL =   1; EXPRESSED IN LUNG, SIGNAL = 0.75; NT HIT: gi4508026, EVALUE 2.00e-19; EST_HUMAN HIT: BG619358.1, EVALUE 1.00e-21; SWISSPROT HIT: Q14586, EVALUE 7.00e-20
taaaagctttgccacattccttacacttgaaaggcttctctccagtatggattctctgatgttgagcaaggtgtgaactcttgttaaaggctttgtcacattttttacatttgtaaggtttctctccagtatgaattttctgatgt

SEQ ID NO: 16763 - DNA, 198 bp, Homo sapiens
  MAP TO CHR2.1; EXPRESSED IN HEART, SIGNAL = 0.93; EXPRESSED IN BONE MARROW, SIGNAL = 0.58; EXPRESSED IN FETAL LIVER, SIGNAL = 0.63; EXPRESSED IN LUNG, SIGNAL =   1; EXPRESSED IN HELA, SIGNAL = 0.71; EXPRESSED IN BRAIN, SIGNAL = 0.6; EST_HUMAN HIT: BF816442.1, EVALUE 2.60e-01; SWISSPROT HIT: P41368, EVALUE 4.20e+00
tcctcaggtggccagcgaggttctcagaagatcaaggccatggaagtttctctccaagagctgtcagtggtggggagatcaaaggcctccattcattcaatatttattcagcaaatatacagaatcaagaatcaagctgagagctgagttcagtaagccagggagtcatccaaacaggtcgcaaaaatcaaaggggag

SEQ ID NO: 16764 - DNA, 219 bp, Homo sapiens
  MAP TO CHRX.1; EXPRESSED IN PLACENTA, SIGNAL = 7.4; EXPRESSED IN LUNG, SIGNAL = 4.8; EXPRESSED IN HELA, SIGNAL = 7.6; EXPRESSED IN BRAIN, SIGNAL =   7; EXPRESSED IN ADULT LIVER, SIGNAL = 5.6; EXPRESSED IN BONE MARROW, SIGNAL = 5.6; EXPRESSED IN FETAL LIVER, SIGNAL = 4.6; EXPRESSED IN HEART, SIGNAL = 4.3; NT HIT: L13325.1, EVALUE 1.00e-120; EST_HUMAN HIT: BE738646.1, EVALUE 1.00e-111; SWISSPROT HIT: P22304, EVALUE 3.00e-36
accttggggtatctgaaggggatgtgtggcttatgatacccaacggccaggaagaaaggactggctgacgttttcatcttttccaacaactgtatggcttgctcagtgctctgtttgtcaggcaaggtgccctcgggaacatccagcacatccacagggcaaagcaggttggcatggagttctccatctggccctcgacatgtctttcaaaacaaaata

SEQ ID NO: 16765 - DNA, 180 bp, Homo sapiens
  MAP TO CHR19.1; EXPRESSED IN FETAL LIVER, SIGNAL = 1.1; EXPRESSED IN BRAIN, SIGNAL = 0.81; EXPRESSED IN LUNG, SIGNAL = 1.1; EXPRESSED IN BONE MARROW, SIGNAL =   1; NT HIT: AF090384.1, EVALUE 7.00e-78; EST_HUMAN HIT: AU119912.1, EVALUE 1.00e-77; SWISSPROT HIT: P15787, EVALUE 1.90e+00
gaataaacaaccaaacccaagaaagaagcttcttgtgccttgtgcactggatcctcccaaccccaattgttatgtatgtgccagcaagccagaggtgactgtgcggctgaatgtccataaagtgactgttctcaccttacaagacaaggtcagtgcaaggcctgggtctcttttcctttt

SEQ ID NO: 16766 - DNA, 166 bp, Homo sapiens
  MAP TO CHR7.1; EXPRESSED IN FETAL LIVER, SIGNAL = 0.53; EXPRESSED IN BRAIN, SIGNAL = 0.38; EXPRESSED IN BONE MARROW, SIGNAL = 0.42; SWISSPROT HIT: P14210, EVALUE 2.00e-17; NT HIT: M75968.1, EVALUE 4.00e-76; EST_HUMAN HIT: AA037738.1, EVALUE 7.00e-57
tttagggagaagtcagttacctttgttttcatagaggtcaaattcatggccaaattcttttttcactccacttgacatgctattgaaggggaaccagaggcattgttttcttgctttatcaaaaacaaaagccctgaaaaaaatatcagaatgaaaagaagaaata

SEQ ID NO: 16767 - DNA, 214 bp, Homo sapiens
  MAP TO CHR1.1; EXPRESSED IN FETAL LIVER, SIGNAL = 1.9; EXPRESSED IN LUNG, SIGNAL = 2.3; EXPRESSED IN HELA, SIGNAL = 2.1; EXPRESSED IN BRAIN, SIGNAL =   2; EXPRESSED IN HEART, SIGNAL = 2.2; EXPRESSED IN BONE MARROW, SIGNAL = 2.1; EXPRESSED IN PLACENTA, SIGNAL = 2.4; EST_HUMAN HIT: BF739172.1, EVALUE 1.10e+00; SWISSPROT HIT: P14129, EVALUE 4.80e+00; NT HIT: AL116761.1, EVALUE 7.60e-01
gccagcacagcctcattcctgcgcaaatcacaagcccaccgcccatcccctgcaatccaagtctctttttctgaagagcttcctatgtgccaaataatatttaacaaacacagatgagcaataggagatgagggaaagaactggcatgccaagatatattggaggagatttcgagggaatgttgtcaatgacacagctccagtggagaaggggg

SEQ ID NO: 16768 - DNA, 182 bp, Homo sapiens
  MAP TO CHR19.1; EXPRESSED IN ADULT LIVER, SIGNAL = 5.2; EXPRESSED IN BONE MARROW, SIGNAL = 1.9; EXPRESSED IN FETAL LIVER, SIGNAL = 2.2; EXPRESSED IN LUNG, SIGNAL =   2; EXPRESSED IN HELA, SIGNAL = 2.3; EXPRESSED IN BRAIN, SIGNAL = 2.3; EXPRESSED IN HEART, SIGNAL = 5.3; EST_HUMAN HIT: BI759746.1, EVALUE 2.00e-94; SWISSPROT HIT: O94759, EVALUE 9.00e-05; NT HIT: AY046396.1, EVALUE 1.00e-94
agatgaaggacgtgttcttcttcctcttcttcctcggcgtgtggctggtagcctatggcgtggccacggaggggctcctgaggccacgggacagtgacttcccaagtatcctgcgccgcgtcttctaccgtccctacctgcagatcttcgggcagattccccaggaggacatggacggtagg

SEQ ID NO: 16769 - DNA, 145 bp, Homo sapiens
  MAP TO CHR5.1; EXPRESSED IN PLACENTA, SIGNAL = 1.2; EXPRESSED IN FETAL LIVER, SIGNAL = 2.2; EXPRESSED IN LUNG, SIGNAL = 1.8; EXPRESSED IN BRAIN, SIGNAL = 1.2; EXPRESSED IN HEART, SIGNAL = 1.7; EXPRESSED IN BONE MARROW, SIGNAL = 1.6; EXPRESSED IN ADULT LIVER, SIGNAL = 0.64; NT HIT: AF063586.1, EVALUE 3.00e-76; SWISSPROT HIT: P09711, EVALUE 3.90e-01; EST_HUMAN HIT: BI545631.1, EVALUE 2.90e+00
tgccagctcccgggtgcgtgcgaaatggctggcggtccgaccggaggagcatggaggcgcggggttaatgcgccattccaaatcgcggtgcccgccagcaggaagccacagaggcactagatttcccttccgtcttaagagggtt

SEQ ID NO: 16770 - DNA, 230 bp, Homo sapiens
  MAP TO CHR11.1; EXPRESSED IN PLACENTA, SIGNAL = 8.4; EXPRESSED IN FETAL LIVER, SIGNAL = 8.9; EXPRESSED IN HELA, SIGNAL =  11; EXPRESSED IN BRAIN, SIGNAL = 7.9; EXPRESSED IN LUNG, SIGNAL = 4.6; EXPRESSED IN HEART, SIGNAL = 4.2; EXPRESSED IN ADULT LIVER, SIGNAL = 7.3; EXPRESSED IN BONE MARROW, SIGNAL = 8.9; NT HIT: gi14784617, EVALUE 1.00e-108; EST_HUMAN HIT: BG696607.1, EVALUE 1.00e-108
tgtcacgcctcacctgagaggtagcaaggacaaaggccgtgatgagggtaggaatccagccattgccaaagtaaaagacagtgaaccatgcaatgctctccagggcgatgatgtgggccaggaggaggaggaagaacacgtggttggtcttgaacaggttcatgtcctcagccgtcttcctcagggcccggaagtcctcagtgatctttgactgttgaccaagagcacag

SEQ ID NO: 16771 - DNA, 303 bp, Homo sapiens
  MAP TO CHR5.1; EXPRESSED IN FETAL LIVER, SIGNAL = 0.61; EXPRESSED IN LUNG, SIGNAL =   1; EXPRESSED IN BRAIN, SIGNAL = 0.53; EXPRESSED IN HEART, SIGNAL = 0.95; EXPRESSED IN BONE MARROW, SIGNAL = 0.56; NT HIT: AF069162.1, EVALUE 1.10e+00; SWISSPROT HIT: Q51559, EVALUE 4.70e+00; EST_HUMAN HIT: BF437898.1, EVALUE 6.40e+00
ttctgtgtatacaggcaaatatcatcagaagcactttcactgtgatggtaacctttctatacactttctaacttgtctggattttcttgaaggtcgattgggttttcaactgtgttatctgctaggtgtttgatggagtggtccagataacagaagagagagcaaaggaaaaagaattttttgaagatcaaaagtggctgttcattttgttatctgaccctatctgttgtcatagtaacaggtttcttttaacctatgtcatgggatgatttgtctctatctgctctgaattctcctttgact

SEQ ID NO: 16772 - DNA, 200 bp, Homo sapiens
  MAP TO CHR7.1; EXPRESSED IN FETAL LIVER, SIGNAL = 1.5; EXPRESSED IN LUNG, SIGNAL = 1.1; EXPRESSED IN BRAIN, SIGNAL = 1.6; EXPRESSED IN HELA, SIGNAL = 1.5; EXPRESSED IN ADULT LIVER, SIGNAL = 2.4; EXPRESSED IN HEART, SIGNAL = 1.1; NT HIT: L13758.1, EVALUE 1.00e-109; SWISSPROT HIT: O08749, EVALUE 1.00e-32; EST_HUMAN HIT: BG478682.1, EVALUE 1.00e-103
tggtagtatctatgccattggtgatgtagttgctggtccaatgctggctcacaaagcagaggatgaaggcattatctgtgttgaaggaatggctggtggtgctgtgcacattgactacaattgtgtgccatcagtgatttacacacaccctgaagttgcttgggttggcaaatcagaagagcagttgaaagaagaggtaa

SEQ ID NO: 16773 - DNA, 301 bp, Homo sapiens
  MAP TO CHR5.1; EXPRESSED IN BRAIN, SIGNAL = 0.54; EXPRESSED IN BONE MARROW, SIGNAL = 0.52; EXPRESSED IN HEART, SIGNAL = 0.5; EXPRESSED IN FETAL LIVER, SIGNAL = 0.42; NT HIT: gi16164285, EVALUE 5.00e-06; SWISSPROT HIT: P51582, EVALUE 1.60e+00; EST_HUMAN HIT: BE545197.1, EVALUE 7.00e-06
ctcatgttctgtctctaggctgttaaatacattgttaaaactcaggctgttgcatttgggttgcagctgggagcttggcagagattctgcctgatgaggtaaggagagaagctaaggacgctgctggtttgcagctggaaacatcttttcatggccatttggccagattgtaaatgtcttttccaaagttcaggtttggtgggacctctggttgtatgtcttggaattgccctgtgtttagaaacagtgccagtcgcctgatgggtgaatcactgttgctgggatgttggcaggttttgca

SEQ ID NO: 16774 - DNA, 154 bp, Homo sapiens
  MAP TO CHR17.1; EXPRESSED IN HEART, SIGNAL = 1.4; EXPRESSED IN BONE MARROW, SIGNAL = 0.85; EXPRESSED IN FETAL LIVER, SIGNAL = 1.1; EXPRESSED IN LUNG, SIGNAL = 1.8; EXPRESSED IN HELA, SIGNAL = 0.58; EXPRESSED IN BRAIN, SIGNAL = 0.75; SWISSPROT HIT: P42229, EVALUE 4.00e-24; EST_HUMAN HIT: AW796816.1, EVALUE 1.00e-79; NT HIT: gi14786067, EVALUE 9.00e-80
cagcggaacgcaacctgtggaacctgaaaccattcaccacgcgggatttctccatcaggtccctggctgaccggctgggggacctgagctatctcatctatgtgtttcctgaccgccccaaggatgaggtcttctccaagtactacactcctgt

SEQ ID NO: 16775 - DNA, 160 bp, Homo sapiens
  MAP TO CHR14.1; EXPRESSED IN HELA, SIGNAL = 8.9; EXPRESSED IN LUNG, SIGNAL =  19; EXPRESSED IN BRAIN, SIGNAL =  12; EXPRESSED IN HEART, SIGNAL = 8.2; EXPRESSED IN BONE MARROW, SIGNAL =  32; EXPRESSED IN ADULT LIVER, SIGNAL =  13; EXPRESSED IN PLACENTA, SIGNAL =  12; SWISSPROT HIT: P01764, EVALUE 7.00e-20; EST_HUMAN HIT: BG684987.1, EVALUE 3.00e-77; NT HIT: X92216.1, EVALUE 4.00e-85
agccccttccctggagcctggcggacccagctcatccaggcgttactgaaagtgaatccagaggctgcacaggagagtctaagggaccccccaggctttaccaagcctcccccagactccaccagctgcacctcacactggacacctgcaaacacagaga

SEQ ID NO: 16776 - DNA, 234 bp, Homo sapiens
  MAP TO CHR17.1; EXPRESSED IN HELA, SIGNAL = 1.9; EXPRESSED IN BRAIN, SIGNAL = 2.5; EXPRESSED IN ADULT LIVER, SIGNAL = 3.2; EXPRESSED IN HEART, SIGNAL = 2.5; EXPRESSED IN BONE MARROW, SIGNAL = 2.3; EXPRESSED IN FETAL LIVER, SIGNAL = 2.4; EXPRESSED IN LUNG, SIGNAL = 1.9; NT HIT: AJ132478.2, EVALUE 2.00e-04; SWISSPROT HIT: Q39565, EVALUE 1.00e-14; EST_HUMAN HIT: BE067568.1, EVALUE 1.20e+00
ctgaccttctggattctcagcaacttgatgttgtcaaagcattttttgaggtgtggctgcacagcctctgggtttcgggactggcccagaatctccagcaggtcatcattggacaagaagtagaagcgggggaaaatatgtcgcttggtctctaaatacatatccagagatttctgaatatcttccaggattgtattcatttctatcaatgtgtccaggaggcctgggaagaag

SEQ ID NO: 16777 - DNA, 191 bp, Homo sapiens
  MAP TO CHR8.1; EXPRESSED IN ADULT LIVER, SIGNAL = 1.3; EXPRESSED IN FETAL LIVER, SIGNAL = 1.1; EXPRESSED IN BRAIN, SIGNAL = 0.99; EXPRESSED IN LUNG, SIGNAL = 1.1; EXPRESSED IN BONE MARROW, SIGNAL = 1.1; NT HIT: AE008685.1, EVALUE 1.00e-101; SWISSPROT HIT: P00966, EVALUE 2.50e+00; EST_HUMAN HIT: R24918.1, EVALUE 6.00e-30
caaaaggtgacttcagccgaggaggagttcaataatcaagtggataagatgacccgttctgtggacagtcagcctctctccccagccatccctgtcattgctcaatgggcacatgaacaaagtggccatggtggtcgagatggaggttatgcttgggctcagcaacatgggcttccactcaccaaggctga

SEQ ID NO: 16778 - DNA, 198 bp, Homo sapiens
  MAP TO CHR1.1; EXPRESSED IN HELA, SIGNAL = 2.1; EXPRESSED IN ADULT LIVER, SIGNAL = 3.4; EXPRESSED IN BONE MARROW, SIGNAL = 2.8; EXPRESSED IN HEART, SIGNAL = 1.9; EXPRESSED IN PLACENTA, SIGNAL = 2.1; EXPRESSED IN FETAL LIVER, SIGNAL = 2.5; EXPRESSED IN LUNG, SIGNAL = 1.5; EXPRESSED IN BRAIN, SIGNAL = 2.7; NT HIT: AJ278435.1, EVALUE 2.80e+00; SWISSPROT HIT: Q9Y581, EVALUE 2.50e+00; EST_HUMAN HIT: AW877648.1, EVALUE 4.10e+00
tctgtgtctttcagtctaggaaaaggcttagtaggcagagtggaaaatgacagactatttttaacacagctttctatcccacagttctgggtcttacttctattatcattacttattcatagactttcattcccaaatatcattaccctttacagtaataggatcagcaaagcaaccacttaaaacaaaacaaacaaa

SEQ ID NO: 16779 - DNA, 376 bp, Homo sapiens
  MAP TO CHR11.1; EXPRESSED IN HEART, SIGNAL = 1.8; EXPRESSED IN ADULT LIVER, SIGNAL = 1.9; EXPRESSED IN BONE MARROW, SIGNAL = 2.5; EXPRESSED IN PLACENTA, SIGNAL = 3.7; EXPRESSED IN FETAL LIVER, SIGNAL = 2.5; EXPRESSED IN LUNG, SIGNAL =   2; EXPRESSED IN HELA, SIGNAL = 5.5; EXPRESSED IN BRAIN, SIGNAL = 2.2; NT HIT: L37374.1, EVALUE 0.00e+00; SWISSPROT HIT: P39748, EVALUE 7.00e-69; EST_HUMAN HIT: BE253795.1, EVALUE 0.00e+00
gagagtatccggggtattgggcccaagcgggctgtggacctcatccagaagcacaagagcatcgaggagatcgtgcggcgacttgaccccaacaagtaccctgtgccagaaaattggctccacaaggaggctcaccagctcttcttggaacctgaggtgctggacccagagtctgtggagctgaagtggagcgagccaaatgaagaagagctgatcaagttcatgtgtggtgaaaagcagttctctgaggagcgaatccgcagtggggtcaagaggctgagtaagagccgccaaggcagcacccagggccgcctggatgatttcttcaaggtgaccggctcactctcttcagctaagcgcaaggagccagaaccca

SEQ ID NO: 16780 - DNA, 232 bp, Homo sapiens
  MAP TO CHR19.1; EXPRESSED IN FETAL LIVER, SIGNAL = 0.48; EXPRESSED IN HELA, SIGNAL = 0.46; EXPRESSED IN BRAIN, SIGNAL = 0.52; EXPRESSED IN HEART, SIGNAL = 0.87; EXPRESSED IN ADULT LIVER, SIGNAL = 0.46; NT HIT: gi16177655, EVALUE 1.00e-113; SWISSPROT HIT: O35984, EVALUE 2.00e-17; EST_HUMAN HIT: BG697418.1, EVALUE 1.00e-127
aaactcttccatgcagaaagatcacctgttcatatttctctagctcagagtggtaaatctgtcggatctgggacagcttggccctgtagtcagagtgctcaatgctattgtcatttggacagccacctggtgttgctgtgccggccctggccaccgctcctcctcttcctctcttctcgggcctgcacacgccctcagccagcagcatgttatccagcctcaggagctgggc

SEQ ID NO: 16781 - DNA, 129 bp, Homo sapiens
  MAP TO CHR7.1; EXPRESSED IN ADULT LIVER, SIGNAL = 7.4; EXPRESSED IN BONE MARROW, SIGNAL = 4.3; EXPRESSED IN HEART, SIGNAL = 5.7; EXPRESSED IN FETAL LIVER, SIGNAL = 4.8; EXPRESSED IN LUNG, SIGNAL = 4.1; EXPRESSED IN BRAIN, SIGNAL = 4.3; NT HIT: AJ010770.1, EVALUE 1.00e-66; SWISSPROT HIT: P13382, EVALUE 3.50e+00; EST_HUMAN HIT: BF839477.1, EVALUE 6.30e-01
ttactgtttgaacctggttagcagttatttttatgccagaactttgaaggtaacattccagtgttttctgatttcttgtttctgtcgacaaggtccttgtcactttgttgttccctcgtaggtaatacg

SEQ ID NO: 16782 - DNA, 152 bp, Homo sapiens
  MAP TO CHR7.1; EXPRESSED IN FETAL LIVER, SIGNAL = 0.78; EXPRESSED IN HELA, SIGNAL = 0.91; EXPRESSED IN BRAIN, SIGNAL = 0.91; EXPRESSED IN LUNG, SIGNAL = 0.72; EXPRESSED IN HEART, SIGNAL = 0.85; EXPRESSED IN BONE MARROW, SIGNAL =   1; SWISSPROT HIT: Q99558, EVALUE 8.80e-01; EST_HUMAN HIT: BG722094.1, EVALUE 2.00e-53; NT HIT: AE000029.2, EVALUE 2.10e+00
tttgtttcatattagctctagaggacaaaatcccagtccttggcacaaactcaggaaatggaagccggagtctgttttttgtggggctgctaattgtgctgattgtcagcctggcactggtttttttcgtgatatttctaataggtaagtac

SEQ ID NO: 16783 - DNA, 204 bp, Homo sapiens
  MAP TO CHR11.1; EXPRESSED IN BRAIN, SIGNAL = 0.53; EXPRESSED IN BONE MARROW, SIGNAL = 0.49; EXPRESSED IN HEART, SIGNAL = 0.51; EXPRESSED IN ADULT LIVER, SIGNAL = 0.72; EXPRESSED IN FETAL LIVER, SIGNAL = 0.5; SWISSPROT HIT: P11260, EVALUE 7.00e-32; EST_HUMAN HIT: AW935133.1, EVALUE 6.00e-30; NT HIT: AE008683.1, EVALUE 1.00e-101
caaaacatccaggaaatccaggacacaatgagaagaccaaacctacggataataggagtggatgagaatgaagattttcaactcaaaggaccagcaaacatcttcaacaaaattattgaagaaaacttaccaaatctaaagaaagagatgcccatgaacatacaagaagcctacagaactccaaatagactggaccagaaaaga

SEQ ID NO: 16784 - DNA, 128 bp, Homo sapiens
  MAP TO CHR19.1; EXPRESSED IN HELA, SIGNAL = 1.9; EXPRESSED IN BRAIN, SIGNAL = 2.4; EXPRESSED IN HEART, SIGNAL = 2.9; EXPRESSED IN BONE MARROW, SIGNAL = 2.7; EXPRESSED IN PLACENTA, SIGNAL = 1.8; EXPRESSED IN FETAL LIVER, SIGNAL = 2.7; NT HIT: gi14759689, EVALUE 4.00e-66; SWISSPROT HIT: P52737, EVALUE 2.00e-15; EST_HUMAN HIT: AW504245.1, EVALUE 3.00e-64
actggagagaaaccctatgaatgtaaggaatgtggcaaagccttcgcatttctcttttcctttcgaaaccatataagaattcatactggagagacaccctatgaatgtaaggaatgtgggaaggcatt

SEQ ID NO: 16785 - DNA, 226 bp, Homo sapiens
  MAP TO CHR14.1; EXPRESSED IN FETAL LIVER, SIGNAL = 0.92; EXPRESSED IN LUNG, SIGNAL = 1.4; EXPRESSED IN HELA, SIGNAL = 0.74; EXPRESSED IN BRAIN, SIGNAL = 0.74; EXPRESSED IN HEART, SIGNAL = 1.3; NT HIT: gi14751987, EVALUE 1.00e-116; SWISSPROT HIT: P14922, EVALUE 4.00e-03; EST_HUMAN HIT: BE777824.1, EVALUE 1.00e-116
gggcagctcacatgggtgagggctcctgagaagcaggtgtgggcagctgcaacatccccttttttccagtacacctcacccagctggttccaggcttccaccagctcgggctccagcttcacagcctttgacagaagctcctcagccttagggctatagtcaggagtcacatttagtgctttcccagttagcattagaacttgtgccttgccctggacagaaccta

SEQ ID NO: 16786 - DNA, 171 bp, Homo sapiens
  MAP TO CHR14.1; EXPRESSED IN BONE MARROW, SIGNAL = 2.8; EXPRESSED IN ADULT LIVER, SIGNAL =   4; EXPRESSED IN FETAL LIVER, SIGNAL =   3; EXPRESSED IN LUNG, SIGNAL = 2.8; EXPRESSED IN HELA, SIGNAL = 4.1; EXPRESSED IN BRAIN, SIGNAL = 3.2; EXPRESSED IN HEART, SIGNAL = 2.3; NT HIT: AF111170.3, EVALUE 1.00e-91; SWISSPROT HIT: P24773, EVALUE 2.50e+00; EST_HUMAN HIT: AI991623.1, EVALUE 2.00e-82
tgccgcagtccttcagccctgccagggacctgcctgacagcagcctgatccagggcgcggcccacgccatcgtggccgccatcacccagcgggggaacagctcactgctcctggctgtcaccgaggtcaaggtggagacggttgttacgggcggctcttccacaggtaagc

SEQ ID NO: 16787 - DNA, 402 bp, Homo sapiens
  MAP TO CHR17.1; EXPRESSED IN BRAIN, SIGNAL = 0.64; EXPRESSED IN BONE MARROW, SIGNAL = 0.68; NT HIT: X64994.1, EVALUE 0.00e+00; SWISSPROT HIT: P30953, EVALUE 3.00e-72; EST_HUMAN HIT: BF477726.1, EVALUE 0.00e+00
gacaatgtgatcccccactttttctgtgatatgtctgctctgctgaagctggccttctctgacactcgagttaatgaatgggtgatatttatcatgggagggctcattcttgtcatcccattcctactcatccttgggtcctatgcaagaattgtctcctccatcctcaaggtcccttcttctaagggtatctgcaaggccttctctacttgtggctcccacctgtctgtggtgtcactgttctatggaaccgttattggtctctacttatgctcatcagctaatagttctactctaaaggacactgtcatggctatgatgtacactgtggtgacccccatgctgaaccccttcatctacagcctgaggaacagagacatgaagggagccctgagcagagtc

SEQ ID NO: 16788 - DNA, 217 bp, Homo sapiens
  MAP TO CHR1.1; EXPRESSED IN HEART, SIGNAL = 2.6; EXPRESSED IN FETAL LIVER, SIGNAL = 1.3; EXPRESSED IN LUNG, SIGNAL = 3.1; EXPRESSED IN HELA, SIGNAL =   1; EXPRESSED IN BRAIN, SIGNAL = 1.1; SWISSPROT HIT: P17140, EVALUE 1.80e+00; EST_HUMAN HIT: BF680711.1, EVALUE 1.00e-03; NT HIT: AF169288.1, EVALUE 8.00e-04
gagcatgggaatggggtggggcagcctgcaagaccgaaagaaaaggcctgggacgctttgctgggaaagacaaagaggagaggggaggggagaggagacgataaacttgccaacagcccggccaaggtgaaccccggctcctggcgccttcccatccgcattcattccacaaacgcgggccaaatctccgaaccagccgcaagcgggagggggcctc

SEQ ID NO: 16789 - DNA, 203 bp, Homo sapiens
  MAP TO CHR2.1; EXPRESSED IN BONE MARROW, SIGNAL = 0.5; EXPRESSED IN FETAL LIVER, SIGNAL = 0.6; EXPRESSED IN HELA, SIGNAL = 0.41; EXPRESSED IN BRAIN, SIGNAL = 0.46; EXPRESSED IN HEART, SIGNAL = 0.63; SWISSPROT HIT: Q9NVP1, EVALUE 7.00e-30; EST_HUMAN HIT: BE160298.1, EVALUE 6.00e-98; NT HIT: gi13787205, EVALUE 4.00e-98
tttctttctatttcagcttgagaaattgattgaaaagaattactttcttcataagtcagcccaggaagcatataagtcatacatacgagcctatgattcccattctctgaaacagatctttaatgttaataacctaaatttgcctcaggttgctctgtcatttggtttcaaggtgcctcccttcgttgatctgagtatccttt

SEQ ID NO: 16790 - DNA, 230 bp, Homo sapiens
  MAP TO CHR13.1; EXPRESSED IN LUNG, SIGNAL = 0.83; EXPRESSED IN BRAIN, SIGNAL = 0.74; EXPRESSED IN HEART, SIGNAL = 0.79; EXPRESSED IN FETAL LIVER, SIGNAL = 0.82; NT HIT: gi4507046, EVALUE 1.00e-120; SWISSPROT HIT: P30825, EVALUE 1.00e-35; EST_HUMAN HIT: BE313207.1, EVALUE 1.00e-120
caggtaccagccagagcagcctaacctggtataccagatggccagtacttccgacgagttagatccagcagaccaaaatgaattggcaagcaccaatgattcccagctggggtttttaccagaggcagagatgttctctttgaaaaccatactctcacccaaaaacatggagccttccaaaatctctgggctaattgtgaacatttcaaccagccttataggtaagagct

SEQ ID NO: 16791 - DNA, 211 bp, Homo sapiens
  MAP TO CHR4.1; EXPRESSED IN FETAL LIVER, SIGNAL = 0.85; EXPRESSED IN LUNG, SIGNAL = 1.1; EXPRESSED IN BRAIN, SIGNAL = 0.61; EXPRESSED IN HEART, SIGNAL = 1.1; NT HIT: U33161.1, EVALUE 1.00e-115; SWISSPROT HIT: P32298, EVALUE 6.00e-33; EST_HUMAN HIT: AA890050.1, EVALUE 2.00e-91
aggtagcaccgttcttacctgtatacaattctttccctctgtaaatcttccaagccgcaacacagctctgcagcatagaaaacggctctctgctcatcaaagccgggattgcccaggttgtaaatgtgaaacttcaaatcccctccattcataatggtgagcaccaagcacaaggcatctttggtttcataagcgtaggctaaactaacct

SEQ ID NO: 16792 - DNA, 203 bp, Homo sapiens
  MAP TO CHR6.1; EXPRESSED IN PLACENTA, SIGNAL = 2.7; EXPRESSED IN FETAL LIVER, SIGNAL = 2.8; EXPRESSED IN LUNG, SIGNAL = 1.2; EXPRESSED IN BRAIN, SIGNAL = 2.5; EXPRESSED IN HELA, SIGNAL = 2.7; EXPRESSED IN HEART, SIGNAL = 1.3; EXPRESSED IN BONE MARROW, SIGNAL = 2.9; EXPRESSED IN ADULT LIVER, SIGNAL = 1.8; NT HIT: gi14782490, EVALUE 1.00e-104; SWISSPROT HIT: O08539, EVALUE 5.50e+00; EST_HUMAN HIT: BE276351.1, EVALUE 1.00e-104
cagacctcattgatgtattccagcaggtggcggaagctgtacgagctgtcgaagagcccatgcaccacgatgaccggcttgtaggacgcgcggtggggcgcgggggctgcaagcagcagcagcggcaggaaaggcaacagaagcaggacccacgccgcggggagccgctgcccccagagccccagcatgctcccgcctgagaa

SEQ ID NO: 16793 - DNA, 209 bp, Homo sapiens
  MAP TO CHR17.1; EXPRESSED IN HELA, SIGNAL = 0.82; EXPRESSED IN BRAIN, SIGNAL = 1.1; EXPRESSED IN LUNG, SIGNAL = 1.7; EXPRESSED IN HEART, SIGNAL = 1.3; EXPRESSED IN BONE MARROW, SIGNAL = 1.1; NT HIT: AJ012469.1, EVALUE 1.90e-01; SWISSPROT HIT: P16356, EVALUE 1.40e+00; EST_HUMAN HIT: BF773558.1, EVALUE 4.30e+00
tctttcaggtctgcactacagagcttacacaaggcttgtgaagtcgccagagcgcataactactacccaggcagcctatttctcacttgggtgagttattatgagagccatatcaactcagatcaatcctcagtcaatgaatggaatgcaatgcaagatgtacagtcccaccggcccgactctccagctctcttcaccgacatgtaagt

SEQ ID NO: 16794 - DNA, 358 bp, Homo sapiens
  MAP TO CHR2.1; EXPRESSED IN BRAIN, SIGNAL = 1.2; EXPRESSED IN BONE MARROW, SIGNAL =   1; NT HIT: gi16162843, EVALUE 0.00e+00; SWISSPROT HIT: Q15032, EVALUE 4.00e-64; EST_HUMAN HIT: AA100742.1, EVALUE 0.00e+00
ttactgagaacttgccctttccaaaatgtgaaagtcatagtgcttcttgcttgttctcagcttaaacttgttaactgagttaatttgtttcttcagtgcattctgtgcagctgaaatggaggggaatgtggctaagacggtgtaggtggaggccaagtcactgggtttagagcgttcagggttggcagtgttgtccccactgccacagcagagggggtgacgacgtggttgggactgggggtcccggagccaccggatcttggcgccaattttaaagagttccccaaaaagcttttcagcttccatgcgagttattccatctggtagttcagtaatttccaagaccttcccaacaact

SEQ ID NO: 16795 - DNA, 487 bp, Homo sapiens
  MAP TO CHR19.1; EXPRESSED IN ADULT LIVER, SIGNAL = 4.6; EXPRESSED IN PLACENTA, SIGNAL = 3.6; EXPRESSED IN FETAL LIVER, SIGNAL = 4.6; EXPRESSED IN LUNG, SIGNAL =   3; EXPRESSED IN HELA, SIGNAL = 3.9; EXPRESSED IN BRAIN, SIGNAL =   5; EXPRESSED IN BONE MARROW, SIGNAL = 5.7; NT HIT: gi14761764, EVALUE 0.00e+00; SWISSPROT HIT: O43823, EVALUE 9.00e-73; EST_HUMAN HIT: AI266184.1, EVALUE 0.00e+00
atcccgcatccgaggctgcgagcggccacatccgtagggcatggtgctgtcatagccgcccgccccctgcatgcccatcacgccgtagtcgggagccatggactgggagaagagggacggaggtggccggctgggggagggccctcccaggccccgtccacccacgtagttcagctcgttccagggcgtggacaggggctcagaggacgcagcggggggcacgaaggggtcgctgcgcatgaaggtgccagggttgctccggtcctggaagcggccctggccccggccccgcatgaagccatcaagggagccccgctcccgggctgggtctcggcattcactgtactgccccccaaagctgccattgcggtcggaccccaggtcgaactcatagtcgtagctgtagctggggcggtaggggttgtgctccggcaggcagggcctggagtcataggactcgaacggctggaagcggaaggagctgcaa

SEQ ID NO: 16796 - DNA, 152 bp, Homo sapiens
  MAP TO CHR17.1; EXPRESSED IN PLACENTA, SIGNAL = 1.5; EXPRESSED IN HELA, SIGNAL = 1.5; EXPRESSED IN LUNG, SIGNAL = 2.3; EXPRESSED IN BRAIN, SIGNAL =   2; EXPRESSED IN HEART, SIGNAL = 1.9; EXPRESSED IN BONE MARROW, SIGNAL = 1.8; NT HIT: AY013288.1, EVALUE 5.20e-01; SWISSPROT HIT: P49847, EVALUE 3.40e+00; EST_HUMAN HIT: BI087207.1, EVALUE 7.70e-01
ccaatcccattagctctgagagggggatgatttagcatcacctgccttatcaatctccctgccccgcctgcatcctcggcttttggggaggtcaatttccggcacacacagaaaagcctgtggctgtggccgggaacaattggccacagtgc

SEQ ID NO: 16797 - DNA, 336 bp, Homo sapiens
  MAP TO CHR19.1; EXPRESSED IN HELA, SIGNAL = 3.5; EXPRESSED IN BRAIN, SIGNAL =   4; EXPRESSED IN HEART, SIGNAL = 4.2; EXPRESSED IN ADULT LIVER, SIGNAL =   3; EXPRESSED IN BONE MARROW, SIGNAL = 3.8; EXPRESSED IN PLACENTA, SIGNAL = 3.5; EXPRESSED IN FETAL LIVER, SIGNAL =   4; EXPRESSED IN LUNG, SIGNAL =   5; NT HIT: gi16162900, EVALUE 0.00e+00; SWISSPROT HIT: P16818, EVALUE 1.70e-01; EST_HUMAN HIT: BG395178.1, EVALUE 0.00e+00
cctcacctcctcagatcatcctcaaagggcaggaaaagccatttctttggcatgtccttgaggaacaggtcctgctgctcctccgtggagtcctgggacacgtacaccagggccagctgagccgcccgcagtacatagaactcatctgtgagccgcacgaagaagtccttgaggatgggcacgaaggcctggcactgtggacaagccccagcaccaaagaacagcagcaccagccggttctccagcctgcgactgacctcagcctccgtatccagctcgtcctggtcgctattgttgcggatcaggatgcggccagagaacagggaggccatggta

SEQ ID NO: 16798 - DNA, 270 bp, Homo sapiens
  MAP TO CHR22.1; EXPRESSED IN BRAIN, SIGNAL = 3.3; EXPRESSED IN HEART, SIGNAL = 3.7; EXPRESSED IN ADULT LIVER, SIGNAL =   4; EXPRESSED IN BONE MARROW, SIGNAL = 3.3; EXPRESSED IN PLACENTA, SIGNAL = 3.2; EXPRESSED IN FETAL LIVER, SIGNAL = 3.9; EXPRESSED IN LUNG, SIGNAL = 2.8; NT HIT: U36261.1, EVALUE 0.00e+00; SWISSPROT HIT: Q10567, EVALUE 4.00e-46; EST_HUMAN HIT: BF841970.1, EVALUE 0.00e+00
caaggactcagataacccagacctgcgggaccgtggctacatctactggcgcctgctgtccacggacccggtggcagccaaggaggtggtgttggctgagaagccactcatctctgaagagacggacctcatcgagcccacactgttagacgagcttatctgctacatcggcacgctggcttccgtctaccataagcctcccagtgcctttgtggaggggggccggggcgtcgtgcacaagagcctgccacctcgcacggcctcgtgagt

SEQ ID NO: 16799 - DNA, 195 bp, Homo sapiens
  MAP TO CHR6.1; EXPRESSED IN FETAL LIVER, SIGNAL = 0.76; EXPRESSED IN HELA, SIGNAL = 0.82; EXPRESSED IN BRAIN, SIGNAL = 0.74; EXPRESSED IN HEART, SIGNAL = 0.79; EXPRESSED IN ADULT LIVER, SIGNAL = 0.91; EXPRESSED IN BONE MARROW, SIGNAL = 0.73; SWISSPROT HIT: P71911, EVALUE 1.90e+00; EST_HUMAN HIT: BE552449.1, EVALUE 2.00e-70
cggcctcccggccctctcggccttaggcgacaggtgcagcagctgtctctactgcccgctgtgccagggcggctgccgagcactggtgcggaaccactatcggaacgagtttgcacttctgtttacaaagcaatcctgccatcaaaagaggaacaaaatcaccacttatcacaccctgtcataaagtaatctgcc

SEQ ID NO: 16800 - DNA, 170 bp, Homo sapiens
  MAP TO CHR9.1; EXPRESSED IN FETAL LIVER, SIGNAL = 0.56; EXPRESSED IN BRAIN, SIGNAL = 0.53; EXPRESSED IN BONE MARROW, SIGNAL = 0.5; SWISSPROT HIT: P45353, EVALUE 8.60e-01; EST_HUMAN HIT: AW408727.1, EVALUE 2.00e-88; NT HIT: gi14738766, EVALUE 1.00e-88
tttacctttatgttaagttttctattgtttgttggaagtgttccatcctctttgagttgctcaggcagatgtatagtctttgttttaaagtttgtaggagtagcattttgtaacttgggcttctttttaccaactttcaattttactttttgaaaatcatgttggcgttt

SEQ ID NO: 16801 - DNA, 205 bp, Homo sapiens
  MAP TO CHR8.1; EXPRESSED IN HELA, SIGNAL = 2.1; EXPRESSED IN BRAIN, SIGNAL = 2.9; EXPRESSED IN LUNG, SIGNAL = 2.2; EXPRESSED IN HEART, SIGNAL = 2.8; EXPRESSED IN PLACENTA, SIGNAL = 1.7; EXPRESSED IN FETAL LIVER, SIGNAL = 2.6; NT HIT: gi16178995, EVALUE 1.00e-109; SWISSPROT HIT: P48454, EVALUE 4.00e-32; EST_HUMAN HIT: AA829420.1, EVALUE 1.00e-108
tagctgtcccctttcctccaacccaacggcttactttcaaggaagtatttgagaatgggaaacctaaagttgatgttttaaaaaaccatttggtaaaggaaggacgactggaagaggaagtagccttaaagataatcaatgatggggctgccatcctgaggcaagagaagactatgatagaagtagatgctccaatcacaggtat

SEQ ID NO: 16802 - DNA, 371 bp, Homo sapiens
  MAP TO CHR11.1; EXPRESSED IN BRAIN, SIGNAL = 0.59; EXPRESSED IN HEART, SIGNAL = 0.76; EXPRESSED IN BONE MARROW, SIGNAL = 0.64; NT HIT: AF282271.1, EVALUE 4.00e-84; SWISSPROT HIT: Q9GZM6, EVALUE 3.00e-37; EST_HUMAN HIT: AI239808.1, EVALUE 6.00e-07
cagatggcaacataacagtcatacgccattgcagccaacatgtgacactctgcaatagcaaaaatactgaataaatagagctgagccatgcattcagggtaggagatgatgttcttctctgtcgcaaagttcaccagcatcttaggggtaatgacagtggaatggcagaagtcaatgaaggacagactgctgaggaaatagtacataggtgtgtgcaggtgagaactgagcccaatcagtgtgatcatgcccaagttgcccaccactgtgaccacacagattcctaagaacaggaggaagaggcgcagctggagctctggctgttctgagagcccagccagaatggactcagtcactgaggaatggtttcc

SEQ ID NO: 16803 - DNA, 148 bp, Homo sapiens
  MAP TO CHR5.1; EXPRESSED IN BRAIN, SIGNAL = 3.5; EXPRESSED IN HEART, SIGNAL = 1.5; EXPRESSED IN ADULT LIVER, SIGNAL = 3.7; EXPRESSED IN PLACENTA, SIGNAL = 2.6; EXPRESSED IN FETAL LIVER, SIGNAL =   3; EXPRESSED IN HELA, SIGNAL =   4; EXPRESSED IN LUNG, SIGNAL = 1.4; NT HIT: M21496.1, EVALUE 5.00e-01; SWISSPROT HIT: P31695, EVALUE 4.50e+00; EST_HUMAN HIT: BE083417.1, EVALUE 7.40e-01
cttgaggcagcctacttcagggcaggtcagcttgggcagtgccaacaccaggcctccagccaaggagctgccagcacctcagctttgtccactcactactgagacctggctgaactgagcctagctgggcttccaggagttcccacca

SEQ ID NO: 16804 - DNA, 370 bp, Homo sapiens
  MAP TO CHR9.1; EXPRESSED IN HEART, SIGNAL = 3.7; EXPRESSED IN PLACENTA, SIGNAL =  11; EXPRESSED IN LUNG, SIGNAL = 5.5; EXPRESSED IN HELA, SIGNAL =  15; EXPRESSED IN BRAIN, SIGNAL =   3; NT HIT: gi4502746, EVALUE 0.00e+00; SWISSPROT HIT: P50750, EVALUE 2.00e-67; EST_HUMAN HIT: BI761424.1, EVALUE 0.00e+00
aggtgtggccaaacgtggacaactatgagctgtacgaaaagctggagctggtcaagggccagaagcggaaggtgaaggacaggctgaaggcctatgtgcgtgacccatacgcactggacctcatcgacaagctgctggtgctggaccctgcccagcgcatcgacagcgatgacgccctcaaccacgacttcttctggtccgaccccatgccctccgacctcaagggcatgctctccacccacctgacgtccatgttcgagtacttggcaccaccgcgccggaagggcagccagatcacccagcagtccaccaaccagagtcgcaatcccgccaccaccaaccagacggagtttgagcgcgtcttctgagg

SEQ ID NO: 16805 - DNA, 172 bp, Homo sapiens
  MAP TO CHR5.1; EXPRESSED IN LUNG, SIGNAL = 1.4; EXPRESSED IN HELA, SIGNAL = 1.1; EXPRESSED IN BRAIN, SIGNAL = 1.1; EXPRESSED IN HEART, SIGNAL = 1.2; NT HIT: X97970.1, EVALUE 1.50e-01; SWISSPROT HIT: Q95155, EVALUE 3.30e+00; EST_HUMAN HIT: AI903184.1, EVALUE 2.20e-01
gttttgatcattttccttttatgagtgccgtgtgcacagactcttgattgtttctgcaatggaaaaagaagaggatgtccctctgaatcccaatgatctgctttggccaaaatcagacaccaaagctgttaacgggaagaacacttgcaatataggaaatcctataatgtaa

SEQ ID NO: 16806 - DNA, 182 bp, Homo sapiens
  MAP TO CHR15.1; EXPRESSED IN LUNG, SIGNAL =   2; EXPRESSED IN HELA, SIGNAL = 2.9; EXPRESSED IN BRAIN, SIGNAL = 4.2; EXPRESSED IN HEART, SIGNAL = 2.6; EXPRESSED IN BONE MARROW, SIGNAL = 4.4; EXPRESSED IN ADULT LIVER, SIGNAL = 4.5; EXPRESSED IN FETAL LIVER, SIGNAL = 3.4; EXPRESSED IN PLACENTA, SIGNAL = 2.9; SWISSPROT HIT: P11716, EVALUE 3.00e-13; EST_HUMAN HIT: BG201525.1, EVALUE 4.00e-49; NT HIT: gi4506758, EVALUE 5.00e-85
tcttctctagtgttaccttttccacatgtacgtgggagtgagagcaggaggtggcattggtgatgaaattgaagaccctgctggtgatccttatgaaatgtatcgcattgtctttgacattacctttttcttcttcgtcattgtcatcttgctggccatcattcaaggtatgattgccaatt

SEQ ID NO: 16807 - DNA, 176 bp, Homo sapiens
  MAP TO CHR19.1; EXPRESSED IN ADULT LIVER, SIGNAL = 0.68; EXPRESSED IN BONE MARROW, SIGNAL = 0.77; EXPRESSED IN LUNG, SIGNAL = 1.5; EXPRESSED IN HELA, SIGNAL = 0.69; EXPRESSED IN BRAIN, SIGNAL = 0.77; EXPRESSED IN HEART, SIGNAL = 1.2; SWISSPROT HIT: P41246, EVALUE 1.50e+00; EST_HUMAN HIT: BG698821.1, EVALUE 2.00e-91; NT HIT: AF009012.1, EVALUE 3.90e-02
ctcagcagtccttgtcatcaccccggatttccacgtagggcagccccacgggccaactgtcccgaggccagtagcggactttgagggtttcacctggcatctcatagttggcatccaccaaggccatggtgaccatgccataagggaaggtgatgctgatgagcacatgcctgtgg

SEQ ID NO: 16808 - DNA, 131 bp, Homo sapiens
  MAP TO CHR12.1; EXPRESSED IN HEART, SIGNAL = 0.86; EXPRESSED IN ADULT LIVER, SIGNAL = 1.2; EXPRESSED IN BONE MARROW, SIGNAL =   1; EXPRESSED IN BRAIN, SIGNAL = 0.82; SWISSPROT HIT: P37287, EVALUE 2.00e-17; EST_HUMAN HIT: AI417807.1, EVALUE 3.00e-58; NT HIT: X77457.1, EVALUE 6.00e-68
cttttgggagctttagaacacaagaatgttagaaatgtcttagttcaaggacatatttttcttaatacctcccttactgaagcattctgcatggcgatcatggaagcagccagctgtggtttacaggttgt

SEQ ID NO: 16809 - DNA, 314 bp, Homo sapiens
  MAP TO CHR9.1; EXPRESSED IN BONE MARROW, SIGNAL =   1; EXPRESSED IN FETAL LIVER, SIGNAL =   1; EXPRESSED IN LUNG, SIGNAL = 3.2; EXPRESSED IN BRAIN, SIGNAL = 0.61; NT HIT: gi7661677, EVALUE 0.00e+00; SWISSPROT HIT: P08645, EVALUE 2.00e-37; EST_HUMAN HIT: BG388299.1, EVALUE 0.00e+00
cactggagtttttctgttaatctgccgcactaggtcataaaagatctcattaacatttattttgaattttgtagaagaatctaagaatgcacagttgttccattgtcttgctagatttttgaccttcttccttccctacagctctttcatcttccaagtcatacttattaccaacaagaatcattggaacatcatcagtgtctttaactcaaagaatctgttctctcaagtcttgcaaatcattaaatgtggactgtgctttgatggaataaactaatgcaaagccttgtccatttctcatgtacaaatccctc

SEQ ID NO: 16810 - DNA, 432 bp, Homo sapiens
  MAP TO CHR19.1; EXPRESSED IN LUNG, SIGNAL = 0.81; EXPRESSED IN HEART, SIGNAL = 1.3; EXPRESSED IN PLACENTA, SIGNAL = 1.2; EXPRESSED IN FETAL LIVER, SIGNAL = 1.5; EXPRESSED IN BRAIN, SIGNAL = 1.6; EXPRESSED IN HELA, SIGNAL = 1.9; EXPRESSED IN BONE MARROW, SIGNAL = 1.3; EXPRESSED IN ADULT LIVER, SIGNAL = 1.6; NT HIT: AJ010154.1, EVALUE 2.60e-02; SWISSPROT HIT: P50090, EVALUE 1.70e-02; EST_HUMAN HIT: BF884008.1, EVALUE 2.00e-40
accgggcagtggagggccggtgtccaccatggaccagcagggcacgggagggggcatggaacaccatggagtggccagtggcagcagggggccgtccgcctgccggaatcacctgctcccaatagcccccgctggtgctgtcaaggcggaaacggaagaggccagaggagaagaggtcgtgcggggtgcggcctccagacacatatagccagacatcatccaccagggcagccgcgtgacctgccaggcctgggggccccgaggagctggaggcaggtggtgccaggagctcccagtggcccctgcccagtggactgaaggcccacacgtcgttggtgagcgagccgtcagccagctcaccacccatcagtaccagggagccggcccaggccacggccacatgggagtgacgggcagcctgtgaggaagaga

SEQ ID NO: 16811 - DNA, 109 bp, Homo sapiens
  MAP TO CHR19.1; EXPRESSED IN BONE MARROW, SIGNAL = 1.8; EXPRESSED IN ADULT LIVER, SIGNAL = 1.7; EXPRESSED IN FETAL LIVER, SIGNAL = 1.7; EXPRESSED IN LUNG, SIGNAL =   1; EXPRESSED IN BRAIN, SIGNAL = 1.9; EXPRESSED IN PLACENTA, SIGNAL = 1.4; EXPRESSED IN HELA, SIGNAL = 1.2; EXPRESSED IN HEART, SIGNAL = 1.5; SWISSPROT HIT: Q9Y2P7, EVALUE 2.00e-13; EST_HUMAN HIT: BG117509.1, EVALUE 1.00e-54; NT HIT: gi6677648, EVALUE 2.00e-30
aattcacactggagcaaagccttatgagtgtggccagtgtgggaaatcctttagtcaaaaagctaccctcattaaacaccagagagttcacactggagaaaggccttat

SEQ ID NO: 16812 - DNA, 208 bp, Homo sapiens
  MAP TO CHR17.1; EXPRESSED IN LUNG, SIGNAL = 0.85; EXPRESSED IN BRAIN, SIGNAL = 0.55; EXPRESSED IN HEART, SIGNAL = 0.99; EXPRESSED IN ADULT LIVER, SIGNAL = 1.2; EXPRESSED IN FETAL LIVER, SIGNAL = 0.68; SWISSPROT HIT: P11716, EVALUE 7.30e-02; EST_HUMAN HIT: AA808745.1, EVALUE 1.00e-113; NT HIT: gi14777849, EVALUE 4.70e-02
aaggactccagatcacagtcaaagtcgtcaaagggcatggtctccgctgaactgggctgggtagcttgtgtctccgtgacaaagttcactggctgcttctgtaggagctctgggtcgaaggccacaccccgaaagaaagggtggacctggaagtgatgcagataacgtagacgatggagggggttctggcataagagctgaaggaaaa

SEQ ID NO: 16813 - DNA, 275 bp, Homo sapiens
  MAP TO CHRX.1; EXPRESSED IN ADULT LIVER, SIGNAL = 2.4; EXPRESSED IN BONE MARROW, SIGNAL = 2.7; EXPRESSED IN PLACENTA, SIGNAL =   3; EXPRESSED IN LUNG, SIGNAL = 1.4; EXPRESSED IN BRAIN, SIGNAL =   2; EXPRESSED IN HEART, SIGNAL = 1.6; SWISSPROT HIT: Q13474, EVALUE 3.00e-47; EST_HUMAN HIT: BI553820.1, EVALUE 0.00e+00; NT HIT: gi14757195, EVALUE 0.00e+00
taccttaatagcctggatgtgctctgggagtgaatcaatgaagagatccccaatgggctcccaagtggctcggactccctcagcttggctcagagtagtgcttagttcctccattgccccttgaatctccaagagctgctccagagtccgctcaatgtgacggtgctggtccacacagcgggctgtcaacttctcccacagttcactggccaccgtcgcctgcttccatacaaagcggctgagattctggatccgctgtttcggggaggtatctg

SEQ ID NO: 16814 - DNA, 196 bp, Homo sapiens
  MAP TO CHR1.1; EXPRESSED IN HEART, SIGNAL = 0.92; EXPRESSED IN ADULT LIVER, SIGNAL = 0.61; EXPRESSED IN BONE MARROW, SIGNAL = 1.2; EXPRESSED IN BRAIN, SIGNAL = 1.2; EXPRESSED IN LUNG, SIGNAL = 0.65; SWISSPROT HIT: P22550, EVALUE 2.50e+00
aatcaatattagttacattgacctaaaagtcagtgctgagatagagagggcaaagtgaccagttaaggctctcttgggaagttatttcaagcacagtagcctgtccttggctcagagccttggtgttgaaattgcccaagacctggcaacttggcttagtttcctccactctggtctcctcacctttcacttccac

SEQ ID NO: 16815 - DNA, 174 bp, Homo sapiens
  MAP TO CHR10.1; EXPRESSED IN HELA, SIGNAL = 0.9; EXPRESSED IN BRAIN, SIGNAL = 1.4; EXPRESSED IN HEART, SIGNAL = 0.73; EXPRESSED IN ADULT LIVER, SIGNAL = 1.3; EXPRESSED IN BONE MARROW, SIGNAL = 0.9; EXPRESSED IN FETAL LIVER, SIGNAL =   1; NT HIT: gi14736929, EVALUE 1.00e-88; EST_HUMAN HIT: W03943.1, EVALUE 4.00e-18; SWISSPROT HIT: P49893, EVALUE 2.90e-01
cccagatggacttgggcattccagcaatgacaaagtgctgcaaccagctggatgtctgttatgacacttgcggtgccaacaaatatcgctgtgatgcaaaattccgatggtgtctccactcgatctgctctgaccttaagcggagtctgggctttgtctccaaagtggaaggta

SEQ ID NO: 16816 - DNA, 372 bp, Homo sapiens
  MAP TO CHR14.1; EXPRESSED IN ADULT LIVER, SIGNAL =   1; EXPRESSED IN BRAIN, SIGNAL = 0.49; EXPRESSED IN BONE MARROW, SIGNAL = 0.53; NT HIT: M97718.1, EVALUE 0.00e+00; EST_HUMAN HIT: AA427667.1, EVALUE 5.10e-01; SWISSPROT HIT: P04437, EVALUE 2.00e-28
caggggtgagtggccaacagaaggagaaaagtgaccagcagcaggtgaaacaaagtcctcaatctttgatagtccagaaaggagggatttcaattataaactgtgcttatgagaacactgcgtttgactactttccatggtaccaacaattccctgggaaaggccctgcattattgatagccatacgtccagatgtgagtgaaaagaaagaaggaagattcacaatctccttcaataaaagtgccaagcagttctcattgcatatcatggattcccagcctggagactcagccacctacttctgtgcagcaagcacacagtgctccccaggcacctgaagcctgtacccaaacctgcagttgaggttccagc

SEQ ID NO: 16817 - DNA, 159 bp, Homo sapiens
  MAP TO AC084117.2; EXPRESSED IN BRAIN, SIGNAL =  38; EXPRESSED IN ADULT LIVER, SIGNAL =  17; EXPRESSED IN LUNG, SIGNAL =  35; EXPRESSED IN HELA, SIGNAL =  25; EXPRESSED IN HEART, SIGNAL =  31; EXPRESSED IN BONE MARROW, SIGNAL =  48; EXPRESSED IN FETAL LIVER, SIGNAL =  36; EXPRESSED IN PLACENTA, SIGNAL =  35; NT HIT: gi14773070, EVALUE 8.00e-71; EST_HUMAN HIT: BG114545.1, EVALUE 8.00e-35; SWISSPROT HIT: Q9UPZ3, EVALUE 3.00e-16
ctctcagtgtcacacaagaaggatcgagtaagtgaagatataagtagccttccatccaaataatctaactgtacaacacaggagtcaacagttgtgattgtctgaacaggaaacatcacaaaagcagcagctgcctaaaaggaatgtgagaaagaaata

SEQ ID NO: 16818 - DNA, 158 bp, Homo sapiens
  MAP TO CHR3.1; EXPRESSED IN ADULT LIVER, SIGNAL = 0.83; EXPRESSED IN FETAL LIVER, SIGNAL = 0.99; EXPRESSED IN LUNG, SIGNAL = 0.93; EXPRESSED IN HELA, SIGNAL = 1.2; EXPRESSED IN BRAIN, SIGNAL =   1; EXPRESSED IN BONE MARROW, SIGNAL = 1.1; EXPRESSED IN HEART, SIGNAL = 0.62; NT HIT: X93921.1, EVALUE 6.00e-84; EST_HUMAN HIT: BG260493.1, EVALUE 9.00e-84; SWISSPROT HIT: Q63340, EVALUE 2.00e-24
cactgcctggcaggcatcagccgctcagtgacggtcactgtggcctatctgatgcagaagatgaacctgtcactcaacgacgcctacgactttgtcaagaggaaaaagtccaacatctcgcccaacttcaacttcatggggcagctgctggactttga

SEQ ID NO: 16819 - DNA, 336 bp, Homo sapiens
  MAP TO CHR7.1; EXPRESSED IN BONE MARROW, SIGNAL =   1; EXPRESSED IN HEART, SIGNAL = 0.8; EXPRESSED IN ADULT LIVER, SIGNAL = 0.75; EXPRESSED IN FETAL LIVER, SIGNAL = 1.3; EXPRESSED IN LUNG, SIGNAL = 1.4; EXPRESSED IN HELA, SIGNAL = 1.4; EXPRESSED IN BRAIN, SIGNAL = 0.91; SWISSPROT HIT: P14019, EVALUE 4.00e-35; NT HIT: M92441.1, EVALUE 7.00e-64; EST_HUMAN HIT: BG677655.1, EVALUE 9.00e-52
tatctgcctggctcagctgtgactctcactctagagtctggtggaaaatacttgtctgatgctgggttgattacactggtaatacttcagatttaagcctcacgtcctcagatccaggaaagcaactgccagtattaagcagttacattctgaaaccaaactcaactcccgtgtcaaagacacagtggacattggaggctgcctgcatgaaggtctcaggattggtacagctacttcctacatggaagctgacaccagtgacatcaatatttagttcttttgctcattccaaaagaagcctgctggctttgagcatggcaccagatttaacactga

SEQ ID NO: 16820 - DNA, 192 bp, Homo sapiens
  MAP TO AC068936.2; EXPRESSED IN BRAIN, SIGNAL = 1.7; EXPRESSED IN BONE MARROW, SIGNAL =   2; EXPRESSED IN HEART, SIGNAL = 0.95; EXPRESSED IN PLACENTA, SIGNAL = 1.5; EXPRESSED IN FETAL LIVER, SIGNAL =   2; EST_HUMAN HIT: BF349771.1, EVALUE 1.00e-103; SWISSPROT HIT: P34369, EVALUE 3.00e-20; NT HIT: AF092565.1, EVALUE 1.00e-103
accttatagttgatgacgacgttgttcttggctgtcatgtagtcggctatgttgtggtccacgatgaggcgcagcagcctgttgagcagagtcaagtcgatcttctcatacatcttctcaaagcgggattccagcatgacattgcactcgccttcactcgtctcccacacgtcctgcaggttattgatgcct

SEQ ID NO: 16821 - DNA, 203 bp, Homo sapiens
  MAP TO CHR19.1; EXPRESSED IN BONE MARROW, SIGNAL = 3.5; EXPRESSED IN HEART, SIGNAL =   4; EXPRESSED IN LUNG, SIGNAL =   5; EXPRESSED IN HELA, SIGNAL = 4.6; EXPRESSED IN BRAIN, SIGNAL = 5.1; EXPRESSED IN ADULT LIVER, SIGNAL = 3.1; EXPRESSED IN FETAL LIVER, SIGNAL = 4.7; EXPRESSED IN PLACENTA, SIGNAL = 3.7; SWISSPROT HIT: P97849, EVALUE 5.00e-27; EST_HUMAN HIT: BG828409.1, EVALUE 5.00e-89; NT HIT: AF023258.1, EVALUE 6.00e-63
cccatctgcccctctcccctctgccaggtgacgtgctagtgatggatgagctgggctacatgtacttccgggaccgtagcggggacaccttccgctggcgaggggagaacgtctccaccaccgaggtggagggcgtgctgagccgcctgctgggccagacagacgtggccgtctatggggtggctgttccaggcaagctgggg

SEQ ID NO: 16822 - DNA, 315 bp, Homo sapiens
  MAP TO CHR14.1; EXPRESSED IN HEART, SIGNAL = 0.55; EXPRESSED IN FETAL LIVER, SIGNAL = 0.48; EXPRESSED IN LUNG, SIGNAL = 0.69; EXPRESSED IN BRAIN, SIGNAL = 0.49; EST_HUMAN HIT: AV717873.1, EVALUE 0.00e+00; SWISSPROT HIT: Q9NVP1, EVALUE 5.00e-51; NT HIT: gi14742950, EVALUE 0.00e+00
tggcaaaagtttaataatttgttttaattcctcttcaaactcaacatccaagatacgatcagcttcatcgataaccagacactgcagatttttatacataaaccctgggatattctgcatatggtccagcagacagcctggtgtgaccacagtgatgttgatcccattagcaagtttctgtgcttcagcagatctattactgccacccattatcaacccataggtatgcacgtggtgactcattagctccttaagaacaccaaaagtttgcatggctagttctctagtaggtgagagaataaggacccctgttcc

SEQ ID NO: 16823 - DNA, 194 bp, Homo sapiens
  MAP TO CHR17.1; EXPRESSED IN HEART, SIGNAL = 1.4; EXPRESSED IN PLACENTA, SIGNAL = 1.8; EXPRESSED IN FETAL LIVER, SIGNAL = 1.6; EXPRESSED IN LUNG, SIGNAL = 1.4; EXPRESSED IN HELA, SIGNAL = 2.5; EXPRESSED IN BRAIN, SIGNAL = 1.6; EXPRESSED IN BONE MARROW, SIGNAL = 1.7; EXPRESSED IN ADULT LIVER, SIGNAL = 1.7; NT HIT: gi7661933, EVALUE 1.00e-101; EST_HUMAN HIT: BF892706.1, EVALUE 1.00e-101; SWISSPROT HIT: P16128, EVALUE 5.60e+00
tctctttcagtccctcctgctttttagccggtctttggacaccaatggtgactgctcccgcctggtggccgatggctggctggagctgcagctagcagacagtgaaagtgccatccgactcctggcggcttccctgcggctccgtgcccgctgggaaagtgccctggaccggcagctggcgcaccaggcccagc

SEQ ID NO: 16824 - DNA, 267 bp, Homo sapiens
  MAP TO CHR13.1; EXPRESSED IN HELA, SIGNAL = 1.5; EXPRESSED IN LUNG, SIGNAL = 0.82; EXPRESSED IN BRAIN, SIGNAL = 0.88; EXPRESSED IN HEART, SIGNAL = 0.89; EXPRESSED IN BONE MARROW, SIGNAL = 0.89; EXPRESSED IN ADULT LIVER, SIGNAL = 0.84; NT HIT: gi14757710, EVALUE 0.00e+00; EST_HUMAN HIT: AU131381.1, EVALUE 0.00e+00; SWISSPROT HIT: P48566, EVALUE 1.00e-07
cctcacctgcagcgacatcatgtcaggtctgtactgcttgcggaagccgaggtcatacatgaggaatttcagcatttcaaaggcttgctcttcactcatgtgcagaagcaggactccagccacaaagctgatcccctgacagtatcccacttctttgtccagcaaagaataggctttcaggaggttaaacagtgacagctgtcctggcccaagctgtactgaaaagtaagggtgagtaggaaacgtccttcctgcagaggaaaagaa

SEQ ID NO: 16825 - DNA, 214 bp, Homo sapiens
  MAP TO CHR12.1; EXPRESSED IN FETAL LIVER, SIGNAL = 0.78; EXPRESSED IN LUNG, SIGNAL = 0.66; EXPRESSED IN HELA, SIGNAL = 1.1; EXPRESSED IN BRAIN, SIGNAL = 0.97; EXPRESSED IN BONE MARROW, SIGNAL = 0.91; NT HIT: Y12056.1, EVALUE 1.00e-117; EST_HUMAN HIT: W27169.1, EVALUE 1.00e-111; SWISSPROT HIT: P16520, EVALUE 5.00e-36
tggcagtgccttgtgggacattgagactgggcagcagaagactgtatttgtgggacacacgggtgactgcatgagcctggctgtgtctcctgacttcaatctcttcatttcgggggcctgtgatgccagtgccaagctctgggatgtgcgagaggggacctgccgtcagactttcactggccacgagtcggacatcaacgccatctgtgtgagt

SEQ ID NO: 16826 - DNA, 270 bp, Homo sapiens
  MAP TO CHR1.1; EXPRESSED IN FETAL LIVER, SIGNAL = 0.41; EXPRESSED IN BRAIN, SIGNAL = 0.47; EXPRESSED IN HEART, SIGNAL = 0.78; SWISSPROT HIT: P23249, EVALUE 2.00e-28; NT HIT: gi16161881, EVALUE 0.00e+00; EST_HUMAN HIT: AU132387.1, EVALUE 0.00e+00
agttaccggtcaggtctctctccttcctctatccgattggtcaccacagggtttccggtgatccgggtccgcttgaagggagtcatgggcttcagctgtgcagccagggggctgtgggcgacggcagccaagaagcgggcaatgtagaatgtgccggctccttctgaacccgactccccaggtcccagcagctcccagagcactgtggctgggaagtagcccacaaagctggtcttacaatggacatggagttcatagcattcacctgga

SEQ ID NO: 16827 - DNA, 216 bp, Homo sapiens
  MAP TO CHR7.1; EXPRESSED IN BRAIN, SIGNAL = 0.54; EXPRESSED IN HEART, SIGNAL = 0.81; EXPRESSED IN LUNG, SIGNAL = 0.58; SWISSPROT HIT: P32525, EVALUE 3.40e-01; EST_HUMAN HIT: BF343701.1, EVALUE 1.80e-02
gtcaacctggatgctgtctggaatgtagttgttccacaggaaatcctcattaactattggttgcactacaatgtttgagactctatctccatctcgagaaaaatctgtgacagcagtgtagtacacaaaagtgtggctacaggttccattagcacaggaagatgtctggagaaggtccacatgacaggaagacagtgccaaatttaagcctaggtg

SEQ ID NO: 16828 - DNA, 151 bp, Homo sapiens
  MAP TO CHR19.1; EXPRESSED IN HELA, SIGNAL = 1.6; EXPRESSED IN FETAL LIVER, SIGNAL = 1.5; EXPRESSED IN LUNG, SIGNAL = 1.2; EXPRESSED IN BRAIN, SIGNAL = 1.4; EXPRESSED IN HEART, SIGNAL = 1.1; EXPRESSED IN BONE MARROW, SIGNAL = 1.6; EST_HUMAN HIT: AA699986.1, EVALUE 1.00e-70; SWISSPROT HIT: Q08477, EVALUE 4.00e-20; NT HIT: gi14767694, EVALUE 8.00e-71
tgtgggcacctttggggatgactcggccatctgggagaacaatgtcctgggtgcagcatcgggagatgaagggagctgggggatgtaacctcaggctctccttcacgcacatggtcaggaagggcagctgggccaggtcgtccctaaggaa

SEQ ID NO: 16829 - DNA, 276 bp, Homo sapiens
  MAP TO CHR9.1; EXPRESSED IN FETAL LIVER, SIGNAL = 0.36; EXPRESSED IN BRAIN, SIGNAL = 0.46; EXPRESSED IN HEART, SIGNAL = 0.57; EST_HUMAN HIT: AI219933.1, EVALUE 0.00e+00; SWISSPROT HIT: P47709, EVALUE 2.30e+00; NT HIT: gi14783215, EVALUE 0.00e+00
cctggctgtcaccggtgcttgggcgggatcaccaccagcggctgcccgtacttgggccgccacatgaggacctgggcatcgttggcattgggcttgaccagggcgctgggcgggatgggctcattcttgctcaggattttgggctggtcctgggcgatgggctcccgcagccgggcgcgctggcccaggggccggttggggttcacctcgatgctgagctgcatgcgccagtgcagcgtctgcaggatgatcatgtcgttggtggaggtgttggtg

SEQ ID NO: 16830 - DNA, 199 bp, Homo sapiens
  MAP TO CHR11.1; EXPRESSED IN PLACENTA, SIGNAL =   3; EXPRESSED IN FETAL LIVER, SIGNAL = 2.9; EXPRESSED IN HELA, SIGNAL = 3.8; EXPRESSED IN BRAIN, SIGNAL = 2.9; EXPRESSED IN HEART, SIGNAL = 1.4; EXPRESSED IN BONE MARROW, SIGNAL = 3.5; EXPRESSED IN ADULT LIVER, SIGNAL = 1.2; EXPRESSED IN LUNG, SIGNAL = 1.3; EST_HUMAN HIT: BF573106.1, EVALUE 2.60e-01; SWISSPROT HIT: P07387, EVALUE 2.50e+00; NT HIT: AJ006345.1, EVALUE 1.00e-107
ctctgcccttggcatccccgtcccccacctgggctctggcagagaagtcaggcgggaagaagccggctgagtgcccgccactgtaagaggaaacgaagagaaacagctccagtcagccccagaagcgaggcctggaaaaactctgcagctggagctaacacaaaggacttttcagaccctgcagccaaggtgcccagtg

SEQ ID NO: 16831 - DNA, 174 bp, Homo sapiens
  MAP TO CHR11.1; EXPRESSED IN FETAL LIVER, SIGNAL = 2.3; EXPRESSED IN LUNG, SIGNAL = 2.5; EXPRESSED IN HELA, SIGNAL = 1.4; EXPRESSED IN BRAIN, SIGNAL = 2.1; EXPRESSED IN HEART, SIGNAL = 1.9; EXPRESSED IN ADULT LIVER, SIGNAL = 1.9; EXPRESSED IN BONE MARROW, SIGNAL = 2.6; NT HIT: gi15312183, EVALUE 1.00e-54; EST_HUMAN HIT: AA378560.1, EVALUE 3.00e-87; SWISSPROT HIT: Q13190, EVALUE 1.00e-13
tgaacctgcttttaactgttaaggtgtgccacatcctgttttctcccccaggcggtggtgctgtggttctgggggcagagtcccatgcctccaaggatgtcgccatcgacatgatggactctcggaccagccagcagctgcagctcattgacgagcaggtacccaggctctgaa

SEQ ID NO: 16832 - DNA, 213 bp, Homo sapiens
  MAP TO CHR17.1; EXPRESSED IN LUNG, SIGNAL = 0.96; EXPRESSED IN FETAL LIVER, SIGNAL = 0.94; EXPRESSED IN HELA, SIGNAL = 1.1; EXPRESSED IN BRAIN, SIGNAL =   1; EXPRESSED IN HEART, SIGNAL = 0.75; NT HIT: AF395009.1, EVALUE 1.00e-116; EST_HUMAN HIT: AW950474.1, EVALUE 1.00e-111; SWISSPROT HIT: P07359, EVALUE 5.00e-35
cctggagctgcagaggggacggcaagtgacagtgccccgggcctggctgctcttccttcgaggttcgcttcccactttccgctccagcctcttcctgtgggtacggcctaatggccgtgtggggcctctagtggcaggaaggaggccctcagctctgagtcagggtcgtggtcaggacctgctgagcacagtgagcattaggtactctggcca

SEQ ID NO: 16833 - DNA, 270 bp, Homo sapiens
  MAP TO CHR5.1; EXPRESSED IN FETAL LIVER, SIGNAL = 0.84; EXPRESSED IN HELA, SIGNAL = 0.72; EXPRESSED IN BRAIN, SIGNAL = 0.93; EXPRESSED IN ADULT LIVER, SIGNAL = 0.79; NT HIT: AY008847.1, EVALUE 0.00e+00; EST_HUMAN HIT: BF204907.1, EVALUE 9.20e-02; SWISSPROT HIT: P29460, EVALUE 4.00e-41
tttaaaatatcagtggaccaaattccatcttcctttttgtgaagcagcaggagcgaatggcttagaacctcgcctcctttgtgacaggtgtactggccagcatctccaaactctttgacttggatggtcagggttttgccagagcctaagacctcactgctctggtccaaggtccaggtgataccatcttcttcaggggtgtcacaggtgaggaccaccatttctccaggggcatccggataccaatccaattctacgacataaactgga

SEQ ID NO: 16834 - DNA, 202 bp, Homo sapiens
  MAP TO CHR19.1; EXPRESSED IN FETAL LIVER, SIGNAL = 2.2; EXPRESSED IN LUNG, SIGNAL = 2.4; EXPRESSED IN HELA, SIGNAL = 2.6; EXPRESSED IN BRAIN, SIGNAL = 2.6; EXPRESSED IN HEART, SIGNAL = 2.4; EXPRESSED IN BONE MARROW, SIGNAL = 2.3; EXPRESSED IN ADULT LIVER, SIGNAL = 2.2; SWISSPROT HIT: P05891, EVALUE 1.10e+00; NT HIT: gi14767767, EVALUE 1.00e-45; EST_HUMAN HIT: BI768177.1, EVALUE 9.00e-97
gttatccttgtagtcctccatagctactttttctaactcggggcctccttctgccacaaagcgggccaatttctctatcactttccgagtctcggctccctctgggggtgaaactttaaggaggctgtcagtactggggttcaactcacacaccccacagtcaataggcacactctctctatggaccacaacgacagagggg

SEQ ID NO: 16835 - DNA, 361 bp, Homo sapiens
  MAP TO CHR12.1; EXPRESSED IN HELA, SIGNAL = 0.77; EXPRESSED IN BRAIN, SIGNAL = 0.81; EXPRESSED IN PLACENTA, SIGNAL = 4.1; SWISSPROT HIT: Q13936, EVALUE 6.00e-58; NT HIT: Z26282.1, EVALUE 0.00e+00; EST_HUMAN HIT: AA443875.1, EVALUE 1.00e-102
cagagggccggtggcctgttcggcaaccacgtcagctactaccaaagcgacggccggagcgccttcccccagaccttcaccactcagcgcccgctgcacatcaacaaggcgggcagcagccagggcgacactgagtcgccatcccacgagaagctggtggactccaccttcaccccgagcagctactcgtccaccggctccaacgccaacatcaacaacgccaacaacaccgccctgggtcgcctccctcgccccgccggctaccccagcacggtcagcactgtggagggccacgggccccccttgtcccctgccatccgggtgcaggaggtggcgtggaagctcagctccaacaggtaag

SEQ ID NO: 16836 - DNA, 208 bp, Homo sapiens
  MAP TO CHRX.1; EXPRESSED IN HELA, SIGNAL =   3; EXPRESSED IN BRAIN, SIGNAL = 3.4; EXPRESSED IN LUNG, SIGNAL = 1.2; EXPRESSED IN HEART, SIGNAL = 1.1; EXPRESSED IN BONE MARROW, SIGNAL = 3.7; EXPRESSED IN FETAL LIVER, SIGNAL = 3.4; EST_HUMAN HIT: AA043433.1, EVALUE 4.00e-03; SWISSPROT HIT: P22105, EVALUE 2.00e-08; NT HIT: gi13649009, EVALUE 1.00e-110
acctgttgagcagtcagatcctgtccacttgggatcacagctgcatactccagcgtccagaagaaaagttccgtgtcctgagcactgctcttgacatacaggaagtggtgtttcacagttaactcctccccagccagtagaacagtgacattctccttttacacagatgccatggttggaacacattgggtctaggcagtcctctgaa

SEQ ID NO: 16837 - DNA, 226 bp, Homo sapiens
  MAP TO CHRX.1; EXPRESSED IN FETAL LIVER, SIGNAL = 1.6; EXPRESSED IN BRAIN, SIGNAL = 0.84; EXPRESSED IN LUNG, SIGNAL = 0.67; EXPRESSED IN HEART, SIGNAL = 0.84; EXPRESSED IN BONE MARROW, SIGNAL = 1.2; SWISSPROT HIT: P51858, EVALUE 7.00e-19; EST_HUMAN HIT: BG114800.1, EVALUE 2.00e-48; NT HIT: gi16161715, EVALUE 4.00e-46
aggactcccctaaatgtcccaaggaagcagaaaaccctgaaggggagaagaaggaggcagccaccttggaaggtgagaagacacttcttgtggaggtggaaaagaatagcaccctctctgagcccggctctggccgggggcctccccaagaggaagaagaggaggaggaagaggaagaggctgccaatgaagatgctgagaccccaggcatcagagatcatgagag

SEQ ID NO: 16838 - DNA, 186 bp, Homo sapiens
  MAP TO CHR15.1; EXPRESSED IN HELA, SIGNAL = 0.68; EXPRESSED IN BRAIN, SIGNAL = 1.2; EXPRESSED IN HEART, SIGNAL = 1.4; EXPRESSED IN LUNG, SIGNAL = 1.4; EST_HUMAN HIT: AA907129.1, EVALUE 9.60e-01; SWISSPROT HIT: Q9UPM8, EVALUE 1.00e-18; NT HIT: AF155156.2, EVALUE 4.00e-64
tttctttttctagctattttgtttgaatgtgtgcatacagtctattctatttatcctaaatcggaattacttgagaaggctgccaagtgcattggaaaatttgttctgtcacctaaaataaatctaaaatatttaggtaagatgattggttcttttgacagaaattacagagatagcttttgaaat

SEQ ID NO: 16839 - DNA, 244 bp, Homo sapiens
  MAP TO CHRX.1; EXPRESSED IN FETAL LIVER, SIGNAL = 0.42; EXPRESSED IN LUNG, SIGNAL = 0.64; EXPRESSED IN BRAIN, SIGNAL = 0.47; EXPRESSED IN HEART, SIGNAL = 0.72; NT HIT: U09277.1, EVALUE 2.20e-01; EST_HUMAN HIT: AV697720.1, EVALUE 8.30e-02; SWISSPROT HIT: P37881, EVALUE 1.60e-01
agactggctctcttatgccaagagctggcccccctcccactcaggcttcccattgtatccagaggctctagttggcaatggcagaggctcccttgctccctcggcattaaaatgcaaagagaagcagggctgcttgctggcaggaggccagggaggaccagcaggtcacctagtccatggcaggcttcattctaggcagattgttgctcaatttcttttgcttgggctctggtggattctagag

SEQ ID NO: 16840 - DNA, 204 bp, Homo sapiens
  MAP TO AC021705.4; EXPRESSED IN BRAIN, SIGNAL = 0.81; EXPRESSED IN BONE MARROW, SIGNAL = 0.75; EXPRESSED IN ADULT LIVER, SIGNAL = 1.3; EXPRESSED IN LUNG, SIGNAL = 0.74; NT HIT: Y13443.1, EVALUE 1.00e-111; EST_HUMAN HIT: BF876996.1, EVALUE 1.00e-102; SWISSPROT HIT: O08789, EVALUE 3.00e-31
ccagtccctgaagaggaaggagaaggaatatgagcatgaaatggagcggctggcacgtgagaagattgccacgcagcagcggctggcagagctcaagcacgagctgagccagtggatggacgtactggagattgaccgcgtgctgcggcagacgggccagcccgaggatgaccaggcctccacctccaccgcctctggtgagcc

SEQ ID NO: 16841 - DNA, 297 bp, Homo sapiens
  MAP TO CHR2.1; EXPRESSED IN FETAL LIVER, SIGNAL = 2.1; EXPRESSED IN BRAIN, SIGNAL = 1.2; EXPRESSED IN BONE MARROW, SIGNAL = 1.3; EXPRESSED IN ADULT LIVER, SIGNAL = 1.7; SWISSPROT HIT: O17438, EVALUE 3.00e-07; NT HIT: AF318278.1, EVALUE 7.00e-42; EST_HUMAN HIT: BF349143.1, EVALUE 1.00e-117
caccaggctctctgggtatatgcacaataggaggattgccccagaaagctcggagcttaggttcaagggctgggtcagtaaccacaaccactctgaggtcccccggaagtttttccagcctggcatcttgcagtagcccctggagtgaatctgatgccaccgaccgctcctgagcctcatctagtaccagcacgccccaggctccagtgcctcgggtcgaggccacctcctgcagaagcagcctgtcccagcagaacctgttgacattggtagtgggcagaggaatcagtgtggaca

SEQ ID NO: 16842 - DNA, 160 bp, Homo sapiens
  MAP TO CHR17.1; EXPRESSED IN BRAIN, SIGNAL = 0.84; EXPRESSED IN HEART, SIGNAL = 1.2; EXPRESSED IN PLACENTA, SIGNAL = 1.3; EXPRESSED IN LUNG, SIGNAL = 1.1; EXPRESSED IN HELA, SIGNAL = 1.1; SWISSPROT HIT: P04626, EVALUE 1.00e-24; NT HIT: M16790.1, EVALUE 2.00e-83; EST_HUMAN HIT: BI755753.1, EVALUE 6.00e-82
cagtgtgcaccggcacagacatgaagctgcggctccctgccagtcccgagacccacctggacatgctccgccacctctaccagggctgccaggtggtgcagggaaacctggaactcacctacctgcccaccaatgccagcctgtccttcctgcaggtgag

SEQ ID NO: 16843 - DNA, 308 bp, Homo sapiens
  MAP TO CHR7.1; EXPRESSED IN BONE MARROW, SIGNAL = 1.3; EXPRESSED IN ADULT LIVER, SIGNAL = 0.58; EXPRESSED IN HELA, SIGNAL = 0.97; EXPRESSED IN FETAL LIVER, SIGNAL = 1.2; EXPRESSED IN BRAIN, SIGNAL = 1.1; EXPRESSED IN LUNG, SIGNAL = 1.2; EXPRESSED IN HEART, SIGNAL = 0.61; EST_HUMAN HIT: Z39065.1, EVALUE 2.00e-77; SWISSPROT HIT: P51350, EVALUE 8.20e+00; NT HIT: gi14752659, EVALUE 2.00e-30
caaatagcaacagtgtaatttcttacagattattatttcaccaacagatttaactacaccactaaaaaaacgaagattttatcagttgctagattcggtttactcagaaacctccacacctactccttccccgtatgctacaccaactcacaccgatattactcctatggacccatcttttgccacgcctccacggataaaatcagatgatgaaacttgtagaaatggttataaacccatatattcaccagttaccccagtaactcctggtacaccaggaaataccatgcactttgaggtgagaaatt

SEQ ID NO: 16844 - DNA, 199 bp, Homo sapiens
  MAP TO CHR7.1; EXPRESSED IN HELA, SIGNAL = 0.63; EXPRESSED IN BRAIN, SIGNAL = 0.88; EXPRESSED IN BONE MARROW, SIGNAL = 0.94; EXPRESSED IN FETAL LIVER, SIGNAL = 0.82; EST_HUMAN HIT: AW993165.1, EVALUE 1.00e-104; SWISSPROT HIT: Q02446, EVALUE 2.00e-37; NT HIT: gi4507168, EVALUE 1.00e-104
tgaaccaggaaaaaagaagcagcatatctgtcatattgaaggatgtggtaaagtttatggcaaaacatctcatttacgagcacatcttcgctggcatactggagaaagaccttttatatgcaactggatgttttgtggcaaaagattcacacggagtgatgagctccagagacatagaagaacccatacaggttagttg

SEQ ID NO: 16845 - DNA, 348 bp, Homo sapiens
  MAP TO CHR6.1; EXPRESSED IN ADULT LIVER, SIGNAL = 0.63; EXPRESSED IN BONE MARROW, SIGNAL = 1.2; EXPRESSED IN BRAIN, SIGNAL = 0.97; NT HIT: AF262697.1, EVALUE 5.10e+00; SWISSPROT HIT: Q9UGF5, EVALUE 8.00e-59
cattaatgagattgcactggctgcattcacaacgtctgcagcatttatctgtttgatctccattgtgctctcctacattcgcatcttctctacagtgctgagaatcccatcagctgagggccggaccaaggtcttctccacctgcctaccacacctatttgtagccaccttctttctttcagctgcaggctttgagtttctcagactgccttctgattcctcatcgactgtggaccttgtattctccgtattctatactgtgatacctccaacactcaatccagtcatttatagcttacggaatgattccatgaaggcagcactgaggaagatgctgtcaaaggaaga

SEQ ID NO: 16846 - DNA, 140 bp, Homo sapiens
  MAP TO CHR17.1; EXPRESSED IN HELA, SIGNAL = 0.41; EXPRESSED IN BRAIN, SIGNAL = 0.69; EXPRESSED IN HEART, SIGNAL = 0.51; EXPRESSED IN BONE MARROW, SIGNAL = 0.64; NT HIT: gi14770568, EVALUE 7.00e-68; EST_HUMAN HIT: BG121266.1, EVALUE 7.00e-01; SWISSPROT HIT: Q39575, EVALUE 2.30e-01
cgcacctcgcgggaggcaagcctgtggaaggtgtccagcagaagcacgccgtgcggcacgtcccgcaccaactcgaaggctgaggtgatcaggttctgggtcatcacctccaggtccttgattccggcacggaacctgca

SEQ ID NO: 16847 - DNA, 208 bp, Homo sapiens
  MAP TO CHR11.1; EXPRESSED IN HELA, SIGNAL = 1.2; EXPRESSED IN BRAIN, SIGNAL = 1.1; EXPRESSED IN LUNG, SIGNAL = 0.6; EXPRESSED IN HEART, SIGNAL = 0.67; EXPRESSED IN BONE MARROW, SIGNAL = 1.1; NT HIT: AJ249369.1, EVALUE 1.00e-109; EST_HUMAN HIT: BE222940.1, EVALUE 1.00e-107; SWISSPROT HIT: O76082, EVALUE 2.00e-03
caggcagacaggcatgggaatgggcagcaccatggcccgagtgggcagcatcgtgagcccactggtgagcatgactgccgagctctacccctccatgcctctcttcatctacggtgctgttcctgtggccgccagcgctgtcactgtcctcctgccagagacctgggccagccactgccagacacggtgcaggacctggagagcaggt

SEQ ID NO: 16848 - DNA, 489 bp, Homo sapiens
  MAP TO CHR14.1; EXPRESSED IN PLACENTA, SIGNAL = 2.5; EXPRESSED IN FETAL LIVER, SIGNAL = 3.2; EXPRESSED IN HELA, SIGNAL = 3.4; EXPRESSED IN BRAIN, SIGNAL = 2.4; EXPRESSED IN LUNG, SIGNAL = 1.5; EXPRESSED IN HEART, SIGNAL = 1.5; EXPRESSED IN BONE MARROW, SIGNAL =   3; SWISSPROT HIT: Q9ULJ3, EVALUE 3.00e-03; NT HIT: gi14749612, EVALUE 0.00e+00; EST_HUMAN HIT: AL135158.1, EVALUE 0.00e+00
cttacctgaatttcttcattttcgtctactaggaggaaactcacaaccttctcagtcatcttcttcctcttggtctcctcatccatctcttctgcctccagtgactcctggagattactgacattgtacacagtaacagggtgtctccttttgttacccccagaatgagtcctcttctggcactccaggcacaagttaattttgcaggtctggcacctcactattgccctctgcctaacacctggtaaatgcccactgagacccttgcagaggtcacagtaagggacatggccaggtttgagtcttatccgctcatggtttctcaggcgctcctgccgatggagctcctcctcgcagcggagacactgcagactgcagcactcatcacactcaaagatagcttcatcagtcccgctgcaagcgtaactttcctggcacatcagccccggattcaggcccttctctgctggggaagtctgggcactcata

SEQ ID NO: 16849 - DNA, 421 bp, Homo sapiens
  MAP TO CHR6.1; EXPRESSED IN BRAIN, SIGNAL = 0.84; EXPRESSED IN LUNG, SIGNAL =   1; EXPRESSED IN HEART, SIGNAL = 1.6; EXPRESSED IN ADULT LIVER, SIGNAL = 1.7; SWISSPROT HIT: P13619, EVALUE 5.00e-53; NT HIT: gi14739401, EVALUE 0.00e+00; EST_HUMAN HIT: BE620027.1, EVALUE 0.00e+00
ataactggctgtgcttgagccttctttgccagcagctttaggttggcaatgcacttggcaattgtctccttttcctgctgtgcagagatgctctgcaccacgtgcttctccacccaatttatcatgtgttcttgtttctttcgaagcatcatgttctgcacagttatatgatagtccaggtgattctttacttccttatatagtctatgcagtcgttcccagtaacctccaaagccatagcaatgttgtttttctgcacatcaaaaaggtaatggtgcttctgaacgagtgcctgctgtgacttctccaaatcagttgcatcctggatttgtctgatagaagcctgcttcacctcttctagttgggcaattttttgctcattgaatttttcagcaaaatctccaatagaggcgcgatattt

SEQ ID NO: 16850 - DNA, 168 bp, Homo sapiens
  MAP TO CHRX.1; EXPRESSED IN ADULT LIVER, SIGNAL = 0.9; EXPRESSED IN LUNG, SIGNAL = 0.9; EXPRESSED IN HELA, SIGNAL = 1.1; EXPRESSED IN BRAIN, SIGNAL =   1; EXPRESSED IN BONE MARROW, SIGNAL = 1.1; EXPRESSED IN HEART, SIGNAL =   1; SWISSPROT HIT: Q93008, EVALUE 5.00e-20; NT HIT: gi14764091, EVALUE 9.00e-71; EST_HUMAN HIT: AW996853.1, EVALUE 5.00e-73
atagtttattttagcttacaatacatacctctagcatatagtctcatgctttccatgtaagttgcaaggttttctgctaccaaagtaactagggcatgattgtgttgaagttgattgattaagtcatggcgataaaacacatggggacttcgctgagtttgactgaaa

SEQ ID NO: 16851 - DNA, 169 bp, Homo sapiens
  MAP TO CHRX.1; EXPRESSED IN BRAIN, SIGNAL = 0.93; EXPRESSED IN HEART, SIGNAL = 1.8; EXPRESSED IN PLACENTA, SIGNAL = 3.7; EXPRESSED IN FETAL LIVER, SIGNAL = 2.4; EXPRESSED IN LUNG, SIGNAL =   5; SWISSPROT HIT: Q9Y3K8, EVALUE 9.00e-26; NT HIT: AF188178.1, EVALUE 2.00e-90; EST_HUMAN HIT: BI467209.1, EVALUE 9.00e-81
gttcaacagctccagctggaggccgggctcaacagcgtaaaagtttcccaggcagctgcagacttgaaacaattctgtctgcagaatgctcaacatgaccctctgctgactggagtatcttcaagtacaaatcccttcagaccccagaaagtctgttcctttttgtagt

SEQ ID NO: 16852 - DNA, 102 bp, Homo sapiens
  MAP TO CHR14.1; EXPRESSED IN ADULT LIVER, SIGNAL = 6.1; EXPRESSED IN HELA, SIGNAL = 7.1; EXPRESSED IN BRAIN, SIGNAL = 3.6; EXPRESSED IN LUNG, SIGNAL = 9.7; EXPRESSED IN HEART, SIGNAL = 4.1; EST_HUMAN HIT: AW575538.1, EVALUE 3.00e-48; NT HIT: gi16157353, EVALUE 2.00e-48
aattctgccactttcatttcacttcctgaaagtcagggtcggcttgtgaaaagttgttaaacaacatgctaaatgtgaaatgtcaaccctcactctaaactt

SEQ ID NO: 16853 - DNA, 327 bp, Homo sapiens
  MAP TO CHR16.1; EXPRESSED IN BRAIN, SIGNAL = 6.1; EXPRESSED IN HEART, SIGNAL = 4.4; EXPRESSED IN ADULT LIVER, SIGNAL = 6.8; EXPRESSED IN BONE MARROW, SIGNAL = 5.7; EXPRESSED IN FETAL LIVER, SIGNAL = 5.6; EXPRESSED IN PLACENTA, SIGNAL = 7.8; EXPRESSED IN LUNG, SIGNAL = 4.2; EXPRESSED IN HELA, SIGNAL = 6.6; EST_HUMAN HIT: BI752318.1, EVALUE 0.00e+00; SWISSPROT HIT: P16927, EVALUE 1.40e+00; NT HIT: gi15316033, EVALUE 0.00e+00
gtactcacagggtcggtgagcatggttctcaggtgggatgacagggcaagcacggccaagcagttaaagatgaccccgttgaccacagagtaccagaagtctttggaaggcagcagcatgacgaaagtcaccacgaagtctgcataggcgaccagaagccacgtcatgacagcacagatcatgccgcagccgtcacggatgaaccagacccggtcagccacgtcagcctcggaggaggaggacgatgaagagtcatagttgtcattttcagccaggagaggatgatgctcgacgtcccggagcctgtgtcctgatggctgcatgatt

SEQ ID NO: 16854 - DNA, 285 bp, Homo sapiens
  MAP TO CHR6.1; EXPRESSED IN ADULT LIVER, SIGNAL = 1.1; EXPRESSED IN BRAIN, SIGNAL = 0.7; NT HIT: gi13631371, EVALUE 0.00e+00; EST_HUMAN HIT: AL548001.1, EVALUE 0.00e+00; SWISSPROT HIT: P15311, EVALUE 5.00e-48
gctcacctttgagggatcagccgctcagagctgaggtacccagacttgtgcacttctttgttgtagtccccaaacttggcctgcacagcgtaggaccccaagagcacggcagtctcaggggggcagtagatctcatcgctaaggattccttccttcacttggaggaagaaaagtttctgggtgatgtcctggatgagctcctcagccacatcttcagggtagaacttggcccggaacttgaactggaggggattctccttcctgacctcctgggcagacacctgc

SEQ ID NO: 16855 - DNA, 206 bp, Homo sapiens
  MAP TO CHR19.1; EXPRESSED IN BRAIN, SIGNAL = 1.7; EXPRESSED IN HEART, SIGNAL = 1.5; EXPRESSED IN PLACENTA, SIGNAL = 3.8; EXPRESSED IN FETAL LIVER, SIGNAL = 1.8; EXPRESSED IN LUNG, SIGNAL = 2.3; NT HIT: AF354258.1, EVALUE 1.00e-112; EST_HUMAN HIT: BF755432.1, EVALUE 1.00e-110
aggccggctgcgtgcacttttcctacaaagcatcgtgtgagatccgcgtgcttatgctcctgtactcttcagagaagaaaatcttcattggcctcatcccccatgaccagggcaactttgtcaacggcatccggcgtgtcattgccaaccagcagcaggtcctgcagcggaacctggagcaggagcaacagcaacgaggggtgagg

SEQ ID NO: 16856 - DNA, 226 bp, Homo sapiens
  MAP TO CHR17.1; EXPRESSED IN ADULT LIVER, SIGNAL = 2.2; EXPRESSED IN FETAL LIVER, SIGNAL = 2.3; EXPRESSED IN BRAIN, SIGNAL = 2.3; EXPRESSED IN LUNG, SIGNAL = 1.9; EXPRESSED IN HEART, SIGNAL = 1.5; EXPRESSED IN BONE MARROW, SIGNAL = 2.1; NT HIT: gi11426182, EVALUE 1.00e-116; EST_HUMAN HIT: BF526330.1, EVALUE 1.00e-116; SWISSPROT HIT: Q9JHD2, EVALUE 6.00e-35
ggggacgcacgggtcaaagacgaggcgggcgatatactccttaggcatgcgcggcagctggtgggaaaagacattctgcagccccacgagccacagcaacacccgccggttggccttgggcgtcagtgagttgccgatgacatggaactcgatgatgccgcggcgctcctccaggcgggctgtctcatcccgggccgcattggccgaaagcaggctcgtctgggca

SEQ ID NO: 16857 - DNA, 148 bp, Homo sapiens
  MAP TO CHR7.1; EXPRESSED IN HELA, SIGNAL = 0.38; EXPRESSED IN BRAIN, SIGNAL = 0.63; NT HIT: X64415.1, EVALUE 1.30e-01; EST_HUMAN HIT: AA278504.1, EVALUE 7.40e-01
atcaccagaaaatgggtgattcaaagggacaattttcagaccgaatgaattcacttgaaatgaatgccaaccttaactgaattaagctgtgctctttcaaatccactgctgtgagttcagtagacagttgtctggattttacatagct

SEQ ID NO: 16858 - DNA, 219 bp, Homo sapiens
  MAP TO CHR17.1; EXPRESSED IN BRAIN, SIGNAL = 0.93; EXPRESSED IN LUNG, SIGNAL = 0.99; EXPRESSED IN HEART, SIGNAL = 0.64; EXPRESSED IN BONE MARROW, SIGNAL = 0.84; EXPRESSED IN ADULT LIVER, SIGNAL = 0.69; EXPRESSED IN FETAL LIVER, SIGNAL = 0.75; NT HIT: AB002344.1, EVALUE 1.00e-113; EST_HUMAN HIT: BI912089.1, EVALUE 1.00e-105; SWISSPROT HIT: O70546, EVALUE 2.00e-28
ccttccagacttgggcctcttctccaccaagaccctggtggaagcgagtggcgaacacaccgtggaagttcgcacccaggtgcagcagccctcagatgagaactgggatctgacaggcactcggcagatctggccttgtgagagctcccgttcccacaccaccattgccaagtacgcacagtaccaggcctcatccttccaggagtctctgcaggtgag

SEQ ID NO: 16859 - DNA, 303 bp, Homo sapiens
  MAP TO CHR13.1; EXPRESSED IN BRAIN, SIGNAL = 0.54; EXPRESSED IN BONE MARROW, SIGNAL = 0.67; NT HIT: AB009667.1, EVALUE 0.00e+00; EST_HUMAN HIT: BG428593.1, EVALUE 0.00e+00; SWISSPROT HIT: P09848, EVALUE 1.40e-01
atcaatctttgcggatactttgcttattcgtttaacgaccgcacagctccgaggtttggcctctatcgttatgctgcagatcagtttgagcccaaggcatccatgaaacattacaggaaaattattgacagcaatggtttcccgggcccagaaactctggaaagattttgtccagaagaattcaccgtgtgtactgagtgcagtttttttcacacccgaaagtctttactggctttcatagcttttctattttttgcttctattatttctctctcccttatattttactactcgaagaaaggc

SEQ ID NO: 16860 - DNA, 237 bp, Homo sapiens
  MAP TO CHR19.1; EXPRESSED IN PLACENTA, SIGNAL = 7.3; EXPRESSED IN LUNG, SIGNAL = 2.4; EXPRESSED IN HELA, SIGNAL = 7.9; EXPRESSED IN BRAIN, SIGNAL = 5.6; EXPRESSED IN HEART, SIGNAL = 3.4; EXPRESSED IN ADULT LIVER, SIGNAL =   5; EXPRESSED IN BONE MARROW, SIGNAL = 4.5; EXPRESSED IN FETAL LIVER, SIGNAL =   5; SWISSPROT HIT: Q61626, EVALUE 8.00e-41; NT HIT: gi14756303, EVALUE 1.00e-127; EST_HUMAN HIT: AL044131.2, EVALUE 1.00e-117
tacccagcggcatgccaatgccgtagcccttggtgtcgaggagtcccccgatctgggtgaggttgcagttgaggcgccggtggtattcgttcatggtggactcgagcaggaaggcgtagcgggagttgaggacgcgggcaatgccctcttctgtgctcttgacgaacacgctgggctgcttcgactgcatgtagttccacatgcgctggtacgtttggtaccgtgaattctgggcag

SEQ ID NO: 16861 - DNA, 173 bp, Homo sapiens
  MAP TO CHR12.1; EXPRESSED IN PLACENTA, SIGNAL =   6; EXPRESSED IN LUNG, SIGNAL = 3.7; EXPRESSED IN BRAIN, SIGNAL = 3.5; EXPRESSED IN HEART, SIGNAL = 4.4; EXPRESSED IN ADULT LIVER, SIGNAL = 6.8; EXPRESSED IN BONE MARROW, SIGNAL = 3.1; EXPRESSED IN FETAL LIVER, SIGNAL = 4.6; EXPRESSED IN HELA, SIGNAL = 4.5; EST_HUMAN HIT: BF305719.1, EVALUE 1.00e-92; SWISSPROT HIT: P25391, EVALUE 2.50e+00; NT HIT: U72517.1, EVALUE 2.00e-90
accgggccacccaggcgttggtgttgatgttgaatgaggcaatggtgccagtgaagcgggggtttgtttcaaagagccacaccttcatgttggcacaggcatcccactttgccttgcccttttcttcaaagccattgaagcccaggcccgtcaaaatgcatactccttcctga

SEQ ID NO: 16862 - DNA, 208 bp, Homo sapiens
  MAP TO CHR13.1; EXPRESSED IN PLACENTA, SIGNAL = 5.7; EXPRESSED IN LUNG, SIGNAL = 3.4; EXPRESSED IN HELA, SIGNAL =   6; EXPRESSED IN BRAIN, SIGNAL = 4.2; EXPRESSED IN HEART, SIGNAL = 3.3; EXPRESSED IN ADULT LIVER, SIGNAL = 4.8; EXPRESSED IN BONE MARROW, SIGNAL = 3.8; EST_HUMAN HIT: BE969822.1, EVALUE 1.00e-104; SWISSPROT HIT: P21575, EVALUE 4.00e-16; NT HIT: gi14759745, EVALUE 3.00e-74
acctgttaccttctcggcacacttttttatgaccgtggccagctctgagaccacgagatcaacacacttcaaactcggctctttgagttttacaatctgttttttcacaatggcttcaaaggccatgtcgggggtgaagagccccgtcctgggtcatgcggagggcaggatgaggcagaaagacacccagggacagtgcaggccacac

SEQ ID NO: 16863 - DNA, 307 bp, Homo sapiens
  MAP TO CHR2.1; EXPRESSED IN ADULT LIVER, SIGNAL = 0.46; EXPRESSED IN BONE MARROW, SIGNAL = 0.46; EXPRESSED IN BRAIN, SIGNAL = 0.47; EXPRESSED IN HEART, SIGNAL = 1.1; NT HIT: AJ277892.1, EVALUE 0.00e+00; EST_HUMAN HIT: F00104.1, EVALUE 1.00e-123; SWISSPROT HIT: P11799, EVALUE 3.00e-09
ctgttcctacagagcaaaaacttccaccatcattttctcgacaattgagagatgttcaagaaacagttggactgccagttgtttttgattgtgccataagtggatcagaacctatctccgtgtcttggtataaagacggcaagccattgaaagacagcccaaatgtacaaacatcatttttagacaatacagccacactcaatatttttaaaactgaccggagccttgcaggccagtattcctgcacagctacaaaccctataggctctgcttcttccagtgccaggctcattctcacaggtttgtg

SEQ ID NO: 16864 - DNA, 471 bp, Homo sapiens
  MAP TO CHR6.1; EXPRESSED IN FETAL LIVER, SIGNAL = 1.4; EXPRESSED IN HELA, SIGNAL = 1.3; EXPRESSED IN LUNG, SIGNAL = 1.5; EXPRESSED IN BRAIN, SIGNAL = 1.3; EXPRESSED IN ADULT LIVER, SIGNAL = 0.87; NT HIT: AF246302.1, EVALUE 0.00e+00; EST_HUMAN HIT: BI045869.1, EVALUE 0.00e+00; SWISSPROT HIT: Q03181, EVALUE 1.00e-82
gggcctggttttcagccctttgtgatccacgacatcgagacattgtggcaggcagagaaggggctggtgtggaagcagttggtgaatggcctgcctccctacaaggagatcagcgtgcacgtcttctaccgctgccagtgcaccacagtggagaccgtgcgggagctcactgagttcgccaagagcatccccagcttcagcagcctcttcctcaacgaccaggttacccttctcaagtatggcgtgcacgaggccatcttcgccatgctggcctctatcgtcaacaaggacgggctgctggtagccaacggcagtggctttgtcacccgtgagttcctgcgcagcctccgcaaacccttcagtgatatcattgagcctaagtttgaatttgctgtcaagttcaacgccctggaacttgatgacagtgacctggccctattcattgcggccatcattctgtgtggaggtgag

SEQ ID NO: 16865 - DNA, 217 bp, Homo sapiens
  MAP TO CHR15.1; EXPRESSED IN LUNG, SIGNAL = 2.1; EXPRESSED IN HELA, SIGNAL = 5.9; EXPRESSED IN BRAIN, SIGNAL = 1.1; EXPRESSED IN BONE MARROW, SIGNAL = 2.1; NT HIT: gi13644654, EVALUE 1.00e-107; EST_HUMAN HIT: BE676481.1, EVALUE 1.00e-107; SWISSPROT HIT: Q13310, EVALUE 4.00e-20
cttgtctgagtggtagcagcagcaacagcgcccaccttctgggcagcttctttcttggcatgatgagcctgtagaactgctacagcttcatccaccttggagcggagagactcgggggactctaacacgtgcagcagctcagagttgtcgatctccagcagcattcccgtgatcttcccagccaggtttgaatgcattgtttggatgagtgggaaca

SEQ ID NO: 16866 - DNA, 182 bp, Homo sapiens
  MAP TO CHR11.1; EXPRESSED IN FETAL LIVER, SIGNAL = 0.56; EXPRESSED IN BRAIN, SIGNAL = 0.64; EXPRESSED IN BONE MARROW, SIGNAL = 0.64; NT HIT: AF282275.1, EVALUE 1.00e-39; SWISSPROT HIT: P34983, EVALUE 1.00e-20; EST_HUMAN HIT: BI063591.1, EVALUE 1.50e-02
tgataggacatgatgacattgtacagcaaggggctgcagatggcaacataacagtcatacgccattgcagccaacatgtgacactctgcaatagcaaaaatactgaataaatagagctgagccatgcattcagggtaggagatgatgttcttctctgtcgcaaagttcaccagcatcttagg

SEQ ID NO: 16867 - DNA, 153 bp, Homo sapiens
  MAP TO CHR14.1; EXPRESSED IN LUNG, SIGNAL = 1.3; EXPRESSED IN ADULT LIVER, SIGNAL = 2.2; EXPRESSED IN PLACENTA, SIGNAL = 1.3; EXPRESSED IN FETAL LIVER, SIGNAL = 1.7; EXPRESSED IN BRAIN, SIGNAL = 1.9; NT HIT: gi14752115, EVALUE 9.00e-40; SWISSPROT HIT: P19263, EVALUE 1.00e+01; EST_HUMAN HIT: BI914436.1, EVALUE 1.00e-39
attgtgtttggttgcaggaatctatagagagctctgcttagaatctgtaaagaacaaatatgaatgtgaaattcaagcttctcgccagcattgtgaggtactgtcattttgcataacttttaagctaatttcatctcttcaagccttttctga

SEQ ID NO: 16868 - DNA, 161 bp, Homo sapiens
  MAP TO CHR19.1; EXPRESSED IN HELA, SIGNAL =   1; EXPRESSED IN LUNG, SIGNAL = 0.78; EXPRESSED IN BRAIN, SIGNAL =   2; EXPRESSED IN HEART, SIGNAL = 1.6; EXPRESSED IN ADULT LIVER, SIGNAL = 2.4; EXPRESSED IN FETAL LIVER, SIGNAL = 1.2; EST_HUMAN HIT: BE909493.1, EVALUE 4.00e-55; NT HIT: AF289220.1, EVALUE 7.00e-56
tgccccgggcccccgcctccttccccggagcccctggcccgcctggccctagccatggagctgagccggcgcgtggccgggctggggggcaccctggccggactcagcgtggagcacgtgcacagcttcacgccctggatccaggcccacgggggctgggt

SEQ ID NO: 16869 - DNA, 246 bp, Homo sapiens
  MAP TO CHR12.1; EXPRESSED IN BRAIN, SIGNAL = 3.7; EXPRESSED IN HEART, SIGNAL = 1.5; EXPRESSED IN PLACENTA, SIGNAL = 1.5; EXPRESSED IN FETAL LIVER, SIGNAL = 1.8; EXPRESSED IN LUNG, SIGNAL = 1.8; SWISSPROT HIT: P07323, EVALUE 6.00e-38; EST_HUMAN HIT: AL538201.1, EVALUE 1.00e-123; NT HIT: X51956.1, EVALUE 0.00e+00
tctgtggctccccaggccttcaacgtgatcaatggtggctctcatgctggcaacaagctggccatgcaggagttcatgatcctcccagtgggagctgagagctttcgggatgccatgcgactaggtgcagaggtctaccatacactcaagggagtcatcaaggacaaatacggcaaggatgccaccaatgtgggggatgaaggtggctttgcccccaatatcctggagaacagtgaaggtgaggcc

SEQ ID NO: 16870 - DNA, 138 bp, Homo sapiens
  MAP TO CHR19.1; EXPRESSED IN FETAL LIVER, SIGNAL = 1.6; EXPRESSED IN LUNG, SIGNAL =   3; EXPRESSED IN HELA, SIGNAL = 1.4; EXPRESSED IN BRAIN, SIGNAL = 1.6; EXPRESSED IN HEART, SIGNAL = 1.5; NT HIT: gi14758035, EVALUE 9.00e-52; SWISSPROT HIT: P51522, EVALUE 3.00e-19; EST_HUMAN HIT: AW749734.1, EVALUE 7.00e-72
tttgtcacattcttcacatttgtaaggtttctctccagtatgaagtctacgatggcatgtaagggatgacttgtgactaaaggtcttgccacactcattacatttgtagggtttctctccagtatgaagtctatgatg

SEQ ID NO: 16871 - DNA, 482 bp, Homo sapiens
  MAP TO CHR20.1; EXPRESSED IN LUNG, SIGNAL = 0.82; EXPRESSED IN BRAIN, SIGNAL = 0.52; EXPRESSED IN HEART, SIGNAL = 0.59; EXPRESSED IN FETAL LIVER, SIGNAL = 0.63; NT HIT: gi15303869, EVALUE 0.00e+00; SWISSPROT HIT: P53323, EVALUE 1.00e-19; EST_HUMAN HIT: AA579641.1, EVALUE 0.00e+00
ctacccaaccatggacctctttcttcctctcaggcgcacttcatctaatttttttagcactggcctggcctttttggaggaggtggagtagctcttcagaaaggcttcaaacacagtttcagtgttgggatgggtactgaggaaggccttctccaggacatagaggtctactcccttatcctctggaagtgctgaaatgaaactcagcccaaagtctatgagcacaatgttcagctgttccagggggggtttcaggagcatgttggaggtggtgagatcaccatgaatgaggtcttcatcgtgcattcgagccaaaacctgcccaattgtcttggctaagttggagagaccctggggagttttttcagtctccatagtggactgaatataatctcgaacagtcactgagccttcaatttcttccatatataagcagttggaagcatagtccacaaaaaagacaactggggcagatattcctg

SEQ ID NO: 16872 - DNA, 225 bp, Homo sapiens
  MAP TO CHR13.1; EXPRESSED IN FETAL LIVER, SIGNAL = 0.6; EXPRESSED IN BRAIN, SIGNAL = 0.69; EXPRESSED IN BONE MARROW, SIGNAL = 0.66; EXPRESSED IN ADULT LIVER, SIGNAL = 0.73; SWISSPROT HIT: P23481, EVALUE 1.90e+00; EST_HUMAN HIT: BF309014.1, EVALUE 7.60e-02
aatgcagaagaggatgtatttgagcatctggcctggaaatcgactaaatgtatctatagcataattggttcagaaagagctggaagacaaattgagaatggtgggtgtaaatagaagaaaaggtggcagaaggggagccagatggataagctgagacacaaaacacacacaagcaaaggctgcttgggatgccagcagagcacatttgcatctggggtccagaac

SEQ ID NO: 16873 - DNA, 304 bp, Homo sapiens
  MAP TO CHR17.1; EXPRESSED IN BONE MARROW, SIGNAL = 0.83; EXPRESSED IN HEART, SIGNAL = 0.86; EXPRESSED IN FETAL LIVER, SIGNAL = 0.84; EXPRESSED IN LUNG, SIGNAL = 0.58; EXPRESSED IN BRAIN, SIGNAL = 0.91; NT HIT: gi14775763, EVALUE 0.00e+00; SWISSPROT HIT: P08111, EVALUE 9.00e-16; EST_HUMAN HIT: AW007076.1, EVALUE 0.00e+00
ccacacacctggccagcacagggctcttgcgctggtagtcgaagaggccaaagccatgactggtgccaaaagccacgaggctccactcggtgtggagtgtgacagcggttacagcagctggcggcaggcactgcaccaggacacggggctggaagccagcaggccagggcagcggccccgtgcgtgggctcagccgctcgtggcccttccatgtgaagccctcgcggtcctggaggaggtctatgatggccacgctgaccgcctgctccaccggcacatcactaagctccagtaccagcacctg

SEQ ID NO: 16874 - DNA, 279 bp, Homo sapiens
  MAP TO CHR17.1; EXPRESSED IN BONE MARROW, SIGNAL = 0.84; EXPRESSED IN HEART, SIGNAL = 0.71; EXPRESSED IN FETAL LIVER, SIGNAL = 0.76; EXPRESSED IN LUNG, SIGNAL = 0.61; EXPRESSED IN BRAIN, SIGNAL = 0.99; EST_HUMAN HIT: BF337562.1, EVALUE 2.00e-03; NT HIT: gi14769777, EVALUE 0.00e+00; SWISSPROT HIT: O35569, EVALUE 1.10e-02
gcacggacccgggagagtggctccttggctctgcccgtcgcactgcggcctctccgctctggttcccctttctcccaggctgggaggcgtgggtagggcttggggcctgaattggccttcggaggccccctgggccttcctacagttgctgtgccccaggcctccccatctccagggtagcaggagctggtgatgctgatgcccccgctgcccgcctcctgctcatcctccgaatcatattcaatgctgatttccaagcacttgggggaaaggcagctg

SEQ ID NO: 16875 - DNA, 151 bp, Homo sapiens
  MAP TO CHR6.1; EXPRESSED IN ADULT LIVER, SIGNAL =   2; EXPRESSED IN BONE MARROW, SIGNAL = 1.6; EXPRESSED IN FETAL LIVER, SIGNAL = 1.2; EXPRESSED IN BRAIN, SIGNAL = 1.4; EXPRESSED IN LUNG, SIGNAL = 0.91; EXPRESSED IN HEART, SIGNAL = 0.87; SWISSPROT HIT: P22004, EVALUE 3.00e-24; EST_HUMAN HIT: BF170349.1, EVALUE 3.00e-77; NT HIT: M60315.1, EVALUE 2.00e-77
tggcatccacaagctcttacaaccatattcctgtattttttcagaatgacattggagttgtcatcaaagtaaagaaccgagatggcatttagcttagttggcgcacagcacggtttggggacatactcggggttcataaggtgaacctgtt

SEQ ID NO: 16876 - DNA, 276 bp, Homo sapiens
  MAP TO CHR16.1; EXPRESSED IN HEART, SIGNAL = 0.81; EXPRESSED IN BONE MARROW, SIGNAL = 0.69; EXPRESSED IN ADULT LIVER, SIGNAL = 0.57; EXPRESSED IN LUNG, SIGNAL = 0.71; EXPRESSED IN BRAIN, SIGNAL = 0.65; NT HIT: AB058767.1, EVALUE 2.00e-39; EST_HUMAN HIT: BE717336.1, EVALUE 3.70e-01
tacctgctctcctttgggaagcttgtcgctctctagggcctgcttccagctcaagccttcaaagtctggtgtctggatgtctaggaagggtacgcccaggtccttctccttcttcccttcgtggtcctcctccccttccccctcccagtcgctccgctcctccagggctcgcagcttctccaggcgctcccgctccgccttctccctctccaggcgctccttctccgtgcgctccttctccaggcgctctctctcccggtccttgcggcccctgcg

SEQ ID NO: 16877 - DNA, 147 bp, Homo sapiens
  MAP TO CHR6.1; EXPRESSED IN BONE MARROW, SIGNAL = 0.87; EXPRESSED IN HEART, SIGNAL = 0.73; EXPRESSED IN FETAL LIVER, SIGNAL = 0.83; EXPRESSED IN BRAIN, SIGNAL =   1; NT HIT: gi16174654, EVALUE 4.00e-63; SWISSPROT HIT: P93736, EVALUE 1.00e-10; EST_HUMAN HIT: BF971970.1, EVALUE 6.00e-63
tggacactcaggtcattccagggctcctcagtggctgtgactgaagcttttgtgcggctctacaaggcggggttgctgtaccggaaccatcagcttgtcaactggtcatgtgctttaagatcagccatctcggacattgaggtgagg

SEQ ID NO: 16878 - DNA, 251 bp, Homo sapiens
  MAP TO CHR5.1; EXPRESSED IN LUNG, SIGNAL = 0.85; EXPRESSED IN BRAIN, SIGNAL = 0.94; EXPRESSED IN HEART, SIGNAL = 0.65; EXPRESSED IN ADULT LIVER, SIGNAL =   1; EXPRESSED IN BONE MARROW, SIGNAL = 0.62; SWISSPROT HIT: P47870, EVALUE 1.00e-26; NT HIT: gi16157420, EVALUE 0.00e+00; EST_HUMAN HIT: AL118953.1, EVALUE 3.00e-72
taccttgttgacatccaggcgcatcttctcattgttggcactggcagccttctcagctgctttcttttggcgttggggccccctcccaaagaagatgtagttgactagggcatattccagaagggccatgaaaacgaagacaaagcaccccatcaggtacatgtcaatggccttcacataggggattttagggagagtttcccggaggtgggtgttgattgtggtcattgtgaggacagttgtgattcctg

SEQ ID NO: 16879 - DNA, 174 bp, Homo sapiens
  MAP TO CHR17.1; EXPRESSED IN LUNG, SIGNAL = 0.58; EXPRESSED IN BRAIN, SIGNAL = 0.58; EXPRESSED IN BONE MARROW, SIGNAL = 0.61; EST_HUMAN HIT: AW207445.1, EVALUE 3.00e-84; SWISSPROT HIT: P27338, EVALUE 3.30e+00; NT HIT: M94081.1, EVALUE 6.10e-01
tgtggctcaatgggagaggctggtggttaccatgacattcgctggaagaggaatggaactgggatcagattgccacaagggaggccctctgcagtccctccctttgaacaagaagttgtagtaggcaattaagaggagaccagagtgaaaagagatctagtctgttaattcctt

SEQ ID NO: 16880 - DNA, 187 bp, Homo sapiens
  MAP TO CHR19.1; EXPRESSED IN BRAIN, SIGNAL = 1.4; EXPRESSED IN HEART, SIGNAL =   1; EXPRESSED IN BONE MARROW, SIGNAL = 1.1; EXPRESSED IN PLACENTA, SIGNAL = 2.1; EXPRESSED IN LUNG, SIGNAL = 1.3; EST_HUMAN HIT: BI816708.1, EVALUE 3.00e-99; SWISSPROT HIT: P00974, EVALUE 4.30e+00; NT HIT: gi14786907, EVALUE 2.00e-99
caggcgggctgcgtgcacttcccccacacggcgccctgtgaggtgcgcgtgctcatgctcctgtactcgtccaagaagaagatcttcatgggcctcatcccctacgaccagagcggcttcgtcaacggcatccggcaggtcatcaccaaccacaagcaggtccagcagcagaagctggagcagcagc

SEQ ID NO: 16881 - DNA, 298 bp, Homo sapiens
  MAP TO CHR6.1; EXPRESSED IN ADULT LIVER, SIGNAL = 0.76; EXPRESSED IN FETAL LIVER, SIGNAL = 0.74; EXPRESSED IN LUNG, SIGNAL = 0.86; EXPRESSED IN HELA, SIGNAL = 0.76; EXPRESSED IN BRAIN, SIGNAL = 0.9; EXPRESSED IN HEART, SIGNAL = 0.86; SWISSPROT HIT: P36938, EVALUE 4.00e-01; NT HIT: gi14781593, EVALUE 0.00e+00; EST_HUMAN HIT: BE244455.1, EVALUE 8.00e-95
ctaatgttctttttgttcccatttccagagggttttcaggctgatttctgttgttccttcaaacttgataaagctgctcatgagacacagtttggccggagtgaccagcatggcagtaaagcaagcagctctctgcaaccgccagccaaggcccaaggcagagaccgagccaaaaccggtgtgacggaacccatgaatcatgaccagtttcatctagtgcctaatcacatcgtggtctctgcagaaggaaacatttctaaaaaaacagaatgccttggcagagcactgaaatttgaca

SEQ ID NO: 16882 - DNA, 164 bp, Homo sapiens
  MAP TO CHR17.1; EXPRESSED IN BRAIN, SIGNAL = 0.44; EXPRESSED IN BONE MARROW, SIGNAL = 0.45; EXPRESSED IN FETAL LIVER, SIGNAL = 0.43; SWISSPROT HIT: Q39565, EVALUE 7.00e-03; NT HIT: AF195956.1, EVALUE 9.00e-03; EST_HUMAN HIT: W22909.1, EVALUE 2.00e-26
tggctcaggggatttcctgaaggagcccaaggtgtatgaagacctcacggatctgacagtgctgaagacagtcatggagacagctctaaatgagtataacctgtcaccctctgtcgtgcccatgcagctagtgctcttccgagaggctattgaacacagtgagc

SEQ ID NO: 16883 - DNA, 230 bp, Homo sapiens
  MAP TO CHR22.1; EXPRESSED IN FETAL LIVER, SIGNAL = 1.1; EXPRESSED IN LUNG, SIGNAL = 1.1; EXPRESSED IN HELA, SIGNAL = 1.4; EXPRESSED IN BRAIN, SIGNAL = 0.83; EXPRESSED IN ADULT LIVER, SIGNAL = 2.1; EXPRESSED IN BONE MARROW, SIGNAL = 0.99; SWISSPROT HIT: O55229, EVALUE 1.00e-15; NT HIT: gi14779773, EVALUE 1.00e-126; EST_HUMAN HIT: BF848234.1, EVALUE 1.00e-124
aggaagttactagagtctaccccatcgccagtcgtcttctgccacaatgacatccaggaaggtaggagaaggcatctgagtctcctaacccaagatggaagagccagagggctctggagtgagcagaacctcaccccattcccccagggaacatcttgctgctctcagagccagaaaatgctgacagcctcatgctggtggacttcgagtacagcagttataactatagg

SEQ ID NO: 16884 - DNA, 200 bp, Homo sapiens
  MAP TO CHR7.1; EXPRESSED IN BONE MARROW, SIGNAL = 0.5; EXPRESSED IN FETAL LIVER, SIGNAL = 0.48; EXPRESSED IN BRAIN, SIGNAL = 0.55; SWISSPROT HIT: P56818, EVALUE 4.90e-01; NT HIT: M13711.1, EVALUE 1.80e-01; EST_HUMAN HIT: BI548282.1, EVALUE 4.00e-28
agtatactcacagctactttgtaaagaacacatttccatcattccagtgttccagattccaacagaagaaatccacagaggaacagtaaacaaagaattccaagaattgtaatgacatattcagtccaaacaggagaggcaaatccattgaaacacagcaagacagaggggaaaaaaaagttacttacatgtaactcaac

SEQ ID NO: 16885 - DNA, 360 bp, Homo sapiens
  MAP TO CHR7.1; EXPRESSED IN FETAL LIVER, SIGNAL = 0.4; EXPRESSED IN LUNG, SIGNAL = 0.77; EXPRESSED IN HELA, SIGNAL = 0.61; EXPRESSED IN BRAIN, SIGNAL = 0.64; EXPRESSED IN HEART, SIGNAL = 0.83; EXPRESSED IN ADULT LIVER, SIGNAL = 0.76; EXPRESSED IN BONE MARROW, SIGNAL = 0.58; SWISSPROT HIT: P14373, EVALUE 1.00e-17; EST_HUMAN HIT: BI524007.1, EVALUE 0.00e+00
cagtgtcccatctgcctggaggtcttcaaggagtccctaatgctacagtgcggccactcctactgcaagggctgcctggtttccctgtcctaccacctggacaccaaggtgcgctgccccatgtgctggcaggtggtggacggcagcagctccttgcccaacgtctccctggcctgggtgatcgaagccctgaggctccctggggacccggagcccaaggtctgcgtgcaccaccggaacccgctcagccttttctgcgagaaggaccaggagctcatctgtggcctctgcggtctgctgggctcccaccaacaccacccggtcacgcccgtctccaccgtctgcagccgcatgaaggtg

SEQ ID NO: 16886 - DNA, 455 bp, Homo sapiens
  MAP TO CHR14.1; EXPRESSED IN HELA, SIGNAL =   1; EXPRESSED IN BRAIN, SIGNAL = 0.72; EXPRESSED IN HEART, SIGNAL = 0.9; EXPRESSED IN BONE MARROW, SIGNAL = 0.77; EXPRESSED IN ADULT LIVER, SIGNAL = 0.77; NT HIT: AY026388.1, EVALUE 0.00e+00; SWISSPROT HIT: Q06218, EVALUE 2.30e+00; EST_HUMAN HIT: BE294034.1, EVALUE 0.00e+00
ctctcatcgagctcttctagcctgctcttcactgtgtgggcattgttatccttggtgatcttctgcaggaggtagaaagtctgctggaacataagcagtaaatactcctcgaactccatcggcacacagctcttggaaatgagttcactgatgcagggcatggccaggacccccggccggctccgctcctgaaccgagacacagttctggctgctgccgttaactgacgccatctttctggcacggatgtcacagccaaatcacgcaaagtggaaggtggtggtaaggagggatggggtgatgccggcagacagaggaatacaactgaagagatgggctaggcactccaaggcaagggaacagatatactcactcaccacatcaaggatgggaattggctgattcaacagtttggctgaactaggactctgccacaggttactcagtaagtcacc

SEQ ID NO: 16887 - DNA, 106 bp, Homo sapiens
  MAP TO CHR13.1; EXPRESSED IN FETAL LIVER, SIGNAL = 0.61; EXPRESSED IN LUNG, SIGNAL = 0.85; EXPRESSED IN BRAIN, SIGNAL = 0.68; EXPRESSED IN HEART, SIGNAL = 0.9; EXPRESSED IN BONE MARROW, SIGNAL = 0.7; EXPRESSED IN ADULT LIVER, SIGNAL = 0.68; EST_HUMAN HIT: AW390763.1, EVALUE 3.00e-42; NT HIT: gi5174740, EVALUE 2.00e-42; SWISSPROT HIT: P15374, EVALUE 4.00e-10
attctcagaatctggatcaaccttgaaaaaattcctggaggaatctgtgtcaatgagccctgaagaacgagccagatacctggagaactatgatgtcggtaccttc

SEQ ID NO: 16888 - DNA, 239 bp, Homo sapiens
  MAP TO CHR7.1; EXPRESSED IN BRAIN, SIGNAL = 0.45; EXPRESSED IN BONE MARROW, SIGNAL = 0.46; EXPRESSED IN LUNG, SIGNAL = 1.5; EXPRESSED IN HELA, SIGNAL = 1.4; EST_HUMAN HIT: AU130889.1, EVALUE 1.00e-129; NT HIT: M61936.1, EVALUE 0.00e+00; SWISSPROT HIT: P07942, EVALUE 7.00e-50
catacctttcacagttatgacccatggtgtagtcctggcagttcaagcactccccagtcactgggtcgcagtcatcggcgtggccattgcactggcagggctggcaacttggaaagccccagtgcccaggtaagcaccgatcacactgccgagcatacactccctggaaacagtggcactggccagtgacgggattgcagaaggcattgacagatccttgcagatggcactcacaagct

SEQ ID NO: 16889 - DNA, 210 bp, Homo sapiens
  MAP TO CHR19.1; EXPRESSED IN BONE MARROW, SIGNAL =   1; EXPRESSED IN FETAL LIVER, SIGNAL = 1.1; EXPRESSED IN HELA, SIGNAL = 1.8; EXPRESSED IN BRAIN, SIGNAL = 0.85; SWISSPROT HIT: P09159, EVALUE 6.30e-01; EST_HUMAN HIT: AL537307.1, EVALUE 1.00e-113; NT HIT: AF288389.1, EVALUE 1.00e-11
cagggctactacaagcgcacacctgcctacatccctatccgcaagcgagaccgccggggctgctttgcagttcccatggtgcactcgaccttcctgatcgacctgcggaaggcggcgtccaggaacctggccttctacccacctcaccctgactacacctggtcctttgacgacatcatcgtctttgccttctcctgcaagcaggcaggt

SEQ ID NO: 16890 - DNA, 135 bp, Homo sapiens
  MAP TO CHR7.1; EXPRESSED IN FETAL LIVER, SIGNAL = 0.75; EXPRESSED IN BRAIN, SIGNAL = 0.42; EXPRESSED IN BONE MARROW, SIGNAL = 0.58; NT HIT: M76741.1, EVALUE 2.00e-03; EST_HUMAN HIT: AW877476.1, EVALUE 1.10e-02
gaacaatggtccaaatatagccaaagcaatcttgaaaaacagaggtgggaggaaggataatgttcattctatcagatattagcacttaattatgaaaccattaagacaatgtttttattggcccaggagtagaca

SEQ ID NO: 16891 - DNA, 284 bp, Homo sapiens
  MAP TO CHR2.1; EXPRESSED IN HELA, SIGNAL = 0.95; EXPRESSED IN FETAL LIVER, SIGNAL = 0.88; EXPRESSED IN LUNG, SIGNAL =   1; EXPRESSED IN BRAIN, SIGNAL = 0.82; EXPRESSED IN HEART, SIGNAL = 0.89; SWISSPROT HIT: P79739, EVALUE 1.00e-15; NT HIT: gi14723798, EVALUE 0.00e+00; EST_HUMAN HIT: BI670463.1, EVALUE 0.00e+00
ctcacccgccggtagccactgaagggcaggtcgacaggcagggagaagacattgtccacaaactgctggtagacctcaaagaggtgcccaaggtcctcctcagggatgctgaagcccagcagcacccggatggccatgcggaaggtcagcttctgcgcctcctggtacacgttgatggcctcggggtggctgctccaggcgcgcagtgtgtcctggatcaccagctggatcttgggcaggtaactctccagggcctcgtggctgaagatcttggagaagacctg

SEQ ID NO: 16892 - DNA, 168 bp, Homo sapiens
  MAP TO CHR20.1; EXPRESSED IN FETAL LIVER, SIGNAL = 0.57; EXPRESSED IN HELA, SIGNAL =   1; EXPRESSED IN BRAIN, SIGNAL = 0.83; EXPRESSED IN HEART, SIGNAL = 0.5; EXPRESSED IN ADULT LIVER, SIGNAL = 1.2; SWISSPROT HIT: P22795, EVALUE 3.30e+00; NT HIT: gi14786688, EVALUE 8.00e-68; EST_HUMAN HIT: BG722454.1, EVALUE 7.00e-63
ccaactgtacctggctttgcgaacgtgcagctgaggatagtggctgtgcctgtgacatatatgcactgcaaagtcttcctcatacgtcagacacgggatgttccccacttggtcaaaaacagttatgagagttgagcctaaatcacagagataaagaaacatgtcctt

SEQ ID NO: 16893 - DNA, 333 bp, Homo sapiens
  MAP TO CHR11.1; EXPRESSED IN HEART, SIGNAL =   1; EXPRESSED IN ADULT LIVER, SIGNAL = 0.51; EXPRESSED IN FETAL LIVER, SIGNAL = 0.68; EXPRESSED IN LUNG, SIGNAL = 1.1; EXPRESSED IN BRAIN, SIGNAL = 0.48; EST_HUMAN HIT: BG036207.1, EVALUE 2.00e-92; SWISSPROT HIT: P03186, EVALUE 2.40e+00; NT HIT: AF009227.1, EVALUE 2.00e-92
aggcagacacagaggactcacaacacggacaacgcagcaaccctaccttctgtggttcctttgcctttcctgtcaggggtctctaagccagtgccccctgaggggtatagggagacgtcggttggcacaggccaactgctggctgtgtcctccgtgatctcatacatctgcccctccatcggctgcaggtgccagtttaggccaaacaggtgcatggctgtggtgagcaatgagaaaagtcatctttttctgctggaggcagaaacgggactcccaagccataagggaaaggtgggcagggtgggggaacacaggcattcagttcagttcaac

SEQ ID NO: 16894 - DNA, 180 bp, Homo sapiens
  MAP TO CHR10.1; EXPRESSED IN HELA, SIGNAL = 0.67; EXPRESSED IN BRAIN, SIGNAL = 0.82; EXPRESSED IN HEART, SIGNAL = 0.7; EXPRESSED IN ADULT LIVER, SIGNAL = 1.9; EST_HUMAN HIT: AV695874.1, EVALUE 8.00e-97; SWISSPROT HIT: O87389, EVALUE 1.50e+00; NT HIT: AF075085.1, EVALUE 4.00e-39
gaactagtcctcccagtcgatgcggatcgggccgcctgttagcgtctggccctgtagaccggctgagtcctctcctcctgccccacgacgcattcgccggtggcaaccctgggcacagcgggaacgctcgtccaacactccacagacaagaacccggcagtgcagaaacacttcctgaag

SEQ ID NO: 16895 - DNA, 226 bp, Homo sapiens
  MAP TO CHR14.1; EXPRESSED IN BRAIN, SIGNAL = 3.2; EXPRESSED IN LUNG, SIGNAL = 2.9; EXPRESSED IN HELA, SIGNAL = 3.1; EXPRESSED IN HEART, SIGNAL = 2.7; EXPRESSED IN BONE MARROW, SIGNAL = 2.7; EXPRESSED IN ADULT LIVER, SIGNAL =   2; EXPRESSED IN PLACENTA, SIGNAL = 2.5; NT HIT: gi4758379, EVALUE 7.00e-23; EST_HUMAN HIT: AI079285.1, EVALUE 1.00e-22
ctttattttacatattatttccaaagcagacactgtttaagtgagcagccaacagaatttataagatagaaagtgaaagcaaaggtaactggctcaagtctctagcatacaccatgtatatttcatatctgatcaccttgcatgtctggcttaagtgaaggtagggcgatgtagattttgcaagcaagaaatctattttctgtgaccaggaatggctactacatgc

SEQ ID NO: 16896 - DNA, 378 bp, Homo sapiens
  MAP TO CHR5.1; EXPRESSED IN BONE MARROW, SIGNAL = 1.1; EXPRESSED IN FETAL LIVER, SIGNAL = 0.82; EXPRESSED IN HELA, SIGNAL = 1.2; EXPRESSED IN LUNG, SIGNAL = 0.67; EXPRESSED IN BRAIN, SIGNAL = 1.3; EXPRESSED IN ADULT LIVER, SIGNAL = 1.1; SWISSPROT HIT: Q9UN75, EVALUE 1.00e-63; NT HIT: AF152308.1, EVALUE 0.00e+00; EST_HUMAN HIT: AI651536.1, EVALUE 0.00e+00
gaacaccggcgggttgtcgttaatgtccttcacctccacgtccacatggaaaacctgcagcggcctgtccacgatcacctccaggtggatactgcactccgcgctccgcccgcacagcttctcgcggtcgatccgagaattcacaaacaaaatgccattctgcagatttacctccagaaggtccccgtgtcttttggacgccacccggaacaggcgcggcaccagctccgccagctccagccccaggtcctgagcgatgcggcccacgaaggtgccgtgtttggcctcctcgtagacggagtagtggagctggccgctccccacctcccaggctgcaaggagcagaagcgagagcagcagacgctgggatcccgggcc

SEQ ID NO: 16897 - DNA, 190 bp, Homo sapiens
  MAP TO CHR19.1; EXPRESSED IN BONE MARROW, SIGNAL = 0.97; EXPRESSED IN HELA, SIGNAL = 0.85; EXPRESSED IN BRAIN, SIGNAL = 0.74; EXPRESSED IN LUNG, SIGNAL = 0.82; EXPRESSED IN HEART, SIGNAL = 0.93; SWISSPROT HIT: P82251, EVALUE 5.00e-30; NT HIT: gi14763944, EVALUE 2.00e-96; EST_HUMAN HIT: BI769541.1, EVALUE 1.00e-103
gcacacacatactcggagaagctgaggcagatgatggcgaaggacgtgggcttaatgacgatcaggctggcccaggagaagaggtaggcggggatgggcccgtaggcctccatcaggtagggatactctccccctgacttggtgatcattgtgccaagctccgcaaagcacagggcacctggaacacaga

SEQ ID NO: 16898 - DNA, 171 bp, Homo sapiens
  MAP TO CHR19.1; EXPRESSED IN BONE MARROW, SIGNAL = 1.4; EXPRESSED IN FETAL LIVER, SIGNAL = 1.2; EXPRESSED IN HELA, SIGNAL = 1.5; EXPRESSED IN BRAIN, SIGNAL = 1.3; EXPRESSED IN LUNG, SIGNAL = 1.9; EXPRESSED IN HEART, SIGNAL = 1.7; EST_HUMAN HIT: BE301939.1, EVALUE 2.00e-81; SWISSPROT HIT: P13291, EVALUE 4.40e+00; NT HIT: AB037816.1, EVALUE 2.00e-81
tctgggtccttgggggcagttcccggagctgctgttcgaggaggacacggagctgtgtgccgacctgtgcctgaggctcctacgacactgtggcagccgcatcagcaccatccgcacgcacgccagcgcctcgctgtacctgctcatgcgacagaacttcgagatcggcca

SEQ ID NO: 16899 - DNA, 404 bp, Homo sapiens
  MAP TO CHR10.1; EXPRESSED IN HELA, SIGNAL = 1.3; EXPRESSED IN LUNG, SIGNAL = 1.7; EXPRESSED IN BRAIN, SIGNAL = 0.98; EXPRESSED IN HEART, SIGNAL = 1.1; EXPRESSED IN BONE MARROW, SIGNAL = 1.3; EXPRESSED IN FETAL LIVER, SIGNAL = 1.3; NT HIT: gi5902159, EVALUE 0.00e+00; EST_HUMAN HIT: AA113952.1, EVALUE 0.00e+00; SWISSPROT HIT: P17026, EVALUE 9.00e-81
aagagtttcagtcagagttcaactctttttcaacaccagaagatccatactggaaagaaatcccataaatgtgctgattgtgggaaaagtttctttcagagttctaatctcattcagcatcgacggatccatacgggggaaaagccctacaaatgtgatgagtgtggagaaagcttcaaacagagctcaaatctcattcagcaccagagaattcatactggagaaaaaccctatcagtgtgatgagtgtggccggtgtttcagccagagctcccaccttattcaacatcagagaacccacactggggagaaaccctaccagtgcagtgaatgtggcaaatgtttcagtcagagctctcatctgaggcagcacatgaaggtgcataaagaagagaagcctcgtaa

SEQ ID NO: 16900 - DNA, 119 bp, Homo sapiens
  MAP TO CHR14.1; EXPRESSED IN BRAIN, SIGNAL = 0.37; EXPRESSED IN HEART, SIGNAL = 0.48; EXPRESSED IN FETAL LIVER, SIGNAL = 0.44; NT HIT: L12199.1, EVALUE 3.90e-01; EST_HUMAN HIT: BF752217.1, EVALUE 1.50e-01
tcattattcatttctggttcaaggtgacagggttaagcctgatagcatccttttagtagtattaggctgtgataaagcccctggcactgtggctgtgttatctgatgtcccaggagctc

SEQ ID NO: 16901 - DNA, 151 bp, Homo sapiens
  MAP TO CHR19.1; EXPRESSED IN BRAIN, SIGNAL = 1.3; EXPRESSED IN BONE MARROW, SIGNAL = 1.2; EXPRESSED IN HEART, SIGNAL = 0.92; EXPRESSED IN ADULT LIVER, SIGNAL = 1.7; EXPRESSED IN LUNG, SIGNAL = 0.7; NT HIT: Y17976.1, EVALUE 3.30e-02; EST_HUMAN HIT: AV727812.1, EVALUE 4.90e-02; SWISSPROT HIT: P03203, EVALUE 2.00e+00
tacctgaggctcccaaaaggggtttgatgtaatcagggtgcaccagaaccaacagcggcaggacaggtcccatccataccaagagtacatggtgcatgttgtccagtaccttcttctcatcttgaaggcccgcctcatttggaaggtactg

SEQ ID NO: 16902 - DNA, 124 bp, Homo sapiens
  MAP TO CHR19.1; EXPRESSED IN HEART, SIGNAL = 1.9; EXPRESSED IN BONE MARROW, SIGNAL = 1.2; EXPRESSED IN PLACENTA, SIGNAL = 1.6; EXPRESSED IN LUNG, SIGNAL = 2.1; EXPRESSED IN HELA, SIGNAL = 1.6; EXPRESSED IN BRAIN, SIGNAL = 1.5; SWISSPROT HIT: P27715, EVALUE 1.00e-05; NT HIT: gi12408317, EVALUE 1.00e-38; EST_HUMAN HIT: AA772911.1, EVALUE 7.00e-47
gagattaaccgtctggatttgggactgacggtggaggtgtggaataagggtctcatctgggacacaatggtgggcactgtgtggatcccactgaggaccatccgccagtccaatgaggtgagtg

SEQ ID NO: 16903 - DNA, 154 bp, Homo sapiens
  MAP TO CHR9.1; EXPRESSED IN BRAIN, SIGNAL = 3.2; EXPRESSED IN HELA, SIGNAL = 2.6; EXPRESSED IN BONE MARROW, SIGNAL = 3.1; EXPRESSED IN HEART, SIGNAL = 3.1; EXPRESSED IN ADULT LIVER, SIGNAL = 3.3; EXPRESSED IN PLACENTA, SIGNAL = 2.6; EXPRESSED IN LUNG, SIGNAL = 3.8; SWISSPROT HIT: Q92574, EVALUE 3.00e-13; NT HIT: gi14738494, EVALUE 6.00e-78; EST_HUMAN HIT: AW630725.1, EVALUE 3.00e-80
ctgcagatggacactgacgtcgttgtcctcacaacaggcgtcttggtgttgataaccatgctaccaatgattccacagtctgggaaacagcatcttcttgatttctttgacatttttggccgtctgtcatcatggtgcctgaagaaaccaggta

SEQ ID NO: 16904 - DNA, 176 bp, Homo sapiens
  MAP TO CHR5.1; EXPRESSED IN ADULT LIVER, SIGNAL = 0.96; EXPRESSED IN BONE MARROW, SIGNAL = 0.96; EXPRESSED IN PLACENTA, SIGNAL = 1.7; EXPRESSED IN FETAL LIVER, SIGNAL = 0.92; EXPRESSED IN HELA, SIGNAL = 0.95; EXPRESSED IN LUNG, SIGNAL = 1.2; EXPRESSED IN BRAIN, SIGNAL = 1.1; EST_HUMAN HIT: AW973926.1, EVALUE 1.00e-83; SWISSPROT HIT: O83401, EVALUE 6.60e-01; NT HIT: AF349038.1, EVALUE 1.00e-94
cagacctattcccacgaggtctccctcactgcggactcgcggaagagccacctgattttcccccagcccaactatgcggacacactcatcagccaggagagctgtgagaaaaagggttttctatcagcaccccagtctttacttgaagacaaaaaggaaccattttctcaggtaaa

SEQ ID NO: 16905 - DNA, 452 bp, Homo sapiens
  MAP TO CHR6.1; EXPRESSED IN HELA, SIGNAL = 4.1; EXPRESSED IN BRAIN, SIGNAL = 1.1; EXPRESSED IN ADULT LIVER, SIGNAL = 2.9; EXPRESSED IN PLACENTA, SIGNAL = 3.5; EXPRESSED IN FETAL LIVER, SIGNAL = 4.9; EST_HUMAN HIT: BG492167.1, EVALUE 0.00e+00; SWISSPROT HIT: P15865, EVALUE 4.00e-32; NT HIT: U91328.1, EVALUE 0.00e+00
ttcttgggcttcgcaaccttggccttctttgggctcttagccactttcttggttacagtggccgcggccggcttcttcgctttcttcggtgttttcttagcgctcttcttcggagttgcgccgccagccgccttcttgggcttcttggctgccccaactggcttcttaggtttggttccgcccgcctttttaaccttgggcttggcttccccggaggctgccttcttgttgagtttaaaggagccagaagcaccggtgcctttcgtttgcaccagagtgcccttgctcaccaggctcttgagaccaagtttgatacggctgttgtttttctccacatcatagccggcggcagccaacgcttttttcagagcagccagagaaactccgctacgctctttagaggcggccacagccttggtgatgagctctgacaccgggggaccagacgcctt

SEQ ID NO: 16906 - DNA, 302 bp, Homo sapiens
  MAP TO CHR19.1; EXPRESSED IN FETAL LIVER, SIGNAL = 7.6; EXPRESSED IN LUNG, SIGNAL = 9.1; EXPRESSED IN HELA, SIGNAL = 8.4; EXPRESSED IN BONE MARROW, SIGNAL = 7.8; EXPRESSED IN ADULT LIVER, SIGNAL = 5.6; EXPRESSED IN PLACENTA, SIGNAL = 7.5; EXPRESSED IN BRAIN, SIGNAL = 7.8; EXPRESSED IN HEART, SIGNAL = 7.2; EST_HUMAN HIT: AW451023.1, EVALUE 1.00e-112; SWISSPROT HIT: P20186, EVALUE 5.40e-01; NT HIT: gi15303551, EVALUE 0.00e+00
agacagacagagggttttggggggcaggggtcccccagacatgcatggcccctcgcctcgagggggagccccagggaagaaaagacagacacagtggaggctgaatgccccccaccctgaaagaaggagctgggccggcctcctctcatcctctcgcttccaggggtaggaagcctagggccagggctgccccgcaccagcagctcggacgttatggcttcaaggagatgaattcacggtccgggcaggaaaggatggggtcctgagggagcctggtccgatcccgggcctaggccagacct

SEQ ID NO: 16907 - DNA, 179 bp, Homo sapiens
  MAP TO CHR22.1; EXPRESSED IN HELA, SIGNAL = 5.6; EXPRESSED IN BRAIN, SIGNAL = 5.1; EXPRESSED IN BONE MARROW, SIGNAL = 6.4; EXPRESSED IN HEART, SIGNAL = 6.1; EXPRESSED IN ADULT LIVER, SIGNAL = 4.1; EXPRESSED IN LUNG, SIGNAL = 9.5; EXPRESSED IN FETAL LIVER, SIGNAL = 5.3; EXPRESSED IN PLACENTA, SIGNAL = 6.1; NT HIT: U36259.1, EVALUE 2.00e-96; EST_HUMAN HIT: BE538009.1, EVALUE 1.00e-89; SWISSPROT HIT: Q10567, EVALUE 5.00e-27
tcccaggtatgagagtgtgattgccacactgtgtgagaatctggactccctggatgagcctgaggcccgggctgccatgatctggattgtgggcgagtacgcggaacggatcgacaacgcagatgagctgctggagagcttcctcgagggcttccatgacgagagcacacaggtgagcc

SEQ ID NO: 16908 - DNA, 111 bp, Homo sapiens
  MAP TO CHR6.1; EXPRESSED IN LUNG, SIGNAL =   2; EXPRESSED IN BRAIN, SIGNAL = 1.1; EXPRESSED IN HELA, SIGNAL = 1.2; EXPRESSED IN BONE MARROW, SIGNAL = 1.1; EXPRESSED IN HEART, SIGNAL = 1.5; EXPRESSED IN ADULT LIVER, SIGNAL = 1.3; NT HIT: AY037049.1, EVALUE 3.60e-01; EST_HUMAN HIT: BG571448.1, EVALUE 3.40e-02
ctgatagcatctcagctactcccttcaaagacaacaacggggtagcaatttttttaaatgcctctgttacaatacagtatattttactcactgcaccaaaatgtcagcaca

SEQ ID NO: 16909 - DNA, 140 bp, Homo sapiens
  MAP TO CHR18.1; EXPRESSED IN FETAL LIVER, SIGNAL = 0.66; EXPRESSED IN LUNG, SIGNAL = 1.3; EXPRESSED IN HELA, SIGNAL = 0.57; EXPRESSED IN BRAIN, SIGNAL = 0.7; EXPRESSED IN ADULT LIVER, SIGNAL = 0.57; NT HIT: gi14762496, EVALUE 5.00e-72; EST_HUMAN HIT: AW073359.1, EVALUE 7.00e-72; SWISSPROT HIT: O08912, EVALUE 6.00e-23
caggttttctcttatactgccaacaaagaaattagaacagatgacctttgcttggatgtttccaaacttaatggcccagttacaatgctcaaatgccaccacctaaaaggcaaccaactctgggagtatgacccagtggt

SEQ ID NO: 16910 - DNA, 182 bp, Homo sapiens
  MAP TO AL390762.3; EXPRESSED IN FETAL LIVER, SIGNAL = 0.69; EXPRESSED IN BRAIN, SIGNAL = 0.67; EXPRESSED IN BONE MARROW, SIGNAL = 0.76; SWISSPROT HIT: Q10077, EVALUE 5.60e+00; NT HIT: U53588.1, EVALUE 8.00e-96; EST_HUMAN HIT: X90532.1, EVALUE 1.00e-95
tcattttgacagaatctaggtggtgtgcatacaacagcagcaagacagttgataatgcagaaatatcaggaggagtgtgaaatactctgtagggagcaagctgtttctcttgactactggcttgccaaagcagagtcttattataataaaataatagtggaaatgatgaaagaagagacagg

SEQ ID NO: 16911 - DNA, 201 bp, Homo sapiens
  MAP TO CHR22.1; EXPRESSED IN BONE MARROW, SIGNAL = 4.8; EXPRESSED IN HEART, SIGNAL = 5.9; EXPRESSED IN ADULT LIVER, SIGNAL = 3.1; EXPRESSED IN PLACENTA, SIGNAL = 3.9; EXPRESSED IN FETAL LIVER, SIGNAL =   5; EXPRESSED IN LUNG, SIGNAL =   6; EXPRESSED IN BRAIN, SIGNAL = 4.4; SWISSPROT HIT: Q9Z0H3, EVALUE 2.00e-32; NT HIT: Y17124.1, EVALUE 1.00e-109; EST_HUMAN HIT: BE264167.1, EVALUE 1.00e-104
atcctacctgaaggcgtaggtcttctgatgccagctcagctgtccccggatgctgtatgcgatggtggtgacaaactccccgcccaaccccagctccgagcacagcttcagggcaaacttctctggtgagttctccttctctgacatgtcccactcaaactggtccaccagggaaatgtttcccacatggatgttcagctg

SEQ ID NO: 16912 - DNA, 174 bp, Homo sapiens
  MAP TO CHR7.1; EXPRESSED IN LUNG, SIGNAL = 0.64; EXPRESSED IN HELA, SIGNAL = 0.45; EXPRESSED IN BRAIN, SIGNAL = 0.69; EXPRESSED IN FETAL LIVER, SIGNAL = 0.71; EST_HUMAN HIT: AW813522.1, EVALUE 1.40e-02; SWISSPROT HIT: Q58249, EVALUE 9.80e+00; NT HIT: AL163218.2, EVALUE 9.50e+00
tatttatgcatttgaaatattcatcacagtcttgggtatgtaaacataaatataaatgaagtaatacagaaacaattttcttgattacaagttatcttccatttcagggatatattcattaccttctttatgcctacataaatggctaccattactactgaaactgcaaaatag

SEQ ID NO: 16913 - DNA, 208 bp, Homo sapiens
  MAP TO CHR19.1; EXPRESSED IN FETAL LIVER, SIGNAL = 0.97; EXPRESSED IN HELA, SIGNAL = 1.3; EXPRESSED IN LUNG, SIGNAL = 0.7; EXPRESSED IN BRAIN, SIGNAL = 0.96; EXPRESSED IN BONE MARROW, SIGNAL = 0.96; EXPRESSED IN HEART, SIGNAL = 0.85; EST_HUMAN HIT: BG741581.1, EVALUE 1.00e-105; SWISSPROT HIT: P32927, EVALUE 1.10e+00; NT HIT: gi14759997, EVALUE 1.00e-102
catgtgccgcaggccaaacatggccagctccacagggtcctggggcaggtcccggggcactgggaaggggttgacgttcatgaatcgagggaaccacagcttcaggcgcaccaacttgagcatggggtagcttttgcgtccaaagatctgaatcagcaggaactccgtctccttgttgggcatcacacctgtgctgggcagatgcagg

SEQ ID NO: 16914 - DNA, 211 bp, Homo sapiens
  MAP TO CHR9.1; EXPRESSED IN LUNG, SIGNAL = 1.2; EXPRESSED IN FETAL LIVER, SIGNAL = 0.49; EXPRESSED IN BRAIN, SIGNAL = 0.61; EXPRESSED IN HEART, SIGNAL = 0.89; EXPRESSED IN BONE MARROW, SIGNAL = 0.59; EST_HUMAN HIT: AW502097.1, EVALUE 1.00e-115; SWISSPROT HIT: Q00174, EVALUE 4.30e-02; NT HIT: gi14740862, EVALUE 1.00e-115
ctctcggctgccacgcacgggaggctggagctggcagtagtggccagagtccgggtcactgtagctgctgagtgatggtgacggggaggccttgccaagggtgtgggaggggctggtgtgggggcccttgtctgactccccatgggtctttggggcacttccgggacacagctggggctcactggaacggcgggcgacaggggaggcaggc

SEQ ID NO: 16915 - DNA, 127 bp, Homo sapiens
  MAP TO CHRX.1; EXPRESSED IN BONE MARROW, SIGNAL = 0.51; EXPRESSED IN FETAL LIVER, SIGNAL = 0.49; EXPRESSED IN BRAIN, SIGNAL = 0.53; NT HIT: X14805.1, EVALUE 1.70e+00; EST_HUMAN HIT: AA287119.1, EVALUE 6.20e-01; SWISSPROT HIT: P07620, EVALUE 6.00e+00
caaatatttccatcctacaagaatgggctaagtagaggtgagaagtatgataaggaacggtgagtggaggatgaggtactaatagagaggggcaggcaagggacaaggtgaataatggcaaatgagg

SEQ ID NO: 16916 - DNA, 173 bp, Homo sapiens
  MAP TO CHRX.1; EXPRESSED IN HELA, SIGNAL = 0.6; EXPRESSED IN BRAIN, SIGNAL = 0.66; EXPRESSED IN HEART, SIGNAL = 0.6; NT HIT: gi14761365, EVALUE 3.00e-86; EST_HUMAN HIT: AA368192.1, EVALUE 3.00e-71; SWISSPROT HIT: Q01968, EVALUE 2.00e-25
acctgaaagtctgaatgttgacatattctttctctcgctttgccaggatatgtttgatgagaccctcccgctgcccagattgggtatttggtacaaagagcttccgcatggtgttggtcactttgggctgctccttgttagaagcttctttttcacgtggaagcctagcaaat

SEQ ID NO: 16917 - DNA, 187 bp, Homo sapiens
  MAP TO CHR11.1; EXPRESSED IN HELA, SIGNAL = 1.1; EXPRESSED IN BRAIN, SIGNAL = 0.97; EXPRESSED IN LUNG, SIGNAL = 0.88; EXPRESSED IN BONE MARROW, SIGNAL = 1.1; SWISSPROT HIT: Q03164, EVALUE 2.00e-30; NT HIT: gi16183746, EVALUE 2.00e-96; EST_HUMAN HIT: AA837477.1, EVALUE 2.00e-91
ggaacttgcctgaggtggacttcagccctggctgagccgtgagggttcaaggggggttcattggcctcctctggcttgtggaaacggaatttgtaatttcgacagtgcttggcaccagacagctgctcaatgaggaacacaactgcatcatggagaatccccagcatcctcaaaccgttaacaccta

SEQ ID NO: 16918 - DNA, 151 bp, Homo sapiens
  MAP TO CHR3.1; EXPRESSED IN LUNG, SIGNAL = 0.68; EXPRESSED IN FETAL LIVER, SIGNAL = 0.52; EXPRESSED IN HELA, SIGNAL = 0.66; EXPRESSED IN BRAIN, SIGNAL = 0.72; EXPRESSED IN HEART, SIGNAL = 0.56; EXPRESSED IN BONE MARROW, SIGNAL = 0.56; SWISSPROT HIT: P51178, EVALUE 1.00e-16; NT HIT: gi5453909, EVALUE 1.00e-69; EST_HUMAN HIT: BI822263.1, EVALUE 2.00e-69
gggcactcacacagctgggactccggggtccgcatgaccttgcgggactcctgccagatggtcttgcagtcctcctgcaacttgtagaacgctctctcctccatgagctggacttcaccttcaggagctggctgcccttcagcagcgcctg

SEQ ID NO: 16919 - DNA, 148 bp, Homo sapiens
  MAP TO CHR19.1; EXPRESSED IN PLACENTA, SIGNAL = 1.3; EXPRESSED IN HELA, SIGNAL = 0.97; EXPRESSED IN BRAIN, SIGNAL = 1.1; EXPRESSED IN BONE MARROW, SIGNAL =   1; EXPRESSED IN HEART, SIGNAL = 1.3; SWISSPROT HIT: P19682, EVALUE 5.00e-04; NT HIT: gi14786060, EVALUE 5.00e-78; EST_HUMAN HIT: BG438212.1, EVALUE 8.00e-78
aggtggtgggcgccaaggttgtgacaaatgcccggagtcctggagctcgctgttacggttttgtcacgatgtccacagcagaagaggccacaaaatgcattaaccacctgcacaagacggagctccacggaaagatgatctccgtgga

SEQ ID NO: 16920 - DNA, 165 bp, Homo sapiens
  MAP TO CHR16.1; EXPRESSED IN ADULT LIVER, SIGNAL = 0.82; EXPRESSED IN LUNG, SIGNAL = 0.77; EXPRESSED IN BRAIN, SIGNAL = 0.53; EXPRESSED IN HEART, SIGNAL = 0.6; EST_HUMAN HIT: AU117653.1, EVALUE 9.00e-78; SWISSPROT HIT: Q57847, EVALUE 8.70e-01; NT HIT: gi13648311, EVALUE 1.00e-82
tacccttgtcagggggaacaaagtactttggcctctcaaatccatgtttctccatccacctggctccctgtgcatccagccggtcgtagagaggagaggtgcgtaactgcctaccggtctggaagtcccagtggggaaccttcagatcatacatcaaagctagaa

SEQ ID NO: 16921 - DNA, 264 bp, Homo sapiens
  MAP TO CHR8.1; EXPRESSED IN BONE MARROW, SIGNAL = 0.98; EXPRESSED IN FETAL LIVER, SIGNAL = 0.97; EXPRESSED IN LUNG, SIGNAL = 0.58; EXPRESSED IN HELA, SIGNAL = 1.9; EXPRESSED IN BRAIN, SIGNAL = 0.95; EXPRESSED IN HEART, SIGNAL = 0.78; EST_HUMAN HIT: BF224224.1, EVALUE 0.00e+00; SWISSPROT HIT: P33991, EVALUE 1.00e-44; NT HIT: X74794.1, EVALUE 0.00e+00
ccttctttatatcttcatgttcataaatgcttggagccaaggctgaagcaagcctctcataaatgtctggtttcctggaaagttccttaagcaattccacacgtttctctgaaaaaagtttctgttctgcttcttcatcaaggccatgcagacgttttgcatccgttttccgataatgaatgacatcaatgtgggttttgtagacagacttcacattactcactcttggattgactcgaataggcacagctcgatagatgcctg

SEQ ID NO: 16922 - DNA, 202 bp, Homo sapiens
  MAP TO CHR22.1; EXPRESSED IN BRAIN, SIGNAL = 0.92; EXPRESSED IN BONE MARROW, SIGNAL = 0.7; EXPRESSED IN HEART, SIGNAL = 1.5; EXPRESSED IN FETAL LIVER, SIGNAL = 1.6; EXPRESSED IN LUNG, SIGNAL =   2; NT HIT: L77569.1, EVALUE 1.00e-110; EST_HUMAN HIT: AI871061.1, EVALUE 1.00e-107; SWISSPROT HIT: Q42533, EVALUE 5.60e-02
ccctgccctggcctaccacagctgcctccgggcctcggcctggcttcaccgcattccaggggctgcagccccctgcttctcccgccattggccttaactggccctcgggccctctctccgccccggacagggtggcacccaccactctcaggaccaccctgccaaggcagaataaaccggatcctgttgcagcctcctgtcc

SEQ ID NO: 16923 - DNA, 181 bp, Homo sapiens
  MAP TO CHR19.1; EXPRESSED IN FETAL LIVER, SIGNAL = 1.1; EXPRESSED IN LUNG, SIGNAL = 1.2; EXPRESSED IN BRAIN, SIGNAL = 0.67; EXPRESSED IN BONE MARROW, SIGNAL = 1.1; NT HIT: AB002459.1, EVALUE 7.00e-84; EST_HUMAN HIT: BG697996.1, EVALUE 1.00e-92; SWISSPROT HIT: P78329, EVALUE 7.00e-22
gtgctgaagcagcccagagacccaagcctgccttgctgccccccaggccatgacaccacggccagtggtctctcctgggtcctgtaccaccttgcaaagcacccagaataccaggagcgctgccggcaggaggtgcaagaacttctgaaggaccgtgagcctaaagagattgaatggtgag

SEQ ID NO: 16924 - DNA, 280 bp, Homo sapiens
  MAP TO CHR6.1; EXPRESSED IN BRAIN, SIGNAL = 0.99; EXPRESSED IN FETAL LIVER, SIGNAL = 0.81; NT HIT: gi6680537, EVALUE 2.60e-01; EST_HUMAN HIT: BG826811.1, EVALUE 5.90e+00; SWISSPROT HIT: P03316, EVALUE 4.60e-01
ttagagtaggcagggggccaggtcagggctgcaggcaacttgtcccaagagggtgaggttgtacttgcccagaggggtggcgggcatagctgttggaggggcagcagggctggtctgggcacagactgacatcttctagccttgtcttcagcccagagcagaacctctgcccagtccccaccctatgagctgttggctgcctgcctgccacgcgcccgggattgctgaaggctttactcatgtatctcaggaacagctgcatgccggaaactgggggctg

SEQ ID NO: 16925 - DNA, 158 bp, Homo sapiens
  MAP TO CHR4.1; EXPRESSED IN HELA, SIGNAL = 1.5; EXPRESSED IN BRAIN, SIGNAL = 0.87; EXPRESSED IN HEART, SIGNAL = 0.6; NT HIT: M83665.1, EVALUE 6.00e-84; EST_HUMAN HIT: BE252235.1, EVALUE 9.00e-84; SWISSPROT HIT: P26583, EVALUE 2.00e-25
tctgccttcttcctgttttgctctgaacatcgcccaaagatcaaaagtgaacaccctggcctatccattggggatactgcaaagaaattgggtgaaatgtggtctgagcagtcagccaaagataaacaaccatatgaacagaaagcagctaagctaaa

SEQ ID NO: 16926 - DNA, 172 bp, Homo sapiens
  MAP TO CHR5.1; EXPRESSED IN FETAL LIVER, SIGNAL = 0.91; EXPRESSED IN HELA, SIGNAL = 0.81; EXPRESSED IN BRAIN, SIGNAL = 1.3; EXPRESSED IN BONE MARROW, SIGNAL = 0.91; SWISSPROT HIT: Q9H158, EVALUE 2.00e-12; NT HIT: gi14724452, EVALUE 3.00e-92; EST_HUMAN HIT: AA296447.1, EVALUE 2.00e-75
gtggggctgcacacaggcgaggtgcgcaccgcacgggccctgctggacagagacgcgctcaagcagaggcttgtagtggtcgtccaggaccatggccagccccctctctcggccaccgtcacactcactgtggctgtggccgacagcatcccagatgtcctggctgacttgg

SEQ ID NO: 16927 - DNA, 252 bp, Homo sapiens
  MAP TO CHR11.1; EXPRESSED IN BRAIN, SIGNAL = 0.56; EXPRESSED IN LUNG, SIGNAL = 0.75; SWISSPROT HIT: P13458, EVALUE 4.20e+00; NT HIT: gi12736519, EVALUE 1.00e-24; EST_HUMAN HIT: BG166825.1, EVALUE 1.00e-84
tcacaaacctgtctggcatgtttgcttcataatcatagaactttttattccaggatttagccttaagaaaatcatcttccagtgtcccagaaatttcattctttggcctccaatagtatctttgactttcttcatcaaaaccatcactgcgcatccggctaaaagagaaagcagaagaacttttagatgtaaaagcaatctgtgagtttactttatggaacatcatgcacaaaactcatggaacaagctgag

SEQ ID NO: 16928 - DNA, 154 bp, Homo sapiens
  MAP TO CHR4.1; EXPRESSED IN ADULT LIVER, SIGNAL = 0.8; EXPRESSED IN HELA, SIGNAL = 0.76; EXPRESSED IN BRAIN, SIGNAL = 0.64; SWISSPROT HIT: Q9ZKS5, EVALUE 4.40e+00; NT HIT: Z11485.1, EVALUE 1.00e-81; EST_HUMAN HIT: BE383806.1, EVALUE 3.00e-71
tgttttccagcgtacacagactttactaaaagagtacaaagaaagggataaatccaatgtattcagagataaacgcttcggagaatacaacagcaacatgagccccgaggagaagatgatgaagaggtttgctctggaacagcaggtatggaaa

SEQ ID NO: 16929 - DNA, 348 bp, Homo sapiens
  MAP TO CHR2.1; EXPRESSED IN HEART, SIGNAL = 1.3; EXPRESSED IN BONE MARROW, SIGNAL = 0.56; EXPRESSED IN FETAL LIVER, SIGNAL = 0.6; EXPRESSED IN BRAIN, SIGNAL = 0.51; EST_HUMAN HIT: BF824856.1, EVALUE 1.00e-117; SWISSPROT HIT: Q15746, EVALUE 4.00e-08; NT HIT: gi16157781, EVALUE 0.00e+00
tttatgtatgtctttattaagccaaactaatacatagtatttctctttcttttatagttccaccaatagtagagtttggccctgaatactttgatggtctcattattaagtccggagagagccttagaattaaagctttggtacaaggaagaccagtgcctcgagtaacttggttcaaagatggagtggaaatcgaaaagaggatgaatatggaaataaccgacgtacttggatccaccagcctatttgttagagatgctactcgggaccatcgtggtgtatacacagtggaagccaaaaatgcatctggttctgcaaaagcagaaattaaagtgaaagtacaaggta

SEQ ID NO: 16930 - DNA, 189 bp, Homo sapiens
  MAP TO CHR17.1; EXPRESSED IN FETAL LIVER, SIGNAL = 1.1; EXPRESSED IN LUNG, SIGNAL = 0.75; EXPRESSED IN BRAIN, SIGNAL = 1.1; EXPRESSED IN BONE MARROW, SIGNAL = 1.2; EXPRESSED IN HEART, SIGNAL = 0.75; EXPRESSED IN ADULT LIVER, SIGNAL = 1.5; EST_HUMAN HIT: BG122688.1, EVALUE 1.00e-102; SWISSPROT HIT: P04637, EVALUE 1.00e-33; NT HIT: U94788.1, EVALUE 1.00e-102
cagtactcccctgccctcaacaagatgttttgccaactggccaagacctgccctgtgcagctgtgggttgattccacacccccgcccggcacccgcgtccgcgccatggccatctacaagcagtcacagcacatgacggaggttgtgaggcgctgcccccaccatgagcgctgctcagatagcgatggt

SEQ ID NO: 16931 - DNA, 278 bp, Homo sapiens
  MAP TO CHR9.1; EXPRESSED IN HELA, SIGNAL = 0.5; EXPRESSED IN BRAIN, SIGNAL = 0.48; EXPRESSED IN ADULT LIVER, SIGNAL = 0.4; NT HIT: gi14349302, EVALUE 0.00e+00; EST_HUMAN HIT: AL530906.1, EVALUE 0.00e+00
acagccctgctcctggacatcatgacggtggccggcgtgcagaagctcatcaagcggcgcggcccgtacgagatgagccccagcctcctggactacctcaccatggacatctacgccttcccggccgggcacgccagccgcgccgccatggtgtccaagttcttcctcagccacctggtgctggcggtgcccctgcgcgtgctgctggtgctctgggccctctgcgtgggcctgtcccgcgtgatgatcggccgccaccacgtcacggacgtcctctc

SEQ ID NO: 16932 - DNA, 182 bp, Homo sapiens
  MAP TO CHR5.1; EXPRESSED IN BRAIN, SIGNAL = 1.2; EXPRESSED IN HEART, SIGNAL = 0.83; NT HIT: gi14726595, EVALUE 2.00e-84; EST_HUMAN HIT: BI869777.1, EVALUE 3.00e-84; SWISSPROT HIT: Q62188, EVALUE 5.00e-16
ggcattcctgcaccaacctggccagcaaggagttgatgtagtccggagtagttgggtcagggctcaggggtggggatgtcacaaatgcagccgccttggcccagttcttgctccaataatgggttccatctatgccgaggctggcagtgatgggctcaccaaagactacatttcctagaagg

SEQ ID NO: 16933 - DNA, 240 bp, Homo sapiens
  MAP TO CHR14.1; EXPRESSED IN BRAIN, SIGNAL = 0.71; EXPRESSED IN LUNG, SIGNAL = 6.6; EXPRESSED IN HEART, SIGNAL = 0.61; EXPRESSED IN ADULT LIVER, SIGNAL = 0.95; NT HIT: L10058.1, EVALUE 0.00e+00; EST_HUMAN HIT: AL554583.1, EVALUE 1.00e-77; SWISSPROT HIT: P23083, EVALUE 3.00e-25
tgatctgcaggtatgctgtgctggcagaggtgtccatggagaagacaaaccgtcctgtgaagccctgggcatatgttgggttcccagtgtaggtgttgaaccatcccatccactcaagcccttgtccaggggcctgtggcacccaattcataccataggtggtgaaactgtaaccagaagccttgcaggagaccttcactgaggccccaggctgcttcacctcatggccagactgcacca

SEQ ID NO: 16934 - DNA, 138 bp, Homo sapiens
  MAP TO CHR12.1; EXPRESSED IN BRAIN, SIGNAL = 0.51; EXPRESSED IN HEART, SIGNAL = 0.51; EXPRESSED IN BONE MARROW, SIGNAL = 0.56; NT HIT: L31848.1, EVALUE 5.00e-72; EST_HUMAN HIT: AU136725.1, EVALUE 4.00e-61; SWISSPROT HIT: P36896, EVALUE 4.00e-18
ctgggtctctgcacaggcactgcgggtgatggggaagatgatgcgagagtgttggtatgccaacggcgcagcccgcctgacggccctgcgcatcaagaagaccctctcccagctcagcgtgcaggaagacgtgaagat

SEQ ID NO: 16935 - DNA, 268 bp, Homo sapiens
  MAP TO CHR13.1; EXPRESSED IN FETAL LIVER, SIGNAL = 0.44; EXPRESSED IN HELA, SIGNAL = 0.43; EXPRESSED IN BRAIN, SIGNAL = 0.44; EXPRESSED IN BONE MARROW, SIGNAL = 0.45; NT HIT: gi12957487, EVALUE 0.00e+00; EST_HUMAN HIT: AL530242.1, EVALUE 0.00e+00
tctctttagaggtaagccagcgattccccacaacacaccccaacgggcgccagatcatgcttacctacctgctgccctggctgcacaacatcgagctggtggacagcaggctcctcctcccgggtcgagccccagcagcccagaggacgaagtcaaggaccgggaaggtgacgtgactgcttctcacgggctgagaggaaatggctggggctctccagaagccacgtcactggtcctgaacaacctcatgtacatgacggccaaggta

SEQ ID NO: 16936 - DNA, 361 bp, Homo sapiens
  MAP TO CHR19.1; EXPRESSED IN LUNG, SIGNAL = 1.4; EXPRESSED IN HELA, SIGNAL = 1.9; EXPRESSED IN BRAIN, SIGNAL = 1.5; EXPRESSED IN HEART, SIGNAL = 1.4; EXPRESSED IN ADULT LIVER, SIGNAL = 1.4; EXPRESSED IN BONE MARROW, SIGNAL = 1.4; EXPRESSED IN PLACENTA, SIGNAL = 1.4; NT HIT: gi14764828, EVALUE 0.00e+00; EST_HUMAN HIT: BF527499.1, EVALUE 0.00e+00
gcaggctatcctgtccgaaaatccatccagcaggacgtcttggggaccaagcttcctcaactgagcaaggggagccccgaggagcccgtggtggggtgccccctggggcagaggcagccctgccggaaaatgctccccgaccgctcgcgggccgcccgggaccgggccaaccagaagctggtggagtacattgtgaaggccaagggcgcggagagccacctgcgggccatcctaaagagcaggaagccatctcgctggctgcagaccttcctgagctccagccagtacgtgacctgtgtggagacctacctggaggatgaggggcagctggacctggtggtgaagtacctgcagggcgtct

SEQ ID NO: 16937 - DNA, 229 bp, Homo sapiens
  MAP TO CHRX.1; EXPRESSED IN HELA, SIGNAL =   1; EXPRESSED IN BRAIN, SIGNAL = 0.75; EXPRESSED IN ADULT LIVER, SIGNAL = 0.88; EXPRESSED IN LUNG, SIGNAL = 1.2; NT HIT: gi14764088, EVALUE 1.00e-123; SWISSPROT HIT: Q93008, EVALUE 2.00e-40; EST_HUMAN HIT: BI011466.1, EVALUE 1.00e-123
ttttacctgccagagaagttcactgaggacagtagatgagaactgaggattctcccagcagcaaaaacgaagcaatttgacggtttcctctgaattactgcagtcttcaatgattttcttcacataacttgttctcacaaataaaatgtctgccacattctgctgaattggcattataggttgtgataaattaggatcaccaaaaggattgggaagaggaggattacct

SEQ ID NO: 16938 - DNA, 186 bp, Homo sapiens
  MAP TO CHR17.1; EXPRESSED IN ADULT LIVER, SIGNAL = 0.59; EXPRESSED IN FETAL LIVER, SIGNAL = 0.91; EXPRESSED IN HELA, SIGNAL = 0.87; EXPRESSED IN BRAIN, SIGNAL = 0.91; EXPRESSED IN BONE MARROW, SIGNAL = 0.9; EXPRESSED IN HEART, SIGNAL = 0.58; SWISSPROT HIT: Q00664, EVALUE 2.50e+00; EST_HUMAN HIT: BG702938.1, EVALUE 1.00e-100; NT HIT: U92460.1, EVALUE 2.60e+00
agatcccatcagtcaacaacattcaagttcctgttctcatccggaggtcaaagcttctggttctcccaactcattatcccaaatactgatcatcctacatttgctttcctgctcactgtctccatgaggtgtccatctattgggtcaaaggccccaacatggcgcggtcacctctgaaattaaaag

SEQ ID NO: 16939 - DNA, 175 bp, Homo sapiens
  MAP TO CHR22.1; EXPRESSED IN LUNG, SIGNAL = 0.57; EXPRESSED IN BRAIN, SIGNAL = 0.4; SWISSPROT HIT: O75381, EVALUE 8.60e-01; EST_HUMAN HIT: AA584173.1, EVALUE 1.00e-33; NT HIT: gi13899208, EVALUE 3.00e-92
accttctgggcgatcatgttgcagatctcaggcaggaagtcctcactgaggagcttgtagagctgccgttctcgaagggaggtcctctcgcgaaaactctcggtgacctgtctccattcctcttctgtctggcacaggagccaccaagtaccttggcctggcccttgggacccta

SEQ ID NO: 16940 - DNA, 300 bp, Homo sapiens
  MAP TO CHR5.1; EXPRESSED IN ADULT LIVER, SIGNAL = 0.46; EXPRESSED IN FETAL LIVER, SIGNAL = 1.1; EXPRESSED IN LUNG, SIGNAL =   1; EXPRESSED IN HELA, SIGNAL = 0.94; EXPRESSED IN BRAIN, SIGNAL = 1.1; EXPRESSED IN BONE MARROW, SIGNAL = 0.99; EXPRESSED IN HEART, SIGNAL =   1; NT HIT: gi14728087, EVALUE 0.00e+00; SWISSPROT HIT: Q9Y5I1, EVALUE 2.00e-51; EST_HUMAN HIT: AI969295.1, EVALUE 0.00e+00
tgtcgttaatgtccttcacctccacgttcacatggaaaacctgcagcggcctgtccacgatcacctccaggtggatgctgcactccgcgctctgcccgcacagctcctcgcggtcgatccgagaattcacaaacaaaatgccattctgcagatttacctccagaaggtccccatgtgttttggacgccacccggaacaggcgctgcaccagctccgccagctccagccccaggtcctgcgcgatgcggcccacgaaggtgccgtgtttggcctcctccgagacggagtagtggagctggc

SEQ ID NO: 16941 - DNA, 166 bp, Homo sapiens
  MAP TO CHR19.1; EXPRESSED IN BRAIN, SIGNAL = 0.94; EXPRESSED IN HELA, SIGNAL = 1.3; EXPRESSED IN HEART, SIGNAL = 0.82; EXPRESSED IN ADULT LIVER, SIGNAL = 0.8; NT HIT: gi15303693, EVALUE 7.00e-87; SWISSPROT HIT: Q06624, EVALUE 1.00e-07; EST_HUMAN HIT: AA236737.1, EVALUE 1.00e-86
gtgaaaaatgactctggtttcttctctatatcctcagtgtccaccttcacatccaccatggggttgagattctgagctcgctccaaagaggcttcagccctatttcggccaacagacccagtacgaatcaagaactgagctccgggatcttctggagttacctagg

SEQ ID NO: 16942 - DNA, 198 bp, Homo sapiens
  MAP TO CHR22.1; EXPRESSED IN BONE MARROW, SIGNAL = 0.35; EXPRESSED IN BRAIN, SIGNAL = 0.34; NT HIT: M57678.1, EVALUE 1.00e-107; SWISSPROT HIT: P09382, EVALUE 1.00e-23; EST_HUMAN HIT: AI802655.1, EVALUE 1.00e-106
ccaggtgtgcatcaccttcgaccaggccaacctgaccgtcaagctgccagatggatacgaattcaagttccccaaccgcctcaacctggaggccatcaactacatggcagctgacggtgacttcaagatcaaatgtgtggcctttgactgaaatcagccagcccatggcccccaataaaggcagctgcctctgctccc

SEQ ID NO: 16943 - DNA, 184 bp, Homo sapiens
  MAP TO CHR17.1; EXPRESSED IN BONE MARROW, SIGNAL = 0.49; EXPRESSED IN BRAIN, SIGNAL = 0.48; NT HIT: gi8923323, EVALUE 2.00e-84; SWISSPROT HIT: O66647, EVALUE 1.10e+00; EST_HUMAN HIT: BG819789.1, EVALUE 1.00e-86
tctgtttccttatggtaacctcagtttgaagtagatctgtaccaaaatgaaacagcctgtcagagtcctttggattatcagtaccgtcaggagatcctgaagctggagaattcgggtggcaagaaaaaccgacgaatctttacctacactgactctgatagatacaccaatttggaggaggtat

SEQ ID NO: 16944 - DNA, 213 bp, Homo sapiens
  MAP TO CHR6.1; EXPRESSED IN FETAL LIVER, SIGNAL = 1.1; EXPRESSED IN HELA, SIGNAL = 1.3; EXPRESSED IN LUNG, SIGNAL = 0.79; EXPRESSED IN BRAIN, SIGNAL = 1.3; EXPRESSED IN HEART, SIGNAL = 0.73; EXPRESSED IN BONE MARROW, SIGNAL = 1.4; SWISSPROT HIT: P72689, EVALUE 7.30e-01; EST_HUMAN HIT: BG622492.1, EVALUE 2.80e-01
ctgccaggcccttgcttatatgatgtcagaagccctgtgcccggtgccattgtcaatgccatgtcccagattacctaatggctgcttcttggagatggtttggtgtccatgcacatttttctctgccgttggagccagggtgaggagctgcttgcaacagctggattccagggtgtcagaggagcccttggagcttgccttgagcctggcagg

SEQ ID NO: 16945 - DNA, 349 bp, Homo sapiens
  MAP TO AL353601.7; EXPRESSED IN BRAIN, SIGNAL = 0.49; EXPRESSED IN HEART, SIGNAL = 0.47; EXPRESSED IN ADULT LIVER, SIGNAL = 0.39; SWISSPROT HIT: P30825, EVALUE 2.00e-52; EST_HUMAN HIT: AL596602.1, EVALUE 0.00e+00; NT HIT: AF078107.1, EVALUE 0.00e+00
gggacctaccgatgatgtaggagaggattaagttccagccggtgatgaaggcccagagctctccaacggtgacatagctgtagaggtaagctgagcccgtcttggggacccgagcaccaaactcgccatagcacaggccagccagcactgaggccagcgcagcgatcaggaaggagatgacaatggcagggcctgcattctcacgggccacagctccagccaggacgtagacaccagcacccagtgtgctgcccaccccgagggccaccagatcaaaagtgttcaggcagcgagacagccgcgtctcctcccggctacagtccaccaccttccgccgcagcatctgctg

SEQ ID NO: 16946 - DNA, 233 bp, Homo sapiens
  MAP TO CHR19.1; EXPRESSED IN ADULT LIVER, SIGNAL = 4.8; EXPRESSED IN PLACENTA, SIGNAL =   3; EXPRESSED IN LUNG, SIGNAL = 1.5; EXPRESSED IN HELA, SIGNAL = 3.4; EXPRESSED IN BRAIN, SIGNAL = 2.4; EXPRESSED IN HEART, SIGNAL = 2.1; EXPRESSED IN BONE MARROW, SIGNAL = 1.9; SWISSPROT HIT: P07562, EVALUE 1.40e-01; EST_HUMAN HIT: AW368928.1, EVALUE 2.00e-02
tggctggggctggatgcaatttcagccgcagagcagggctccctggctggaagcaattttctcattaggaccccaagcctgctagctcgttgcttttcagccctcactcccctcctgcgaaaccgcaccccacaggcctccccacagaccactcacacgcacagggaaccacacgtatattgagttgaggggcgactggggggtcacctccgtggggctgggtgcaaggagag

SEQ ID NO: 16947 - DNA, 205 bp, Homo sapiens
  MAP TO CHR5.1; EXPRESSED IN BRAIN, SIGNAL = 0.54; EXPRESSED IN HEART, SIGNAL = 0.65; EXPRESSED IN BONE MARROW, SIGNAL = 0.39; EXPRESSED IN FETAL LIVER, SIGNAL = 0.49; SWISSPROT HIT: Q9H158, EVALUE 7.00e-24; EST_HUMAN HIT: AW152471.1, EVALUE 2.00e-30; NT HIT: gi14728058, EVALUE 1.00e-112
tgatcccctttcctattccgaatctgaatacaggatattggcaaattcagtcctaccccagtggcaagatttcgcaggtcggcagcattgtactccccacgcaacagcaaactgttattatcagaaccaagtcccagagaggcccgatagagataagtctgagaaagtctctcaactgtagtgacatctatggtggctgatgtca

SEQ ID NO: 16948 - DNA, 236 bp, Homo sapiens
  MAP TO CHR22.1; EXPRESSED IN LUNG, SIGNAL = 0.99; EXPRESSED IN BRAIN, SIGNAL = 0.8; EXPRESSED IN HEART, SIGNAL = 0.95; SWISSPROT HIT: P06719, EVALUE 1.00e-06; EST_HUMAN HIT: BG013567.1, EVALUE 3.00e-69
catcactgtagatgccagtgaggtccctccctttactgtagatgccagtgtgacccttcccttcactgtagatgccagcgaggtccctccattcactgtagatgccagcgaggtccctccattcactgtagatgccagcgaggtccctccctttactgtagatgccagcaaggtccctcccttcactgtagatgccagcatggcccttcccttcactgtagatgccagcgaggtcc

SEQ ID NO: 16949 - DNA, 229 bp, Homo sapiens
  MAP TO CHR11.1; EXPRESSED IN LUNG, SIGNAL = 1.5; EXPRESSED IN HELA, SIGNAL = 1.4; EXPRESSED IN BRAIN, SIGNAL = 1.7; EXPRESSED IN ADULT LIVER, SIGNAL = 1.8; EXPRESSED IN FETAL LIVER, SIGNAL = 1.6; NT HIT: AF144711.1, EVALUE 5.30e-02; SWISSPROT HIT: P27738, EVALUE 1.30e+00; EST_HUMAN HIT: BF849580.1, EVALUE 1.00e-123
caggaaactggagaaggtgaggtgacttgctcaaaaagacagacccaagtgtgggtgaacttggaagagaaccttggaattctggctccctggatcccagagaagtccgtgtgccctagacagtgtggtttcctattacataagcaactcttttattactcacactcgcttgctcctgcaagactcctacagcatctccccctagaaaacacagtggaagaaaagggtt

SEQ ID NO: 16950 - DNA, 149 bp, Homo sapiens
  MAP TO CHR17.1; EXPRESSED IN BRAIN, SIGNAL = 0.53; EXPRESSED IN HEART, SIGNAL = 0.58; EXPRESSED IN BONE MARROW, SIGNAL = 0.44; SWISSPROT HIT: Q92764, EVALUE 1.00e-10; EST_HUMAN HIT: BF569905.1, EVALUE 1.00e-48; NT HIT: Y16791.1, EVALUE 1.00e-78
gctcacctcctcatggttcttcttcaggcagagcagctcctccttcagggactccacctgggcctccaggtcagacttgcacagggtcaggtcatccaggatcctgcgcaggccgttgatgtctgactccaccagctgccgcagggaca

SEQ ID NO: 16951 - DNA, 216 bp, Homo sapiens
  MAP TO CHR19.1; EXPRESSED IN FETAL LIVER, SIGNAL = 0.86; EXPRESSED IN HELA, SIGNAL = 0.69; EXPRESSED IN BRAIN, SIGNAL = 0.85; EXPRESSED IN LUNG, SIGNAL = 0.97; EXPRESSED IN ADULT LIVER, SIGNAL = 1.1; SWISSPROT HIT: P17105, EVALUE 6.00e-28; EST_HUMAN HIT: BI000788.1, EVALUE 1.00e-108; NT HIT: D38169.1, EVALUE 1.00e-113
tgtgctcaggacctatctggaagaggagctagtgaaggcacgggaacgtccccgtccccggaaggacatgtatgagaagatggtggctgtggaccctggggcccctacccctgaggagcatgcccagggtgcagtcaccaagccccgctacatgcagtggagggaaaccatgagctccacctctaccctgggcttccggatcgagggcatcaaggt

SEQ ID NO: 16952 - DNA, 185 bp, Homo sapiens
  MAP TO CHR1.1; EXPRESSED IN FETAL LIVER, SIGNAL = 1.7; EXPRESSED IN LUNG, SIGNAL = 2.3; EXPRESSED IN HELA, SIGNAL = 1.5; EXPRESSED IN BRAIN, SIGNAL = 1.6; EXPRESSED IN BONE MARROW, SIGNAL = 1.7; EXPRESSED IN ADULT LIVER, SIGNAL = 1.5; SWISSPROT HIT: O14896, EVALUE 8.00e-31; EST_HUMAN HIT: BG718815.1, EVALUE 1.00e-95; NT HIT: gi5453699, EVALUE 8.00e-96
agatcatggccctccacccccgcagagtccggctaaagccctggctggtggcccaggtggatagtggcctctaccctgggctcatctggctacacagggactctaaacgcttccagattccctggaaacatgccacccggcatagccctcaacaagaagaggaaaataccatttttaaggtaaag

SEQ ID NO: 16953 - DNA, 245 bp, Homo sapiens
  MAP TO CHR10.1; EXPRESSED IN BONE MARROW, SIGNAL = 0.67; EXPRESSED IN LUNG, SIGNAL = 0.78; EXPRESSED IN BRAIN, SIGNAL = 0.49; SWISSPROT HIT: P09914, EVALUE 7.00e-47; EST_HUMAN HIT: AL552669.1, EVALUE 0.00e+00; NT HIT: gi4504584, EVALUE 0.00e+00
tcagggttttcagggtccacttcaagcaccttttcaaagcaggccttggcccgttcataattctttcctccacacttcagcaaggcccatccttcctcacagtctatttctggacactccattctatagcggaagggatttgaaagcttcttgcaaatgttctccaccttgtccaggtaagtctgggcttctgccagtctgcccatgtggtaatacatccaggcaaagttgccccaggtcaccag

SEQ ID NO: 16954 - DNA, 242 bp, Homo sapiens
  MAP TO CHR17.1; EXPRESSED IN FETAL LIVER, SIGNAL = 0.64; EXPRESSED IN HELA, SIGNAL = 0.69; EXPRESSED IN BRAIN, SIGNAL = 0.69; EXPRESSED IN HEART, SIGNAL = 0.49; EXPRESSED IN ADULT LIVER, SIGNAL = 0.6; SWISSPROT HIT: O27606, EVALUE 4.90e+00; EST_HUMAN HIT: BE260736.1, EVALUE 1.00e-123; NT HIT: gi14774017, EVALUE 0.00e+00
gcaggttctttagggagctcacggagctcaagaccttcgccaactattctacgtgcgaccgcagcaacctggcggactggctgggcagcctggacccgcgcttccgccagtacacctacggcctggtcagctgcggcctggaccgctccctgctgcaccgcgtgtctgagcagcagctgctggaagactgcggcatccacctgggcgtgcaccgcgcccgcatcctcacggcggccagaggt

SEQ ID NO: 16955 - DNA, 284 bp, Homo sapiens
  MAP TO CHR3.1; EXPRESSED IN FETAL LIVER, SIGNAL = 0.73; EXPRESSED IN LUNG, SIGNAL = 0.89; EXPRESSED IN BRAIN, SIGNAL = 0.58; EXPRESSED IN HEART, SIGNAL = 0.98; SWISSPROT HIT: P21179, EVALUE 3.70e-01; EST_HUMAN HIT: BI194595.1, EVALUE 9.70e-02; NT HIT: AB022159.1, EVALUE 6.60e-02
ttaatcactgccaccttcccatgacccgcctcaatcacgtctctttacagttgggcagagccggctgggcctcctcaaacttccatatctgcaccgggagatcactgatagggctaatggcatttgcttgcctccacaccctgggcccagtgctccaggagtcacgcaatcccacaggcccagggcggaaactgttcccacagcagcaaggccctccggcctggggagcctccccgccccataaaatatatgaaaagagcctttcttcatggccacctggccag

SEQ ID NO: 16956 - DNA, 169 bp, Homo sapiens
  MAP TO CHR19.1; EXPRESSED IN ADULT LIVER, SIGNAL = 3.2; EXPRESSED IN HEART, SIGNAL = 1.9; EXPRESSED IN HELA, SIGNAL = 2.3; EXPRESSED IN BRAIN, SIGNAL = 1.1; NT HIT: gi6715585, EVALUE 1.00e-82; SWISSPROT HIT: P31751, EVALUE 3.00e-19; EST_HUMAN HIT: BF987457.1, EVALUE 2.00e-82
ccagcacttaccactttagcccgtgccttgctgaccgccacttccatctcctcagtcgtggaggagtcactgggggagccacacttgtagtccatggggtcctcgcctggggcccgctgcttgaggctgttggcgaccatctggatggcccgcatccactcctccctgt

SEQ ID NO: 16957 - DNA, 193 bp, Homo sapiens
  MAP TO CHR16.1; EXPRESSED IN BRAIN, SIGNAL = 0.82; EXPRESSED IN FETAL LIVER, SIGNAL = 0.62; SWISSPROT HIT: P23382, EVALUE 6.50e-01; EST_HUMAN HIT: BF947775.1, EVALUE 1.00e+00
accaagttcattcatgtgactgtattcatctagtattgtttctaacttgcagagaaccccagtgggtatatcccccacactttacctgcccacttctgatccccagattgtctccaactctgcacctcagacatgatgtggtaaatatctttgtatcccttatcagtgcatccctatgagaatttctttggga

SEQ ID NO: 16958 - DNA, 306 bp, Homo sapiens
  MAP TO CHR7.1; EXPRESSED IN FETAL LIVER, SIGNAL = 0.31; EXPRESSED IN BRAIN, SIGNAL = 0.42; SWISSPROT HIT: P10071, EVALUE 3.00e-43; NT HIT: gi13518031, EVALUE 0.00e+00; EST_HUMAN HIT: BF194991.1, EVALUE 0.00e+00
acttacggtagtggggctccatgtaaccattcctggggtccatggcaaacaccgtcccgcggtacggcacagagggctccgccacgtgtggcagggacccatggatctctttcttgatcaatgaggccctctcgtcactcgatgttgaaggttcctcactgactttgctgagcccctggacattctgtggctgcatagtgattgcgtttcttctctctctgtgataagtctgtccaggactttcatcctctaaagaaagaagaaaaatgaaagactctgtaaactactttaaggagcaattaaaaa

SEQ ID NO: 16959 - DNA, 221 bp, Homo sapiens
  MAP TO CHR12.1; EXPRESSED IN HEART, SIGNAL = 1.2; EXPRESSED IN ADULT LIVER, SIGNAL = 1.7; EXPRESSED IN HELA, SIGNAL =   2; EXPRESSED IN BRAIN, SIGNAL = 1.5; SWISSPROT HIT: Q9VPY8, EVALUE 3.00e-19; NT HIT: gi14756915, EVALUE 1.00e-117; EST_HUMAN HIT: BE207231.1, EVALUE 1.00e-117
gagtcggccccacggatcatgcggctggtggccgaatgcagccgctccagggcccgggcaggcgagctgtggctgccgcatgggacagtggccactcctgtgttcatgccagtgggcacgcaggccaccatgaagggcatcacgaccgaacagctggacgctctgggttgccgcatctgcctgggcaatacctaccatctgggtctaaggccggtgggtgg

SEQ ID NO: 16960 - DNA, 167 bp, Homo sapiens
  MAP TO CHR5.1; EXPRESSED IN BRAIN, SIGNAL = 0.54; EXPRESSED IN FETAL LIVER, SIGNAL = 0.32; SWISSPROT HIT: Q9Y5I2, EVALUE 1.00e-24; NT HIT: gi14165380, EVALUE 3.00e-89; EST_HUMAN HIT: BI465306.1, EVALUE 1.00e-36
gaggccttgggtgcctggctgccctccacaagcgacacaagcacagtggccgtggccgtcagcgacggctcgccatggtccttcaccagcaccagtaggcgctggcgtggcgagtcagtctcatccagagcgcgcgtcgtactgatctcgcccgtgtacagccccac

SEQ ID NO: 16961 - DNA, 457 bp, Homo sapiens
  MAP TO CHR19.1; EXPRESSED IN BONE MARROW, SIGNAL = 4.7; EXPRESSED IN ADULT LIVER, SIGNAL = 4.2; EXPRESSED IN PLACENTA, SIGNAL = 5.4; EXPRESSED IN FETAL LIVER, SIGNAL = 4.2; EXPRESSED IN LUNG, SIGNAL = 4.5; EXPRESSED IN HELA, SIGNAL = 6.3; EXPRESSED IN BRAIN, SIGNAL = 4.9; SWISSPROT HIT: Q9ULX6, EVALUE 2.00e-72; NT HIT: gi14761726, EVALUE 0.00e+00; EST_HUMAN HIT: AI479138.1, EVALUE 0.00e+00
tcactcggaagtcggctgtggtccaggtcttccaggtccgcctcatctgcttcatgccattgccaaacccgaaaccaaagcgggagccgcccgggaaggcgcccccacctcgcatgccctggaacatgccgtactcggggatgatgttctgggagaagagggagggcagccgagaggcaccagacatgcactggccccgggcccccatggggtcttcccacatgcgcccatagcctgaggccattggccggccgctccgggcatcccgggcccagccctgtgccctgggaccgaaggtgtcgttgccacgcatgcggaactggtcgcggtaggcatcgtattggccctcataggccatttccatctcagggtcaagctcgctgtagtcatagcctgaccggtacaggtcgcgctcactcaggacggccctcgagtcgcaggactcataagagtcata

SEQ ID NO: 16962 - DNA, 207 bp, Homo sapiens
  MAP TO CHR5.1; EXPRESSED IN BONE MARROW, SIGNAL = 1.2; EXPRESSED IN HEART, SIGNAL = 1.7; EXPRESSED IN ADULT LIVER, SIGNAL = 0.87; EXPRESSED IN LUNG, SIGNAL = 1.8; EXPRESSED IN HELA, SIGNAL = 1.2; EXPRESSED IN BRAIN, SIGNAL = 1.1; SWISSPROT HIT: Q9UKP4, EVALUE 6.00e-04; EST_HUMAN HIT: BF790959.1, EVALUE 2.70e-01
cataccttcatccaggacagcttgccactgaagtatatgctttggggaggaagttctaacactataagcctgacattgccagtctctgaatccaggcaaacctgcaggacaaggtggattctcacatattctgtattgttttctgggaccattacaatcccttgcttcagaatctagcctagaaaagaaagtacaaataatcaattt

SEQ ID NO: 16963 - DNA, 145 bp, Homo sapiens
  MAP TO CHR19.1; EXPRESSED IN LUNG, SIGNAL = 1.1; EXPRESSED IN BRAIN, SIGNAL = 0.49; EXPRESSED IN BONE MARROW, SIGNAL = 0.56; EXPRESSED IN ADULT LIVER, SIGNAL = 0.46; SWISSPROT HIT: Q14584, EVALUE 6.00e-23; NT HIT: gi14760087, EVALUE 3.00e-76; EST_HUMAN HIT: BF843253.1, EVALUE 9.00e-56
acatgaacgagttcacactggagagaaaccatataaatgtaaacaatgtggtaaagcctttagttattcaacttcccttcaaatacatgaaagaactcacactggagagaagccttatgaatgtaaggaatgtgggaaagcattc

SEQ ID NO: 16964 - DNA, 213 bp, Homo sapiens
  MAP TO CHR11.1; EXPRESSED IN BRAIN, SIGNAL = 0.52; EXPRESSED IN HEART, SIGNAL = 0.45; SWISSPROT HIT: Q15620, EVALUE 4.00e-27; NT HIT: X89669.1, EVALUE 2.00e-72; EST_HUMAN HIT: AI962273.1, EVALUE 1.00e-116
tgacatctttattcctcaggctgtagatcagggggttcagcatgggcacaatagtagtataaaacacagacgacactttcctctggtccatggagctgacagatgatggctgcaggtacatgaatgctgcagatccaaagaaaacagcaacagccaagatgtgggagctgcaagtgctgaaggctttggacctgccctcagtggagtgaatgc

SEQ ID NO: 16965 - DNA, 219 bp, Homo sapiens
  MAP TO CHR3.1; EXPRESSED IN ADULT LIVER, SIGNAL = 0.41; EXPRESSED IN FETAL LIVER, SIGNAL = 0.6; EXPRESSED IN BRAIN, SIGNAL = 0.63; SWISSPROT HIT: Q05086, EVALUE 7.00e-38; NT HIT: AF016707.1, EVALUE 1.00e-120; EST_HUMAN HIT: BE891281.1, EVALUE 1.00e-114
ttataggtatgttcacatacgatgaatctacaaaattgttttggtttaatccatcttcttttgaaactgagggtcagtttactctgattggcatagtactgggtctggctatttacaataactgtatactggatgtacattttcccatggttgtctacaggaagctaatggggaaaaaaggaacttttcgtgacttgggagactctcacccagtaagtt

SEQ ID NO: 16966 - DNA, 220 bp, Homo sapiens
  MAP TO CHR17.1; EXPRESSED IN LUNG, SIGNAL = 0.82; EXPRESSED IN HELA, SIGNAL = 0.48; EXPRESSED IN BRAIN, SIGNAL = 0.69; EXPRESSED IN HEART, SIGNAL = 0.78; SWISSPROT HIT: P34703, EVALUE 2.00e-25; NT HIT: gi14773922, EVALUE 1.00e-116; EST_HUMAN HIT: BI009653.1, EVALUE 1.00e-117
ttcctccagcactgactcatatattgaagtccttgatggttcccgtgtccaccctgagacttatgagtgggctaggaagatggcagtggatgccctggaatacgatgaatcagccgaggatgccaatcctgcaggagcccttgaagaaatcttggaaaacccagagcgactgaaagacctggaccttgatgcctttgcagaagagctggagaggcaggta

SEQ ID NO: 16967 - DNA, 133 bp, Homo sapiens
  MAP TO CHR19.1; EXPRESSED IN ADULT LIVER, SIGNAL =   8; EXPRESSED IN PLACENTA, SIGNAL =  12; EXPRESSED IN FETAL LIVER, SIGNAL = 9.5; EXPRESSED IN HELA, SIGNAL = 8.6; EXPRESSED IN HEART, SIGNAL = 5.3; EXPRESSED IN BONE MARROW, SIGNAL =  14; EXPRESSED IN LUNG, SIGNAL = 6.2; EXPRESSED IN BRAIN, SIGNAL =  11; SWISSPROT HIT: P48038, EVALUE 7.80e+00; NT HIT: gi14589963, EVALUE 1.10e-01
ccaggagactttgcctacaacctggatcaggacaacgcccgtgttggggataggttcatgcggctcattgaacccgtggctgccagcctgccgtacatgacatgccctgggaatcatgaagaacgctagtgag

SEQ ID NO: 16968 - DNA, 194 bp, Homo sapiens
  MAP TO CHR11.1; EXPRESSED IN BRAIN, SIGNAL = 0.86; EXPRESSED IN HEART, SIGNAL = 0.89; EXPRESSED IN LUNG, SIGNAL = 0.9; SWISSPROT HIT: Q03164, EVALUE 4.00e-20; NT HIT: Z69771.1, EVALUE 1.00e-105; EST_HUMAN HIT: BF944387.1, EVALUE 2.00e-91
gactgaggaaacattattcctagagtaagtattcccagttctcattggagacattatccggagtttggaccgctggggtgataaggaagaggtactgtgacgcctggagccaatgcttcgaagtccagaggagagtaaaggatcacctactgtgactatttcatgagtggttggggtaggacttcctaaacaag

SEQ ID NO: 16969 - DNA, 170 bp, Homo sapiens
  MAP TO CHR19.1; EXPRESSED IN LUNG, SIGNAL = 1.1; EXPRESSED IN BRAIN, SIGNAL = 0.61; EXPRESSED IN HEART, SIGNAL = 0.89; EXPRESSED IN BONE MARROW, SIGNAL = 0.85; SWISSPROT HIT: Q9Y2G4, EVALUE 2.00e-02; NT HIT: gi14249329, EVALUE 3.00e-89; EST_HUMAN HIT: BF870044.1, EVALUE 1.00e-86
accccctcagggcccggcccgggccgcagcaggtgaacgggctgctcattctccaggttgcgcagtgtggggtccgccccagctgccaacaggtgccgcacgatggcctcctgggccggcccagggggcagggcagccgccatgtggagggctgtgttcccgtgggcctg

SEQ ID NO: 16970 - DNA, 234 bp, Homo sapiens
  MAP TO CHR17.1; EXPRESSED IN LUNG, SIGNAL = 0.7; EXPRESSED IN HELA, SIGNAL = 0.66; EXPRESSED IN BRAIN, SIGNAL = 0.59; EXPRESSED IN HEART, SIGNAL = 0.53; EXPRESSED IN BONE MARROW, SIGNAL = 0.49; SWISSPROT HIT: P37959, EVALUE 9.00e-06; NT HIT: gi7661657, EVALUE 1.00e-120; EST_HUMAN HIT: BE785725.1, EVALUE 1.00e-120
tacctttcgttagagcaactgggccaaagtagtttgtctccatgaccctcttgtccacatccactgtggtgtccatgatggtaccacggtagctgatcccagcattgttgacaagtatgtcgacatagccaaagcactgcaggatctcagctgctgctgcaactatggccccagagtctgtgaggtcgaaggtcaccaagtaaggcttgtgtgtctgcacctggtcaaatacaa

SEQ ID NO: 16971 - DNA, 118 bp, Homo sapiens
  MAP TO CHR14.1; EXPRESSED IN HEART, SIGNAL = 0.76; EXPRESSED IN BONE MARROW, SIGNAL = 3.4; EXPRESSED IN ADULT LIVER, SIGNAL = 0.96; EXPRESSED IN PLACENTA, SIGNAL = 1.2; EXPRESSED IN FETAL LIVER, SIGNAL = 0.93; EXPRESSED IN BRAIN, SIGNAL = 1.1; EXPRESSED IN LUNG, SIGNAL = 1.4; SWISSPROT HIT: P23083, EVALUE 3.00e-13; NT HIT: U84179.1, EVALUE 3.00e-60; EST_HUMAN HIT: BE169081.1, EVALUE 2.00e-50
gtgaaggtgtatccagaagccttgcaggagaccttcactgaggccccaggcttcttcacctcagccccagactgcaccagctgcacctgggagtgggcacctgtggagagaacacagg

SEQ ID NO: 16972 - DNA, 188 bp, Homo sapiens
  MAP TO AL356000.4; EXPRESSED IN BONE MARROW, SIGNAL = 0.78; EXPRESSED IN ADULT LIVER, SIGNAL = 0.53; EXPRESSED IN BRAIN, SIGNAL = 0.72; EXPRESSED IN HEART, SIGNAL = 0.44
  unsure 117
  unsure 169
cacttctgtgattgcagctccagttgaaactaaaaactcaactaggaatacccggtgatatagccatgatgatataaacagctcaaaaagaagcccccaagttataagacgtggcanaaagggggaagctgcagatgctttttgggctctgggcaaactcccgagaccncaggtggaaactgtgaagt

SEQ ID NO: 16973 - DNA, 223 bp, Homo sapiens
  MAP TO CHR17.1; EXPRESSED IN LUNG, SIGNAL = 1.3; EXPRESSED IN BRAIN, SIGNAL = 0.73; EXPRESSED IN HEART, SIGNAL = 0.75; EST_HUMAN HIT: AA852442.1, EVALUE 1.00e-114; SWISSPROT HIT: Q99536, EVALUE 2.00e-35; NT HIT: L78833.1, EVALUE 1.00e-122
gggacctgtcacctgcagccatgtgtaccaagacgctgtggccaggctgtaggttgccgaagtcaaagaggaccatgtaggctgtaatgtaattgacgagcaaggcagcagcttcctcaaaggtcatggcctcaggaatcaggaaggtctggaccgagggcacagtcacctcttcctgccacatccctgaccggttcaacaccatcacccggtctcctgcctt

SEQ ID NO: 16974 - DNA, 270 bp, Homo sapiens
  MAP TO CHR11.1; EXPRESSED IN BRAIN, SIGNAL = 0.56; EXPRESSED IN BONE MARROW, SIGNAL = 0.63; EXPRESSED IN ADULT LIVER, SIGNAL = 0.45; EST_HUMAN HIT: BI011063.1, EVALUE 9.20e-02; SWISSPROT HIT: O55028, EVALUE 3.70e+00; NT HIT: X69536.1, EVALUE 6.30e-02
cctgattttctgggtcaactgacaaataaaatacattagaggtcaattctagatttcataacagatttttggaagaggaaagtatccaaaaattattttgtttgacctgtttcactttctggcctctcagcaggctctctaccatttgtgtcaatgtgtctttgtggttaatagtgctcctggcatggagcatggttgaagacccaaatagtgaatttaactcaaattctatcctctaacaacaggacagttctcctggggaacaattct

SEQ ID NO: 16975 - DNA, 186 bp, Homo sapiens
  MAP TO CHR12.1; EXPRESSED IN FETAL LIVER, SIGNAL = 1.8; EXPRESSED IN LUNG, SIGNAL = 3.9; EXPRESSED IN HELA, SIGNAL = 3.5; EXPRESSED IN BRAIN, SIGNAL = 2.3; EXPRESSED IN HEART, SIGNAL = 1.6; EST_HUMAN HIT: AI360048.1, EVALUE 5.00e-95; SWISSPROT HIT: P16587, EVALUE 2.00e-27; NT HIT: M74493.1, EVALUE 1.00e-100
agggctgtctggctttcacttcttgtttttgagctgattggccagccagtccaggccttcgtacagcccgtccccgctggtggcacaggtggcctgaatgtaccagttacggtgacgaagggaatgcaggcccagcttgtctgtgatctcagcagcgttcatagcattaggcagatcctggagcac

SEQ ID NO: 16976 - DNA, 110 bp, Homo sapiens
  MAP TO CHR7.1; EXPRESSED IN FETAL LIVER, SIGNAL = 0.34; EXPRESSED IN BRAIN, SIGNAL = 0.3; SWISSPROT HIT: Q02388, EVALUE 4.60e+00; EST_HUMAN HIT: BG333926.1, EVALUE 1.30e-01
gtcatcaccaccctatgggatttctctcatttgtcccaacaggccagcacttatgggctttgtgtctgcacctcaccccacgggccctgtgaaacctttccagcaatggc

SEQ ID NO: 16977 - DNA, 188 bp, Homo sapiens
  MAP TO CHR7.1; EXPRESSED IN BONE MARROW, SIGNAL = 0.52; EXPRESSED IN LUNG, SIGNAL = 0.57; EXPRESSED IN BRAIN, SIGNAL = 0.46; NT HIT: gi14781728, EVALUE 5.00e-91; EST_HUMAN HIT: BG385460.1, EVALUE 8.00e-91; SWISSPROT HIT: P36113, EVALUE 6.50e-01
tttaaacaggcctttgttgaaaataatcctgccattaaatggtgtcctactccaggctgtgacagagcagtaagactaacgaaacaagggtcaaatacatctggatctgatacactcagcttcccattgctgagagctcctgctgttgattgtggaaaaggacacctcttctgctggttagtataaga

SEQ ID NO: 16978 - DNA, 251 bp, Homo sapiens
  MAP TO CHR17.1; EXPRESSED IN HEART, SIGNAL = 0.87; EXPRESSED IN BONE MARROW, SIGNAL = 1.3; EXPRESSED IN ADULT LIVER, SIGNAL = 1.5; EXPRESSED IN FETAL LIVER, SIGNAL = 1.2; EXPRESSED IN HELA, SIGNAL = 0.92; EXPRESSED IN BRAIN, SIGNAL = 1.2; EXPRESSED IN LUNG, SIGNAL = 0.79; NT HIT: gi14770568, EVALUE 0.00e+00; EST_HUMAN HIT: BE142539.1, EVALUE 1.00e-93; SWISSPROT HIT: Q39565, EVALUE 1.00e-09
cccctgcagcctccatgatccactggacccggcagataaaggagatgctcagtgcccaggagactgtggagacaggagaaaatttaggtcctctggaggagattgagttctggcgcaaccgatgcatggacctgtctggcatcagtaagcagctggtgaagaagggagtgaagcacgttgaatccatcctgcaccttgccaagtcgtcctacttggcgccctttatgaaactggcacagcagatccaggtt

SEQ ID NO: 16979 - DNA, 332 bp, Homo sapiens
  MAP TO AC026803.4; EXPRESSED IN FETAL LIVER, SIGNAL = 0.67; EXPRESSED IN LUNG, SIGNAL = 1.1; EXPRESSED IN HELA, SIGNAL = 0.93; EXPRESSED IN BRAIN, SIGNAL = 0.83; EXPRESSED IN HEART, SIGNAL = 1.1; NT HIT: Z33633.1, EVALUE 0.00e+00; EST_HUMAN HIT: BE563641.1, EVALUE 0.00e+00; SWISSPROT HIT: P13807, EVALUE 3.00e-24
gtatgcaggcccaggggtaccgctacccacggccagcctcggtgccaccgtcgccctcgctgtcacgacactccagcccgcaccagagtgaggacgaggaggatccccggaacgggccgctggaggaagacggcgagcgctacgatgaggacgaggaggccgccaaggaccggcgcaacatccgtgcaccagagtggccgcgccgagcgtcctgcacctcctccaccagcggcagcaagcgcaactctgtggacacggccacctccagctcactcagcaccccgagcgagcccctcagccccaccagctccctgggcgaggagcgtaactaa

SEQ ID NO: 16980 - DNA, 200 bp, Homo sapiens
  MAP TO CHR19.1; EXPRESSED IN BRAIN, SIGNAL = 0.92; EXPRESSED IN HEART, SIGNAL = 0.96; EXPRESSED IN BONE MARROW, SIGNAL = 0.96; EXPRESSED IN FETAL LIVER, SIGNAL = 0.72; EXPRESSED IN LUNG, SIGNAL = 0.78; SWISSPROT HIT: P51680, EVALUE 1.90e+00; NT HIT: AF117757.1, EVALUE 4.50e-02; EST_HUMAN HIT: BG010301.1, EVALUE 1.00e-108
tgttccctccaacatgactgggcgtgtaacacgtttgcatcaacttttcacagtcagacatgtgctttcgaacaaaggagcagtggagacaggcagagatgggggcttgacacagtttacagattttgtgcttcaacagtactttacaaatgacttgctcaattttaacgtccatcaccacaagagacattggagtaaaa

SEQ ID NO: 16981 - DNA, 205 bp, Homo sapiens
  MAP TO CHR17.1; EXPRESSED IN ADULT LIVER, SIGNAL = 1.5; EXPRESSED IN FETAL LIVER, SIGNAL = 1.1; EXPRESSED IN BRAIN, SIGNAL = 1.1; EXPRESSED IN LUNG, SIGNAL = 1.2; EXPRESSED IN BONE MARROW, SIGNAL = 1.9; NT HIT: AB002344.1, EVALUE 1.00e-102; SWISSPROT HIT: O70546, EVALUE 3.00e-29; EST_HUMAN HIT: AW993657.1, EVALUE 8.00e-85
caggcacggcgtggactacttgacgggttcctggtggccaatcctggatgatctctatgcatccaatattcctgtgtaccgcttcgtgcagcgacccggagacctcgtgtggattaatgcggggactgtgcactgggtgcaggccaccggctggtgcaacaacattgcctggaacgtggggcccctcaccggtgagagggtgggg

SEQ ID NO: 16982 - DNA, 181 bp, Homo sapiens
  MAP TO CHR6.1; EXPRESSED IN BONE MARROW, SIGNAL = 0.82; EXPRESSED IN LUNG, SIGNAL = 0.57; EXPRESSED IN HELA, SIGNAL = 0.49; EXPRESSED IN BRAIN, SIGNAL = 0.79; EXPRESSED IN HEART, SIGNAL = 0.61; NT HIT: X56659.1, EVALUE 2.50e+00; EST_HUMAN HIT: AI583880.1, EVALUE 2.40e-01; SWISSPROT HIT: P56954, EVALUE 3.30e+00
gggcgtgttgtgcctcgtgcctgcagccacccttgaagtgttgttgttaaacaacagtcatgaactctggaatgtctctggtcatttatagcgtgactgtgtcactctgtaaatgacactgtcaagcttcaaggcctagaatgaagttggtttgcttttcaatagatcatagtcccgccca

SEQ ID NO: 16983 - DNA, 249 bp, Homo sapiens
  MAP TO CHR10.1; EXPRESSED IN BRAIN, SIGNAL = 0.61; EXPRESSED IN BONE MARROW, SIGNAL = 0.71; NT HIT: gi13386415, EVALUE 1.50e-02; EST_HUMAN HIT: BF823018.1, EVALUE 0.00e+00; SWISSPROT HIT: P27935, EVALUE 6.40e-01
tgggaatgtctttgtcttatgcacgtagtctgccttgttgttgcaaataacatttctgctataatcacaggatgccccggcttcttcactccattcgacgtaaccccttcccacgagctccaccttcactatggggtccaccagggtgctgttcagggttaagatcacctgcccttttatgctggagccagccaggtagattctatcctcgggcagcactaattcgatcgacttcaccacagacatggg

SEQ ID NO: 16984 - DNA, 172 bp, Homo sapiens
  MAP TO CHRX.1; EXPRESSED IN FETAL LIVER, SIGNAL = 0.88; EXPRESSED IN LUNG, SIGNAL = 0.99; EXPRESSED IN BRAIN, SIGNAL = 0.77; NT HIT: X57998.1, EVALUE 1.50e-01; EST_HUMAN HIT: BE409327.1, EVALUE 5.00e-61; SWISSPROT HIT: P38947, EVALUE 2.50e+00
ttctgattggctgaagccagaggggcggtggtggggtgattccaagggcccagagctctggccggcggaccttttccttctggagtttccccggcgggtgtgagttgttgcggggtctgggggagctgggaggcccggtttgggaagttttgcaggcaggtgcatgagccat

SEQ ID NO: 16985 - DNA, 177 bp, Homo sapiens
  MAP TO CHR4.1; EXPRESSED IN BRAIN, SIGNAL = 0.72; EXPRESSED IN BONE MARROW, SIGNAL = 0.67; EXPRESSED IN HEART, SIGNAL = 0.43; SWISSPROT HIT: Q9R0Y8, EVALUE 3.00e-20; NT HIT: X55272.1, EVALUE 8.00e-22; EST_HUMAN HIT: T75122.1, EVALUE 2.30e-01
tttcctttttggttgctggtaaaataatgcaaggttccatattccatcaaggctgcaaaaacaaaaatgaaacaaacagaaacaaagagatccatcgcagtcacataagaaaccttaggtaaagacttcctggcaattgtactcagggttgtcatagtcagaactgtagtgatacct

SEQ ID NO: 16986 - DNA, 141 bp, Homo sapiens
  MAP TO CHR14.1; EXPRESSED IN BONE MARROW, SIGNAL = 0.82; EXPRESSED IN LUNG, SIGNAL = 0.89; EXPRESSED IN BRAIN, SIGNAL = 0.81; EXPRESSED IN HEART, SIGNAL = 0.86; EXPRESSED IN ADULT LIVER, SIGNAL = 0.88; EST_HUMAN HIT: BF093217.1, EVALUE 4.00e-61; SWISSPROT HIT: Q92696, EVALUE 9.00e-07; NT HIT: gi14750755, EVALUE 4.00e-60
tcctcccttcaccccccaggatctgacagtgctctgccatctggaacagctgctcttggtcacccatcttgacttgtcacacaatcgcctccgaaccctgccacctgcactggctgccctgcgctgccttgaggtaaagta

SEQ ID NO: 16987 - DNA, 140 bp, Homo sapiens
  MAP TO CHRX.1; EXPRESSED IN BRAIN, SIGNAL = 1.2; EXPRESSED IN HEART, SIGNAL = 0.99; EXPRESSED IN ADULT LIVER, SIGNAL = 0.96; EXPRESSED IN FETAL LIVER, SIGNAL = 0.81; EXPRESSED IN LUNG, SIGNAL = 1.4; NT HIT: gi14767910, EVALUE 3.00e-73; EST_HUMAN HIT: AA102648.1, EVALUE 4.00e-73; SWISSPROT HIT: P53935, EVALUE 2.70e-02
tcagaagagaaaacgacacctagaagaaggcaaagaaaggccagagaaagagcagtccaagcataaaaggaaaaagagttatgaagatacagatttagacaaagacaagagcatcagacaaaggaaaagagaggaggata

SEQ ID NO: 16988 - DNA, 371 bp, Homo sapiens
  MAP TO CHR7.1; EXPRESSED IN LUNG, SIGNAL = 0.65; EXPRESSED IN HELA, SIGNAL = 0.61; EXPRESSED IN BRAIN, SIGNAL = 0.66; EXPRESSED IN HEART, SIGNAL = 0.7; EXPRESSED IN ADULT LIVER, SIGNAL = 0.8; EXPRESSED IN FETAL LIVER, SIGNAL = 0.62; NT HIT: gi15839372, EVALUE 3.50e-01; EST_HUMAN HIT: BI524007.1, EVALUE 0.00e+00; SWISSPROT HIT: P14373, EVALUE 2.00e-16
caccttcatgcggctgcagacggtggagacgggcgtgaccgggtggtgttggtgggagcccagcagaccgcagaggccacagatgagctcctggtccttctcgcagaaaaggctgagcgggttccggtggtgcacgcagaccttgggctccgggtccccagggagcctcagggcttcgatcacccaggccagggagacgttgggcaaggagctgctgccgtccaccacctgccagcacatggggcagcgcaccttggtgtccaggtggtaggacagggaaaccaggcagcccttgcagtaggagtggccgcactgtagcattagggactccttgaagacctccaggctgatgggacactgaagccggtcct

SEQ ID NO: 16989 - DNA, 239 bp, Homo sapiens
  MAP TO CHR9.1; EXPRESSED IN BONE MARROW, SIGNAL = 0.49; EXPRESSED IN BRAIN, SIGNAL = 0.53; NT HIT: AF084375.1, EVALUE 0.00e+00; EST_HUMAN HIT: BG575022.1, EVALUE 1.00e-108; SWISSPROT HIT: P16157, EVALUE 3.00e-08
aggtggagcaagggtagatctagttgaccaagatggacattctcttctacattgggcagcactgggaggaaatgctgatgtttgccagatattaatagaaaataagatcaatccaaatgtccaggattatgcaggaagaacccctttgcagtgtgcagcatatggaggctatatcaactgcatggcagttctcatggaaaacaatgcagaccctaacattcaagacaaagaggtagaaa

SEQ ID NO: 16990 - DNA, 112 bp, Homo sapiens
  MAP TO CHR16.1; EXPRESSED IN BRAIN, SIGNAL = 0.66; EXPRESSED IN LUNG, SIGNAL = 0.7; EXPRESSED IN BONE MARROW, SIGNAL = 0.61; EXPRESSED IN ADULT LIVER, SIGNAL = 0.8; NT HIT: L32873.1, EVALUE 2.30e-02; EST_HUMAN HIT: AL582706.1, EVALUE 1.40e-01
gagtagaatttgtgagtcacaaaatgcatagttttaattatatataaggccagattacttgttattcagaacagctgtacgattctgtatcactatcagtagcacgtgagga

SEQ ID NO: 16991 - DNA, 434 bp, Homo sapiens
  MAP TO CHR19.1; EXPRESSED IN FETAL LIVER, SIGNAL = 0.76; EXPRESSED IN LUNG, SIGNAL = 1.1; EXPRESSED IN HELA, SIGNAL = 0.48; EXPRESSED IN BRAIN, SIGNAL = 0.71; EXPRESSED IN HEART, SIGNAL = 0.75; EXPRESSED IN ADULT LIVER, SIGNAL = 0.7; EXPRESSED IN BONE MARROW, SIGNAL = 0.76; NT HIT: gi4503804, EVALUE 0.00e+00; SWISSPROT HIT: P19526, EVALUE 8.00e-85; EST_HUMAN HIT: AL046138.2, EVALUE 8.00e-25
acctttgtcggcgtccacgtgcgccgtggggactatctgcaggttatgcctcagcgctggaagggtgtggtgggcgacagcgcctacctccggcaggccatggactggttccgggcacggcacgaagcccccgttttcgtggtcaccagcaacggcatggagtggtgtaaagaaaacatcgacacctcccagggcgatgtgacgtttgctggcgatggacaggaggctacaccgtggaaagactttgccctgctcacacagtgcaaccacaccattatgaccattggcaccttcggcttctgggctgcctacctggctggcggagacactgtctacctggccaacttcaccctgccagactctgagttcctgaagatctttaagccggaggcggccttcctgcccgagtgggtgggcattaatgcagacttgtc

SEQ ID NO: 16992 - DNA, 150 bp, Homo sapiens
  MAP TO CHR17.1; EXPRESSED IN LUNG, SIGNAL = 0.63; EXPRESSED IN BRAIN, SIGNAL = 0.87; EXPRESSED IN ADULT LIVER, SIGNAL = 1.7; EXPRESSED IN BONE MARROW, SIGNAL = 0.76; EXPRESSED IN FETAL LIVER, SIGNAL = 0.98; NT HIT: gi14773213, EVALUE 3.00e-76; EST_HUMAN HIT: R90792.1, EVALUE 8.00e-75; SWISSPROT HIT: Q64536, EVALUE 2.00e-21
caggatccagcaatgcctgtgagaaaacctccttcaccttcctcaggcaggagctgcctgtgcgcctggccaacatcatgaaagagatcaacctgcttcccgaccgagtgctgagcacaccctccgtgcagctggtgcagagctggtgag

SEQ ID NO: 16993 - DNA, 182 bp, Homo sapiens
  MAP TO CHR20.1; EXPRESSED IN BONE MARROW, SIGNAL = 1.3; EXPRESSED IN ADULT LIVER, SIGNAL = 3.9; EXPRESSED IN FETAL LIVER, SIGNAL = 3.3; EXPRESSED IN PLACENTA, SIGNAL = 1.7; EXPRESSED IN LUNG, SIGNAL = 1.1; EXPRESSED IN BRAIN, SIGNAL = 1.5; EXPRESSED IN HEART, SIGNAL = 1.3; NT HIT: X16925.1, EVALUE 3.00e-98; EST_HUMAN HIT: BE732435.1, EVALUE 3.00e-90; SWISSPROT HIT: P17858, EVALUE 9.00e-28
gggctgggctcacctttaagtcgtggatgttgaaagggtcctcgaagacgtaggcggcgtcggcccccacagcaatgccagtcacggtggccaggtagccacagtaaccccccatggtctccacgatgaacacacggcgcttggtccccgaggcagactgtttgatgcggtcacagctctgg

SEQ ID NO: 16994 - DNA, 215 bp, Homo sapiens
  MAP TO CHR13.1; EXPRESSED IN ADULT LIVER, SIGNAL = 1.5; EXPRESSED IN BONE MARROW, SIGNAL = 1.7; EXPRESSED IN FETAL LIVER, SIGNAL = 1.5; EXPRESSED IN LUNG, SIGNAL = 1.5; EXPRESSED IN HELA, SIGNAL = 1.8; EXPRESSED IN BRAIN, SIGNAL = 1.7; EXPRESSED IN HEART, SIGNAL = 1.5; SWISSPROT HIT: P49413, EVALUE 1.30e+00; NT HIT: gi14757710, EVALUE 1.00e-117; EST_HUMAN HIT: BE732429.1, EVALUE 1.00e-112
tacctggaagagcatggtcctgttcttctccgagtccgagggctggacgtgactgggtgcgctcgcgtgtctccgtcgcggctgggatttctggctgccctcgtgaactctccgttgcacgccggtgacactgctgcaccgagaccgaaactcctgctgctcatcaaagccagaatcttccaaaatccgctcagggaagcagacccgagagctgg

SEQ ID NO: 16995 - DNA, 427 bp, Homo sapiens
  MAP TO CHR19.1; EXPRESSED IN LUNG, SIGNAL = 1.3; EXPRESSED IN FETAL LIVER, SIGNAL = 0.88; EXPRESSED IN BRAIN, SIGNAL = 0.92; EXPRESSED IN HEART, SIGNAL = 0.86; EXPRESSED IN ADULT LIVER, SIGNAL = 0.83; NT HIT: gi16163266, EVALUE 0.00e+00; EST_HUMAN HIT: BI090562.1, EVALUE 0.00e+00; SWISSPROT HIT: P07318, EVALUE 2.00e-03
actcaccagcactgttggcctccgactccagcaggtggatgtcattgcagtccgccagtgagtgctccaggcagagctgcaggaagcgggcctgggtacgggtgacccgtttcagaagtgacaggagggccactgtctgctcacactcattccagcctttgaaccagccagcgaggatgcccacctggtctcggaacatcatggtgccgggcctggggccagggtcgggggacggcggtggcgagggccagcgccgtcacatggtcccggctctggcctcctgttacctttcccctgagggccagggcttaaggacgtttctgggcgtggtggcaacggttgttgggggaggaggaagcctgctcacatggggggaggtcttggtccagccacgcctctccagtttcctgaaaaaggaagcaaaggg

SEQ ID NO: 16996 - DNA, 224 bp, Homo sapiens
  MAP TO CHRX.1; EXPRESSED IN BRAIN, SIGNAL = 4.9; EXPRESSED IN BONE MARROW, SIGNAL =   5; EXPRESSED IN HEART, SIGNAL = 2.5; EXPRESSED IN ADULT LIVER, SIGNAL = 6.1; EXPRESSED IN FETAL LIVER, SIGNAL = 3.9; EXPRESSED IN HELA, SIGNAL = 4.5; EXPRESSED IN LUNG, SIGNAL = 2.1; NT HIT: AF131253.1, EVALUE 2.00e-01; EST_HUMAN HIT: BG825530.1, EVALUE 1.20e+00; SWISSPROT HIT: Q07864, EVALUE 7.40e+00
tatctttccatcatctagcatgtgtgtactcccaacgaatattaaaaaatagggtgtgaccctcttaaccataagagatgattcctcattttgagatgacgtgctctgggaataaagaatgcttccttcattttccgtgactgtcaaactggcatctttcatcagcactaaattcccttttaagtagtcaaatgccttacacagttttaacaggaaatctctca

SEQ ID NO: 16997 - DNA, 232 bp, Homo sapiens
  MAP TO CHR19.1; EXPRESSED IN BRAIN, SIGNAL = 0.35; EXPRESSED IN HEART, SIGNAL = 0.61; SWISSPROT HIT: P71354, EVALUE 1.60e+00; NT HIT: gi14755934, EVALUE 1.00e-128; EST_HUMAN HIT: BG758956.1, EVALUE 1.00e-127
gcttgaaggtatatgaaataatgtcactacatcggagcagcgcctctgcttgcacacctatgggagtctgcagctgtgacacgtagaagttggccacatccaggtcggtggctccaaagtgggcggccacacgcacaccctcgtgcaacgtgaagctcacctgatgacccaccatggccagcaggctgcggaggtaacgctcccgaagggcggctcgtgcccgctgctcctg

SEQ ID NO: 16998 - DNA, 273 bp, Homo sapiens
  MAP TO CHR3.1; EXPRESSED IN ADULT LIVER, SIGNAL = 3.9; EXPRESSED IN BONE MARROW, SIGNAL = 2.9; EXPRESSED IN PLACENTA, SIGNAL =   3; EXPRESSED IN HELA, SIGNAL = 3.6; EXPRESSED IN BRAIN, SIGNAL = 3.1; EXPRESSED IN LUNG, SIGNAL = 1.8; SWISSPROT HIT: P37238, EVALUE 1.00e-31; NT HIT: AB005524.1, EVALUE 0.00e+00; EST_HUMAN HIT: BF514811.1, EVALUE 1.00e-120
atccaatgattcatcctgtcattcctcttcctctatagccatcaggtttgggcggatgccacaggccgagaaggagaagctgttggcggagatctccagtgatatcgaccagctgaatccagagtccgctgacctccgggccctggcaaaacatttgtatgactcatacataaagtccttcccgctgaccaaagcaaaggcgagggcgatcttgacaggaaagacaacagacaaatcagttagttctcttctgctgtcttcattgggggaggc

SEQ ID NO: 16999 - DNA, 266 bp, Homo sapiens
  MAP TO CHR2.1; EXPRESSED IN BRAIN, SIGNAL = 1.7; EXPRESSED IN HEART, SIGNAL = 3.4; EXPRESSED IN ADULT LIVER, SIGNAL = 9.5; SWISSPROT HIT: P19945, EVALUE 3.00e-44; NT HIT: gi13637300, EVALUE 0.00e+00; EST_HUMAN HIT: BI084087.1, EVALUE 0.00e+00
caactattggatgattatccaaaatgtttcatcgtgggagcagacaatgtgggctccaagcagatgcagcagatccgcatgtcccttcgcgggaaggtcgtggtgctgatgggcaagaacaccatgatgcgcaaggccatccgagggcacctggaaaacaacccagctctggagaaactgctgcctcatatctgggggaatgtgggctttgtgttcaccaaggaggacctcactgagatcagggacatgttgctggccaataaggt

SEQ ID NO: 17000 - DNA, 336 bp, Homo sapiens
  MAP TO CHR12.1; EXPRESSED IN ADULT LIVER, SIGNAL = 0.91; EXPRESSED IN BONE MARROW, SIGNAL = 0.99; EXPRESSED IN FETAL LIVER, SIGNAL = 0.88; EXPRESSED IN LUNG, SIGNAL = 0.98; EXPRESSED IN HELA, SIGNAL = 0.64; EXPRESSED IN BRAIN, SIGNAL = 0.99; SWISSPROT HIT: P04628, EVALUE 7.00e-30; NT HIT: X03072.1, EVALUE 0.00e+00; EST_HUMAN HIT: AA069967.1, EVALUE 4.60e-01
tcccaccaggggtattgtgaacgtagcctcctccacgaacctgcttacagactccaagagtctgcaactggtactcgagcccagtctgcagctgttgagccgcaaacagcggcgtctgatacgccaaaatccggggatcctgcacagcgtgagtggggggctgcagagtgccgtgcgcgagtgcaagtggcagttccggaatcgccgctggaactgtcccactgctccagggccccacctcttcggcaagatcgtcaaccgaggtgggtgcccaggaaggcgacgcttccgggagcaggggaaacgcggggtcacccccagggcatgggcgggcga

SEQ ID NO: 17001 - DNA, 193 bp, Homo sapiens
  MAP TO CHR1.1; EXPRESSED IN BRAIN, SIGNAL = 0.33; EXPRESSED IN HEART, SIGNAL = 0.57; SWISSPROT HIT: P03191, EVALUE 4.30e-02; NT HIT: S96754.1, EVALUE 1.70e-01
ggcctgccagcaacactgggtcactcagcccccggcaggggacaatgaccacactgtagggagccatacatctaccacagcacagtgactgagaagaatccaccagggaatcacctccacccactctggaacagccccttcctccctcagtccagctcacccgcatgccctgcccacccctccctgtgactca

SEQ ID NO: 17002 - DNA, 245 bp, Homo sapiens
  MAP TO CHRX.1; EXPRESSED IN ADULT LIVER, SIGNAL = 1.1; EXPRESSED IN BONE MARROW, SIGNAL = 0.86; EXPRESSED IN HELA, SIGNAL = 0.77; EXPRESSED IN BRAIN, SIGNAL = 0.87; EST_HUMAN HIT: H94427.1, EVALUE 8.30e-02; SWISSPROT HIT: P57999, EVALUE 2.70e+00; NT HIT: gi13649009, EVALUE 0.00e+00
tctacagaaaatactcaaagtacctatcgggtgaatccagatggttccctgcgtgtcacttttgccagcgggatggagatcggcctcagctcagagccccacatcctggcaggggcagtcaaccctaccctgggcaaatgcaacatctcattgcccggagagcacaatgcaaacctcatcgagtggcggcagaggaaggagcaaaacaaaggcaatgtttcggcttttgaaaggaggctgagggt

SEQ ID NO: 17003 - DNA, 175 bp, Homo sapiens
  MAP TO CHR5.1; EXPRESSED IN FETAL LIVER, SIGNAL = 0.62; EXPRESSED IN HELA, SIGNAL = 0.76; EXPRESSED IN BRAIN, SIGNAL = 0.76; EXPRESSED IN BONE MARROW, SIGNAL = 0.82; EXPRESSED IN ADULT LIVER, SIGNAL = 0.73; EST_HUMAN HIT: BF352788.1, EVALUE 9.00e-01; SWISSPROT HIT: P53431, EVALUE 2.50e+00; NT HIT: gi14751069, EVALUE 9.50e+00
acattattgtcatacactgaattctgagttatcaggccaaatatgtggacttggcaaagatgagacttactgttaattgttccagctctccaaactggatgtgactggcaccagtggctatatgagtgaatatagaagctgaaatccacattatgttaactttggttctattcca

SEQ ID NO: 17004 - DNA, 258 bp, Homo sapiens
  MAP TO CHRX.1; EXPRESSED IN FETAL LIVER, SIGNAL = 0.63; EXPRESSED IN BRAIN, SIGNAL = 0.99; EXPRESSED IN BONE MARROW, SIGNAL = 0.78; EST_HUMAN HIT: AW611841.1, EVALUE 4.00e-10; SWISSPROT HIT: Q64568, EVALUE 5.00e-22; NT HIT: AF060497.1, EVALUE 0.00e+00
cacagcctgtgggaatgtgtcgggaggcgcagaagatgagggcgaggccgaagctggctggatcgagggggctgccatcctgctgtccgtcatctgtgtggtgctggtcacggccttcaatgactggagcaaggagaagcagttccgaggcctgcagagccgaattgagcaggagcagaagttcacggtcatccggaacgggcagctcctccaggtccccgtggctgcgctggtggtgggggacattgcccaggtcaa

SEQ ID NO: 17005 - DNA, 207 bp, Homo sapiens
  MAP TO CHR19.1; EXPRESSED IN FETAL LIVER, SIGNAL = 0.84; EXPRESSED IN LUNG, SIGNAL = 0.91; EXPRESSED IN BRAIN, SIGNAL = 1.1; EXPRESSED IN HEART, SIGNAL = 1.1; EXPRESSED IN BONE MARROW, SIGNAL = 1.3; SWISSPROT HIT: P07720, EVALUE 6.40e-01
tttctcctgtaattaagggattttctaacttgagcaatagattaaaattcatcaaaattatattttcagaaagccataaacctgaagctactaaggtctggctccaggaaatcctgaatccaggaaggatgctcagcgggacagaattgaagacaatagttcatcatctttccttcccaggatcgagaatatcccaaggaaatgcca

SEQ ID NO: 17006 - DNA, 232 bp, Homo sapiens
  MAP TO CHR6.1; EXPRESSED IN HELA, SIGNAL = 0.61; EXPRESSED IN BRAIN, SIGNAL = 0.68; EXPRESSED IN BONE MARROW, SIGNAL = 0.74; EXPRESSED IN ADULT LIVER, SIGNAL = 0.67; EST_HUMAN HIT: AW948409.1, EVALUE 7.80e-02; NT HIT: AY040589.1, EVALUE 5.30e-02
tgtcagatctcaggaactaaaagcaagaggagggcttggtttaaacttggctggaagacccaggaatgataataataattaacacagctcaacttccacttgcgctataaacaataattaatgtacacagtggcccactgagacatctaagtttggattatgagtcttgttttgcagacagggaaactgaggccaggaggttaactgacttgtaaaggccacacagggactc

SEQ ID NO: 17007 - DNA, 188 bp, Homo sapiens
  MAP TO CHRX.1; EXPRESSED IN BRAIN, SIGNAL = 0.62; EXPRESSED IN LUNG, SIGNAL = 0.7; EXPRESSED IN HEART, SIGNAL = 0.74; EXPRESSED IN BONE MARROW, SIGNAL = 0.69; EXPRESSED IN FETAL LIVER, SIGNAL = 1.3; EXPRESSED IN HELA, SIGNAL = 0.57; EST_HUMAN HIT: AU140296.1, EVALUE 3.00e-96; SWISSPROT HIT: Q93008, EVALUE 3.00e-30; NT HIT: gi14764091, EVALUE 2.00e-96
acttacctatgtgggcagccttggcagatcttctgatcagcaaaggaacctcctaagactttacttagcatagctggatgtcctaaagcttttaaagcttcatctaaactatccaccaatgaattaaaaaattctaaagcatcgtgttgttcacgcagattaacaggctcaccccaaagcctaagaaa

SEQ ID NO: 17008 - DNA, 148 bp, Homo sapiens
  MAP TO CHR5.1; EXPRESSED IN HELA, SIGNAL =   1; EXPRESSED IN BRAIN, SIGNAL =   1; EXPRESSED IN HEART, SIGNAL = 1.1; EXPRESSED IN BONE MARROW, SIGNAL = 1.2; EXPRESSED IN FETAL LIVER, SIGNAL = 0.87; EXPRESSED IN LUNG, SIGNAL = 0.95; SWISSPROT HIT: P15038, EVALUE 2.60e+00; NT HIT: AP003130.2, EVALUE 1.30e-01
gagtggcgtggcccatggcctccagtggtttctatgcattcgtttacttgcgttttccttcctccactttgaggtgaacgcccctcaggacaggatgtttttagaggaaaatataagcttccgggagctgctgcaactgagctgctag

SEQ ID NO: 17009 - DNA, 157 bp, Homo sapiens
  MAP TO CHR17.1; EXPRESSED IN BONE MARROW, SIGNAL = 0.55; EXPRESSED IN BRAIN, SIGNAL = 0.53; SWISSPROT HIT: P16885, EVALUE 7.60e+00
cagtttgtactaaatgatttaagattcctttccaatctaatctgacaaactaatctaatttcagagcagccgcgtggagggaatgtttttgctttgggtttgtatttctgaaataacctgtcttctctcttcccaggagaccagcagtaaatacaca

SEQ ID NO: 17010 - DNA, 179 bp, Homo sapiens
  MAP TO CHR4.1; EXPRESSED IN HELA, SIGNAL = 0.61; EXPRESSED IN BRAIN, SIGNAL = 0.72; EXPRESSED IN BONE MARROW, SIGNAL = 0.73; EXPRESSED IN FETAL LIVER, SIGNAL = 0.69; EST_HUMAN HIT: AW183059.1, EVALUE 3.00e-31; NT HIT: gi14916450, EVALUE 2.00e-96; SWISSPROT HIT: P49579, EVALUE 5.70e+00
aagtcatatctggattcaacagcagtaagcaaaacagaatgggtctctgcttcatttgcagtatctctctccatccaaatactggctccctcggtagtttcttcatcagttagcagagtatcttcccgtttatctttgtctttttcagcagaggtagtgagttcaaacacagtgataaa

SEQ ID NO: 17011 - DNA, 122 bp, Homo sapiens
  MAP TO CHRX.1; EXPRESSED IN BRAIN, SIGNAL = 0.44; EXPRESSED IN BONE MARROW, SIGNAL = 0.49; EXPRESSED IN LUNG, SIGNAL = 0.68; SWISSPROT HIT: P48190, EVALUE 7.90e+00; EST_HUMAN HIT: BI667416.1, EVALUE 2.00e-53; NT HIT: L12370.1, EVALUE 6.30e+00
atatcttttttcagggtgaaaaacatgctcaaaatgttagtttttattttcaaatgcatggggaacaaaatgaagtgcctggtaagaaaatgaagatgcatgttgagaattttcaggtgagt

SEQ ID NO: 17012 - DNA, 154 bp, Homo sapiens
  MAP TO CHR1.1; EXPRESSED IN BONE MARROW, SIGNAL = 0.9; EXPRESSED IN ADULT LIVER, SIGNAL = 0.97; EXPRESSED IN FETAL LIVER, SIGNAL = 0.81; EXPRESSED IN HELA, SIGNAL = 1.1; EXPRESSED IN BRAIN, SIGNAL = 0.76; SWISSPROT HIT: Q9NYT6, EVALUE 6.00e-27; NT HIT: AF246126.1, EVALUE 1.00e-81; EST_HUMAN HIT: BF966342.1, EVALUE 3.00e-77
tttcccacatacagtacatatgtatgacttctctccagtgtgaactccctgatgggcctgaagacttgaaggccgactaaagcctttaccacattcctcacatttatagggtttttctcctgtgtggactctctgatgaatgtaaagatttgag

SEQ ID NO: 17013 - DNA, 252 bp, Homo sapiens
  MAP TO AC068936.2; EXPRESSED IN PLACENTA, SIGNAL = 1.3; EXPRESSED IN FETAL LIVER, SIGNAL = 0.79; EXPRESSED IN BRAIN, SIGNAL = 0.95; EXPRESSED IN HEART, SIGNAL = 0.94; EST_HUMAN HIT: AV706934.1, EVALUE 0.00e+00; SWISSPROT HIT: P34369, EVALUE 9.00e-36; NT HIT: gi5453983, EVALUE 0.00e+00
ccccacagtgtgaacgtggcatcactgacacaatcagaaattcgagacatcatcctgggtatggagatctcggcaccgtcacagcagcggcagcagatcgctgagatcgagaagcagaccaaggaacaatcgcagctgacggcaacacagactcgcactgtcaacaagcatggcgatgagatcatcacctccaccaccagcaactatgagacccagactttctcatccaagactgagtggagggtcaggtac

SEQ ID NO: 17014 - DNA, 138 bp, Homo sapiens
  MAP TO CHR1.1; EXPRESSED IN HEART, SIGNAL = 1.1; EXPRESSED IN ADULT LIVER, SIGNAL = 1.5; EXPRESSED IN FETAL LIVER, SIGNAL = 1.5; EXPRESSED IN LUNG, SIGNAL = 0.91; EXPRESSED IN BRAIN, SIGNAL = 1.9; EST_HUMAN HIT: BI821474.1, EVALUE 4.00e-67; NT HIT: gi14720528, EVALUE 3.00e-67; SWISSPROT HIT: Q63450, EVALUE 1.00e-05
actcactttttcaacacagcaatctcattctccaggctgctgtcccggaaggcaggtgacttcttgatgcacttcagagcaaagagcttcccagtcagtctttgcttcaccaggaaaacttctgagaaagctcctctg

SEQ ID NO: 17015 - DNA, 242 bp, Homo sapiens
  MAP TO CHR19.1; EXPRESSED IN HEART, SIGNAL = 9.8; EXPRESSED IN ADULT LIVER, SIGNAL = 3.1; EXPRESSED IN FETAL LIVER, SIGNAL = 4.7; EXPRESSED IN BRAIN, SIGNAL = 5.2; EXPRESSED IN LUNG, SIGNAL =   9; EST_HUMAN HIT: BF512006.1, EVALUE 2.10e-02; NT HIT: gi16163602, EVALUE 1.40e-02; SWISSPROT HIT: P51870, EVALUE 2.00e-22
gaactgagcgctctgtctgtccggcgccagtatcgcttgcaccactacctcgacttcatttactaccgctcggcggatgggcggaggttccggcaggcctgtgacatggtgcaccacttcaccactgaagtcatccaggaacggcggcgggcactgcgtcagcagggggccgaggcctggcttaaggccaagcaggggaagaccttggactttattgatgtgctgctcctggccagggtgag

SEQ ID NO: 17016 - DNA, 226 bp, Homo sapiens
  MAP TO CHR5.1; EXPRESSED IN BRAIN, SIGNAL = 0.62; EXPRESSED IN HEART, SIGNAL = 0.8; EXPRESSED IN FETAL LIVER, SIGNAL = 0.64; SWISSPROT HIT: P32997, EVALUE 1.90e+00; NT HIT: AL163252.2, EVALUE 3.20e+00; EST_HUMAN HIT: BI029559.1, EVALUE 3.00e-01
ctatatatcatagatttgcatctcatatctgcacatgtttagactatgctagaaatcattctattcttgaaacatttaaagatatattatgcctttcacacacaggcctaccctctattaatgcagtttatatttttcttgtttttaaaattcactggtccaaagtactttattatgctggttggtgtgctttactgctgatgttctttctatttttcagaaacat

SEQ ID NO: 17017 - DNA, 151 bp, Homo sapiens
  MAP TO CHR19.1; EXPRESSED IN HELA, SIGNAL = 1.3; EXPRESSED IN BRAIN, SIGNAL = 1.7; EXPRESSED IN BONE MARROW, SIGNAL = 0.94; EXPRESSED IN FETAL LIVER, SIGNAL = 0.8; EXPRESSED IN LUNG, SIGNAL = 0.73; NT HIT: M99176.1, EVALUE 5.20e-01; EST_HUMAN HIT: BE222886.1, EVALUE 1.00e-76; SWISSPROT HIT: Q98919, EVALUE 1.70e-01
gtgagcgtggcaatctggtggtgggtgtcttctgtgtagagctggcagaaatagcccccctcgtcctccaggcgggcatctgagagccggatccgcacccggcgtggggagaactcctcaagctggaaacgctcatccttcaaggctagag

SEQ ID NO: 17018 - DNA, 206 bp, Homo sapiens
  MAP TO CHR12.1; EXPRESSED IN BRAIN, SIGNAL = 0.41; EXPRESSED IN ADULT LIVER, SIGNAL = 0.41; EST_HUMAN HIT: AL522912.1, EVALUE 9.00e-57; NT HIT: AF229163.1, EVALUE 1.80e-01; SWISSPROT HIT: P14895, EVALUE 1.10e+00
gtttcctcccagagccggcagggggggcaccaggcaaagtttgcaagacgcgcctccctcccacccctcccccttcctcgcccaacttcccatagccgcggcctcaactaaaagtggccattgacctttcaagctttcgagcagtgatgcaatagaatagtatttcaaagaaaaatgcttatcgaaattttggatccggttttccc

SEQ ID NO: 17019 - DNA, 118 bp, Homo sapiens
  MAP TO CHR2.1; EXPRESSED IN ADULT LIVER, SIGNAL =   1; EXPRESSED IN BRAIN, SIGNAL = 0.5; EXPRESSED IN HEART, SIGNAL = 0.77; EST_HUMAN HIT: AW860232.1, EVALUE 7.00e-53; NT HIT: gi4557730, EVALUE 5.00e-53; SWISSPROT HIT: P22064, EVALUE 6.00e-11
tcattgcagtgtggcaaagcgctccctggcctttcaaagcaagaggactgctgtggaactgtgggtacctcctggggctttaacaaatgccagaaatgccccaagaaaccatgtaagt

SEQ ID NO: 17020 - DNA, 183 bp, Homo sapiens
  MAP TO CHR19.1; EXPRESSED IN BRAIN, SIGNAL = 0.72; EXPRESSED IN ADULT LIVER, SIGNAL = 0.7; EXPRESSED IN BONE MARROW, SIGNAL = 0.71; EXPRESSED IN HELA, SIGNAL = 0.72; EST_HUMAN HIT: BE937287.1, EVALUE 9.50e-01; NT HIT: AB046843.1, EVALUE 1.00e-88; SWISSPROT HIT: P10266, EVALUE 5.00e-01
ctcagcccccaactgaccctgaactgggggcgtggctcctccacggcttccccaggtgagtccagcgtcccccacttatatgccagctcagcccctctccgcttccattcctctaggaacagcgtcgaccagatcacgttgaagagggcaaagaccacgcaggaaacatcccggcttgtctgt

SEQ ID NO: 17021 - DNA, 166 bp, Homo sapiens
  MAP TO CHR2.1; EXPRESSED IN PLACENTA, SIGNAL = 1.7; EXPRESSED IN FETAL LIVER, SIGNAL = 1.7; EXPRESSED IN LUNG, SIGNAL = 0.59; EXPRESSED IN HELA, SIGNAL = 2.6; EXPRESSED IN BRAIN, SIGNAL =   2; EXPRESSED IN ADULT LIVER, SIGNAL = 1.4; EXPRESSED IN BONE MARROW, SIGNAL = 1.7; EST_HUMAN HIT: AW994475.1, EVALUE 9.00e-44; NT HIT: U82671.3, EVALUE 9.00e+00; SWISSPROT HIT: P52020, EVALUE 3.40e+00
ccctcagctgtcccctggcttctgcctgttggttttcttcactgctctaatgacccaggcctggagggagagctaattagacattttttggcagcctacacttgcccctcctgctggtgtcttgcctctgccccttgggttctaatctagagagaagtgggagtgt

SEQ ID NO: 17022 - DNA, 234 bp, Homo sapiens
  MAP TO CHR9.1; EXPRESSED IN HELA, SIGNAL = 5.4; EXPRESSED IN BRAIN, SIGNAL = 3.3; EXPRESSED IN LUNG, SIGNAL = 2.9; EXPRESSED IN ADULT LIVER, SIGNAL = 1.6; EXPRESSED IN BONE MARROW, SIGNAL = 3.7; EXPRESSED IN PLACENTA, SIGNAL = 3.8; EXPRESSED IN FETAL LIVER, SIGNAL = 4.1; SWISSPROT HIT: P78368, EVALUE 2.00e-31; EST_HUMAN HIT: BF980670.1, EVALUE 1.00e-71; NT HIT: AF001177.1, EVALUE 8.00e-72
gatcacgcgcatggattatgtgcacaccaagaacctcatttaccaggacgtgaagcccgagaacttcctggtggggcgcccggggaccaagcggcagcacgccatccacatcatcgacctcgggctggccaaggggtacactggtctcaggaccaagaagcacatcccgtgcagccagcacaagagcttgacaggtacggcgtgctacatgagcatcaacatgcacctgggcaa

SEQ ID NO: 17023 - DNA, 221 bp, Homo sapiens
  MAP TO CHR11.1; EXPRESSED IN BRAIN, SIGNAL = 0.61; EXPRESSED IN BONE MARROW, SIGNAL = 0.65; NT HIT: U91629.1, EVALUE 1.00e-121; SWISSPROT HIT: Q14896, EVALUE 1.00e-32; EST_HUMAN HIT: AI185858.1, EVALUE 4.00e-96
tctcccaggccctggccccgagggctcctcacctcgcacctccaggcggcactcacaccgtgcctcgccctgtaagttggtggccctgcagacatagatgcccccgtcaaaggggcagggctttctaatctccagagtcaacactccctgcttgctgaacatgcggaagcgggcgtcttctcccaggtccaggccattcttgaaccaggaaatcttgggct

SEQ ID NO: 17024 - DNA, 196 bp, Homo sapiens
  MAP TO CHRX.1; EXPRESSED IN BRAIN, SIGNAL = 0.33; EXPRESSED IN ADULT LIVER, SIGNAL = 0.52; NT HIT: gi14765213, EVALUE 8.00e-10; EST_HUMAN HIT: BE779416.1, EVALUE 3.00e-07; SWISSPROT HIT: P39604, EVALUE 3.30e+00
gttttctttccaaatgactgcacatttgacagaaatgccaggaacaacaaaaacgcatatttaccaagtgttcttggtctgaatcaacaccaaccctaaaggagaaagacaaagagcaaatgagattttgaagccaaaaaatggtctattcacacatatacattgtcaggcaactacttttctcaacacagaagct

SEQ ID NO: 17025 - DNA, 191 bp, Homo sapiens
  MAP TO CHR5.1; EXPRESSED IN FETAL LIVER, SIGNAL = 0.85; EXPRESSED IN HELA, SIGNAL = 1.2; EXPRESSED IN BRAIN, SIGNAL = 0.94; EXPRESSED IN LUNG, SIGNAL = 0.67; EXPRESSED IN BONE MARROW, SIGNAL =   1; EST_HUMAN HIT: BE743637.1, EVALUE 3.90e+00; NT HIT: D00749.1, EVALUE 1.70e-01; SWISSPROT HIT: O15534, EVALUE 7.30e+00
attactaaccaacagggcatgtaaggaaaagggctcctttcagggctggagtgctatagttggtggatcacagcctgtgtgggaggcttccccaaagacatatgatgtgggtgtaggaaccagacagacgggaggaattaagtcacccttttccccaaccctaattttcttgcccaacctagaagtcactg

SEQ ID NO: 17026 - DNA, 267 bp, Homo sapiens
  MAP TO CHR12.1; EXPRESSED IN FETAL LIVER, SIGNAL = 0.61; EXPRESSED IN HELA, SIGNAL = 0.67; EXPRESSED IN BRAIN, SIGNAL = 0.77; EXPRESSED IN BONE MARROW, SIGNAL = 1.1; EST_HUMAN HIT: BE763773.1, EVALUE 3.60e-01; NT HIT: AB018070.1, EVALUE 3.80e+00; SWISSPROT HIT: P09706, EVALUE 1.60e+00
ttcatgttctaggcacttcttgctcggtgacttgttttgttcttatgccttggccaattaaaagctgagatagtgatccctaggagagtatgagatgtaaatgagctgtaaaatggcttcttcctagtgattattcatgggaggcttggaactcgaggtgggttcagtctgtttggaggcttgagctgtgcacttcggctgcctgatgcgaatggcctatggggaaggaaccacatactgattgaaatgttagcaaacagctggcac

SEQ ID NO: 17027 - DNA, 124 bp, Homo sapiens
  MAP TO CHR6.1; EXPRESSED IN HEART, SIGNAL = 0.76; EXPRESSED IN LUNG, SIGNAL = 0.77; EXPRESSED IN BRAIN, SIGNAL = 0.51; EXPRESSED IN BONE MARROW, SIGNAL = 0.37; EST_HUMAN HIT: BF348412.1, EVALUE 2.40e+00; SWISSPROT HIT: P42752, EVALUE 4.60e+00; NT HIT: AF325178.1, EVALUE 4.10e-01
tggttatttctgtgtcataaaagttatgacctatcagacagaagaagcatcaagaaggcctctaataaatagtattcaacaagctccagacaaatctaataacagccgtggaggcttcaaagaa

SEQ ID NO: 17028 - DNA, 181 bp, Homo sapiens
  MAP TO CHR4.1; EXPRESSED IN LUNG, SIGNAL = 2.6; EXPRESSED IN PLACENTA, SIGNAL = 2.3; EXPRESSED IN BRAIN, SIGNAL = 1.7; EXPRESSED IN HEART, SIGNAL = 1.9; SWISSPROT HIT: P31266, EVALUE 1.10e+00; NT HIT: gi14781062, EVALUE 2.00e-87; EST_HUMAN HIT: BE909068.1, EVALUE 3.00e-87
ggtcttttccctaggcggtcattggggtggccttctcactgggcttcaccctgggccctatgctcggagcctccctgcccctggaaatggcaccctggtttgccctgctcttcgcagcctccgacctgctgttcatcttctgcttcctgccagagacgctgcccctggagaaacgggtagg

SEQ ID NO: 17029 - DNA, 160 bp, Homo sapiens
  MAP TO CHR13.1; EXPRESSED IN BONE MARROW, SIGNAL = 0.46; EXPRESSED IN BRAIN, SIGNAL = 0.45; EXPRESSED IN HEART, SIGNAL = 0.65; EST_HUMAN HIT: AA996140.1, EVALUE 8.10e-01
aaatgtaggtaagccaaattattttaaatgcaatagcgctttcaaataaatcctttagttgctcctttgcaaagtgaaggattctcttacaaagccaataattacttcctaatgcatgggttttgcaaatctggaatttaatccatcaggtttgcttaaa

SEQ ID NO: 17030 - DNA, 219 bp, Homo sapiens
  MAP TO CHR1.1; EXPRESSED IN LUNG, SIGNAL =   3; EXPRESSED IN BRAIN, SIGNAL = 2.4; EXPRESSED IN HEART, SIGNAL =   4; EXPRESSED IN ADULT LIVER, SIGNAL =   4; EST_HUMAN HIT: AL597553.1, EVALUE 1.00e-109; SWISSPROT HIT: Q9Y483, EVALUE 2.00e-34; NT HIT: gi15294427, EVALUE 1.00e-109
aacagagactctacaggggcaggtaattcactggtccacaagcggtctcctttacgtcgaaaccaaaagaccccaacatccttgaccaagctgtctttacaggatggacataaagccaaaaagccagcatgtaaatttgaagagggtcaggatgtcctagctagatggtcagatggcttgttttatcttggcactatcaaaaaggcaagttactttaat

SEQ ID NO: 17031 - DNA, 452 bp, Homo sapiens
  MAP TO CHR9.1; EXPRESSED IN HEART, SIGNAL = 0.46; EXPRESSED IN FETAL LIVER, SIGNAL = 0.32; EXPRESSED IN BRAIN, SIGNAL = 0.3; EST_HUMAN HIT: AA314860.1, EVALUE 0.00e+00; SWISSPROT HIT: P35658, EVALUE 5.00e-28; NT HIT: gi14783213, EVALUE 0.00e+00
ccagcacagcagctgccacaccacaggtcagcagctcagggtttagcagcccagcttttggtaccacagccccaggggtctttggacagacaaccttcgggcaggcctcagtctttgggcagtcggcgagcagtgctgcaagtgtcttttccttcagtcagcctgggttcagttccgtgcctgccttcggtcagcctgcttcctccactcccacatccaccagtggaagtgtctttggtgccgcctcaagtaccagtagctccagttccttctcatttggacagtcttctcccaacacaggaggggggctgtttggccaaagcaacgctcctgcttttgggcagagtcctggctttggacagggaggctctgtctttggtggtacctcagctgccaccacaacagcagcaacctctgggttcagcttttgccaagcttcaggtaagaatttg

SEQ ID NO: 17032 - DNA, 263 bp, Homo sapiens
  MAP TO CHR19.1; EXPRESSED IN BONE MARROW, SIGNAL = 3.7; EXPRESSED IN ADULT LIVER, SIGNAL = 3.7; EXPRESSED IN PLACENTA, SIGNAL = 4.6; EXPRESSED IN FETAL LIVER, SIGNAL = 5.2; EXPRESSED IN HELA, SIGNAL = 5.5; EXPRESSED IN BRAIN, SIGNAL = 4.3; EXPRESSED IN LUNG, SIGNAL = 1.3; EST_HUMAN HIT: AW340038.1, EVALUE 3.50e-01; SWISSPROT HIT: Q58105, EVALUE 7.10e-01; NT HIT: AJ414157.1, EVALUE 9.50e-01
accctggcactgatgtttcaaaaggacttctgggattttaaggataaacgcaggtttcctaaactgcccaagttagagaagaagacacagcccatttctaaaaaaaaggaagagttgcctttgtgggagacatttgtggcactgtaccatgttttgcggatgctgcagcagcgatatccaaaagacagcactgcttggatggaacagttctaccagctcatggacctgtaccaacttaagtcccccagaatccagaagctgct

SEQ ID NO: 17033 - DNA, 195 bp, Homo sapiens
  MAP TO CHR20.1; EXPRESSED IN BRAIN, SIGNAL = 4.3; EXPRESSED IN HEART, SIGNAL = 4.3; EXPRESSED IN ADULT LIVER, SIGNAL =  21; EST_HUMAN HIT: BE812275.1, EVALUE 3.00e-84; SWISSPROT HIT: P39019, EVALUE 2.00e-21; NT HIT: gi14756213, EVALUE 5.00e-82
ccctttcccctggctggcagcgcggaagccgcacgatgcctggagttcctgtaaaccacgtgaaccagcgggacttcgtcagagctctggcagcctttctcaaaaagtccgggaagctgaaagtccccgaatgggtggacaccgtcaagctggccaagcacaaagagcttcctccctacgttgagaactggttct

SEQ ID NO: 17034 - DNA, 179 bp, Homo sapiens
  MAP TO CHR20.1; EXPRESSED IN BONE MARROW, SIGNAL = 0.71; EXPRESSED IN BRAIN, SIGNAL = 0.64; EST_HUMAN HIT: AA398263.1, EVALUE 2.00e-32; SWISSPROT HIT: Q9Y6D5, EVALUE 3.00e-24; NT HIT: gi5453572, EVALUE 1.00e-82
atgactttgtacttgtgttttaagaagcagcggaaaagcatggtctgacagaacctgagagagttctaggtgaactggagtgccaggaatgtgctattcccccaggagttgatgaaaactcacagaccaacgggatagccgatgacaggcagtccttgtcgtcagcagataatctggta

SEQ ID NO: 17035 - DNA, 201 bp, Homo sapiens
  MAP TO CHR17.1; EXPRESSED IN BONE MARROW, SIGNAL = 0.77; EXPRESSED IN HELA, SIGNAL = 0.84; EXPRESSED IN BRAIN, SIGNAL = 0.79; SWISSPROT HIT: Q04690, EVALUE 6.00e-25; NT HIT: U17687.1, EVALUE 1.00e-109
tatcaaaataattcacctttgacattaacttcaagcccctttcgattctaggtggtggctttttatctaaaatccctgcttcatacggtgagacaatggcaggattgataaatctgaggaacatggcacttcctactgcaccgatgctgttctgagggaaacgctggctaaccacctaaaaacaaggagttgagaattgag

SEQ ID NO: 17036 - DNA, 174 bp, Homo sapiens
  MAP TO CHR17.1; EXPRESSED IN BONE MARROW, SIGNAL = 0.4; EXPRESSED IN HELA, SIGNAL = 1.4; EXPRESSED IN BRAIN, SIGNAL = 0.42; SWISSPROT HIT: O95838, EVALUE 6.00e-21; NT HIT: gi15313957, EVALUE 6.00e-69; EST_HUMAN HIT: BG436859.1, EVALUE 6.00e-05
aatgactccaagacagtaacctctcacttgtctcacccggcaggtgaaggctgagctgcggaaatactgggtccgcttcttgctagcccgccactcaggctgcagagcctgtgtcctggggaaggacttccggttcctaggaaaatgtcccaagaagctctcggaaggagatgg

SEQ ID NO: 17037 - DNA, 197 bp, Homo sapiens
  MAP TO CHR14.1; EXPRESSED IN ADULT LIVER, SIGNAL = 0.65; EXPRESSED IN BRAIN, SIGNAL = 0.41; EXPRESSED IN HEART, SIGNAL = 0.55; EST_HUMAN HIT: R39776.1, EVALUE 2.60e-01; SWISSPROT HIT: P01739, EVALUE 9.00e-05; NT HIT: U51444.1, EVALUE 1.00e-107
gggagaagaggatcctcaggccttgagcatccaggagggtgaaaatgccaccatgaactgcagttacaaaactagtataaacaatttacagtggtatagacaaaattcaggtagaggccttgtccacctaattttaatacgttcaaatgaaagagagaaacacagtggaagattaagagtcacgcttgacacttcca

SEQ ID NO: 17038 - DNA, 211 bp, Homo sapiens
  MAP TO CHR7.1; EXPRESSED IN HELA, SIGNAL = 0.64; EXPRESSED IN BRAIN, SIGNAL = 0.46; EXPRESSED IN ADULT LIVER, SIGNAL = 0.96; NT HIT: gi13630971, EVALUE 1.00e-111; EST_HUMAN HIT: AI793160.1, EVALUE 1.00e-108; SWISSPROT HIT: P40879, EVALUE 1.00e-34
aaattaccgatttaaggcccctcactgaagaaacatcaagaaaggacactgctgaaaagtcaagaatgaggctgtggaggctgattttggggacctcaatgttgagaggaagatcatcattccagtcaatgtggaaaggcaggtctgtggtattgattggctggtccagtacttctatctgattgttgtccagctcttcgtcagaatcttt

SEQ ID NO: 17039 - DNA, 279 bp, Homo sapiens
  MAP TO CHR17.1; EXPRESSED IN LUNG, SIGNAL = 1.1; EXPRESSED IN BRAIN, SIGNAL = 0.62; EXPRESSED IN BONE MARROW, SIGNAL = 0.57; NT HIT: AF162137.2, EVALUE 4.00e+00; EST_HUMAN HIT: BI758863.1, EVALUE 3.80e-01; SWISSPROT HIT: P41734, EVALUE 3.10e+00
gtgttatattcccattaagaatggctagatctggaagaaacttgatggattagtggaaagtggaggtggggagagaaggcggcaccatcaattgctgaaattggccccagacaggtttcctcattgttctgccaattggttttgcaataaattggaggaaatttggcgagatattcaaccagggcatggacagtgtactaggaccaaaataaacaatggtgaataacttggcagttttttattggatatttcagaagtgagttatgagacaccaagttg

SEQ ID NO: 17040 - DNA, 148 bp, Homo sapiens
  MAP TO AL355432.3; EXPRESSED IN BRAIN, SIGNAL = 0.37; EXPRESSED IN HEART, SIGNAL = 0.45; EXPRESSED IN BONE MARROW, SIGNAL = 0.38; SWISSPROT HIT: P28612, EVALUE 2.30e-01; EST_HUMAN HIT: AL534794.1, EVALUE 5.00e-73; NT HIT: AY040325.1, EVALUE 3.00e-73
acctgtaacagtttctcatttgtggttttcatctctaggtacttgacttggttttcaaaagacatatttttgataatgtcatctgttgcttgtttttcctgttcaatttcttcttcgacacttctgatttgtttttctttcctaaaat

SEQ ID NO: 17041 - DNA, 218 bp, Homo sapiens
  MAP TO CHR13.1; EXPRESSED IN ADULT LIVER, SIGNAL = 3.8; EXPRESSED IN BRAIN, SIGNAL = 1.4; NT HIT: gi13641663, EVALUE 1.00e-104; SWISSPROT HIT: P15954, EVALUE 4.00e-29; EST_HUMAN HIT: BG430695.1, EVALUE 1.00e-117
tcgcagagcttccagcagcgctacgttgggccagagcatccggaggttcacaacctctgtggtccgtaggagccactgtgaggagggccctgggaagaatttgccattttcagtggaaaacaagtggtcgttactagctaagatgtgtttgtactttggatctgcatttgctacaccctttcttgtagtaagacaacaactacttaaaacataaggat

SEQ ID NO: 17042 - DNA, 214 bp, Homo sapiens
  MAP TO CHR14.1; EXPRESSED IN BONE MARROW, SIGNAL = 1.1; EXPRESSED IN BRAIN, SIGNAL = 0.89; EXPRESSED IN LUNG, SIGNAL = 0.82; EST_HUMAN HIT: BI252493.1, EVALUE 1.00e-110; NT HIT: Y11484.1, EVALUE 1.00e-115; SWISSPROT HIT: Q16822, EVALUE 2.00e-33
tgtcctgtcaggggctggcccacggagtgcagacacttgacaaagtcaccatctcccagggcctgaagcacaggtgtccccagtcgggtcataatacgcatgcttgccaccacataggctgagtcagtgagctgcaccccgatgcgggacagcggggagcccacaggacccatgctgaatggaagcacatacatggtgcggcctgtggaggaag

SEQ ID NO: 17043 - DNA, 186 bp, Homo sapiens
  MAP TO CHR14.1; EXPRESSED IN FETAL LIVER, SIGNAL = 0.55; EXPRESSED IN HELA, SIGNAL = 0.82; EXPRESSED IN BRAIN, SIGNAL = 0.6; EST_HUMAN HIT: AI074577.1, EVALUE 3.00e-96; NT HIT: gi14751885, EVALUE 2.00e-96; SWISSPROT HIT: P09874, EVALUE 6.00e-06
tttttttccatttggcaggaatgggagtacagtgccattaggaccagcaagtgacacaggaattctgaatccagatggttataccctcaactacaatgaatatattgtatataaccccaaccaggtccgtatgcggtaccttttaaaggttcagtttaatttccttcagctgtggtgaatgttgat

SEQ ID NO: 17044 - DNA, 177 bp, Homo sapiens
  MAP TO CHR14.1; EXPRESSED IN HELA, SIGNAL =   1; EXPRESSED IN BRAIN, SIGNAL = 0.65; EST_HUMAN HIT: AW867050.1, EVALUE 3.00e-93; NT HIT: U64205.1, EVALUE 1.00e-82; SWISSPROT HIT: P27448, EVALUE 6.00e-06
acttaccatggtcactgtagcgtctttgcttttggcttgaagaaacacttctctgcactttgtggtgaggagactggccagtactgttgttgagatcactgctcggcctaaccttagcaagtgaaagattgctgctagaactggaatcactagcatccagctaagagaaaatgagaa

SEQ ID NO: 17045 - DNA, 140 bp, Homo sapiens
  MAP TO AL035464.20; EXPRESSED IN BONE MARROW, SIGNAL = 2.9; EXPRESSED IN ADULT LIVER, SIGNAL = 4.3; EXPRESSED IN PLACENTA, SIGNAL = 4.5; EXPRESSED IN LUNG, SIGNAL = 3.5; EXPRESSED IN HELA, SIGNAL =   5; EXPRESSED IN FETAL LIVER, SIGNAL = 3.2; EXPRESSED IN HEART, SIGNAL = 4.6; EST_HUMAN HIT: AA203342.1, EVALUE 3.00e-04; SWISSPROT HIT: Q50318, EVALUE 6.70e+00
ttctcctggcatggagccatcactttatgagcaggcaaaggcaatcgagacctggtattcttggcctgcttcacctggaagagaacttctgccttacaaagaggggcctgggtggaggaaggaagccccagatctctcat

SEQ ID NO: 17046 - DNA, 115 bp, Homo sapiens
  MAP TO AL034373.13; EXPRESSED IN HELA, SIGNAL = 1.8; EXPRESSED IN LUNG, SIGNAL = 1.5; EXPRESSED IN PLACENTA, SIGNAL = 2.6; EST_HUMAN HIT: AA362987.1, EVALUE 3.70e-01; NT HIT: AE008501.1, EVALUE 9.50e-02; EST_HUMAN HIT: AL600353.1, EVALUE 1.40e-01; NT HIT: U35248.1, EVALUE 3.90e+00
tttactctgaagggagacaccaaagtatctgaacatggagctatctagttgaaaggaaagtttcaggataatgaatttttcaggaatatgcatgatggatgagcgtacggcattc

SEQ ID NO: 17047 - DNA, 151 bp, Homo sapiens
  MAP TO AC011676.4; EXPRESSED IN HELA, SIGNAL = 5.8; EXPRESSED IN FETAL LIVER, SIGNAL =  11; EXPRESSED IN BONE MARROW, SIGNAL =  10; EXPRESSED IN LUNG, SIGNAL =  12; EXPRESSED IN HEART, SIGNAL = 7.8; EXPRESSED IN PLACENTA, SIGNAL =  11; EXPRESSED IN ADULT LIVER, SIGNAL =  10; EST_HUMAN HIT: AW016048.1, EVALUE 1.00e-79; SWISSPROT HIT: O24467, EVALUE 7.70e+00; NT HIT: gi14747475, EVALUE 9.00e-80
tcagcacgtatctgtcctcagccgagcacagcgtcctcacggtgtccatgtgcgccaccagctccttctccacggtcttcctctcggcgtcaatcacgtagattttccccttgggtgttccctgccccagccctcggctgcccacccagac

SEQ ID NO: 17048 - DNA, 114 bp, Homo sapiens
  MAP TO AL137846.1; EXPRESSED IN FETAL LIVER, SIGNAL = 0.82; EXPRESSED IN PLACENTA, SIGNAL = 1.1; EXPRESSED IN LUNG, SIGNAL = 0.91; EXPRESSED IN ADULT LIVER, SIGNAL = 1.2; EXPRESSED IN HELA, SIGNAL = 0.71; NT HIT: gi16179901, EVALUE 8.00e-58; SWISSPROT HIT: P55200, EVALUE 6.00e+00; EST_HUMAN HIT: BG822507.1, EVALUE 1.00e-57
cttctcggagtagtgctccccggggagtggggggtagtcacactgctcgatcttctggcacagggagaagagattcatcttatctccatagaaggggctctggagggctgccat

SEQ ID NO: 17049 - DNA, 150 bp, Homo sapiens
  MAP TO CHR21_66.0; EXPRESSED IN FETAL LIVER, SIGNAL = 1.7; EXPRESSED IN BONE MARROW, SIGNAL = 1.8; EXPRESSED IN HELA, SIGNAL = 3.6; EXPRESSED IN LUNG, SIGNAL = 1.1; EXPRESSED IN PLACENTA, SIGNAL = 1.7; EXPRESSED IN ADULT LIVER, SIGNAL =   1; SWISSPROT HIT: P54320, EVALUE 1.50e+00; NT HIT: AB020683.2, EVALUE 5.10e-01; EST_HUMAN HIT: BE218113.1, EVALUE 5.00e-79
cctcatccatgtcatagcggaactcctcctggtcatactcccggctctcttcccggaggacgtctgcatcttcatctccaggcctcatgtccatctcaccctcgaagccctccagcagagcctgggcctcctccccgggttctcctgcac

SEQ ID NO: 17050 - DNA, 103 bp, Homo sapiens
  MAP TO CHR21_68.0; EXPRESSED IN BONE MARROW, SIGNAL = 1.9; EXPRESSED IN HEART, SIGNAL = 1.4; EXPRESSED IN LUNG, SIGNAL = 0.89; EXPRESSED IN HELA, SIGNAL = 3.2; EXPRESSED IN PLACENTA, SIGNAL = 1.1; EXPRESSED IN ADULT LIVER, SIGNAL = 1.1; EXPRESSED IN FETAL LIVER, SIGNAL = 1.8; EST_HUMAN HIT: AL513842.1, EVALUE 1.90e+00; SWISSPROT HIT: Q05859, EVALUE 2.70e+00; NT HIT: AF406992.1, EVALUE 1.30e+00
acatccctccagggatccacaggatccctccagtgccccttgtaagacccgtttgtataaccattgaggacatccaggctagtccactgtttggctttgacag

SEQ ID NO: 17051 - DNA, 97 bp, Homo sapiens
  MAP TO CHR21_69.0; EXPRESSED IN HEART, SIGNAL = 1.2; EXPRESSED IN BONE MARROW, SIGNAL = 1.5; EXPRESSED IN LUNG, SIGNAL = 0.79; EXPRESSED IN ADULT LIVER, SIGNAL = 0.92; EXPRESSED IN HELA, SIGNAL = 4.3; EXPRESSED IN FETAL LIVER, SIGNAL = 1.4; EXPRESSED IN PLACENTA, SIGNAL = 0.78; NT HIT: M98447.1, EVALUE 3.00e-01; EST_HUMAN HIT: BG459666.1, EVALUE 1.10e-01; SWISSPROT HIT: P87503, EVALUE 8.10e+00
caggggcagtgcagtacacccccctcggctctcctccccacctcgaggacttcggtggcaaggatcaggctccggaaaactcactggagccatgctg

SEQ ID NO: 17052 - DNA, 278 bp, Homo sapiens
  MAP TO AL160058.2; EXPRESSED IN PLACENTA, SIGNAL = 1.9; EXPRESSED IN FETAL LIVER, SIGNAL = 1.3; EXPRESSED IN LUNG, SIGNAL = 1.6; EXPRESSED IN ADULT LIVER, SIGNAL = 1.8; EXPRESSED IN BONE MARROW, SIGNAL = 1.4; EXPRESSED IN HELA, SIGNAL = 1.2; SWISSPROT HIT: P28705, EVALUE 1.00e-19; NT HIT: gi14735348, EVALUE 8.00e-97; EST_HUMAN HIT: BE255171.1, EVALUE 1.00e-96
gaaagcactacggggtatacagttgtgaaggctgcaaagggttcttcaagaggacgataaggaaggacctcatctacacgtgtcgggataataaagactgcctcattgacaagcgtcagcgcaaccgctgccagtactgtcgctatcagaagtgccttgtcatgggcatgaagagggaaggtgagacacattcagttccaaaactcgtgtccggagagaggcatttcctaggcaaggggacattcaactgcaatacacgagaagtcatggtgcccaaa

SEQ ID NO: 17053 - DNA, 126 bp, Homo sapiens
  MAP TO CHR21_69.0; EXPRESSED IN BONE MARROW, SIGNAL = 2.2; EXPRESSED IN HEART, SIGNAL = 1.7; EXPRESSED IN LUNG, SIGNAL =   1; EXPRESSED IN PLACENTA, SIGNAL = 0.99; EXPRESSED IN ADULT LIVER, SIGNAL = 1.6; EXPRESSED IN HELA, SIGNAL = 4.5; EXPRESSED IN FETAL LIVER, SIGNAL =   2; SWISSPROT HIT: P35520, EVALUE 2.00e-18; NT HIT: X82166.1, EVALUE 6.00e-65; EST_HUMAN HIT: BE297756.1, EVALUE 9.00e-65
cgtcctgtccagcaccgtggggatgaagtcgtagccgatcccttccacctcgtaggttgtctgctccgtctggttcagctcctccggctctgcgaggatggacccttcgggatccaccccaatgat

SEQ ID NO: 17054 - DNA, 182 bp, Homo sapiens
  MAP TO CHR21_71.0; EXPRESSED IN HELA, SIGNAL = 3.8; EXPRESSED IN HEART, SIGNAL = 1.3; EXPRESSED IN FETAL LIVER, SIGNAL = 1.7; EXPRESSED IN PLACENTA, SIGNAL = 0.89; EXPRESSED IN LUNG, SIGNAL = 0.9; EXPRESSED IN BONE MARROW, SIGNAL = 1.7; EXPRESSED IN ADULT LIVER, SIGNAL = 1.3; SWISSPROT HIT: Q14684, EVALUE 5.00e-28; NT HIT: gi14780631, EVALUE 3.00e-98; EST_HUMAN HIT: BE221756.1, EVALUE 2.00e-97
ccacaccctggtacagaccatagctcggggtgtcttcgaagctatcgtagatcagtctccttttgtgcctgaagagacgatggaggaacagaagacaaaagtgggtgatggtgacctctctgctgaggagatacctgaaaatgaggtatccttgagaagagctgtcagtaaaaagaagacag

SEQ ID NO: 17055 - DNA, 139 bp, Homo sapiens
  MAP TO AC013614.4; EXPRESSED IN HELA, SIGNAL = 4.7; EXPRESSED IN FETAL LIVER, SIGNAL = 1.8; EXPRESSED IN BONE MARROW, SIGNAL = 0.86; EXPRESSED IN PLACENTA, SIGNAL = 3.5; EXPRESSED IN ADULT LIVER, SIGNAL = 2.6; EST_HUMAN HIT: BF185489.1, EVALUE 1.80e-01; SWISSPROT HIT: P49340, EVALUE 2.30e-01
ctgccatgtggtctggaacagggagggtgttcctggagaaaagcctttgtgggctctctgaaaagcccagggtcaggcagagacccagcatgggtcccagtgcagccccgctgtggttctggagaggctgtgtggccat

SEQ ID NO: 17056 - DNA, 142 bp, Homo sapiens
  MAP TO AL035697.19; EXPRESSED IN PLACENTA, SIGNAL = 3.6; EXPRESSED IN LUNG, SIGNAL = 2.3; EXPRESSED IN ADULT LIVER, SIGNAL = 2.2; EXPRESSED IN BONE MARROW, SIGNAL = 2.1; EXPRESSED IN HELA, SIGNAL = 0.66; EXPRESSED IN FETAL LIVER, SIGNAL = 2.6; NT HIT: AF195953.1, EVALUE 7.50e+00; EST_HUMAN HIT: BI048046.1, EVALUE 2.80e+00; SWISSPROT HIT: Q50638, EVALUE 7.70e+00
ctgtcctgttcctgggcctggagatgagggtccacctctcccaggtcctgaggactttcctcctggagcctagcctgccagtgagtaggctgctctgatctcttctccctgcactccaacatcttgctttcagctttgccct

SEQ ID NO: 17057 - DNA, 139 bp, Homo sapiens
  MAP TO AL138747.1; EXPRESSED IN ADULT LIVER, SIGNAL = 1.1; EXPRESSED IN HELA, SIGNAL = 0.69; EXPRESSED IN FETAL LIVER, SIGNAL = 1.1; EXPRESSED IN PLACENTA, SIGNAL = 0.89; EXPRESSED IN BONE MARROW, SIGNAL = 1.2; SWISSPROT HIT: P44650, EVALUE 3.40e+00; NT HIT: AJ006345.1, EVALUE 3.00e-08; EST_HUMAN HIT: AW962164.1, EVALUE 3.00e-12
atgatctggcttttaaaactaggtcatgaggtggggcaagatgactcaatggaagtctccaacaattgtcttccctgtaggaacaccaaatttgacaactatctacacaaaaagtacactcataagaatcaaaaatcag

SEQ ID NO: 17058 - DNA, 179 bp, Homo sapiens
  MAP TO AL138919.2; EXPRESSED IN FETAL LIVER, SIGNAL =   2; EXPRESSED IN PLACENTA, SIGNAL = 1.9; EXPRESSED IN LUNG, SIGNAL = 2.1; EXPRESSED IN ADULT LIVER, SIGNAL = 2.2; EXPRESSED IN BONE MARROW, SIGNAL = 1.7; EXPRESSED IN HELA, SIGNAL = 1.6; NT HIT: AF099810.1, EVALUE 6.30e-01; EST_HUMAN HIT: AW802021.1, EVALUE 1.50e-02; SWISSPROT HIT: Q09788, EVALUE 3.80e-01
atgtttgttcagatagatggagggggaatatctgcctctcagaaagagcttttgtggcagacgtggcaagctatgggtttcccagtcagacagcctggggtggagtcctggctgctcctcatcggggatttaacactgggcaagttactcagcctctctgagatgcagatttctgatgt

SEQ ID NO: 17059 - DNA, 465 bp, Homo sapiens
  MAP TO CHR22_106.0; EXPRESSED IN BONE MARROW, SIGNAL = 1.5; EXPRESSED IN HELA, SIGNAL =   3; EXPRESSED IN FETAL LIVER, SIGNAL = 0.77; EXPRESSED IN PLACENTA, SIGNAL = 0.73; EXPRESSED IN LUNG, SIGNAL = 0.64; EXPRESSED IN ADULT LIVER, SIGNAL = 0.44; NT HIT: gi14777802, EVALUE 0.00e+00; EST_HUMAN HIT: AL042278.1, EVALUE 0.00e+00; SWISSPROT HIT: Q9Y2N3, EVALUE 2.00e-11
tgtctttgaggaactgagggtcagctggcagtgggatgaggctggccccctcctccgctttagccccggcaagcctcccgtggagctgtaggagctggagatggcatttcggttggtgcaggagctcgtccaggaggtctgggatgtcgggttatatctgatttctgacctctgggcatggaggtctgtctgcagaggcccgggcccgggcacaaagggagagaggcctccattgtcccgcaggggccgaaatgcagacggtgcatccccggtgacctcggggacccttctctgatcaccaggattctcttggactctagggtccttgtcctgctcaggcatccctgccccgctctccttgagggccctcaacactatcttccctggacacaagtctggggacagccgggtgttgtggaccccaaaggggtgactcccggctcctgggccccacagagagtccat

SEQ ID NO: 17060 - DNA, 159 bp, Homo sapiens
  MAP TO CHR22_101.0; EXPRESSED IN HELA, SIGNAL =   5; EXPRESSED IN PLACENTA, SIGNAL = 4.1; EXPRESSED IN LUNG, SIGNAL =   4; EXPRESSED IN ADULT LIVER, SIGNAL = 3.7; EXPRESSED IN FETAL LIVER, SIGNAL = 4.3; EXPRESSED IN BONE MARROW, SIGNAL =   4; EXPRESSED IN HEART, SIGNAL = 3.8; SWISSPROT HIT: Q00804, EVALUE 2.60e+00; EST_HUMAN HIT: BE504099.1, EVALUE 2.00e-84
acgtagtgcagactcaggctgacagggggccacagaaatgcaaatatgtgagcagtgtgggtaactgcatcctggggaggaagtcctatgtgctggaataccacaagcacccatttctgccctgtggtactgcgcagcgttggtgtgaagcgatacata

SEQ ID NO: 17061 - DNA, 215 bp, Homo sapiens
  MAP TO CHR21_44.0; EXPRESSED IN BONE MARROW, SIGNAL = 4.3; EXPRESSED IN HELA, SIGNAL =  15; EXPRESSED IN LUNG, SIGNAL = 1.1; EXPRESSED IN ADULT LIVER, SIGNAL = 3.3; EXPRESSED IN PLACENTA, SIGNAL = 1.2; EXPRESSED IN FETAL LIVER, SIGNAL =   5; NT HIT: S49438.1, EVALUE 4.90e-02; SWISSPROT HIT: Q9XA86, EVALUE 5.00e+00
ccaagttaagcatgcgtgcctctggctctgggctctgccccttcagtagggtctgcactgtgcctgctgatgcaggagcagaactggctctgacaccccggtctggcccaactgcacacacattggctgtgctttttccatcatctgctgggctcaaagaatcagtatggagggtgagatatggcttccctaccagagaaacttggatggaaaac

SEQ ID NO: 17062 - DNA, 228 bp, Homo sapiens
  MAP TO AL136224.3; EXPRESSED IN LUNG, SIGNAL = 5.6; EXPRESSED IN ADULT LIVER, SIGNAL = 7.1; EXPRESSED IN HELA, SIGNAL = 5.2; NT HIT: AL163227.2, EVALUE 4.00e-15; EST_HUMAN HIT: BG750030.1, EVALUE 9.00e-14; SWISSPROT HIT: P03395, EVALUE 4.40e+00
atgatatcatttgactccatgtctcacatccaggtcatgctgatgcaaaaggtgggcacccacagccttgggcagttctgctcctgtggctttgtggggtatggcccaactcctagctggtttcacgagatggcattgattgaggattttccaggcacaaagtgcaagctctcagtggatctgacattctgggtctggaggacggtggccctcttctcacagctccac

SEQ ID NO: 17063 - DNA, 78 bp, Homo sapiens
  MAP TO AL160211.1; EXPRESSED IN HEART, SIGNAL = 5.8; EXPRESSED IN HELA, SIGNAL = 3.2; EXPRESSED IN PLACENTA, SIGNAL = 6.7; EXPRESSED IN ADULT LIVER, SIGNAL = 5.6; EXPRESSED IN FETAL LIVER, SIGNAL = 4.6; EXPRESSED IN LUNG, SIGNAL = 6.4; EXPRESSED IN BONE MARROW, SIGNAL = 5.2; NT HIT: D16583.1, EVALUE 4.00e-03; EST_HUMAN HIT: AA204970.1, EVALUE 6.00e-06
ccctcccactaccttttccagcctccctggtaaccattattccatttactacctccatgagagcaaattttttagctc

SEQ ID NO: 17064 - DNA, 160 bp, Homo sapiens
  MAP TO AC020759.3; EXPRESSED IN BONE MARROW, SIGNAL = 2.2; EXPRESSED IN HELA, SIGNAL = 1.3; EXPRESSED IN PLACENTA, SIGNAL = 2.4; EXPRESSED IN LUNG, SIGNAL = 2.9; EXPRESSED IN ADULT LIVER, SIGNAL =   3; EXPRESSED IN FETAL LIVER, SIGNAL = 2.2; SWISSPROT HIT: Q9Z3Q7, EVALUE 1.50e+00; EST_HUMAN HIT: BI561486.1, EVALUE 6.00e-85; NT HIT: M32501.1, EVALUE 5.50e-01
ctgagacctggttgagggtggagatggctccgtgcacagcctcgggggagagggattccagttggctgtaggtcaaacctacaactgcatccgacaaagaacccagggtctcattgagggtctggttctccatggcaatgtccaggagttctgctttgag

SEQ ID NO: 17065 - DNA, 355 bp, Homo sapiens
  MAP TO AL138478.1; EXPRESSED IN BONE MARROW, SIGNAL = 2.3; EXPRESSED IN LUNG, SIGNAL = 2.8; EXPRESSED IN PLACENTA, SIGNAL = 3.4; EXPRESSED IN ADULT LIVER, SIGNAL = 3.3; EXPRESSED IN HELA, SIGNAL = 1.9; EXPRESSED IN FETAL LIVER, SIGNAL = 3.1; NT HIT: gi14748995, EVALUE 3.00e-54; SWISSPROT HIT: O00409, EVALUE 9.00e-14; EST_HUMAN HIT: AV762447.1, EVALUE 1.00e-109
aattcacgtgcggtgtctttctcccctttgctttttcagttcctccaggagtgatccaaaatggagcgcgggtcctgagccgagggctgtttcctggcgtgcggccgctgccaatcactcccattggggtgacagcggccatgaggtaagtggggagtgcgctgggcagagccagcctggggagtgggaagggcagctttctgtccacggggtcccttctggagacagagaggagctgcttcgaactagtgacagcaataaacctggtttgcgtgctcagaaatgtgaaagtaaccccaagaactcccaatccaaatgcccccttctctttctcgggccaccagatgatcctggt

SEQ ID NO: 17066 - DNA, 229 bp, Homo sapiens
  MAP TO AL136163.3; EXPRESSED IN FETAL LIVER, SIGNAL = 0.97; EXPRESSED IN HELA, SIGNAL = 1.7; EXPRESSED IN LUNG, SIGNAL = 1.3; EXPRESSED IN ADULT LIVER, SIGNAL = 0.98; SWISSPROT HIT: Q06440, EVALUE 8.80e-01; NT HIT: AJ404331.1, EVALUE 2.10e-01; EST_HUMAN HIT: AW500008.1, EVALUE 1.00e-126
cttcaatgggtacctgaattctctttaacagccacaactgaacttcagatttattatccatttgtgcaccttgacagctgttgtccagagtagattccaaagaggagtctagagcctctttaatcacatttgcttctgtagaagagttcagttttaccgggaggggctctccctttttcacccaggtcttatctggctctttattgccctcagttatgggatcacccgc

SEQ ID NO: 17067 - DNA, 159 bp, Homo sapiens
  MAP TO CHR22_92.0; EXPRESSED IN HELA, SIGNAL = 1.3; EXPRESSED IN BONE MARROW, SIGNAL = 0.42; EXPRESSED IN ADULT LIVER, SIGNAL = 0.58; NT HIT: AY056182.1, EVALUE 3.50e-02; EST_HUMAN HIT: BG765374.1, EVALUE 3.20e+00; SWISSPROT HIT: P01931, EVALUE 3.40e+00
aagtgtggtgcatatttctttgtggtggacgaggtaaggtacagcaacctgcttatgacttcagtggcataatgctcataagcatagggccatttgacctgagaaacttcatcaggataactggcatctgaaatttcacaccatttgtcttctatcttc

SEQ ID NO: 17068 - DNA, 252 bp, Homo sapiens
  MAP TO AC015855.4; EXPRESSED IN PLACENTA, SIGNAL = 1.8; EXPRESSED IN LUNG, SIGNAL = 1.7; EXPRESSED IN ADULT LIVER, SIGNAL = 2.4; EXPRESSED IN HELA, SIGNAL =   3; EXPRESSED IN FETAL LIVER, SIGNAL = 1.9; EXPRESSED IN BONE MARROW, SIGNAL = 1.6; EXPRESSED IN HEART, SIGNAL = 1.7; SWISSPROT HIT: P49812, EVALUE 4.80e-01; NT HIT: AB067495.1, EVALUE 1.00e-03; EST_HUMAN HIT: C15898.1, EVALUE 1.00e-03
atgtatgatgccttggtgggaatggctggaagactggactcagctgggaatggtaacgggagcccctacacgtggcctttccagcatggtggcctcaggttgctgggcttcttccatgatggctggggctcccagagtaagtgctacaagaagctgagtggaagctgcagggcttcttataacctggccttgaaaatcccagaatttcacttctttcatattctgttggtccaggaagtcattaagaccagc

SEQ ID NO: 17069 - DNA, 91 bp, Homo sapiens
  MAP TO AL139135.2; EXPRESSED IN PLACENTA, SIGNAL = 1.1; EXPRESSED IN LUNG, SIGNAL = 0.93; EXPRESSED IN FETAL LIVER, SIGNAL =   1; EXPRESSED IN ADULT LIVER, SIGNAL = 1.3; EXPRESSED IN BONE MARROW, SIGNAL = 0.87; EXPRESSED IN HELA, SIGNAL = 1.4; NT HIT: AF100956.1, EVALUE 7.10e-02; EST_HUMAN HIT: BG537033.1, EVALUE 2.70e-02
agtagatacaggaagaagagtgaaggaagaggaggagtgaaaataggcatggaagcctctaagcctccaggtactgggagcagagagagag

SEQ ID NO: 17070 - DNA, 133 bp, Homo sapiens
  MAP TO AF238280.1; EXPRESSED IN HELA, SIGNAL = 0.5; EXPRESSED IN FETAL LIVER, SIGNAL = 0.66; EXPRESSED IN PLACENTA, SIGNAL = 0.61; EXPRESSED IN LUNG, SIGNAL = 0.63; EXPRESSED IN ADULT LIVER, SIGNAL = 0.74; EXPRESSED IN BONE MARROW, SIGNAL = 0.61; NT HIT: AE000369.1, EVALUE 7.00e+00; SWISSPROT HIT: P08547, EVALUE 1.80e-01; EST_HUMAN HIT: BE149398.1, EVALUE 1.10e-02
actcaatatcatgaagatgaaaatttttcttaaatttatctgtgaattcagtgcatccccagtcaaaatccaaataggaagcattggggaactagtccaaattatctcaaagttcacgcagaaaaagacacat

SEQ ID NO: 17071 - DNA, 109 bp, Homo sapiens
  MAP TO AL137802.2; EXPRESSED IN BONE MARROW, SIGNAL = 2.2; EXPRESSED IN HELA, SIGNAL = 1.7; EXPRESSED IN HEART, SIGNAL = 2.5; EXPRESSED IN PLACENTA, SIGNAL = 3.1; EXPRESSED IN LUNG, SIGNAL =   3; EXPRESSED IN ADULT LIVER, SIGNAL = 2.9; EST_HUMAN HIT: BG757527.1, EVALUE 1.00e-54; NT HIT: AK024468.1, EVALUE 7.00e-55
gtgggtgaaacagcagtgtgaatttgcaaaacaagcccagaacccagaccaaggccctaaactggacctgggcttcaaggagggccagaccatcaagctcaacatcgca

SEQ ID NO: 17072 - DNA, 224 bp, Homo sapiens
  MAP TO CHR22_163.0; EXPRESSED IN HEART, SIGNAL = 1.6; EXPRESSED IN BONE MARROW, SIGNAL = 0.73; EXPRESSED IN LUNG, SIGNAL = 1.2; EXPRESSED IN PLACENTA, SIGNAL = 1.3; EXPRESSED IN ADULT LIVER, SIGNAL = 1.3; EXPRESSED IN HELA, SIGNAL =   1; EXPRESSED IN FETAL LIVER, SIGNAL = 0.82; SWISSPROT HIT: P21827, EVALUE 3.80e-01
gctgcccaaggagaccgaggcgggtggcaacgcaggagtacaaggctatccccagggcctgcctgtggaattcggcaggaagcacgtgattgggaatgctgagagttctgtgccatctgcacatggtccccggcccagctctgcagaggagcctgtcccagcacaggatggcactggtgttcaggtagaaagccgtggcccccgcagaagcacacacagccgcg

SEQ ID NO: 17073 - DNA, 163 bp, Homo sapiens
  MAP TO CHR22_195.0; EXPRESSED IN BONE MARROW, SIGNAL = 0.9; EXPRESSED IN HELA, SIGNAL =   1; EXPRESSED IN LUNG, SIGNAL =   1; EXPRESSED IN FETAL LIVER, SIGNAL = 0.91; EXPRESSED IN PLACENTA, SIGNAL = 0.94; EXPRESSED IN ADULT LIVER, SIGNAL =   1; NT HIT: gi14778050, EVALUE 7.00e-87; SWISSPROT HIT: P06869, EVALUE 6.00e-06
ctgcaatagttgtgctcacccaggcccccctccccgttggggtatttcagagtgttgtatggatgctggaaagtctcgttccaaaacagacatggcttcccgccttgtagtgctgtccagttctgtgttcccctataatccgcaccattggctgtgaaacact

SEQ ID NO: 17074 - DNA, 319 bp, Homo sapiens
  MAP TO CHR21_27.0; EXPRESSED IN LUNG, SIGNAL = 0.77; EXPRESSED IN FETAL LIVER, SIGNAL = 1.2; EXPRESSED IN PLACENTA, SIGNAL = 0.67; EXPRESSED IN BONE MARROW, SIGNAL = 1.3; EXPRESSED IN HELA, SIGNAL = 3.3; SWISSPROT HIT: Q9GZZ6, EVALUE 1.70e+00; EST_HUMAN HIT: BG171134.1, EVALUE 1.10e-01
ccttctgatgaatatcccagatggagcccccagatgaaatggccacggcaacggccacgacgggcgggggaaaaaccacagctgccactgggagcctgcacggttggctggctggcgcttgctgcccggtgtgccagtggaactctactctggccaaggaattcagctctgtctgaacagaggggaagcatacaatgattaaggagacacatttgcgctgagcaaggggttcttcccccaggaccttccccttttgttccttaaactgttttctcttgttttccttttccaagaggttttcttccccagcacgctgctt

SEQ ID NO: 17075 - DNA, 162 bp, Homo sapiens
  MAP TO CHR22_88.0; EXPRESSED IN BONE MARROW, SIGNAL = 0.95; EXPRESSED IN HEART, SIGNAL = 1.2; EXPRESSED IN HELA, SIGNAL = 1.6; EXPRESSED IN PLACENTA, SIGNAL = 1.2; EXPRESSED IN LUNG, SIGNAL = 0.97; EXPRESSED IN ADULT LIVER, SIGNAL =   1; EXPRESSED IN FETAL LIVER, SIGNAL = 0.88; NT HIT: U75902.1, EVALUE 5.60e-01; EST_HUMAN HIT: BF238626.1, EVALUE 8.20e-01
tcaagacctgactaaacgactggcaagaaggactaacctagaggggaaaagtaagagaaaagtggcttctgtccttcagaagcgaatcgagagaagcgacttggattactcacatccgaattgtccttttgagattgtccctagtcagcgtttcactggaag

SEQ ID NO: 17076 - DNA, 244 bp, Homo sapiens
  MAP TO CHR22_16.0; EXPRESSED IN PLACENTA, SIGNAL = 0.76; EXPRESSED IN HELA, SIGNAL = 0.55; EXPRESSED IN LUNG, SIGNAL = 0.89; EXPRESSED IN FETAL LIVER, SIGNAL = 0.7; EXPRESSED IN ADULT LIVER, SIGNAL = 0.82; EXPRESSED IN BONE MARROW, SIGNAL = 0.65; EST_HUMAN HIT: BG980069.1, EVALUE 1.00e-126; SWISSPROT HIT: P10263, EVALUE 3.00e-35; NT HIT: Y08032.1, EVALUE 9.00e-78
aagagggggagttagagcttctacagaaaatctaattacgctatttcaaacaatagaacaattctgcccatggtttccagaacagggaactttagatctaaaagattgggaaaaaattggcaaagaattaaaacaagcaaatagggaaggtaaaatcatcccacttacagtatggaatgattgggccattattaaagcaactttagaaccatttcaaacaggagaagatattgtttcagtttct

SEQ ID NO: 17077 - DNA, 164 bp, Homo sapiens
  MAP TO AC020759.3; EXPRESSED IN LUNG, SIGNAL = 1.3; EXPRESSED IN FETAL LIVER, SIGNAL =   1; EXPRESSED IN ADULT LIVER, SIGNAL =   1; EXPRESSED IN HELA, SIGNAL = 0.89; SWISSPROT HIT: P37780, EVALUE 2.00e+00; EST_HUMAN HIT: BG105996.1, EVALUE 2.00e-48
ctgtttccctgtgtgatttgaaatggggtcaagctcccatttctccttgaagaactgagcacctactttgaatatctcatcaggaaggcattttattgctgatggctggaaatatggcatcaaatccttgtcaagcatccggagctctgccttagttaatccag

SEQ ID NO: 17078 - DNA, 189 bp, Homo sapiens
  MAP TO CHR22_209.0; EXPRESSED IN FETAL LIVER, SIGNAL = 1.2; EXPRESSED IN BONE MARROW, SIGNAL = 1.5; EXPRESSED IN HELA, SIGNAL = 2.3; EXPRESSED IN PLACENTA, SIGNAL = 0.83; EXPRESSED IN LUNG, SIGNAL = 0.84; EXPRESSED IN ADULT LIVER, SIGNAL = 0.78; EST_HUMAN HIT: AA363322.1, EVALUE 2.50e-01; SWISSPROT HIT: P18627, EVALUE 3.30e+00; NT HIT: gi14748171, EVALUE 1.70e-01
ttctcagtgacgatgattttgtttcaaatttcattgaaaacattagaagcaataagaagagaactgccaaagctctcagcaccacatctacccaccttccagtacctattccatataccctgctttccctcttgctcctttgcatgaaccctgtgctcctactccatggaaacccttcacttgtgctct

SEQ ID NO: 17079 - DNA, 472 bp, Homo sapiens
  MAP TO CHR22_155.0; EXPRESSED IN BONE MARROW, SIGNAL = 1.2; EXPRESSED IN PLACENTA, SIGNAL = 0.36; EXPRESSED IN LUNG, SIGNAL = 0.54; EXPRESSED IN HELA, SIGNAL = 0.63; SWISSPROT HIT: P01717, EVALUE 4.00e-29; NT HIT: L29162.1, EVALUE 0.00e+00; EST_HUMAN HIT: H62289.1, EVALUE 0.00e+00
ttctgtagggcctccgtagagatctggaaggaaggaggcctcagagtctctgatctgggtgtactgggccagacctgttcgtggctttgtccacagtcctcctggggctggaggaagaaggtgacacagatggcaaggggtttgtgtctcatttctccatctgcctgtgtcactgtgagattgttgtcagccgcagagtaacagtaatagtcagcctcatcctcaacctgggccccgctgatggtcaaggtgactgtggtccctgagctggagccggagaatcgctcagggatccctgagggccgctcactgtctttataaatcaccagcacaggggcctggcctggcttctgctggaaccaccgagcatatttttttgccagtacatctcctgagcaggtgatcctggctgtctgtcccggagacactgacactgaggatggctgtgtcagctcataggaggccacagaga

SEQ ID NO: 17080 - DNA, 159 bp, Homo sapiens
  MAP TO AC019287.3; EXPRESSED IN HELA, SIGNAL = 0.64; EXPRESSED IN FETAL LIVER, SIGNAL = 1.8; EXPRESSED IN LUNG, SIGNAL = 1.8; EXPRESSED IN PLACENTA, SIGNAL = 1.7; EXPRESSED IN BONE MARROW, SIGNAL = 1.8; EXPRESSED IN ADULT LIVER, SIGNAL = 1.9; EST_HUMAN HIT: BE350127.1, EVALUE 3.00e-19; SWISSPROT HIT: P52687, EVALUE 5.10e-01; NT HIT: U93163.1, EVALUE 1.00e-20
aaaagttaactataaaatggccacaagcagatccttcaggaagtttttcagaagaaggccttgttatcgtaggagatgacagctccacacatgttattgcccctgaagacctgggacaagatgtggaggtagaagacagtgatattgatgatcctaacc

SEQ ID NO: 17081 - DNA, 162 bp, Homo sapiens
  MAP TO CHR22_95.0; EXPRESSED IN HELA, SIGNAL = 1.9; EXPRESSED IN FETAL LIVER, SIGNAL = 0.48; EXPRESSED IN BONE MARROW, SIGNAL = 0.49; EXPRESSED IN PLACENTA, SIGNAL = 0.65; EXPRESSED IN LUNG, SIGNAL = 0.51; EXPRESSED IN ADULT LIVER, SIGNAL = 0.64; SWISSPROT HIT: P36917, EVALUE 5.80e+00; NT HIT: gi7669470, EVALUE 5.60e-01; EST_HUMAN HIT: AV755008.1, EVALUE 3.30e+00
acctccagcctcagtccctgaagtcgccgactctcctgcattgctgcgtctagaaaggaatgccttccaggtgatccaggctctgatacggtggaatataaacaggttaatcaataatagcccagaaatggacaaactctctgagctgcagcggacctccag

SEQ ID NO: 17082 - DNA, 179 bp, Homo sapiens
  MAP TO AC020588.4; EXPRESSED IN LUNG, SIGNAL = 4.4; EXPRESSED IN PLACENTA, SIGNAL = 5.4; EXPRESSED IN BONE MARROW, SIGNAL = 3.2; EXPRESSED IN ADULT LIVER, SIGNAL = 3.7; EXPRESSED IN HELA, SIGNAL = 2.5; EXPRESSED IN FETAL LIVER, SIGNAL = 3.3; EST_HUMAN HIT: BG760517.1, EVALUE 3.00e-96; SWISSPROT HIT: Q9PW71, EVALUE 5.00e-31; NT HIT: gi14744021, EVALUE 2.00e-96
tgcctaccatgctgcccggagagacatgctggacgccctgggcatcacggctctgttgaatgtctcctcggactgcccaaaccactttgaaggacactatcagtacaagtgcatcccagtggaagataaccacaaggccgacatcagctcctggttcatggaagccatagagtacatcg

SEQ ID NO: 17083 - DNA, 82 bp, Homo sapiens
  MAP TO AL138499.1; EXPRESSED IN HEART, SIGNAL = 2.6; EXPRESSED IN PLACENTA, SIGNAL = 3.5; EXPRESSED IN LUNG, SIGNAL = 2.5; EXPRESSED IN ADULT LIVER, SIGNAL = 3.1; EXPRESSED IN FETAL LIVER, SIGNAL = 3.4; EXPRESSED IN BONE MARROW, SIGNAL =   2; EXPRESSED IN HELA, SIGNAL =   2; NT HIT: L25616.1, EVALUE 6.00e-39; EST_HUMAN HIT: BE706560.1, EVALUE 9.00e-39
tgtttatgttaaagatgataaaataagattgctggaagagcaactacaacatgaaatttcaaacaaaatggaagaatttaag

SEQ ID NO: 17084 - DNA, 180 bp, Homo sapiens
  MAP TO CHR22_13.0; EXPRESSED IN PLACENTA, SIGNAL = 3.5; EXPRESSED IN LUNG, SIGNAL = 3.6; EXPRESSED IN BONE MARROW, SIGNAL = 2.8; EXPRESSED IN ADULT LIVER, SIGNAL = 3.3; EXPRESSED IN HELA, SIGNAL = 1.4; EXPRESSED IN FETAL LIVER, SIGNAL = 3.3; SWISSPROT HIT: P02810, EVALUE 1.30e-01; NT HIT: M96015.1, EVALUE 1.60e-01
cgctgcagtcctggaagctcagaggccacagtggagacagcagcgtgggggatgtcccccctcctctccccaccatcctcgtcaggcagaggccagggtgcagggaccaccggagcaaaggcccagggaaatgaatgggtgtcattctggtcctgatccgaggcacagccaggaaggtcc

SEQ ID NO: 17085 - DNA, 184 bp, Homo sapiens
  MAP TO AC024326.2; EXPRESSED IN HELA, SIGNAL = 1.1; EXPRESSED IN FETAL LIVER, SIGNAL = 1.7; EXPRESSED IN BONE MARROW, SIGNAL = 1.8; EXPRESSED IN LUNG, SIGNAL = 2.7; EXPRESSED IN ADULT LIVER, SIGNAL = 2.6; SWISSPROT HIT: P38386, EVALUE 1.10e+00; EST_HUMAN HIT: AA724866.1, EVALUE 3.00e-99; NT HIT: gi13626872, EVALUE 2.00e-99
gaatttgtaaaaaccgtgaataattttgttcaaagggatacatttgtagtttgggacaagttatctgtgaatcataggagaacacatcttacaaaactcatgcacactgttgaacaagctactttaaggatatcccagagcttccaaaagaccacagagtttgatacaaattcaacggatatag

SEQ ID NO: 17086 - DNA, 92 bp, Homo sapiens
  MAP TO AC016078.3; EXPRESSED IN FETAL LIVER, SIGNAL = 1.8; EXPRESSED IN PLACENTA, SIGNAL = 1.2; EXPRESSED IN LUNG, SIGNAL = 1.2; EXPRESSED IN ADULT LIVER, SIGNAL = 1.4; EXPRESSED IN HELA, SIGNAL = 1.1; NT HIT: gi11426540, EVALUE 2.90e-01; EST_HUMAN HIT: AA437318.1, EVALUE 1.00e-44
gtgctaagaacgctcaagccatggagagagatgcatttggagttgtttacattcagacaaagctcatctggttgtttgcagctagtcacaag

SEQ ID NO: 17087 - DNA, 300 bp, Homo sapiens
  MAP TO CHR22_35.0; EXPRESSED IN FETAL LIVER, SIGNAL = 2.1; EXPRESSED IN BONE MARROW, SIGNAL = 1.8; EXPRESSED IN LUNG, SIGNAL =   3; EXPRESSED IN HELA, SIGNAL = 3.1; EXPRESSED IN ADULT LIVER, SIGNAL = 2.5; EXPRESSED IN PLACENTA, SIGNAL = 2.5; EST_HUMAN HIT: AA534354.1, EVALUE 5.00e-50; NT HIT: gi9635487, EVALUE 1.00e-101
cttgactatgccttcagctccagccacttctctaagaggaaattgttgggcaggtggggaagcgctagtcgcggaactaaactgtaagccggaccaggtgtgaggaggggaggtgatagaaggattatagggtggaggagtggaggctgaggaagtattgggacttagctcggtctggcgacaagcagcttggggaggaggggaaaggtcagatgggtctgtagaaaaggaagactgggaagactcagcgacgcttggggttgggaccgaggggacaggcgggagggaaaggaggaggat

SEQ ID NO: 17088 - DNA, 148 bp, Homo sapiens
  MAP TO CHR22_27.0; EXPRESSED IN HELA, SIGNAL = 2.6; EXPRESSED IN FETAL LIVER, SIGNAL = 3.2; EXPRESSED IN PLACENTA, SIGNAL = 3.2; EXPRESSED IN LUNG, SIGNAL = 2.9; EXPRESSED IN ADULT LIVER, SIGNAL = 3.3; EXPRESSED IN BONE MARROW, SIGNAL =   3; EST_HUMAN HIT: BG719388.1, EVALUE 1.90e-01; SWISSPROT HIT: P46865, EVALUE 3.40e+00; NT HIT: X06162.1, EVALUE 1.30e-01
atggccttcttttggactttcgattgtaaaactgtgaattccatcagatgcttgtcggtgttggcggcggtggctgctgaggtcctgaaagcgttttgcctccgcgtgtgtgcagaacaccgaaataatcgtttttctctcttcgcct

SEQ ID NO: 17089 - DNA, 123 bp, Homo sapiens
  MAP TO AC021635.3; EXPRESSED IN PLACENTA, SIGNAL = 0.69; EXPRESSED IN LUNG, SIGNAL = 0.69; EXPRESSED IN FETAL LIVER, SIGNAL = 0.58; EXPRESSED IN ADULT LIVER, SIGNAL = 0.85; EXPRESSED IN HELA, SIGNAL = 0.53; SWISSPROT HIT: Q10094, EVALUE 4.60e+00; EST_HUMAN HIT: T69925.1, EVALUE 1.50e-01; NT HIT: AF087913.1, EVALUE 6.00e-31
attctgcatattttcccggtgatctgcgttgttattgtcccactgggggtctcgggtggagaatttctggcctgtggtaggaatgttttcatcaggagggtgctcacattcctgaactaccat

SEQ ID NO: 17090 - DNA, 172 bp, Homo sapiens
  MAP TO CHR22_13.0; EXPRESSED IN HEART, SIGNAL =   4; EXPRESSED IN BONE MARROW, SIGNAL = 4.2; EXPRESSED IN ADULT LIVER, SIGNAL = 5.3; EXPRESSED IN HELA, SIGNAL = 3.2; EXPRESSED IN LUNG, SIGNAL = 4.8; EXPRESSED IN FETAL LIVER, SIGNAL = 4.1; EST_HUMAN HIT: AW590017.1, EVALUE 4.00e-92; SWISSPROT HIT: P11274, EVALUE 1.00e-18; NT HIT: U07000.1, EVALUE 1.00e-82
tccatcccgtcctgcgcaggccgacactcactgacgttgaagcctgccttcagtgcctggatgtccgtggccacaccggacacgcggtagatgcccacctcctccatgcctcggcgctcgatctcctccacgcactggcgcatgatgtagggcaccttggacctctctctcc

SEQ ID NO: 17091 - DNA, 108 bp, Homo sapiens
  MAP TO AL136224.3; EXPRESSED IN HELA, SIGNAL = 1.6; EXPRESSED IN LUNG, SIGNAL = 5.4; EXPRESSED IN ADULT LIVER, SIGNAL = 5.1; EXPRESSED IN FETAL LIVER, SIGNAL = 2.9; NT HIT: AL163227.2, EVALUE 1.00e-34; EST_HUMAN HIT: BF959202.1, EVALUE 2.00e-40; SWISSPROT HIT: P53283, EVALUE 8.00e+00
acttgttgaatggctttgaccaaaatgctgataatgatatggacaatgaaatccaggctgaggtagttttagatggagatgaggatcttgttgggaactggagcaaag

SEQ ID NO: 17092 - DNA, 111 bp, Homo sapiens
  MAP TO AC024195.2; EXPRESSED IN LUNG, SIGNAL = 3.5; EXPRESSED IN PLACENTA, SIGNAL = 3.4; EXPRESSED IN ADULT LIVER, SIGNAL = 3.8; EXPRESSED IN FETAL LIVER, SIGNAL = 3.2; EXPRESSED IN BONE MARROW, SIGNAL = 3.6; EXPRESSED IN HELA, SIGNAL = 0.91; EXPRESSED IN HEART, SIGNAL =   3; EST_HUMAN HIT: BE676486.1, EVALUE 5.30e-01; NT HIT: AJ003021.1, EVALUE 3.60e-01
ctggaccagggagcactggtaggagtatctgatttctatgaacagtgcttgctggcactgactcaagaaagaagacaggaaggaatggtgaatacaacttccattgagaaa

SEQ ID NO: 17093 - DNA, 121 bp, Homo sapiens
  MAP TO AL136140.2; EXPRESSED IN LUNG, SIGNAL = 2.8; EXPRESSED IN HELA, SIGNAL = 1.9; EXPRESSED IN FETAL LIVER, SIGNAL = 2.2; EXPRESSED IN BONE MARROW, SIGNAL = 2.1; EST_HUMAN HIT: T96599.1, EVALUE 5.90e-01; NT HIT: gi14772918, EVALUE 4.00e-01
gctgtcatgccatggctgcaagtccaggtggagaatggaggcctctgctcaccagtggttccacgctaactgatgtgtatggcaatgacccacagccacaaaacctcactcagtattcagc

SEQ ID NO: 17094 - DNA, 178 bp, Homo sapiens
  MAP TO AL138889.2; EXPRESSED IN HELA, SIGNAL = 1.6; EXPRESSED IN LUNG, SIGNAL = 1.5; EXPRESSED IN ADULT LIVER, SIGNAL = 1.5; EXPRESSED IN FETAL LIVER, SIGNAL = 1.5; EST_HUMAN HIT: AA834990.1, EVALUE 7.00e-91; SWISSPROT HIT: P37370, EVALUE 5.00e-01; NT HIT: AF134935.1, EVALUE 1.60e-01
attggtgagcatctcccacattaccgtctccaacggaacaaggtgccccattggacatttcctctgcatggaccagccattctccaaatctgcccccatgtcaccccagctccccatcgcagtcacttctcactccttgtcccctgtccccctgagtgacaggacttttgccagttag

SEQ ID NO: 17095 - DNA, 115 bp, Homo sapiens
  MAP TO AC011881.5; EXPRESSED IN BONE MARROW, SIGNAL = 1.8; EXPRESSED IN LUNG, SIGNAL = 1.6; EXPRESSED IN HELA, SIGNAL = 1.1; EXPRESSED IN PLACENTA, SIGNAL = 2.8; EXPRESSED IN ADULT LIVER, SIGNAL = 1.7; EXPRESSED IN FETAL LIVER, SIGNAL = 1.5; NT HIT: AF412834.1, EVALUE 9.50e-02; EST_HUMAN HIT: H59931.1, EVALUE 2.00e-40
tttttaaagtctttcttttctttaatctcctccggtagctgttcttcacactcagaatttgaagttagttttttacactcatcctcctcttcctcatctgaatctgcctcatcat

SEQ ID NO: 17096 - DNA, 170 bp, Homo sapiens
  MAP TO AC021010.3; EXPRESSED IN FETAL LIVER, SIGNAL = 2.5; EXPRESSED IN HELA, SIGNAL = 1.7; EXPRESSED IN PLACENTA, SIGNAL =   3; EXPRESSED IN ADULT LIVER, SIGNAL =   3; EXPRESSED IN LUNG, SIGNAL = 3.3; NT HIT: L11910.1, EVALUE 1.00e-02; SWISSPROT HIT: Q15323, EVALUE 3.30e+00; EST_HUMAN HIT: BG425933.1, EVALUE 4.00e-03
atgttgacactcattaactatcacgccaataaatccaagttaaaaagaaattctcaattgaactacgggggtatacaggtatacacgggatatgaactacaggggtatacacagaatgaaatcctgtcatttggtgtacaaattctactagggaaggccgacaataacaa

SEQ ID NO: 17097 - DNA, 255 bp, Homo sapiens
  MAP TO AJ239319.2; EXPRESSED IN BONE MARROW, SIGNAL = 1.3; EXPRESSED IN PLACENTA, SIGNAL = 2.1; EXPRESSED IN ADULT LIVER, SIGNAL = 1.7; EXPRESSED IN HELA, SIGNAL = 2.6; EXPRESSED IN LUNG, SIGNAL = 1.8; EXPRESSED IN FETAL LIVER, SIGNAL = 1.8; EST_HUMAN HIT: BE295333.1, EVALUE 0.00e+00; SWISSPROT HIT: Q14202, EVALUE 9.00e-45; NT HIT: gi14759120, EVALUE 0.00e+00
ctcgccctttcctctggcggactggggcatagtagcggatgctcaccaccttggtggtgccccgaggggtggtacacttgcgggactgccgcaccacattggtgaaggagagttgcatgtgttcctcagctgtctgcagcccaaaaaacttagtgttgaagaacatgagggtgttgaggaggacaaagggcgagtagacccccagttgcttacactcccagaggtgctcctcctccactcgagagaacaccgtat

SEQ ID NO: 17098 - DNA, 147 bp, Homo sapiens
  MAP TO CHR22_21.0; EXPRESSED IN LUNG, SIGNAL = 2.5; EXPRESSED IN BONE MARROW, SIGNAL = 2.4; EXPRESSED IN HELA, SIGNAL = 3.3; EXPRESSED IN HEART, SIGNAL = 2.2; EXPRESSED IN PLACENTA, SIGNAL = 2.7; EXPRESSED IN FETAL LIVER, SIGNAL = 2.5; EXPRESSED IN ADULT LIVER, SIGNAL =   3; NT HIT: U65949.1, EVALUE 1.30e-01
gaacaggctggaccagatggctgtggggtggaaccttacaaaaatgatggacaaccagaatgagattttctgctctatcagctcaggctctaattttgactgcaagaagcttatggagcagaggattaaagcactggtgctggcttg

SEQ ID NO: 17099 - DNA, 170 bp, Homo sapiens
  MAP TO AC021609.3; EXPRESSED IN FETAL LIVER, SIGNAL = 1.4; EXPRESSED IN BONE MARROW, SIGNAL = 1.4; EXPRESSED IN HEART, SIGNAL = 1.5; EXPRESSED IN PLACENTA, SIGNAL = 1.6; EXPRESSED IN LUNG, SIGNAL = 1.4; EXPRESSED IN HELA, SIGNAL =   1; EXPRESSED IN ADULT LIVER, SIGNAL = 1.4; NT HIT: gi16159207, EVALUE 5.00e-91; EST_HUMAN HIT: AU119404.1, EVALUE 7.00e-91; SWISSPROT HIT: Q08462, EVALUE 5.00e-27
ctctcaaataagacctggctgtagtcgcccaggacgtgggcgtgggtgtggagtaggatggtgttgtagcccaccaaggccaccatcatgatcaacatcttcagctcatagtttacccgcaggaacacggaacaggatatcagtcccagaatgcagctgtagataaagta

SEQ ID NO: 17100 - DNA, 160 bp, Homo sapiens
  MAP TO AC016763.5; EXPRESSED IN HEART, SIGNAL = 1.2; EXPRESSED IN BONE MARROW, SIGNAL = 1.5; EXPRESSED IN LUNG, SIGNAL = 1.4; EXPRESSED IN PLACENTA, SIGNAL = 1.4; EXPRESSED IN ADULT LIVER, SIGNAL = 1.5; EXPRESSED IN HELA, SIGNAL = 1.4; EXPRESSED IN FETAL LIVER, SIGNAL = 1.5; SWISSPROT HIT: P43572, EVALUE 8.70e-01; NT HIT: AF286904.1, EVALUE 8.00e-71; EST_HUMAN HIT: AI761763.1, EVALUE 1.00e-70
gctgaatatgaatgaactgttttggctgtttaaactctcctttgtacaagcgattgtaatagttgacgttgctctctgcctcaggaacaggaatgaccatactctcttttttttctctaaacacttgctgtgctgaaattgctcgctgtaaatgatgttc

SEQ ID NO: 17101 - DNA, 196 bp, Homo sapiens
  MAP TO CHR22_6.0; EXPRESSED IN LUNG, SIGNAL =   3; EXPRESSED IN HEART, SIGNAL = 2.5; EXPRESSED IN PLACENTA, SIGNAL = 3.1; EXPRESSED IN ADULT LIVER, SIGNAL = 5.1; EXPRESSED IN HELA, SIGNAL =   3; EXPRESSED IN FETAL LIVER, SIGNAL =   3; EXPRESSED IN BONE MARROW, SIGNAL = 2.3; NT HIT: AJ271736.1, EVALUE 2.00e-41; SWISSPROT HIT: P04985, EVALUE 6.40e-01; EST_HUMAN HIT: BE389450.1, EVALUE 1.00e-37
cctggttcttcccagtgctcagctttcctgccgagcttcttttagacgttcgacgttcttgggtgtcctgtgacaatgtgtcctccgctttcacatgctctagtgttccttcaccggggtctttgtcgccccacgttgggcagccaggaatgttggggtgatcagacccaacaccaggttgtggggacgacgaagt

SEQ ID NO: 17102 - DNA, 143 bp, Homo sapiens
  MAP TO AL137802.2; EXPRESSED IN BONE MARROW, SIGNAL =   1; EXPRESSED IN PLACENTA, SIGNAL = 1.2; EXPRESSED IN LUNG, SIGNAL = 1.5; EXPRESSED IN ADULT LIVER, SIGNAL = 2.2; EXPRESSED IN HELA, SIGNAL = 1.4; EXPRESSED IN FETAL LIVER, SIGNAL =   1; EST_HUMAN HIT: BI517643.1, EVALUE 7.00e-38; SWISSPROT HIT: O35548, EVALUE 1.50e+00
ggggaagttctttttacaaagcgttgatttctcggcacccggcagggagggcaactggcagggtctctggcgcaccttctgcgcggtggagccacgggggctcagctgggcggtggtgcggccgtggggtggtaggtcaagag

SEQ ID NO: 17103 - DNA, 149 bp, Homo sapiens
  MAP TO AC011985.3; EXPRESSED IN PLACENTA, SIGNAL = 0.91; EXPRESSED IN FETAL LIVER, SIGNAL = 1.1; EXPRESSED IN LUNG, SIGNAL = 1.1; EXPRESSED IN ADULT LIVER, SIGNAL = 1.1; EXPRESSED IN BONE MARROW, SIGNAL = 1.1; EXPRESSED IN HELA, SIGNAL = 1.1; SWISSPROT HIT: Q99743, EVALUE 7.00e-22; NT HIT: gi15294734, EVALUE 1.00e-78; EST_HUMAN HIT: BI915366.1, EVALUE 2.00e-78
cattgtgtttctgcaaaaatccgatgaccttttccaacacggtggttttgtccattttccgcgtgttgccagggagcatggaactgagctctttgatgagaacattgaactggtcccgacgcttcttctcagacttgtttcgagaagct

SEQ ID NO: 17104 - DNA, 307 bp, Homo sapiens
  MAP TO AL049828.3; EXPRESSED IN ADULT LIVER, SIGNAL = 2.3; EXPRESSED IN LUNG, SIGNAL = 2.3; EXPRESSED IN FETAL LIVER, SIGNAL = 1.4; EXPRESSED IN HELA, SIGNAL = 0.87; EST_HUMAN HIT: BF801149.1, EVALUE 5.00e-53; SWISSPROT HIT: P75254, EVALUE 1.00e-04; NT HIT: AJ229041.1, EVALUE 2.00e-57
aggaggttagttattaagctaatcagggaggcaccagaggaaggcaaagcccaatgcaaggaagtccaaaaactgatacaaaaagtgcaaggagaaattatcgacgaaatagataccataaataagaaacaaccaaaacttcaggaaacaatggacacacttacaaaaatgcaaaatgctcaggaaagtctcagcaatagaattgaacaagtagaagaaaaaaattaagagctcgaagacaatgtcttcaaattaacccaatccaagaaaaattaaaaaaatttactaagaaaatatgaccaaagcc

SEQ ID NO: 17105 - DNA, 138 bp, Homo sapiens
  MAP TO AL122013.3; EXPRESSED IN LUNG, SIGNAL = 0.57; EXPRESSED IN HELA, SIGNAL = 0.55; EXPRESSED IN PLACENTA, SIGNAL = 0.57; EXPRESSED IN ADULT LIVER, SIGNAL = 0.59; EXPRESSED IN FETAL LIVER, SIGNAL = 0.58; SWISSPROT HIT: P26354, EVALUE 1.20e+00
ggcataagaagaacagaactagattgtctgaataaaaagaagcaatctcctcccatcagctcaactcccaacattctccaggaggccatgcccctgaaccttttctccaatacagctttccccttgctaccttctact

SEQ ID NO: 17106 - DNA, 353 bp, Homo sapiens
  MAP TO AL137010.1; EXPRESSED IN BONE MARROW, SIGNAL = 1.3; EXPRESSED IN HELA, SIGNAL = 1.1; EXPRESSED IN HEART, SIGNAL = 1.4; EXPRESSED IN PLACENTA, SIGNAL = 2.1; EXPRESSED IN LUNG, SIGNAL = 1.8; EXPRESSED IN ADULT LIVER, SIGNAL = 1.9; EXPRESSED IN FETAL LIVER, SIGNAL = 1.8; NT HIT: Y09356.1, EVALUE 1.30e+00; SWISSPROT HIT: Q9Z565, EVALUE 3.60e+00
aagttcgaggaactagcaagtcaccaaatggttttctagttagccgtgatgtatgtaaaggtcagctggctttgacacgtgttcccttgcccatcaccagactgatgtggctgcttttgattgtctgcatctttgtcttcttactttatcacctggcagtactcctttccagtaatcacaccttcatccaaaaaggccaactgttcctggaagacaagaatgacccttcactcaagagtgtagaagagactatggccataagacccttgaatacaactaagaaaatagcctgggatttcacccagatgggtgcctaccacctcagccatattgtgatccatgtccttgacaca

SEQ ID NO: 17107 - DNA, 163 bp, Homo sapiens
  MAP TO AL139149.1; EXPRESSED IN HELA, SIGNAL = 0.61; EXPRESSED IN HEART, SIGNAL = 1.2; EXPRESSED IN PLACENTA, SIGNAL = 1.5; EXPRESSED IN ADULT LIVER, SIGNAL = 1.4; EXPRESSED IN FETAL LIVER, SIGNAL = 1.2; EXPRESSED IN BONE MARROW, SIGNAL = 1.3; EST_HUMAN HIT: AI382204.1, EVALUE 6.00e-05; SWISSPROT HIT: Q64737, EVALUE 3.40e+00; NT HIT: AB026898.1, EVALUE 3.60e-02
cttgggtaccaacttggccatagtgggtcagagcaccaagcaggctattggggttcctgattctatgccttggctccttgatgccatttctggacctgatctgggccagagaggagcctactgccccaacaggagagacagacctggcagcattcaccacaag

SEQ ID NO: 17108 - DNA, 171 bp, Homo sapiens
  MAP TO AC015845.4; EXPRESSED IN BONE MARROW, SIGNAL = 3.4; EXPRESSED IN HELA, SIGNAL = 1.8; EXPRESSED IN FETAL LIVER, SIGNAL = 3.2; EXPRESSED IN PLACENTA, SIGNAL = 3.5; EXPRESSED IN LUNG, SIGNAL = 3.5; EXPRESSED IN ADULT LIVER, SIGNAL = 3.6; EST_HUMAN HIT: BE255689.1, EVALUE 2.00e-91; SWISSPROT HIT: Q9Y3D9, EVALUE 4.00e-29; NT HIT: gi14769732, EVALUE 1.00e-91
gctctaatccgatcctcgtggtaccagatgtcttggatgggagctttggctttgccatatcgcactcgaggcctttggaagacgggctccctcagcgggggaaaggcgtcatatacgtcaaaccacaggggcttctccttcagcaccccggcccgaaccaggtcccgagtc

SEQ ID NO: 17109 - DNA, 110 bp, Homo sapiens
  MAP TO CHR22_77.0; EXPRESSED IN HELA, SIGNAL = 0.66; EXPRESSED IN ADULT LIVER, SIGNAL = 0.43; EXPRESSED IN PLACENTA, SIGNAL = 0.38; SWISSPROT HIT: O34261, EVALUE 2.40e-01; NT HIT: M17983.1, EVALUE 5.60e+00; EST_HUMAN HIT: BE876304.1, EVALUE 2.10e+00
atgggggtgaagatccctgaccccgaaccagccccatctgggtccatcccggtccctctgcaggaaatcctcatcacccctcctacacctcaggggccaaaggcagcagg

SEQ ID NO: 17110 - DNA, 118 bp, Homo sapiens
  MAP TO CHR22_100.0; EXPRESSED IN HELA, SIGNAL = 1.4; EXPRESSED IN PLACENTA, SIGNAL = 2.5; EXPRESSED IN ADULT LIVER, SIGNAL = 1.9; EXPRESSED IN LUNG, SIGNAL = 1.7; EXPRESSED IN FETAL LIVER, SIGNAL = 2.6; EXPRESSED IN BONE MARROW, SIGNAL = 1.3; SWISSPROT HIT: P46020, EVALUE 2.00e+00; EST_HUMAN HIT: BI227235.1, EVALUE 3.70e-02; NT HIT: gi13123771, EVALUE 9.80e-02
ggctgccccagcctgcatgtcaccatcaatcagcgccttcccacttgccgtttgcaggcagagttccccacagatgtgctcggggggctgggagaaggagaagaaggtggagctgggg

SEQ ID NO: 17111 - DNA, 156 bp, Homo sapiens
  MAP TO AB017651.1; EXPRESSED IN PLACENTA, SIGNAL = 1.1; EXPRESSED IN HELA, SIGNAL = 0.56; EXPRESSED IN ADULT LIVER, SIGNAL = 1.1; EXPRESSED IN LUNG, SIGNAL =   1; EST_HUMAN HIT: BG824220.1, EVALUE 7.90e-01; NT HIT: AJ233982.1, EVALUE 5.40e-01
tcagtgtgatatcagatttactcctccttctcttcctcctttcctgccttcttttttcccttcatttactgtgcatgacactgtgcttgataccacagaagactcaaagatgatgcagctatcacccctaccctcaaggacccagccacactctac

SEQ ID NO: 17112 - DNA, 104 bp, Homo sapiens
  MAP TO AC015822.3; EXPRESSED IN BONE MARROW, SIGNAL = 4.9; EXPRESSED IN HELA, SIGNAL = 2.2; EXPRESSED IN HEART, SIGNAL = 3.6; EXPRESSED IN LUNG, SIGNAL = 5.2; EXPRESSED IN PLACENTA, SIGNAL = 5.2; EXPRESSED IN ADULT LIVER, SIGNAL = 5.2; EXPRESSED IN FETAL LIVER, SIGNAL = 5.1; EST_HUMAN HIT: AI371336.1, EVALUE 4.90e-01; NT HIT: AF281677.1, EVALUE 3.30e-01
ctttctgtgtttttcaccaccctctccttttgctctgttaatcttgcagacatagtcaattctgactttctcattctgaggaatataaaggagatctggtaaaa

SEQ ID NO: 17113 - DNA, 183 bp, Homo sapiens
  MAP TO CHR22_143.0; EXPRESSED IN ADULT LIVER, SIGNAL = 0.35; EXPRESSED IN HELA, SIGNAL = 0.77; SWISSPROT HIT: Q10357, EVALUE 3.00e-05; EST_HUMAN HIT: AV661341.1, EVALUE 1.50e-02
cacccaggaacagcaccagatgagcacccagggtcagcactgagacagcacccaggatcagcaccagataagcacccagggtcagcactgagacagcacccaggatcagcaccagatgagcacccaggatcagcaccagatgagcacccaggatcagcaccagataagcacccagggtcagca

SEQ ID NO: 17114 - DNA, 84 bp, Homo sapiens
  MAP TO AL137017.4; EXPRESSED IN ADULT LIVER, SIGNAL = 1.7; EXPRESSED IN LUNG, SIGNAL = 1.6; EXPRESSED IN HELA, SIGNAL = 2.6; EXPRESSED IN FETAL LIVER, SIGNAL = 1.5; EST_HUMAN HIT: BE536158.1, EVALUE 9.50e-02; NT HIT: X03248.1, EVALUE 1.00e+00
ccttgtgaaaaagagaagactcatagcagtcactggtgaaggtgtcatattttactgggggaaagacgttatgaaaaccctgct

SEQ ID NO: 17115 - DNA, 500 bp, Homo sapiens
  MAP TO AL138781.2; EXPRESSED IN HELA, SIGNAL = 3.1; EXPRESSED IN FETAL LIVER, SIGNAL = 1.7; EXPRESSED IN ADULT LIVER, SIGNAL = 2.3; EXPRESSED IN LUNG, SIGNAL = 2.1; SWISSPROT HIT: P14581, EVALUE 7.00e-01; EST_HUMAN HIT: AW408680.1, EVALUE 1.00e-103; NT HIT: gi14730929, EVALUE 4.70e-01
ccggaagaagaagtacatcaccatgaggaacagggatgaagccacgtacagcacgacacagagactcatgtccaggctggagaagtcaaccccgaggaagggtgcggccccgcccacctccttgtgggccccgggcccatccagactctggagtttcccgtccaagctgtgatgcaagctctctggaagggcaggcctggggcccagtgcaccaggtggacggacgctctgggtgtctcggtctccatgggacacctctgggggagtgagtcttttctcctcttcctcacccctggccagggttcctccttcactggaatccccctggtctgcggaatacgtgtctaagaggttgtcgcggccatagtgctgcttcaagaatgtgagcacgtggccttcatcccagctggccaggcccttaatttcctcatggcaggctgggcagaggtccggagtgggccactgaagctttggaaaccggggatcctcactcagatggc

SEQ ID NO: 17116 - DNA, 184 bp, Homo sapiens
  MAP TO CHR22_200.0; EXPRESSED IN HELA, SIGNAL = 1.7; EXPRESSED IN FETAL LIVER, SIGNAL =   1; EXPRESSED IN BONE MARROW, SIGNAL = 0.95; SWISSPROT HIT: P58163, EVALUE 5.60e+00; EST_HUMAN HIT: BI830341.1, EVALUE 2.40e-01; NT HIT: AF369029.1, EVALUE 2.50e+00
ctacacagcagacgtcttcacagctgcgggcactgtgcatggcttctcagatgctgtgcccaggagattattgacgaacatgatgccacatgcattaagaacaattccagggttcagagagagaaggcttattttagcaagagaatttgggccttccatttcttctggaatagctgcaggacct

SEQ ID NO: 17117 - DNA, 144 bp, Homo sapiens
  MAP TO CHR22_84.0; EXPRESSED IN HELA, SIGNAL = 0.9; EXPRESSED IN ADULT LIVER, SIGNAL = 0.32; NT HIT: Y07848.1, EVALUE 1.00e-75; EST_HUMAN HIT: BI772364.1, EVALUE 1.80e-01
ccagccctcggaggccagactcgcaccgtctgctcttctccatctcccatcaggctcctagcttacagagcttcctgcagcagcaggctcagctggagctcctggccagacgggtcaccctcctggaagccatcatctggccag

SEQ ID NO: 17118 - DNA, 265 bp, Homo sapiens
  MAP TO AC019196.4; EXPRESSED IN HELA, SIGNAL = 1.6; EXPRESSED IN HEART, SIGNAL = 3.2; EXPRESSED IN PLACENTA, SIGNAL = 4.7; EXPRESSED IN LUNG, SIGNAL = 4.1; EXPRESSED IN FETAL LIVER, SIGNAL =   3; EXPRESSED IN ADULT LIVER, SIGNAL = 3.9; EXPRESSED IN BONE MARROW, SIGNAL = 3.9; EST_HUMAN HIT: BE276179.1, EVALUE 3.00e-48; SWISSPROT HIT: O70372, EVALUE 4.10e-01; NT HIT: AL163246.2, EVALUE 1.00e-46
gggcaggggcaaaacgccaccagtctctttgctaaagcatggcaagagtgacctttactccagttccaagcaagttcctcatctccatcagagaccaactcagcctggaccttattgtcaatgtaactatcagcattttggtcaaagcctttcaacaagtctccaggaagttccaaattttctacatctctctgtttcctgtggagccctccaaactcttccaacttctgcctgttacccagttccagagtcacttccacatttt

SEQ ID NO: 17119 - DNA, 372 bp, Homo sapiens
  MAP TO CHR22_115.0; EXPRESSED IN BONE MARROW, SIGNAL = 0.62; EXPRESSED IN HELA, SIGNAL = 0.65; EXPRESSED IN PLACENTA, SIGNAL = 0.38; EXPRESSED IN LUNG, SIGNAL = 0.52; EXPRESSED IN ADULT LIVER, SIGNAL = 0.55; NT HIT: gi10863914, EVALUE 0.00e+00; EST_HUMAN HIT: AL119662.1, EVALUE 9.00e-49; SWISSPROT HIT: Q92558, EVALUE 7.00e-04
atctcctctcctcctccacggagaagcctggcccaccgggggacccggaccccatcgtggcctccgaggaggcatcagaagtgcccctttggctggaccgaaaggagagtgcggtccctacaacacccgcacccctgcaaatctcccccttcacttcgcagccctatgtggcccacacactcccccagaggccagaacccggggagcctgggcctgacatggcccaggaggccccccaggaggacaccagccccatggccctgatggacaaaggtgagaatgagctgactgggtcagcctcagaggagagccaggagaccactacctccaccattatcaccaccacggtcatcaccaccgagcaggcaccag

SEQ ID NO: 17120 - DNA, 198 bp, Homo sapiens
  MAP TO CHR21_32.0; EXPRESSED IN BONE MARROW, SIGNAL = 2.4; EXPRESSED IN LUNG, SIGNAL = 1.7; EXPRESSED IN HELA, SIGNAL = 5.2; EXPRESSED IN PLACENTA, SIGNAL = 1.4; EXPRESSED IN ADULT LIVER, SIGNAL = 1.3; SWISSPROT HIT: P08547, EVALUE 5.00e-03; NT HIT: AJ277662.1, EVALUE 1.80e-01; EST_HUMAN HIT: BG622654.1, EVALUE 1.00e-03
tgttaattcatcaatagacccttggattgtttccgtatcttggcatttgtgaataacactgcagtgaacatgggtgcaccagatatccctttgagatcctggtttaaattcttttgcatgtatatctaaaagtgggttcactggatcatattgtagttctattttaaactttccgaggaacctccatggtttatccat

SEQ ID NO: 17121 - DNA, 154 bp, Homo sapiens
  MAP TO AL136537.3; EXPRESSED IN HEART, SIGNAL = 1.2; EXPRESSED IN ADULT LIVER, SIGNAL =   2; EXPRESSED IN HELA, SIGNAL = 1.1; EXPRESSED IN PLACENTA, SIGNAL = 1.6; EXPRESSED IN LUNG, SIGNAL = 1.4; EXPRESSED IN FETAL LIVER, SIGNAL = 1.4; EXPRESSED IN BONE MARROW, SIGNAL = 1.3; EST_HUMAN HIT: BG679138.1, EVALUE 3.10e+00; SWISSPROT HIT: P33487, EVALUE 7.60e+00; NT HIT: AF112087.1, EVALUE 5.30e-01
ttccattttcctaataaggttccctttgaagactaagaatttctccaagacaaaattcatgtaagccaaaataccagacatcaggcctgtaattgtggtcaccctggccacagccaagttgtcaccttcactcacgatcatctttctgccctct

SEQ ID NO: 17122 - DNA, 474 bp, Homo sapiens
  MAP TO AC016714.2; EXPRESSED IN HELA, SIGNAL = 0.69; EXPRESSED IN FETAL LIVER, SIGNAL = 0.97; EXPRESSED IN PLACENTA, SIGNAL = 0.77; EXPRESSED IN LUNG, SIGNAL = 0.85; EXPRESSED IN BONE MARROW, SIGNAL = 0.96; EXPRESSED IN ADULT LIVER, SIGNAL = 0.88; SWISSPROT HIT: P25927, EVALUE 2.00e-11; NT HIT: gi12084983, EVALUE 1.10e-01
aactatgcacttgaccattttcttcttcctcatccccaggaactccaccactggtacttcgccttatgccactatcatcaccactggtacttctccttatgccactaccatcaccactggtacttctccttatgacactggcaccaccactggtacttctccttatgacactggcatcaccactggtacttcttatgacactgtcatcaccactggtacttctccttatgacactggcatcaccactgatacttctccttatgacactggcatcaccactggtacttctccttatgacactgtcatcgccactggtacttctccttatgacactgtcatcaccactggtacttctccttatgacactgtcatcgccactggtacttctccttatgacactgtcatcaccactggtacttctccttatgacactgtcatcaccactggtacttcttatgacactatcatcacaag

SEQ ID NO: 17123 - DNA, 80 bp, Homo sapiens
  MAP TO AL138691.2; EXPRESSED IN HELA, SIGNAL = 0.87; EXPRESSED IN FETAL LIVER, SIGNAL = 1.2; EXPRESSED IN BONE MARROW, SIGNAL = 1.3; EXPRESSED IN LUNG, SIGNAL = 0.68; EST_HUMAN HIT: AI356086.1, EVALUE 2.30e-02; NT HIT: AL163201.2, EVALUE 6.00e-05
atgataccactttatgataaatctgaaatagtcaaattcatcaaagcagagagtggcatggtggtggccaggggcttggt

SEQ ID NO: 17124 - DNA, 100 bp, Homo sapiens
  MAP TO AL137185.3; EXPRESSED IN HEART, SIGNAL =   3; EXPRESSED IN BONE MARROW, SIGNAL = 3.3; EXPRESSED IN LUNG, SIGNAL =   2; EXPRESSED IN HELA, SIGNAL = 1.3; EXPRESSED IN FETAL LIVER, SIGNAL = 3.2; EST_HUMAN HIT: BF374081.1, EVALUE 4.70e-01
gtgagtctgttgaaatagtcagtgaggtcagagtagaagtaggagaacttaacatcataaaagactggggaagagagagtgtggagaaaggaggggcagt

SEQ ID NO: 17125 - DNA, 131 bp, Homo sapiens
  MAP TO AC016569.2; EXPRESSED IN HELA, SIGNAL = 0.68; EXPRESSED IN FETAL LIVER, SIGNAL = 0.93; EXPRESSED IN PLACENTA, SIGNAL =   1; EXPRESSED IN LUNG, SIGNAL = 0.99; EXPRESSED IN BONE MARROW, SIGNAL = 0.97; EXPRESSED IN ADULT LIVER, SIGNAL = 0.99; EST_HUMAN HIT: BF877657.1, EVALUE 4.00e-05; NT HIT: AL163203.2, EVALUE 7.00e-03
ttaatgttatcaatatgttcttggaaactgtgactttaggagaacttaggtataatgaaaccaattttaccatagcctcgttgatataagcaagagttaagttctggtcatttctggtcacaaaaacatcc

SEQ ID NO: 17126 - DNA, 83 bp, Homo sapiens
  MAP TO CHR21_30.0; EXPRESSED IN LUNG, SIGNAL = 1.1; EXPRESSED IN HELA, SIGNAL =   3; EXPRESSED IN FETAL LIVER, SIGNAL = 1.7; EXPRESSED IN BONE MARROW, SIGNAL = 1.4; EXPRESSED IN PLACENTA, SIGNAL = 1.1; EXPRESSED IN ADULT LIVER, SIGNAL = 1.2; EST_HUMAN HIT: BG718914.1, EVALUE 5.00e-19; NT HIT: AJ001235.1, EVALUE 2.00e-17
cgtgaaggtctgcagcttcacttctgaagtcagtgagacgatgaacgcatcagaaggaagaaactccggacacgtctgaacat

SEQ ID NO: 17127 - DNA, 146 bp, Homo sapiens
  MAP TO AL160168.1; EXPRESSED IN HELA, SIGNAL = 0.95; EXPRESSED IN PLACENTA, SIGNAL = 0.54; EXPRESSED IN LUNG, SIGNAL = 0.6; EXPRESSED IN FETAL LIVER, SIGNAL = 0.56; EXPRESSED IN ADULT LIVER, SIGNAL = 0.52; EXPRESSED IN BONE MARROW, SIGNAL = 0.54; NT HIT: AY007797.1, EVALUE 2.00e+00; SWISSPROT HIT: P41658, EVALUE 5.90e+00
gtcatctttttgatgcccaggatttcaagttctatgtatacgttgatgactcacaagtacaaattacccacccgtatcttgctcctgaaattcagaggcaaatactcagcttcatcttgcacactggatatcctactggcacttaa

SEQ ID NO: 17128 - DNA, 266 bp, Homo sapiens
  MAP TO CHR22_179.0; EXPRESSED IN BONE MARROW, SIGNAL = 0.59; EXPRESSED IN LUNG, SIGNAL = 0.57; EXPRESSED IN PLACENTA, SIGNAL = 0.65; EXPRESSED IN HELA, SIGNAL = 0.76; SWISSPROT HIT: P22357, EVALUE 4.00e-03; EST_HUMAN HIT: BI832511.1, EVALUE 1.00e-117
cctcccaccttgggacccctgatccccgctcccaggcaagcccagaacccactggccattctcgaggtccttgacgtggcagacagcagcctccacgcaatcctgagggctggggtaggggtgaggggtggacaggcgctcctccgtgtggaagtggcgggccgtgccattgccctggtaggcccgggggctgcccttcccactggccgacagctcctccttgcctcgctccttctcaggcagcaccacctcgatcttgagctcca

SEQ ID NO: 17129 - DNA, 366 bp, Homo sapiens
  MAP TO AL132996.2; EXPRESSED IN HELA, SIGNAL = 5.9; EXPRESSED IN FETAL LIVER, SIGNAL = 8.4; EXPRESSED IN HEART, SIGNAL = 6.6; EXPRESSED IN PLACENTA, SIGNAL = 8.8; EXPRESSED IN LUNG, SIGNAL =   9; EXPRESSED IN ADULT LIVER, SIGNAL =   9; EXPRESSED IN BONE MARROW, SIGNAL = 9.7; NT HIT: AL163303.2, EVALUE 1.00e-34; EST_HUMAN HIT: AL046939.1, EVALUE 5.00e-81; SWISSPROT HIT: P08075, EVALUE 6.50e+00
atgaagatgtacaaagagattaacgttgttttcatgcctgcggacacaacatctattctgcagcccatgaaccaaagagtaatttcaactttcaagacttcttatttaagaaatacatttcataaagctatagctgccatagatagtgattcctctaatggatcgtggcaaagtaaattgaaaaccttccggaaagaattcatcattctagatgccattaagaacatttgtgattcatgggagcaggtcaaaatatcaacgttagcaggagtatggaagaagttgattccaaacctcatgaatgactttgaggggttcaatactgaagtggaagaagtaactgcagttgtgatggaaatagcaaga

SEQ ID NO: 17130 - DNA, 316 bp, Homo sapiens
  MAP TO CHR22_180.0; EXPRESSED IN BONE MARROW, SIGNAL = 0.44; EXPRESSED IN PLACENTA, SIGNAL = 0.61; EXPRESSED IN LUNG, SIGNAL = 0.46; EXPRESSED IN ADULT LIVER, SIGNAL = 0.57; EXPRESSED IN HELA, SIGNAL = 0.72; EXPRESSED IN FETAL LIVER, SIGNAL = 0.47; EST_HUMAN HIT: N48360.1, EVALUE 2.80e-02; NT HIT: X06690.1, EVALUE 4.60e+00; SWISSPROT HIT: P28481, EVALUE 3.00e-03
gaatctttctgctactctgcttggcctttcgtggtaaacaactgggcgtgtgagcgagcggcggcgtgcacgccagagacagatggatacagtgagtgtgctaagccccaggcagcccaggcactgaacacccagataaagctgccaggccgccttcttccttctccgggagaacaggagtcagtggcccagggacaggagctggaccagaagggctttggaaagcctctgaagggaggccacgaaaggatggaggcagagaaggaaggaccctgtggggagtggtgcccacagaacaccgcctccatcgagggct

SEQ ID NO: 17131 - DNA, 231 bp, Homo sapiens
  MAP TO CHR22_146.0; EXPRESSED IN HELA, SIGNAL = 4.7; EXPRESSED IN FETAL LIVER, SIGNAL = 0.84; EXPRESSED IN PLACENTA, SIGNAL =   1; EXPRESSED IN BONE MARROW, SIGNAL = 0.63; EXPRESSED IN LUNG, SIGNAL = 0.7; SWISSPROT HIT: P16818, EVALUE 5.50e-01; EST_HUMAN HIT: BG387688.1, EVALUE 1.20e+00
atggacaccagctggggtggcccaaattccctccccctggccctgagaccagctttctccagaggaggtgggagggtccagcccacactgacggccgcctctgaggctacggggggcctgcagctgcagcagcagagaacaaggaggctctgtcggtgcagaggggtcgacatcgagccccggaaactccccggggagggccgccggctgggcagaaaccacagcccaaac

SEQ ID NO: 17132 - DNA, 407 bp, Homo sapiens
  MAP TO CHR22_148.0; EXPRESSED IN FETAL LIVER, SIGNAL = 0.44; EXPRESSED IN LUNG, SIGNAL = 0.52; EXPRESSED IN BONE MARROW, SIGNAL = 0.47; EXPRESSED IN HELA, SIGNAL = 1.2; NT HIT: AF183177.1, EVALUE 3.80e-01; EST_HUMAN HIT: AI949279.1, EVALUE 2.20e+00; SWISSPROT HIT: O75562, EVALUE 1.00e+01
ttagcaaccttcctggcaaaaggtggagactaatttctctcctcttgagtgtggacaagactcatttctaacaagtagaatgtagtgggggtgatagtgagtgacttctaggattaagtcataaaaggcattatttttgctcctcttctcccctctcctttcctctatcctcttctctcctccttcatcccctctttctttgtcctctgcttcttcctctcctcttcgtctcttctgttttcttctctcctcctcttgtcctttccctccttcttctccttctttttttctctctcccttccccccgccaacctcaattatttgcactgtgaaaagccagttgacacattctgaagacatccaggcagccttttggtgaggttcatatgacaagggatagagacatt

SEQ ID NO: 17133 - DNA, 222 bp, Homo sapiens
  MAP TO CHR22_148.0; EXPRESSED IN FETAL LIVER, SIGNAL = 0.59; EXPRESSED IN HELA, SIGNAL = 1.2; EST_HUMAN HIT: AA969186.1, EVALUE 1.90e-02; SWISSPROT HIT: P77837, EVALUE 3.20e+00; NT HIT: AL163267.2, EVALUE 1.30e-02
atgaagaaattgaagctcagagagtgataggcccccaggcacccatcaagcatgtgtcagagctggaactgcgccctgggttcactcccccaccaggtgtcaggcaggcctggtgttcaatgccagccttttcagagtgtaactcacctgggacacttctaagactgagtgttctcatttgtgaaatggagacaatgatccctgccagctgcatcctaaaag

SEQ ID NO: 17134 - DNA, 286 bp, Homo sapiens
  MAP TO CHR22_174.0; EXPRESSED IN HEART, SIGNAL = 3.1; EXPRESSED IN LUNG, SIGNAL = 3.9; EXPRESSED IN HELA, SIGNAL =   3; EXPRESSED IN ADULT LIVER, SIGNAL = 3.8; EXPRESSED IN PLACENTA, SIGNAL = 3.8; EXPRESSED IN FETAL LIVER, SIGNAL = 3.4; EXPRESSED IN BONE MARROW, SIGNAL = 3.8; SWISSPROT HIT: P19474, EVALUE 5.00e-07; EST_HUMAN HIT: BI826818.1, EVALUE 0.00e+00; NT HIT: gi11418013, EVALUE 0.00e+00
atggctgcactcttccaagaagcaagcagctgtcccgtctgctcagactatctggaaaaaccaatgtccctggagtgtggatgcaccgtctgcctcaagtgcatcaattcgctgcagaaggagccccatggggaggatctgctttgctgttgctgttccatggtctctcagaggaacaaaatcaggcccaatcggcagctagagaggctggtttcccacatcaaggaactggagcccaagctgaagaagattctacagatgaacccaaggatgcggaagttccaag

SEQ ID NO: 17135 - DNA, 174 bp, Homo sapiens
  MAP TO CHR22_175.0; EXPRESSED IN HELA, SIGNAL = 0.74; EXPRESSED IN PLACENTA, SIGNAL = 0.46; EXPRESSED IN LUNG, SIGNAL = 0.52; EXPRESSED IN ADULT LIVER, SIGNAL =   2; SWISSPROT HIT: Q92838, EVALUE 1.50e+00; EST_HUMAN HIT: BF886752.1, EVALUE 3.00e-93; NT HIT: gi8923627, EVALUE 2.00e-93
gaactttccgaaagcctgtgaactatgggaacagattctccaggaccacccgacagacatgttggccctgaaattttcccatgatgcttatttttacctgggctatcaggaacagatgagagattctgttgctcgaatttaccccttctggacacctgacatccccctaagcag

SEQ ID NO: 17136 - DNA, 145 bp, Homo sapiens
  MAP TO CHR22_182.0; EXPRESSED IN LUNG, SIGNAL = 1.6; EXPRESSED IN HELA, SIGNAL = 1.8; EXPRESSED IN ADULT LIVER, SIGNAL = 2.2; EXPRESSED IN FETAL LIVER, SIGNAL = 0.92; SWISSPROT HIT: P08236, EVALUE 3.00e-19; EST_HUMAN HIT: AW250046.1, EVALUE 5.00e-76; NT HIT: gi14777720, EVALUE 5.00e-72
gccgcttacactggttagtcatgaaatcggcaaaattccagatgagctctccaaccacgtattttctgagtttttgatccagacccagatggtactgctctagcagacttttctggtagtcttcactgaacatcagaggtggatc

SEQ ID NO: 17137 - DNA, 142 bp, Homo sapiens
  MAP TO CHR21_26.0; EXPRESSED IN HELA, SIGNAL = 5.6; EXPRESSED IN FETAL LIVER, SIGNAL = 2.9; EXPRESSED IN HEART, SIGNAL =   2; EXPRESSED IN BONE MARROW, SIGNAL =   4; EXPRESSED IN LUNG, SIGNAL = 2.5; EXPRESSED IN ADULT LIVER, SIGNAL =   2; NT HIT: AL163246.2, EVALUE 1.00e-26; SWISSPROT HIT: P57965, EVALUE 3.40e+00; EST_HUMAN HIT: BG001353.1, EVALUE 1.00e-33
tttgggggcctgccaaaggctccaaacagcatccctatcttccactgacacctcaagctccattggatctgctggatctgggtcatatggcccaagcgggagcagcttgcacagcagcctgtacccgttgcagagccgtctc

SEQ ID NO: 17138 - DNA, 297 bp, Homo sapiens
  MAP TO CHR22_183_1.0; EXPRESSED IN HELA, SIGNAL = 2.4; EXPRESSED IN FETAL LIVER, SIGNAL = 1.2; EXPRESSED IN LUNG, SIGNAL = 6.6; EXPRESSED IN ADULT LIVER, SIGNAL = 4.3; EXPRESSED IN PLACENTA, SIGNAL = 1.3; NT HIT: X51755.1, EVALUE 0.00e+00; SWISSPROT HIT: P01842, EVALUE 2.00e-50; EST_HUMAN HIT: AW393787.1, EVALUE 0.00e+00
gtcagcccaaggctgccccctcggtcactctgttcccaccctcctctgaggagcttcaagccaacaaggccacactggtgtgtctcgtaagtgacttctacccgggagccgtgacagtggcctggaaggcagatggcagccccgtcaaggtgggagtggagaccaccaaaccctccaaacaaagcaacaacaagtatgcggccagcagctacctgagcctgacgcccgagcagtggaagtcccacagaagctacagctgccgggtcacgcatgaagggagcaccgtggagaagacag

SEQ ID NO: 17139 - DNA, 85 bp, Homo sapiens
  MAP TO AC020582.3; EXPRESSED IN HELA, SIGNAL = 1.3; EXPRESSED IN FETAL LIVER, SIGNAL = 1.7; EXPRESSED IN LUNG, SIGNAL = 2.4; EXPRESSED IN ADULT LIVER, SIGNAL = 2.2; EXPRESSED IN BONE MARROW, SIGNAL = 1.6; NT HIT: gi11421705, EVALUE 1.00e-15; EST_HUMAN HIT: BF930825.1, EVALUE 5.00e-28
aactagtgtggttttttgggggggtggtgttagaataaccttgttttgtcatattaccacggttggttttctggttccttctcat

SEQ ID NO: 17140 - DNA, 260 bp, Homo sapiens
  MAP TO AC019325.3; EXPRESSED IN FETAL LIVER, SIGNAL = 9.2; EXPRESSED IN HEART, SIGNAL = 7.8; EXPRESSED IN PLACENTA, SIGNAL =  11; EXPRESSED IN LUNG, SIGNAL =  10; EXPRESSED IN ADULT LIVER, SIGNAL =  10; EXPRESSED IN BONE MARROW, SIGNAL = 9.4; EXPRESSED IN HELA, SIGNAL = 5.9; NT HIT: gi4557468, EVALUE 0.00e+00; SWISSPROT HIT: P21851, EVALUE 4.00e-47; EST_HUMAN HIT: BI828821.1, EVALUE 0.00e+00
gattctgataatcctgaccttcgagaccggggctatatttattggcgccttctctcaactgaccctgttacagctaaagaagtagtcttgtctgagaagccactgatctctgaggagacggaccttattgagccaactctgctggatgagctaatctgccacattggttctttggcctctgtgtatcataagcctcccaatgcttttgtggaaggaagtcatggaattcatcgtaaacacttgccaattcatcatgggag

SEQ ID NO: 17141 - DNA, 478 bp, Homo sapiens
  MAP TO CHR22_179.0; EXPRESSED IN BONE MARROW, SIGNAL = 5.4; EXPRESSED IN PLACENTA, SIGNAL = 1.6; EXPRESSED IN HELA, SIGNAL = 2.8; EXPRESSED IN FETAL LIVER, SIGNAL =   5; EXPRESSED IN LUNG, SIGNAL = 1.9; EST_HUMAN HIT: AL134889.1, EVALUE 1.00e-118; NT HIT: gi15317879, EVALUE 1.00e-118; SWISSPROT HIT: P05214, EVALUE 2.00e-64
tcacacttgaccatctgattggctggctcgaagtgggcactggcgatctcggccacggacagctgctcgtggtaggccttctcggctgagatgatcaaggcataggtggccagggggaggtggatgtgggtgtacggcaccaggttggtttggaattctgtcaagtacacattcagggccccaacgaatcacagggaggccgtgatggaggacacgatctgcccaatcagacgactgaggttggtgtacatgggacactcgatgtccaggttgcactgacatgtcgaccatgaaggcacagtcagaatgttccagggtcgtgtaggtggtcaggatggagttgcagggctccatcacagccatggagacatggggggctgggcaaatggcaaactccagcttggacttcttcccgtagtccaccgagagccgctccatgagcagagacatgaacccagagacggtgccgcccccaaag

SEQ ID NO: 17142 - DNA, 206 bp, Homo sapiens
  MAP TO AL133216.10; EXPRESSED IN FETAL LIVER, SIGNAL = 0.88; EXPRESSED IN HELA, SIGNAL = 1.6; EXPRESSED IN ADULT LIVER, SIGNAL = 1.4; EST_HUMAN HIT: BG015076.1, EVALUE 1.00e-71; SWISSPROT HIT: P06819, EVALUE 2.20e-01; NT HIT: AF109718.1, EVALUE 3.00e-86
cagggtgtaccaccactcgttcagcatctggctgacagtccggttatcctggttggggtgaccctggtgtgccctgccagggcctggtgccgcttgctgaagatcatgaccgccactcatgggccactggatgtggtccttgtcccatttgttggggctgcgtccatccttctcagaagatgagtcctgttccttgcgcagggcac

SEQ ID NO: 17143 - DNA, 125 bp, Homo sapiens
  MAP TO AL136105.2; EXPRESSED IN FETAL LIVER, SIGNAL = 2.3; EXPRESSED IN HELA, SIGNAL = 3.1; EST_HUMAN HIT: D54846.1, EVALUE 3.00e-52; SWISSPROT HIT: P11645, EVALUE 4.60e+00; NT HIT: AJ309278.1, EVALUE 1.00e-47
ttacgtgcacgtccagtcatagtaacttcccttgaacttaattatgacgtagattctgttgctcacatgttcgttgctgaccttctccttattatcaccctgctctcctactacattcctttttg

SEQ ID NO: 17144 - DNA, 198 bp, Homo sapiens
  MAP TO CHR22_119.0; EXPRESSED IN HELA, SIGNAL = 0.55; EXPRESSED IN ADULT LIVER, SIGNAL = 0.45; EXPRESSED IN PLACENTA, SIGNAL = 0.51; SWISSPROT HIT: P98095, EVALUE 1.10e+00; NT HIT: AE004836.1, EVALUE 4.50e-02; EST_HUMAN HIT: W72129.1, EVALUE 1.00e-80
cccacacaaaacaaaaatgcctcagagcttcagtgtaactggagcaataccagctgattctaacagtgtggcccagcagcgcctgctggctgggagcagggacagaaaatgcctgaggctccgaggtgggagcccaggctgggattcaggatttcgctgctccccgttcaaggcctctggagaatgttccaaagggag

SEQ ID NO: 17145 - DNA, 234 bp, Homo sapiens
  MAP TO AC019196.4; EXPRESSED IN PLACENTA, SIGNAL = 2.2; EXPRESSED IN FETAL LIVER, SIGNAL = 1.6; EXPRESSED IN ADULT LIVER, SIGNAL = 1.8; EXPRESSED IN LUNG, SIGNAL = 1.7; EXPRESSED IN BONE MARROW, SIGNAL = 1.8; EXPRESSED IN HELA, SIGNAL = 1.3; EXPRESSED IN HEART, SIGNAL = 2.5; SWISSPROT HIT: Q51130, EVALUE 4.80e+00; NT HIT: X92726.1, EVALUE 8.40e-01
catcataaaatgcatgcaccatctcaaggctttcattctcacacagcaatgcaaaaagctggaaaaaaggctgccttttccttggttcccttttaagaacaaatacaagtttccaaaaataaaactaaccccagaacactttacacaatgtctcatggctaaattgcattccttgtgcatagtcactagcaaaggaaatgataccacgattgttgaagacaggcttagtgtccc

SEQ ID NO: 17146 - DNA, 131 bp, Homo sapiens
  MAP TO AL137068.1; EXPRESSED IN PLACENTA, SIGNAL =  11; EXPRESSED IN LUNG, SIGNAL =  10; EXPRESSED IN ADULT LIVER, SIGNAL =  11; EXPRESSED IN HELA, SIGNAL = 4.6; EXPRESSED IN FETAL LIVER, SIGNAL = 9.7; EXPRESSED IN BONE MARROW, SIGNAL = 8.5; SWISSPROT HIT: P03876, EVALUE 7.80e+00; NT HIT: X95966.1, EVALUE 1.10e-01; EST_HUMAN HIT: BE295646.1, EVALUE 9.00e-68
gagctgattcacatgcaggagttagatatattacagaggccctcattaaaaaacttactaaacaggataatttggctttgataaaatctctgaacctttcactttctaaagacggtggcaagaaatttaag

SEQ ID NO: 17147 - DNA, 104 bp, Homo sapiens
  MAP TO CHR22_102.0; EXPRESSED IN FETAL LIVER, SIGNAL = 5.3; EXPRESSED IN BONE MARROW, SIGNAL =   6; EXPRESSED IN HEART, SIGNAL = 3.6; EXPRESSED IN PLACENTA, SIGNAL =   2; EXPRESSED IN LUNG, SIGNAL = 1.9; EXPRESSED IN HELA, SIGNAL =  19; NT HIT: AB048319.1, EVALUE 2.10e-02; EST_HUMAN HIT: BF996338.1, EVALUE 8.00e-37
cctttgccatctcccccctcggctccttccacttgttgaagcccactcgtggctctgaggctgctgctgacacaggtctcttctcgtgccccacagacaccgtg

SEQ ID NO: 17148 - DNA, 89 bp, Homo sapiens
  MAP TO AL137159.1; EXPRESSED IN HELA, SIGNAL = 0.77; EXPRESSED IN FETAL LIVER, SIGNAL = 9.4; EXPRESSED IN HEART, SIGNAL =  14; EXPRESSED IN PLACENTA, SIGNAL =  17; EXPRESSED IN LUNG, SIGNAL =  19; EST_HUMAN HIT: AI220006.1, EVALUE 4.00e-07; SWISSPROT HIT: P08548, EVALUE 7.10e-01; NT HIT: AL163267.2, EVALUE 1.00e-03
atgataaaaggcatctatgaagaacctacagttgacaccatacttaatggtgaaaaactgaatggtttcatgcaaagattagaaacaag

SEQ ID NO: 17149 - DNA, 316 bp, Homo sapiens
  MAP TO AC010125.3; EXPRESSED IN HELA, SIGNAL = 6.8; EXPRESSED IN LUNG, SIGNAL = 2.5; EXPRESSED IN ADULT LIVER, SIGNAL = 2.3; EXPRESSED IN FETAL LIVER, SIGNAL = 2.4; EST_HUMAN HIT: AW820271.1, EVALUE 1.10e-01; SWISSPROT HIT: P08728, EVALUE 9.80e-01; NT HIT: AL163218.2, EVALUE 4.60e+00
aaaagtgaatattaagggtaatatcaaatcagtacttaagaagaatgctgggaaaggccaggaaataaagattacagaaattgaagagaacacaaattatcagaagccaaagtccagccctagcccacccatcctctatacccattatctaggggaaatatatgatcttagggcaagtgcaagaaaggttacaattaaaaacatctcagtgatgattcttgccttaaactccagaagaatccttgtccaactctgctggatgaaggatgaagtagagaaatacacttctgcatccctgccttgccccagcatggac

SEQ ID NO: 17150 - DNA, 96 bp, Homo sapiens
  MAP TO AL136366.3; EXPRESSED IN HELA, SIGNAL = 1.6; EXPRESSED IN HEART, SIGNAL = 2.1; EXPRESSED IN PLACENTA, SIGNAL = 2.5; EXPRESSED IN FETAL LIVER, SIGNAL = 2.1; EST_HUMAN HIT: AL538961.1, EVALUE 7.00e-34; NT HIT: X74765.1, EVALUE 7.60e-02
ctggatctgacgctgcttcttcgcccttggtgttgctgaagcttttgtgggctcttctgtgtaatacttgtcaatttttcgtttttcttttttaag

SEQ ID NO: 17151 - DNA, 101 bp, Homo sapiens
  MAP TO AL136975.1; EXPRESSED IN HELA, SIGNAL = 1.9; EXPRESSED IN FETAL LIVER, SIGNAL = 2.6; EXPRESSED IN BONE MARROW, SIGNAL = 2.7; EXPRESSED IN ADULT LIVER, SIGNAL = 2.8; EXPRESSED IN PLACENTA, SIGNAL = 2.9; EXPRESSED IN LUNG, SIGNAL = 2.9; NT HIT: AF290209.1, EVALUE 3.20e-01; EST_HUMAN HIT: AI692926.1, EVALUE 7.40e+00; SWISSPROT HIT: Q92411, EVALUE 8.00e+00
atgcaaacttctactgccagcacccacagctggaaccctatgcagccccatagtcagtgccccatgctcaccagcaatgaatgctttctgggcacccacct

SEQ ID NO: 17152 - DNA, 196 bp, Homo sapiens
  MAP TO CHR22_105.0; EXPRESSED IN BONE MARROW, SIGNAL =  12; EXPRESSED IN HEART, SIGNAL = 8.3; EXPRESSED IN PLACENTA, SIGNAL = 3.7; EXPRESSED IN HELA, SIGNAL = 9.1; EXPRESSED IN ADULT LIVER, SIGNAL =   2; EXPRESSED IN FETAL LIVER, SIGNAL =  11; SWISSPROT HIT: Q92523, EVALUE 6.00e-33; NT HIT: gi14779764, EVALUE 1.00e-106; EST_HUMAN HIT: BG674341.1, EVALUE 1.00e-106
cttcctcctgcagtgagggctgccagcttctcctccccaggctgaggtggggaggggtcgtccaggatcctctggaactgcatctccagatcctgaggcttgagcagacgggcgccctcatagagccacagcttgaagaagcgtcccttgtggtagacagccacgtgccggctgtctgagaggtgctgtagcacat

SEQ ID NO: 17153 - DNA, 142 bp, Homo sapiens
  MAP TO AL136366.3; EXPRESSED IN BONE MARROW, SIGNAL = 4.5; EXPRESSED IN HEART, SIGNAL = 9.4; EXPRESSED IN HELA, SIGNAL =   5; EXPRESSED IN PLACENTA, SIGNAL = 7.6; EXPRESSED IN LUNG, SIGNAL = 5.5; EXPRESSED IN ADULT LIVER, SIGNAL = 5.4; EXPRESSED IN FETAL LIVER, SIGNAL = 5.8; EST_HUMAN HIT: BF037987.1, EVALUE 1.80e-01; SWISSPROT HIT: P70327, EVALUE 4.50e+00; NT HIT: U86018.1, EVALUE 4.80e-01
attcgaagttgaacagggctctttcagtgtacaaccccaggacatggagaaataaaaagaacagtattccaactaacgcatactcagtgggaatcatcacatcgcataattgcttgaaatccacaagctgatccgatgtcat

SEQ ID NO: 17154 - DNA, 135 bp, Homo sapiens
  MAP TO AL136443.5; EXPRESSED IN BONE MARROW, SIGNAL = 1.2; EXPRESSED IN LUNG, SIGNAL =   2; EXPRESSED IN ADULT LIVER, SIGNAL = 2.1; EXPRESSED IN HELA, SIGNAL = 0.6; EXPRESSED IN FETAL LIVER, SIGNAL = 1.2; EST_HUMAN HIT: BE267487.1, EVALUE 1.00e-08; NT HIT: AF094515.1, EVALUE 2.00e-06; SWISSPROT HIT: P17098, EVALUE 4.50e+00
gtcttgctgttgctcagtgtttgggtctacattacttttggagctgtggcactccgcgtgaaggcttgcagcttcacccttgaagccagtgagaccatgaacccaccaggaggagtgaaggctgtcttgtcttaa

SEQ ID NO: 17155 - DNA, 158 bp, Homo sapiens
  MAP TO AC020759.3; EXPRESSED IN BONE MARROW, SIGNAL =   2; EXPRESSED IN LUNG, SIGNAL = 2.5; EXPRESSED IN ADULT LIVER, SIGNAL = 1.8; EXPRESSED IN HELA, SIGNAL = 1.6; SWISSPROT HIT: Q09466, EVALUE 2.00e+00; NT HIT: gi5031672, EVALUE 6.00e-84; EST_HUMAN HIT: BI909320.1, EVALUE 9.00e-84
aagtggactacactcatgaggccgtcaccataaagtgtaccttctccgcaaccggatgcccttctgagcaaccaacatgcctgtggtttcgctacggtgctcaccagcctgagaacctgtgcttggacgggtgcaaaagtgaggcagacaagttcaca

SEQ ID NO: 17156 - DNA, 152 bp, Homo sapiens
  MAP TO CHR22_10.0; EXPRESSED IN PLACENTA, SIGNAL = 0.36; EXPRESSED IN HELA, SIGNAL = 0.67; EXPRESSED IN FETAL LIVER, SIGNAL = 0.78; EXPRESSED IN BONE MARROW, SIGNAL = 0.76; NT HIT: gi14735943, EVALUE 1.30e-01; SWISSPROT HIT: Q10870, EVALUE 3.40e+00; EST_HUMAN HIT: W27574.1, EVALUE 1.90e-01
acgtcgttcatctcagccagctcctctgccggccccctcttcaccttgatggggcagcgcctttctccgctgtgtctgtggccttcccaggtggacttcccacagggggacaaggaattggctctctggggatccaagaagctgccagaaca

SEQ ID NO: 17157 - DNA, 154 bp, Homo sapiens
  MAP TO AC016078.3; EXPRESSED IN HELA, SIGNAL = 0.66; EXPRESSED IN FETAL LIVER, SIGNAL = 0.66; EXPRESSED IN BONE MARROW, SIGNAL = 0.6; EXPRESSED IN LUNG, SIGNAL = 0.52; EXPRESSED IN ADULT LIVER, SIGNAL = 0.58; EST_HUMAN HIT: BG492740.1, EVALUE 2.00e-01
gcacagaaagaggagacacaagaggagagaaagaaggaggataggggaaaggcagacgactggaaaggaagagaggacaaagaagaggagggaatgagacagaggaaatggaaggagattaagggaagaaaggagtggagagaaaagaagaagt

SEQ ID NO: 17158 - DNA, 157 bp, Homo sapiens
  MAP TO AL121993.2; EXPRESSED IN BONE MARROW, SIGNAL = 0.73; EXPRESSED IN HELA, SIGNAL = 0.52; EXPRESSED IN FETAL LIVER, SIGNAL = 0.73; EXPRESSED IN PLACENTA, SIGNAL = 0.91; EXPRESSED IN LUNG, SIGNAL = 0.9; EXPRESSED IN ADULT LIVER, SIGNAL = 0.81; NT HIT: gi16161328, EVALUE 2.00e-83; EST_HUMAN HIT: AW897200.1, EVALUE 3.00e-74; SWISSPROT HIT: O49885, EVALUE 7.60e+00
tttctttgatgctgcttctgcagagctgcctctgataattgtccctgaaggatcagttttctttgcttgtcaatatctccttccattcgagcaaaagcatgagagccaatgaaagagagatcaactcccaagccttcatcctcctcttcttggttat

SEQ ID NO: 17159 - DNA, 167 bp, Homo sapiens
  MAP TO CHR21_66.0; EXPRESSED IN BONE MARROW, SIGNAL = 1.5; EXPRESSED IN HELA, SIGNAL = 4.2; EXPRESSED IN FETAL LIVER, SIGNAL = 1.5; EXPRESSED IN HEART, SIGNAL = 1.2; EXPRESSED IN PLACENTA, SIGNAL = 0.79; EXPRESSED IN ADULT LIVER, SIGNAL = 0.59; NT HIT: gi14780568, EVALUE 3.00e-89; EST_HUMAN HIT: BE737177.1, EVALUE 4.00e-89; SWISSPROT HIT: P57057, EVALUE 2.00e-27
gagaggtttgattatgggggtctggaactcccacacctccgtgggcaacatcttggggtcattgatcgctggctactgggtgtccacatgctggggcctgtccttcgtcgtgcctggagccatcgtggcagccatggggatagtgtgctttctcttcctcattgaac

SEQ ID NO: 17160 - DNA, 115 bp, Homo sapiens
  MAP TO CHR21_55.0; EXPRESSED IN HELA, SIGNAL = 0.52; NT HIT: U75916.1, EVALUE 1.50e+00
gcagcatctgctgtagtgtgagccgcaaccctgcctggccctccaccaagcctgaggaggacgcgagctcggctgcggctgacagcattcagcagcagaactccaagcaaggggg

SEQ ID NO: 17161 - DNA, 257 bp, Homo sapiens
  MAP TO AC015937.3; EXPRESSED IN LUNG, SIGNAL = 1.1; EXPRESSED IN HELA, SIGNAL = 1.8; SWISSPROT HIT: O42280, EVALUE 2.00e-12; NT HIT: AB063483.1, EVALUE 3.00e-68; EST_HUMAN HIT: AI952364.1, EVALUE 3.50e-01
ccgtctctgtcctctcgccgtctccagcctgaccaggtgggaggtcctgatgcccttcccaggactgggcactgcggtggccccagcacagggcagggcccacctgaagcagtgtgacctgctgaagttgtcccggcagcagaagcagctctgcgggagggagcccagcctggctgagaccctgtgggacgccatgcacctcggcctggagtgccagttccagttccggcatgagcgctggaactacagcttggagg

SEQ ID NO: 17162 - DNA, 282 bp, Homo sapiens
  MAP TO AL118512.8; EXPRESSED IN HELA, SIGNAL = 2.3; EXPRESSED IN FETAL LIVER, SIGNAL = 3.2; EXPRESSED IN PLACENTA, SIGNAL = 4.1; EXPRESSED IN LUNG, SIGNAL = 4.6; EXPRESSED IN ADULT LIVER, SIGNAL = 4.5; EXPRESSED IN HEART, SIGNAL = 3.8; SWISSPROT HIT: P13590, EVALUE 2.00e-10; EST_HUMAN HIT: AW946301.1, EVALUE 3.80e-01; NT HIT: gi15296873, EVALUE 0.00e+00
ccaagacatcaacttcatatttgatttccttttctcctgccacactggtagccacgcatatgtactgtcctcgatcaatttcttgggcactcatgatttcgagtttcttcccaccagcttctatgcggatattgtcattagctttcacaggtacaccatctttcaaccaggtgagaatgggagaagggtttccagcagctttgcactccagtgtcagagaatgagcaataactacttgcttattcaaaggcgtggccaagttgccttcaatcattggaggaa

SEQ ID NO: 17163 - DNA, 142 bp, Homo sapiens
  MAP TO AL121876.23; EXPRESSED IN HELA, SIGNAL = 1.3; EXPRESSED IN LUNG, SIGNAL =   3; EXPRESSED IN ADULT LIVER, SIGNAL = 3.2; EXPRESSED IN FETAL LIVER, SIGNAL = 3.7; EXPRESSED IN PLACENTA, SIGNAL = 3.8; EXPRESSED IN BONE MARROW, SIGNAL = 3.4; SWISSPROT HIT: Q59088, EVALUE 4.50e+00
ttaggtactcattataaataggcaggctcccatcatagcagtaaactgtgtgtgtaggccagttgaagaataccacacttggaaaatagactgctttggggagatatttgaggtttaacctaaactcaaacttgaagaccat

SEQ ID NO: 17164 - DNA, 147 bp, Homo sapiens
  MAP TO AL133520.2; EXPRESSED IN HELA, SIGNAL =   1; EXPRESSED IN FETAL LIVER, SIGNAL = 2.4; EXPRESSED IN PLACENTA, SIGNAL = 2.6; EXPRESSED IN LUNG, SIGNAL = 2.6; EXPRESSED IN ADULT LIVER, SIGNAL = 3.2; EXPRESSED IN BONE MARROW, SIGNAL = 2.4; SWISSPROT HIT: P08075, EVALUE 5.90e+00; EST_HUMAN HIT: BI600012.1, EVALUE 2.00e-38; NT HIT: AL163284.2, EVALUE 2.00e-19
acctcctatctcattctgtgacttaggctgcctaacttcctgggaatgcagcccagcaggtctcagcctcattctccccagctcctgttcaagatggagtcgctctggttcaaacgcctctgacagtaggtcccatgatgataactg

SEQ ID NO: 17165 - DNA, 132 bp, Homo sapiens
  MAP TO CHR22_168.0; EXPRESSED IN HELA, SIGNAL = 0.79; EXPRESSED IN LUNG, SIGNAL = 0.72; EXPRESSED IN ADULT LIVER, SIGNAL = 0.75; EXPRESSED IN FETAL LIVER, SIGNAL = 0.6; EXPRESSED IN BONE MARROW, SIGNAL = 0.58; SWISSPROT HIT: P27703, EVALUE 3.00e-20; EST_HUMAN HIT: AL036162.2, EVALUE 2.00e-68; NT HIT: gi16167524, EVALUE 2.00e-68
gtattcttggatccccatcacaagaagacctgaattgtataataaatttaaaagctaggaactatttgctttctcttccacacaaaaataaggtgccatggaacaggctgttcccaaatgctgactccaaag

SEQ ID NO: 17166 - DNA, 180 bp, Homo sapiens
  MAP TO CHR22_184_2.0; EXPRESSED IN FETAL LIVER, SIGNAL = 3.2; EXPRESSED IN BONE MARROW, SIGNAL = 2.8; EXPRESSED IN HELA, SIGNAL = 1.9; EXPRESSED IN PLACENTA, SIGNAL = 3.6; EXPRESSED IN LUNG, SIGNAL = 3.8; EXPRESSED IN ADULT LIVER, SIGNAL = 3.2
ctacttctccttctctccctcctctttctcttcctcctcctcttcttcctcctcctcctcctcttcctcctcctcctccccctcttcctcctcctcctcctccatctcctcctcctccatctcctcctcttcctcctcctcctcctcctcctcctccttctcctcctccttttgctgctg

SEQ ID NO: 17167 - DNA, 189 bp, Homo sapiens
  MAP TO AL138781.2; EXPRESSED IN HELA, SIGNAL =   2; EXPRESSED IN FETAL LIVER, SIGNAL = 1.7; EXPRESSED IN PLACENTA, SIGNAL = 1.7; EXPRESSED IN LUNG, SIGNAL = 2.2; EXPRESSED IN ADULT LIVER, SIGNAL =   2; SWISSPROT HIT: Q63042, EVALUE 3.30e-02; NT HIT: AF058301.1, EVALUE 2.60e+00; EST_HUMAN HIT: AW408680.1, EVALUE 1.00e-100
gctttgaagacgacccccaggctgtgctgcagacaatgaggaggtacgttcacaccttctttgggtgtaaggaatgtggtgagcactttgaggaaatggctaaagaatccatggactcggtgaaaaccccagaccaagccatcctctggctgtggaagaagcataatatggtgaacggccgcctggcag

SEQ ID NO: 17168 - DNA, 468 bp, Homo sapiens
  MAP TO AL160314.1; EXPRESSED IN FETAL LIVER, SIGNAL =   2; EXPRESSED IN BONE MARROW, SIGNAL = 2.3; EXPRESSED IN LUNG, SIGNAL = 1.9; EXPRESSED IN ADULT LIVER, SIGNAL = 1.9; EXPRESSED IN HELA, SIGNAL = 0.71; SWISSPROT HIT: P23267, EVALUE 4.00e-35; NT HIT: gi6754931, EVALUE 1.00e-72; EST_HUMAN HIT: AI424858.1, EVALUE 2.00e-07
atgacaggattccttctcatcattattccaagttttcttgtccttcagcagccattctgtggccccaacatcattaaccatttcttctgtgacaactttcccctcttgaaactcatttgtgcagacatgactctgatagagctcctgggttttgttatagccaacgtcagcttactgggcactctgtctatgacggccacttgctatggccacatcctccacgccattctgcacatcccctcagccaaagagaagcagaaagccttctccgcctgctcctcccacatcattgtcgtgtctctcttctatggcagctgcatcttcatgtacattcagtcaggcaagagtgaccagaaggaagacaggaacaaggtggcggcattgcttaacaccgtggtgaccctgatgctcaaccccttcatctacaccctgaggaacaaacaggtgaaacaggtgtttaggcagcag

SEQ ID NO: 17169 - DNA, 126 bp, Homo sapiens
  MAP TO AL137799.2; EXPRESSED IN HEART, SIGNAL = 3.9; EXPRESSED IN HELA, SIGNAL = 5.5; EXPRESSED IN PLACENTA, SIGNAL = 4.7; EXPRESSED IN FETAL LIVER, SIGNAL = 4.6; EXPRESSED IN BONE MARROW, SIGNAL = 5.9; NT HIT: gi14727329, EVALUE 6.00e-65; SWISSPROT HIT: O00519, EVALUE 1.00e-18; EST_HUMAN HIT: R16939.1, EVALUE 9.00e-65
cgtgtgccccgcagcctcaaggctctgtttggtctccagcacggcccgcctcatggccggggagggcatggtatagttgtcagtctcatagtaccccacacgcaggggctgagagctggtgtagac

SEQ ID NO: 17170 - DNA, 89 bp, Homo sapiens
  MAP TO CHR21_69.0; EXPRESSED IN FETAL LIVER, SIGNAL = 1.3; EXPRESSED IN BONE MARROW, SIGNAL = 1.3; EXPRESSED IN LUNG, SIGNAL = 0.7; EXPRESSED IN ADULT LIVER, SIGNAL = 0.66; EXPRESSED IN HELA, SIGNAL =   4; NT HIT: AP003001.2, EVALUE 2.80e-01; SWISSPROT HIT: Q61982, EVALUE 4.70e+00
tgcaccagcagcagcaaggccatgccggccgtggtccagcccggctgctctcccccactctgcagtgtttttccacacccatgctgcag

SEQ ID NO: 17171 - DNA, 137 bp, Homo sapiens
  MAP TO AC017112.5; EXPRESSED IN FETAL LIVER, SIGNAL = 0.86; EXPRESSED IN HEART, SIGNAL = 1.3; EXPRESSED IN BONE MARROW, SIGNAL = 1.1; EXPRESSED IN HELA, SIGNAL = 0.53; EXPRESSED IN PLACENTA, SIGNAL = 1.3; EXPRESSED IN LUNG, SIGNAL = 1.5; EXPRESSED IN ADULT LIVER, SIGNAL = 1.4; NT HIT: AE001744.1, EVALUE 1.20e-01
gttccaatgaacaaggcctaggaatctgtatgttcaaagcactgcccatgagtctgatccagagggtgcaagaaccacacttggagaaatgctggtctacaggagagaaggcggacttcagtggtaaaaattcttga

SEQ ID NO: 17172 - DNA, 100 bp, Homo sapiens
  MAP TO AL160237.1; EXPRESSED IN BONE MARROW, SIGNAL = 2.3; EXPRESSED IN LUNG, SIGNAL = 1.9; EXPRESSED IN ADULT LIVER, SIGNAL =   2; EXPRESSED IN PLACENTA, SIGNAL = 1.7; EXPRESSED IN HELA, SIGNAL = 2.1; EXPRESSED IN FETAL LIVER, SIGNAL = 2.5; NT HIT: AF111170.3, EVALUE 8.00e-05; EST_HUMAN HIT: D44849.1, EVALUE 3.00e-08
gtcagtgcccaaaaaggtaaagaaaacctcatgcagtgtgcttgcttctcctcatgggcagcccatttggataccctggaaattgaacctaatttaaaag

SEQ ID NO: 17173 - DNA, 230 bp, Homo sapiens
  MAP TO AB017651.1; EXPRESSED IN HELA, SIGNAL = 8.4; EXPRESSED IN FETAL LIVER, SIGNAL = 6.7; EXPRESSED IN PLACENTA, SIGNAL =   7; EXPRESSED IN BONE MARROW, SIGNAL = 8.2; EXPRESSED IN ADULT LIVER, SIGNAL =  14; SWISSPROT HIT: Q9CZM2, EVALUE 2.00e-27; EST_HUMAN HIT: AV763018.1, EVALUE 3.00e-60; NT HIT: gi14723414, EVALUE 4.00e-58
tcatggtcgacaggcttgccataagttgcacccttaggaactgggcatttttggccaccatggcgcatacaaatcctatatataatgtaactttgcttggccttgtagcccagttggcatgctttatcaggccaggtggggtggggattcctgtgcagagcagagagccagcagtactgccaacagccgaccttcagaagaaagtgcaagacatcagactgcctcttcca

SEQ ID NO: 17174 - DNA, 133 bp, Homo sapiens
  MAP TO AL138783.2; EXPRESSED IN PLACENTA, SIGNAL = 0.51; EXPRESSED IN HELA, SIGNAL = 0.54; SWISSPROT HIT: Q9XSB5, EVALUE 5.90e+00; EST_HUMAN HIT: AA634662.1, EVALUE 1.70e-01; NT HIT: AF401986.1, EVALUE 2.90e-02
gatgacttatttggacaacatgaacggtattgctgtgttaccaatatatgaccgtaaaatggacatcatcaatgctcatcaaaattttatgaaaattttgtggaatatagaactatcactgagggatatctag

SEQ ID NO: 17175 - DNA, 82 bp, Homo sapiens
  MAP TO AC022117.2; EXPRESSED IN HELA, SIGNAL =  13; EXPRESSED IN FETAL LIVER, SIGNAL = 2.3; EXPRESSED IN PLACENTA, SIGNAL = 6.1; EXPRESSED IN BONE MARROW, SIGNAL = 0.61; NT HIT: gi13640106, EVALUE 2.00e-23; EST_HUMAN HIT: AW247350.1, EVALUE 3.00e-23; SWISSPROT HIT: P05783, EVALUE 1.20e+00
atgcaaaccatccaaaagaccaccaccacccaccggacagtggatggcaaagtggtgtctgagacccacgacaccaaagttc

SEQ ID NO: 17176 - DNA, 174 bp, Homo sapiens
  MAP TO AL137784.2; EXPRESSED IN HELA, SIGNAL = 0.98; EXPRESSED IN LUNG, SIGNAL = 1.2; EXPRESSED IN PLACENTA, SIGNAL = 1.3; EXPRESSED IN FETAL LIVER, SIGNAL = 0.87; SWISSPROT HIT: P22978, EVALUE 2.60e-02; EST_HUMAN HIT: AI084231.1, EVALUE 3.00e-93
atggtacattgatagactcagggattttttgatactccagaatttcccatatctctctaacatcaattaacataatatttttagaattcaacaggtttttaagttccttataagtgacatctttagaaatagcagtataaaaattgtggcagtttccctttattgacgtcaaac

SEQ ID NO: 17177 - DNA, 158 bp, Homo sapiens
  MAP TO AL160192.1; EXPRESSED IN BONE MARROW, SIGNAL = 1.3; EXPRESSED IN HELA, SIGNAL =   1; EXPRESSED IN FETAL LIVER, SIGNAL = 1.6; EXPRESSED IN LUNG, SIGNAL = 1.1; EXPRESSED IN ADULT LIVER, SIGNAL =   1; EXPRESSED IN PLACENTA, SIGNAL = 1.1; EST_HUMAN HIT: R98072.1, EVALUE 2.00e-01; NT HIT: AF321530.1, EVALUE 6.00e-04; SWISSPROT HIT: P37889, EVALUE 1.50e+00
gagcaaccaccaatcaaccttttgcatgcaactcccatctcaaagtcaatttaagacaaggggatagcaactgttcagctccaccaactgttgccatgcacaatcatgtagacccattgatgtcagatcttgtttttcaagagaagctagaaatgcaa

SEQ ID NO: 17178 - DNA, 255 bp, Homo sapiens
  MAP TO AL122013.3; EXPRESSED IN BONE MARROW, SIGNAL =   4; EXPRESSED IN LUNG, SIGNAL = 3.5; EXPRESSED IN ADULT LIVER, SIGNAL = 3.8; EXPRESSED IN HELA, SIGNAL = 2.7; EXPRESSED IN FETAL LIVER, SIGNAL = 4.2; EXPRESSED IN PLACENTA, SIGNAL = 3.6; EST_HUMAN HIT: AA136928.1, EVALUE 3.40e-01; SWISSPROT HIT: Q01721, EVALUE 4.40e+00
agcatctcacagcagggatactcccccagcaacagcagccagaagacgaatgctccaagctggacctgctttagccacatgtgtgataagctttcaaatctcacacacacaagcagaggaaggggcacttcagaatcacaggaaaatgccaggagtatttcaaagtcaaataatgcctagagcaagagaaaaaaagcaagaagaagctcctcatctcactgctttcatgttcctgccccagggtgggaggggcta

SEQ ID NO: 17179 - DNA, 102 bp, Homo sapiens
  MAP TO CHR22_41.0; EXPRESSED IN PLACENTA, SIGNAL = 0.62; EXPRESSED IN LUNG, SIGNAL = 0.49; EXPRESSED IN FETAL LIVER, SIGNAL = 0.69; EXPRESSED IN BONE MARROW, SIGNAL = 0.49; EXPRESSED IN HELA, SIGNAL = 0.87; NT HIT: Z99119.1, EVALUE 1.30e+00; EST_HUMAN HIT: BG338795.1, EVALUE 7.50e+00
tgggaaagcagaaggagcggctcctctacctactctggggagaggtagcatttctgagagtcaaatgccgcatcgccatgcttctcaagtttgaacgctcag

SEQ ID NO: 17180 - DNA, 172 bp, Homo sapiens
  MAP TO CHR22_233.0; EXPRESSED IN BONE MARROW, SIGNAL = 2.9; EXPRESSED IN HELA, SIGNAL =   3; EXPRESSED IN HEART, SIGNAL = 2.3; EXPRESSED IN LUNG, SIGNAL = 2.8; EXPRESSED IN PLACENTA, SIGNAL = 3.2; EXPRESSED IN FETAL LIVER, SIGNAL = 2.6; EST_HUMAN HIT: BI460050.1, EVALUE 2.20e-01; SWISSPROT HIT: P24014, EVALUE 4.40e+00
gatcagcctttcactcaatcttggacaacgagtttttcttccaatgtggtttagccttggtggtgaatgttgttgctccagcagccaaaactgaaggtgcaaatgcaggaacagtcagccccaccctgctgtgtgtgaggatgatgctgccctgtgcagtgaagaaagcagg

SEQ ID NO: 17181 - DNA, 87 bp, Homo sapiens
  MAP TO AC006477.3; EXPRESSED IN HELA, SIGNAL = 6.4; EXPRESSED IN LUNG, SIGNAL = 2.8; EXPRESSED IN ADULT LIVER, SIGNAL = 2.7
actcctacagcatctcacggtactgccttgcctccttccagtgggggctgcttctctgcagaacttgctatgccagtggtgctccct

SEQ ID NO: 17182 - DNA, 264 bp, Homo sapiens
  MAP TO AL133330.5; EXPRESSED IN FETAL LIVER, SIGNAL = 5.7; EXPRESSED IN BONE MARROW, SIGNAL = 5.6; EXPRESSED IN HEART, SIGNAL = 4.6; EXPRESSED IN LUNG, SIGNAL =   6; EXPRESSED IN HELA, SIGNAL =   3; EXPRESSED IN PLACENTA, SIGNAL =   6; EXPRESSED IN ADULT LIVER, SIGNAL = 5.9; EST_HUMAN HIT: AU124528.1, EVALUE 0.00e+00; SWISSPROT HIT: P43006, EVALUE 3.00e-29; NT HIT: gi4759123, EVALUE 0.00e+00
aactctgggttacctgttgaaagcaggcttggacaaggttttcagggaagagatttcgaataaggtccaggaaggcatccaggctggacacttcatcattcttcttcccaggccccagctgcttcttgagcttgggattgcctggatggatagccaagaccagaatgacccccagtactgcagcaatgatggtcgtggacatgtaatacaccatggctctcgtgcccaagcggccactagccttagcatccaggcctgacaacc

SEQ ID NO: 17183 - DNA, 333 bp, Homo sapiens
  MAP TO CHR21_43.0; EXPRESSED IN HELA, SIGNAL = 0.58; EXPRESSED IN FETAL LIVER, SIGNAL = 0.44; EXPRESSED IN ADULT LIVER, SIGNAL = 0.31; SWISSPROT HIT: P31792, EVALUE 2.00e-10; NT HIT: AB026898.1, EVALUE 0.00e+00; EST_HUMAN HIT: AA368311.1, EVALUE 1.00e-108
gcgagacattctagcaaaagcaggggccattatacacctgaacataggagaaggaacacctgtttgttgtcccctgcttgaggaaggaattaatcccgaagtctgggcaacagaaggacaatacggacgagcaaagaatgcctgtgctgttcaagttaaactaaaggattccgcctcctttccctaccaaaggcagtacccccttagacctgaggcccaacaaggactccaaaagattgttaaggacctaaaagcccatggcctagtaaaaccatgcaatagcccctgcaatactccaattttaggagtacagaaacccaacagacagtggag

SEQ ID NO: 17184 - DNA, 125 bp, Homo sapiens
  MAP TO AC018876.4; EXPRESSED IN HELA, SIGNAL = 1.9; EXPRESSED IN FETAL LIVER, SIGNAL = 2.7; EXPRESSED IN ADULT LIVER, SIGNAL = 2.8; EXPRESSED IN LUNG, SIGNAL = 2.8; SWISSPROT HIT: P52645, EVALUE 4.60e+00; NT HIT: gi7524593, EVALUE 4.10e-01; EST_HUMAN HIT: AL546364.1, EVALUE 3.00e-64
atataaagggcaatgaacaaattgaaaaatattcttggagagaagcttgtgatactggcagctcaagaatggacagaaagcatggaaaatacatattgaacgttgagcactctgaaaaccagccg

SEQ ID NO: 17185 - DNA, 346 bp, Homo sapiens
  MAP TO CHR22_18.0; EXPRESSED IN HELA, SIGNAL = 1.1; EXPRESSED IN FETAL LIVER, SIGNAL = 0.95; EXPRESSED IN LUNG, SIGNAL =   1; EXPRESSED IN BONE MARROW, SIGNAL = 1.4; NT HIT: M86848.1, EVALUE 3.20e-01; EST_HUMAN HIT: BE735359.1, EVALUE 4.00e-69; SWISSPROT HIT: P54743, EVALUE 2.00e+00
gaaccctaatataccccccatgcagaaattcatttcacagtgtagagtggtcacttctgtggtcatgaagcaccataggtcaccttgcacacgtcatctcacaagtgaggagtcatggttcatggtggttcatggttctggtcttgctgtgccccaggtccagatcatactgtgcaccaagggctgcagctgtttggacaatttcatgaaaggaaatcagtatttacagtcttgggtatattggagaattatcagcaaagttggaattttattagaaagtgatccagacgttgatctacaggagaagaaacagaatcacagaatctttaagcacagtgagggctga

SEQ ID NO: 17186 - DNA, 109 bp, Homo sapiens
  MAP TO CHR21_46.0; EXPRESSED IN HEART, SIGNAL = 1.4; EXPRESSED IN PLACENTA, SIGNAL = 0.73; EXPRESSED IN HELA, SIGNAL = 5.8; EXPRESSED IN LUNG, SIGNAL = 1.1; EXPRESSED IN ADULT LIVER, SIGNAL = 0.82; EXPRESSED IN FETAL LIVER, SIGNAL = 1.7; EXPRESSED IN BONE MARROW, SIGNAL = 2.2; EST_HUMAN HIT: N87421.1, EVALUE 5.20e-01
tgtaccaggcagatccctttcagaaaagcctgagaaaaatgctaagagattcttggcagagctgaagcaagatgctgtcaggttcagctctgtgaagctgattgtacag

SEQ ID NO: 17187 - DNA, 131 bp, Homo sapiens
  MAP TO AC015822.3; EXPRESSED IN BONE MARROW, SIGNAL = 1.9; EXPRESSED IN HEART, SIGNAL = 1.7; EXPRESSED IN HELA, SIGNAL = 1.6; EXPRESSED IN FETAL LIVER, SIGNAL = 2.3; EXPRESSED IN ADULT LIVER, SIGNAL = 3.1; EXPRESSED IN LUNG, SIGNAL = 2.3; EST_HUMAN HIT: BF964636.1, EVALUE 3.00e-09; SWISSPROT HIT: P23482, EVALUE 4.50e+00; NT HIT: AL163227.2, EVALUE 5.00e-16
aatctacaccaccaagagtgggcccaatgtaaaccataaactttgtataagaatgatgtgtcaatgtaggtccactgattgtaacaaatgtaccactctggtgggggatgttgataatgggggcagcatgt

SEQ ID NO: 17188 - DNA, 154 bp, Homo sapiens
  MAP TO AC013718.3; EXPRESSED IN FETAL LIVER, SIGNAL = 3.1; EXPRESSED IN PLACENTA, SIGNAL = 3.5; EXPRESSED IN ADULT LIVER, SIGNAL = 3.7; EXPRESSED IN HEART, SIGNAL = 2.3; EXPRESSED IN LUNG, SIGNAL = 3.6; EXPRESSED IN BONE MARROW, SIGNAL = 3.3; EXPRESSED IN HELA, SIGNAL = 2.2; EST_HUMAN HIT: BG434025.1, EVALUE 5.00e-02; SWISSPROT HIT: Q9ZJJ4, EVALUE 1.20e+00; NT HIT: M63391.1, EVALUE 2.10e+00
tatcaatgcctctctcctctcctccttctggaactcccccacttcccttcatgtttgtactcatcatcacctcatttcttccctcaactctcctgaactccagcccctcatcctctctctccatccatttcccatctctctcctctatcttcat

SEQ ID NO: 17189 - DNA, 148 bp, Homo sapiens
  MAP TO AC019287.3; EXPRESSED IN HELA, SIGNAL =   3; EXPRESSED IN PLACENTA, SIGNAL = 2.2; EXPRESSED IN ADULT LIVER, SIGNAL = 2.7; EXPRESSED IN FETAL LIVER, SIGNAL = 2.7; EXPRESSED IN HEART, SIGNAL = 1.9; EXPRESSED IN LUNG, SIGNAL = 2.4; EXPRESSED IN BONE MARROW, SIGNAL = 2.8; NT HIT: AL161515.2, EVALUE 1.30e-01; EST_HUMAN HIT: BF689912.1, EVALUE 7.40e-01; SWISSPROT HIT: O57340, EVALUE 2.00e+00
aatgaagatgaggcagaattcaagggtgataccaagggcccactcacaatttctctttcatgggaaaacagtgtagtgctgaggggcattagtaagaatttggcagacacttgtcctaattccatgggacaaagaaataaaggcaaag

SEQ ID NO: 17190 - DNA, 178 bp, Homo sapiens
  MAP TO AL121916.12; EXPRESSED IN LUNG, SIGNAL = 4.5; EXPRESSED IN ADULT LIVER, SIGNAL =   6; EXPRESSED IN HELA, SIGNAL =  14; SWISSPROT HIT: P12970, EVALUE 9.00e-22; NT HIT: AB056665.1, EVALUE 4.00e-48; EST_HUMAN HIT: BI493061.1, EVALUE 3.00e-50
gtccacaagaagagaggcaccactgctgccttcgcacaggttaacttggaagacaaaggagctttggctaagctggtggaaactatcaggaccaattacagcgacagatacgatgagatctgctgtcactggggaggtaatgtcctgggtcccaagtctgtggctcgcatcaccaagc

SEQ ID NO: 17191 - DNA, 123 bp, Homo sapiens
  MAP TO AL136122.1; EXPRESSED IN LUNG, SIGNAL = 0.71; EXPRESSED IN PLACENTA, SIGNAL = 0.98; EXPRESSED IN ADULT LIVER, SIGNAL = 0.49; EXPRESSED IN HELA, SIGNAL = 0.7; EXPRESSED IN FETAL LIVER, SIGNAL = 0.87; EST_HUMAN HIT: T71153.1, EVALUE 9.40e+00; SWISSPROT HIT: O81973, EVALUE 6.00e+00
tcagcagttctcaaccagggcagtatcaatcacacacaaacacaccccagggcattttggaaattcatggaggcttttgattggtgctatgatgacagggtgctgccggcatttagtgattaa

SEQ ID NO: 17192 - DNA, 143 bp, Homo sapiens
  MAP TO AL136985.1; EXPRESSED IN HELA, SIGNAL = 0.66; EXPRESSED IN FETAL LIVER, SIGNAL = 0.94; EXPRESSED IN PLACENTA, SIGNAL = 0.56; EXPRESSED IN BONE MARROW, SIGNAL =   1; EXPRESSED IN ADULT LIVER, SIGNAL = 0.32; EST_HUMAN HIT: BF001756.1, EVALUE 7.10e-01; SWISSPROT HIT: P02216, EVALUE 2.00e+00
agcccagcatgatggggctggagtgggtaaaggcatcatgtccagtattcccactatccatctctctgtggcaaatgtattcaaccatgctagtgtaccttctcctcagctgctgctccttggtgcaacaaatctttgacatc

SEQ ID NO: 17193 - DNA, 223 bp, Homo sapiens
  MAP TO CHR22_137.0; EXPRESSED IN FETAL LIVER, SIGNAL = 0.49; EXPRESSED IN BONE MARROW, SIGNAL = 0.45; EXPRESSED IN ADULT LIVER, SIGNAL = 0.45; EXPRESSED IN HELA, SIGNAL = 2.6; EST_HUMAN HIT: BG178443.1, EVALUE 6.00e-24; SWISSPROT HIT: Q28346, EVALUE 5.00e-09; NT HIT: gi4506652, EVALUE 4.00e-24
cttcttgactgcaaccccctttctcatctgatttggcctctagtgctgctggtgctgctggtgctgctggtgctggtgctggtgctgctgctgctgctgccaccgccgccgctgccttatccacctggagtttgtggttgctggcctggcaaagcctggtgttgcagagcatggtctttgcatatgggtttagcttcaacatgattttcaggttttccaggag

SEQ ID NO: 17194 - DNA, 104 bp, Homo sapiens
  MAP TO AL136530.3; EXPRESSED IN HELA, SIGNAL = 2.9; EXPRESSED IN LUNG, SIGNAL =   1; EXPRESSED IN FETAL LIVER, SIGNAL = 3.7; EXPRESSED IN ADULT LIVER, SIGNAL = 0.79; EXPRESSED IN BONE MARROW, SIGNAL = 3.6; EXPRESSED IN HEART, SIGNAL = 3.6; EST_HUMAN HIT: BG255417.1, EVALUE 1.90e+00
ttagcttatttcatctgacagtgacttcatggggttggccttatcatcatcatcatcgtcatcatcatcatcatcatcccagtcctacgaaagaaaaaagcaaa

SEQ ID NO: 17195 - DNA, 361 bp, Homo sapiens
  MAP TO AC016672.4; EXPRESSED IN HELA, SIGNAL = 1.9; EXPRESSED IN FETAL LIVER, SIGNAL = 1.5; EXPRESSED IN HEART, SIGNAL = 1.4; EXPRESSED IN PLACENTA, SIGNAL = 2.1; EXPRESSED IN BONE MARROW, SIGNAL = 1.3; EXPRESSED IN LUNG, SIGNAL = 1.6; EXPRESSED IN ADULT LIVER, SIGNAL =   2; SWISSPROT HIT: P11269, EVALUE 1.60e-01; EST_HUMAN HIT: AA180425.1, EVALUE 2.00e+00
ggtccacctgggacaccttcttgtgaaaagagagcatggcggtggcaacacatcccacagagtgagcaagctgcttggggttcgggccgtgtcccctcctgcctcctcctctctctctgctgatgagccttcccctctctgccctgggaaagcagaggccatgggagaagtccccacacccccagtgctgcctgtgggccccgaggctctgcccttccttctgtgtctgggttgcgccgtccacccccgccccccgccccacaagaccagcggctcctcctggccccagatcctgcttctggaggacacccctccacaggcccagcaactcctgaccttcccctgggccacggccatcggc

SEQ ID NO: 17196 - DNA, 236 bp, Homo sapiens
  MAP TO CHR22_24.0; EXPRESSED IN PLACENTA, SIGNAL =   1; EXPRESSED IN LUNG, SIGNAL = 0.92; EXPRESSED IN HELA, SIGNAL = 1.7; EXPRESSED IN ADULT LIVER, SIGNAL = 0.83; EST_HUMAN HIT: AA897278.1, EVALUE 1.00e-130; NT HIT: gi4502902, EVALUE 1.00e-130; SWISSPROT HIT: P53675, EVALUE 1.00e-42
gctcaagctgctgcttccctggctggagtcccagattcaggaaggctgtgaggagcctgccactcacaatgcactggctaaaatctacatcgacagcaacaacagccccgagtgcttcctgagagagaatgcctactatgacagcagcgtggtgggccgctactgtgagaagcgagacccccatctggcctgtgttgcctatgagcgggggcagtgtgaccttgagctcatcaagg

SEQ ID NO: 17197 - DNA, 78 bp, Homo sapiens
  MAP TO AC011931.3; EXPRESSED IN ADULT LIVER, SIGNAL = 2.1; EXPRESSED IN HELA, SIGNAL = 1.1; EXPRESSED IN FETAL LIVER, SIGNAL = 1.7; EXPRESSED IN HEART, SIGNAL = 1.7; EXPRESSED IN PLACENTA, SIGNAL = 2.3; EXPRESSED IN LUNG, SIGNAL =   2; EXPRESSED IN BONE MARROW, SIGNAL = 1.8; EST_HUMAN HIT: BI603028.1, EVALUE 2.00e-36; NT HIT: gi14735335, EVALUE 1.00e-36
ccaacccaacccgagcaggcggcagagagccgtatccaggctcagcagaagtgatccgggagtccagcagcaccacgg

SEQ ID NO: 17198 - DNA, 216 bp, Homo sapiens
  MAP TO CHR22_143.0; EXPRESSED IN BONE MARROW, SIGNAL = 0.5; EXPRESSED IN HELA, SIGNAL = 3.2; EXPRESSED IN ADULT LIVER, SIGNAL = 0.67; NT HIT: gi14779563, EVALUE 1.00e-118; SWISSPROT HIT: P41163, EVALUE 2.20e+00; EST_HUMAN HIT: BG740388.1, EVALUE 1.00e-118
cagaatccaaattctgcaggttcctccgtgcgaggcccagcgtgggatgtcccaggttggaggtgtgcgtgttggcggtgttctttggctggaagcaaaaggccgttctggcgggatcggggccgtctgctcagctggaggcctttctggaactgggcgtgggtgaggtattcccagcccagggcaaagccatcaaacttctcgtgttcccatctc

SEQ ID NO: 17199 - DNA, 262 bp, Homo sapiens
  MAP TO AC011803.4; EXPRESSED IN LUNG, SIGNAL = 1.3; EXPRESSED IN BONE MARROW, SIGNAL = 1.1; EXPRESSED IN PLACENTA, SIGNAL = 1.3; EXPRESSED IN ADULT LIVER, SIGNAL = 1.1; EXPRESSED IN HELA, SIGNAL =   1; EXPRESSED IN FETAL LIVER, SIGNAL = 0.96; EST_HUMAN HIT: BG622923.1, EVALUE 8.90e-02; NT HIT: X55635.1, EVALUE 2.40e-01; SWISSPROT HIT: Q9WTN3, EVALUE 9.00e-01
cattcttgattagacttcaggaccaggtctgtaaccattttttctttcttcttccacctcaccttcaaatatcctaaagggttagtttttctgtaaaaccgaaatgactgcaagtcattgtgcagagctggggtgtgtggataggcttttgatggatggagttgagctgtggagcttggatcacttgcgacgttgctgatgcaacctctgaatgggatggaacttttgagaggagatggggacttggcacttatgatgttac

SEQ ID NO: 17200 - DNA, 209 bp, Homo sapiens
  MAP TO CHR21_69.0; EXPRESSED IN FETAL LIVER, SIGNAL = 9.6; EXPRESSED IN BONE MARROW, SIGNAL = 5.6; EXPRESSED IN PLACENTA, SIGNAL = 7.3; EXPRESSED IN LUNG, SIGNAL = 6.8; EXPRESSED IN HELA, SIGNAL = 3.6; EXPRESSED IN ADULT LIVER, SIGNAL = 7.7; EST_HUMAN HIT: AI221054.1, EVALUE 1.00e-114; NT HIT: gi14780601, EVALUE 1.00e-114; SWISSPROT HIT: P55347, EVALUE 5.00e-24
gagctgttgtcaccatcaccacgcccgtgaacatgaacgtggacagccttcagtctctgtcctcggacggggccaccctggcggtgcagcaggtcatgatggcagggcagagcgaggacgagtctgtggacagcacagaggaggatgcgggtgccctggcccctgcccacatcagcgggctggtcttggagaacagtgactccctgcag

SEQ ID NO: 17201 - DNA, 142 bp, Homo sapiens
  MAP TO CHR22_43.0; EXPRESSED IN HELA, SIGNAL = 1.2; EXPRESSED IN FETAL LIVER, SIGNAL = 1.6; EXPRESSED IN BONE MARROW, SIGNAL = 1.4; EXPRESSED IN ADULT LIVER, SIGNAL =   2; EXPRESSED IN LUNG, SIGNAL =   2; EST_HUMAN HIT: AI818119.1, EVALUE 2.00e-69; NT HIT: gi14777547, EVALUE 2.00e-74; SWISSPROT HIT: P11274, EVALUE 5.00e-18
gagagagaggtccaaggtgccctacatcgtgcgtcagtgcgtggaggagatcgagcgccgaggcatggaggaggtgggcatctaccgcatgtctggggtggccgcagacatccaggcactgaaggcaggcttcaacgtcagt

SEQ ID NO: 17202 - DNA, 137 bp, Homo sapiens
  MAP TO AC016729.5; EXPRESSED IN HELA, SIGNAL = 1.9; EXPRESSED IN FETAL LIVER, SIGNAL = 4.3; EXPRESSED IN LUNG, SIGNAL = 5.4; EXPRESSED IN PLACENTA, SIGNAL = 4.9; EXPRESSED IN ADULT LIVER, SIGNAL = 5.9; EXPRESSED IN BONE MARROW, SIGNAL = 3.9; EST_HUMAN HIT: H69277.1, EVALUE 3.00e-18; NT HIT: gi15718529, EVALUE 6.00e-16; SWISSPROT HIT: O00268, EVALUE 6.00e-02
gctgtacaggaagcatggcagcatctacttggctacttggcttctggggaggccttgggaaactttcagtcatggcggaaggtgatggggaagcaggcacatcttacgtggctggagcaggaggaagagagcaaagg

SEQ ID NO: 17203 - DNA, 75 bp, Homo sapiens
  MAP TO AC013637.3; EXPRESSED IN FETAL LIVER, SIGNAL = 5.5; EXPRESSED IN BONE MARROW, SIGNAL = 2.9; EXPRESSED IN HELA, SIGNAL = 0.53; EXPRESSED IN LUNG, SIGNAL = 3.5; EXPRESSED IN ADULT LIVER, SIGNAL = 3.1; NT HIT: AF162784.1, EVALUE 3.50e+00
ctaaacttcttctttcgcaccaggaactgtgaggcgctgaagatcatcctgcatgggccacttgtcatcttcgat

SEQ ID NO: 17204 - DNA, 325 bp, Homo sapiens
  MAP TO CHR22_232.0; EXPRESSED IN FETAL LIVER, SIGNAL =   1; EXPRESSED IN ADULT LIVER, SIGNAL = 0.96; EXPRESSED IN BONE MARROW, SIGNAL = 1.5; EXPRESSED IN HELA, SIGNAL = 2.7; EXPRESSED IN PLACENTA, SIGNAL =   1; EXPRESSED IN LUNG, SIGNAL = 0.97; NT HIT: AJ310932.1, EVALUE 5.00e-06; EST_HUMAN HIT: W76159.1, EVALUE 2.00e-03; SWISSPROT HIT: P08548, EVALUE 3.00e-07
ctgtacacgcctgttcttagcagcaccgttcccaacagccagaaagtggaaagagcccaagtgtccgtcagcggtcccacggaaaaacaaccttcatatacagccatgactggaatattattcagccttaaaaaggaatggcattctgatgaaccggcaacacggatgaacctcggaaacatgacgccgagtgaaggaagccagtcaccgaagtctgccctgttggagcccagtgatgtgaaacttccggaacaggcaaggtcacagaggccgaatgaaggcccgtggccgccagggtccaggacggagatggggagtggttgct

SEQ ID NO: 17205 - DNA, 130 bp, Homo sapiens
  MAP TO AL138895.4; EXPRESSED IN HELA, SIGNAL = 0.88; EXPRESSED IN HEART, SIGNAL = 2.2; EXPRESSED IN LUNG, SIGNAL = 2.8; EXPRESSED IN PLACENTA, SIGNAL = 2.2; EXPRESSED IN ADULT LIVER, SIGNAL = 2.4; EXPRESSED IN FETAL LIVER, SIGNAL = 1.9; EXPRESSED IN BONE MARROW, SIGNAL = 1.7; EST_HUMAN HIT: BG421721.1, EVALUE 1.60e-01; NT HIT: X03139.1, EVALUE 4.30e-01
cccaaagggacagacagacgacatcatcatcatcatcatcatcatcatcatcatcatcatcatcatcatcattatggacataatcattaacatctaccatatctcccctttcccagttactcttccaagt

SEQ ID NO: 17206 - DNA, 186 bp, Homo sapiens
  MAP TO AL049828.3; EXPRESSED IN HELA, SIGNAL = 1.2; EXPRESSED IN ADULT LIVER, SIGNAL = 3.8; EXPRESSED IN FETAL LIVER, SIGNAL = 1.9; EXPRESSED IN LUNG, SIGNAL = 2.9; EXPRESSED IN BONE MARROW, SIGNAL = 2.1; SWISSPROT HIT: Q00174, EVALUE 3.30e+00; EST_HUMAN HIT: BG773035.1, EVALUE 4.00e-40; NT HIT: AL163249.2, EVALUE 2.00e-38
acctttaagagctgtgacactcagtgcaaaggtctgcagcttcactcctgaagtcagcaagaccacaaacccaccaggaggaacaaacaactccagatgcgccatctttaagagctgtaacactctgcgaaggtctgcagcttcactcatgaagtcagcgagaccacgaacatctgaaggaacaaa

SEQ ID NO: 17207 - DNA, 91 bp, Homo sapiens
  MAP TO AC016692.4; EXPRESSED IN BONE MARROW, SIGNAL = 0.59; EXPRESSED IN HELA, SIGNAL = 0.59; EXPRESSED IN PLACENTA, SIGNAL = 0.72; EXPRESSED IN LUNG, SIGNAL = 0.71; SWISSPROT HIT: Q04205, EVALUE 1.20e+00; EST_HUMAN HIT: AI286158.1, EVALUE 4.20e-01; NT HIT: J02756.1, EVALUE 5.00e-03
ctgtccagagctcccagcccaggggtggggtcaaacgctctcgcaagaacaacagccagaaccccagagactccggggttgggaaggcctg

SEQ ID NO: 17208 - DNA, 154 bp, Homo sapiens
  MAP TO AL133216.10; EXPRESSED IN LUNG, SIGNAL = 1.1; EXPRESSED IN FETAL LIVER, SIGNAL =   1; EXPRESSED IN ADULT LIVER, SIGNAL = 1.5; EXPRESSED IN BONE MARROW, SIGNAL = 0.68; EXPRESSED IN HELA, SIGNAL = 0.55; SWISSPROT HIT: P56937, EVALUE 3.00e-21; EST_HUMAN HIT: BF738124.1, EVALUE 2.00e-81; NT HIT: gi14741197, EVALUE 1.00e-81
tctcagctcatctggacatcatctcgcaatgcaaggaaatctaatttcagcctcgaggacttccagcacagcaaaggcaaggaaccctacagctcttccaaatatgccactgaccttttgagtgtggctttgaacaggaactttcaaccagcag

SEQ ID NO: 17209 - DNA, 167 bp, Homo sapiens
  MAP TO CHR22_101.0; EXPRESSED IN LUNG, SIGNAL = 0.71; EXPRESSED IN FETAL LIVER, SIGNAL = 0.77; EXPRESSED IN ADULT LIVER, SIGNAL = 0.99; EXPRESSED IN BONE MARROW, SIGNAL = 0.59; EXPRESSED IN HELA, SIGNAL = 1.6; EST_HUMAN HIT: BG683658.1, EVALUE 4.00e-89; NT HIT: gi4758795, EVALUE 3.00e-89; SWISSPROT HIT: Q9Y295, EVALUE 1.00e-28
gtttatatcccctgtatctatgtgttaaataagattgaccaaatctccattgaggaattggatatcatctataaggtgcctcactgtgtacccatctctgcccatcaccgctggaattttgatgacctattggaaaagatctgggactatctgaaactagtgagaat

SEQ ID NO: 17210 - DNA, 244 bp, Homo sapiens
  MAP TO CHR22_103.0; EXPRESSED IN FETAL LIVER, SIGNAL = 1.3; EXPRESSED IN BONE MARROW, SIGNAL = 1.2; EXPRESSED IN HEART, SIGNAL = 1.3; EXPRESSED IN HELA, SIGNAL =   1; EXPRESSED IN LUNG, SIGNAL = 1.6; EXPRESSED IN PLACENTA, SIGNAL = 2.3; EXPRESSED IN ADULT LIVER, SIGNAL = 1.5
ggtgaccagagcctccccgagacactgccccatacatatcaagagcctcggctgctgaagaaggagtgtggcgccctcaggaccagcagtgtgtctgcagatggggcgagtagcagcctcgtgtgttcgctgctcacacaagtgaaatcaaagacacagcccatgattcggttcctgaagagacaaaggcgttggaggaaaaacttggtaaatcacaaggctaatcatcatagccagcagctct

SEQ ID NO: 17211 - DNA, 165 bp, Homo sapiens
  MAP TO AL137157.2; EXPRESSED IN BONE MARROW, SIGNAL = 4.2; EXPRESSED IN HEART, SIGNAL = 4.7; EXPRESSED IN PLACENTA, SIGNAL = 2.7; EXPRESSED IN LUNG, SIGNAL = 2.5; EXPRESSED IN HELA, SIGNAL =  13; EXPRESSED IN ADULT LIVER, SIGNAL = 5.5; EXPRESSED IN FETAL LIVER, SIGNAL = 5.2; SWISSPROT HIT: P42041, EVALUE 2.60e+00; NT HIT: AB012638.1, EVALUE 8.90e+00
gttactattatcctgctccagatccctagccaaactgggctcctccctgacctccagcagggatttccccttctacctcatgaaatctacagcaaccaacgctgcaaggaacatttaaattcttacttccttcaagaagtcttcccggatcacctccaactcaag

SEQ ID NO: 17212 - DNA, 178 bp, Homo sapiens
  MAP TO AL133500.2; EXPRESSED IN HELA, SIGNAL = 0.67; EXPRESSED IN FETAL LIVER, SIGNAL = 0.93; EXPRESSED IN BONE MARROW, SIGNAL = 1.1; EXPRESSED IN PLACENTA, SIGNAL = 1.1; EXPRESSED IN HEART, SIGNAL = 1.4; EST_HUMAN HIT: W02241.1, EVALUE 9.20e-01; SWISSPROT HIT: O28392, EVALUE 2.50e+00
gaaggatgccaatcccggatgtcaggctgccagaggaagtgctgcttatacgcagcacaatggttctcctaagaatattaccagtagatgtgcaaagggtctcagattggggctgtggaactgcaaatggcagactgggtctggtggctacagcacatttcaggcagcaggagctggg

SEQ ID NO: 17213 - DNA, 121 bp, Homo sapiens
  MAP TO AL138499.1; EXPRESSED IN FETAL LIVER, SIGNAL = 0.73; EXPRESSED IN LUNG, SIGNAL = 1.1; EXPRESSED IN ADULT LIVER, SIGNAL = 1.3; EXPRESSED IN BONE MARROW, SIGNAL = 0.6; EXPRESSED IN HELA, SIGNAL = 0.65; NT HIT: gi4826813, EVALUE 5.00e-62; EST_HUMAN HIT: N92194.1, EVALUE 5.00e-60
gagtcttctgagaaggagacaatgtctgtaagtctaaatcagactgtaacacagttacagcagttgcttcaggcggtaaaccaacagctcacaaaggagaaagagcactaccaggtgttag

SEQ ID NO: 17214 - DNA, 119 bp, Homo sapiens
  MAP TO AC022215.2; EXPRESSED IN FETAL LIVER, SIGNAL = 0.84; EXPRESSED IN BONE MARROW, SIGNAL = 0.86; EXPRESSED IN ADULT LIVER, SIGNAL =   1; EXPRESSED IN HELA, SIGNAL = 0.72; EXPRESSED IN PLACENTA, SIGNAL = 1.1; EXPRESSED IN LUNG, SIGNAL =   1; SWISSPROT HIT: P14616, EVALUE 3.50e+00; NT HIT: gi15296972, EVALUE 8.00e-61; EST_HUMAN HIT: BG829052.1, EVALUE 5.00e-60
tggtactgcagatagtttttgagagactgaggcaggggcagggagctgatgtcctgcaggcgctggcggcccagggccgagcggatggatctccggcacaggtccatcagtggcagggg

SEQ ID NO: 17215 - DNA, 144 bp, Homo sapiens
  MAP TO AL121976.2; EXPRESSED IN FETAL LIVER, SIGNAL = 1.1; EXPRESSED IN BONE MARROW, SIGNAL = 0.99; EXPRESSED IN PLACENTA, SIGNAL = 1.6; EXPRESSED IN HELA, SIGNAL = 0.55; EXPRESSED IN LUNG, SIGNAL = 1.5; EXPRESSED IN ADULT LIVER, SIGNAL = 1.9; EST_HUMAN HIT: AA504984.1, EVALUE 2.00e-04; NT HIT: AJ271735.1, EVALUE 8.00e-06
atgttaagtgaaataagccaggcactgaaaggtaaacacatgttcttactcatgttctccacatgttcttacccattttcacaagctaaaaaagttgttctcatagaagcagaaagtagaatagtgattattaaggctgagagg

SEQ ID NO: 17216 - DNA, 99 bp, Homo sapiens
  MAP TO AL139135.2; EXPRESSED IN HELA, SIGNAL = 0.65; EXPRESSED IN FETAL LIVER, SIGNAL = 0.82; EXPRESSED IN PLACENTA, SIGNAL = 0.62; EXPRESSED IN LUNG, SIGNAL = 0.65; EXPRESSED IN BONE MARROW, SIGNAL = 0.78; EST_HUMAN HIT: BE180287.1, EVALUE 4.60e-01
atgacctccagtaaaacattgaataacagtgagaataatcagttttctcatatgtcttcatttcaggaggaagacttatatgactttattattaggcat

SEQ ID NO: 17217 - DNA, 144 bp, Homo sapiens
  MAP TO AL136304.2; EXPRESSED IN FETAL LIVER, SIGNAL = 5.4; EXPRESSED IN BONE MARROW, SIGNAL = 5.8; EXPRESSED IN HEART, SIGNAL = 5.6; EXPRESSED IN PLACENTA, SIGNAL =   8; EXPRESSED IN LUNG, SIGNAL = 7.8; EXPRESSED IN ADULT LIVER, SIGNAL = 7.9; EXPRESSED IN HELA, SIGNAL = 4.4; EST_HUMAN HIT: BE396680.1, EVALUE 2.00e-75; SWISSPROT HIT: Q14999, EVALUE 8.00e-23; NT HIT: gi14781548, EVALUE 1.00e-75
atgaggatggcattagccccctgggttggctgctggaccagtacctggagtgtcaggaagctgtcttcaacccccagagccgcggcccagctttcttctcgcgggtgcgccgtctcactcacctgctggtgcatgtcgagccct

SEQ ID NO: 17218 - DNA, 212 bp, Homo sapiens
  MAP TO AL133499.1; EXPRESSED IN BONE MARROW, SIGNAL = 0.7; EXPRESSED IN HELA, SIGNAL = 0.88; EXPRESSED IN PLACENTA, SIGNAL = 0.79; EXPRESSED IN LUNG, SIGNAL = 0.9; EXPRESSED IN ADULT LIVER, SIGNAL = 0.79; EST_HUMAN HIT: R55851.1, EVALUE 8.00e-11; SWISSPROT HIT: P08547, EVALUE 1.10e-01; NT HIT: AL163301.2, EVALUE 1.00e-116
ctagtctgtggcttgtcttttcactcccttgtctttcacagagtagaactttttaattttaataaagtctagcaaatcagttatttctgtcatagattgtgcctttgatgttacatctgaaaagtcatcaccaaacccaagatcatctagattttcttctgtgttatcttctaggaattttatagttttgcattttacatttaggttgtgac

SEQ ID NO: 17219 - DNA, 143 bp, Homo sapiens
  MAP TO CHR22_101.0; EXPRESSED IN ADULT LIVER, SIGNAL = 0.38; EXPRESSED IN HELA, SIGNAL = 3.4; SWISSPROT HIT: P94300, EVALUE 5.90e+00; EST_HUMAN HIT: BI870390.1, EVALUE 7.00e-75; NT HIT: gi14778380, EVALUE 5.00e-75
ctgtttctgaatccatctctggttctgtccacctgtggtttgccaaaaccaggctggtagaagtttgctgcctgtacagcaaggtcatgtggcaaggccagcccttctaaagctgcctgttgcaactccagctggctcatctg

SEQ ID NO: 17220 - DNA, 147 bp, Homo sapiens
  MAP TO CHR22_152.0; EXPRESSED IN HELA, SIGNAL = 0.83; EXPRESSED IN ADULT LIVER, SIGNAL = 0.29; SWISSPROT HIT: Q39578, EVALUE 3.40e+00; NT HIT: AF162137.2, EVALUE 5.00e-01
gcatccaagcaggtgtctcagtgccagctcacaccgttcacactgctcacaccagctctggagagctgcttgtacacatctctccacaagtccactttcagtgttgccacgtggtaccggaaatttgccatagaaattggccgatgg

SEQ ID NO: 17221 - DNA, 182 bp, Homo sapiens
  MAP TO CHR22_108.0; EXPRESSED IN BONE MARROW, SIGNAL = 2.1; EXPRESSED IN HEART, SIGNAL =   2; EXPRESSED IN LUNG, SIGNAL = 2.1; EXPRESSED IN PLACENTA, SIGNAL = 2.1; EXPRESSED IN ADULT LIVER, SIGNAL = 2.2; EXPRESSED IN HELA, SIGNAL = 0.61; NT HIT: AJ275020.1, EVALUE 6.40e-01; SWISSPROT HIT: Q05858, EVALUE 4.30e+00
agactaaatgagtcggtgatcataaagtacttagaacaggccccagtgcacaataagcacgagaactgttggtttttattcttatggttgtcgtcgtcatcatcatcatcgtcatcatccttgccccacagccaaccagcgatgggaacttgggtacgttccttttcctctctgcgcctcag

SEQ ID NO: 17222 - DNA, 235 bp, Homo sapiens
  MAP TO CHR22_235.0; EXPRESSED IN HELA, SIGNAL = 3.8; EXPRESSED IN LUNG, SIGNAL = 0.57; EXPRESSED IN BONE MARROW, SIGNAL = 0.93; EXPRESSED IN ADULT LIVER, SIGNAL = 0.55; SWISSPROT HIT: Q13164, EVALUE 2.90e-02; EST_HUMAN HIT: AW173241.1, EVALUE 6.00e-58
tggcctctggggtgggccacgatgagacccctgcccctgagggcccagcctgcacctcctccacctcactggatgctgttaaccccctctgctcctcctccaggtacagggaagccacagggaggcagagggcaaacatcggggagctgtgttcccgccacagatccacactgtcggttgagtgcaccctcaccaggaaagctgggcccaccatgtgatttcctggagcctccgt

SEQ ID NO: 17223 - DNA, 98 bp, Homo sapiens
  MAP TO AC020582.3; EXPRESSED IN HELA, SIGNAL = 0.55; EXPRESSED IN LUNG, SIGNAL = 0.61; EXPRESSED IN ADULT LIVER, SIGNAL = 0.46; NT HIT: AB038254.1, EVALUE 3.10e-01; EST_HUMAN HIT: AI184725.1, EVALUE 5.00e-16
cttgttttcagcatccttctctttctcttctttctcttccttgcctgcagcatcttgggcctcttcatcccacttttcatgctgatatttagtgactt

SEQ ID NO: 17224 - DNA, 163 bp, Homo sapiens
  MAP TO AL035367.1; EXPRESSED IN HEART, SIGNAL = 1.1; EXPRESSED IN BONE MARROW, SIGNAL = 0.78; EXPRESSED IN PLACENTA, SIGNAL = 1.2; EXPRESSED IN LUNG, SIGNAL = 0.96; EXPRESSED IN ADULT LIVER, SIGNAL = 1.1; EXPRESSED IN HELA, SIGNAL = 1.1; EXPRESSED IN FETAL LIVER, SIGNAL = 0.86; EST_HUMAN HIT: BG762276.1, EVALUE 1.00e-86; SWISSPROT HIT: P54259, EVALUE 4.40e+00; NT HIT: U74467.1, EVALUE 2.20e+00
ctggggcagacgacgagggggccaagggcaacactggctggctaagggcagcaggtggaggccggggctgcaggtgtggtgtggccttgagcaggctcagttccttccagctgtctgccttggtgtcatcctcatcccgcgggctagtggccctgtcaatgaa

SEQ ID NO: 17225 - DNA, 178 bp, Homo sapiens
  MAP TO CHR22_52.0; EXPRESSED IN HELA, SIGNAL = 0.52; EXPRESSED IN FETAL LIVER, SIGNAL = 0.54; EXPRESSED IN BONE MARROW, SIGNAL = 0.48; NT HIT: U07000.1, EVALUE 8.00e-96; EST_HUMAN HIT: BF057242.1, EVALUE 2.00e-26; SWISSPROT HIT: Q9NYV4, EVALUE 1.70e-01
atatatattggcacaaagcaagtactgttacatgcactggaaattgctgagccaggcacctgccctctcacagatgaaggtgctgaagttcccaggggtggctggggcgggagccagccaagcctggggcttctccaccacgctgtgcatgtgcccagtggtggtcggggccttcatg

SEQ ID NO: 17226 - DNA, 240 bp, Homo sapiens
  MAP TO AC015956.3; EXPRESSED IN BONE MARROW, SIGNAL = 0.59; EXPRESSED IN LUNG, SIGNAL =   1; EXPRESSED IN ADULT LIVER, SIGNAL = 0.72; EXPRESSED IN HELA, SIGNAL = 0.88; EXPRESSED IN FETAL LIVER, SIGNAL = 0.57; NT HIT: gi4826933, EVALUE 6.00e-76; EST_HUMAN HIT: BE313442.1, EVALUE 8.00e-76; SWISSPROT HIT: Q63150, EVALUE 4.50e-01
atgaaagtccatagccttcctaagtaccctcaagaacagataaaggttttgttgctgcaggagaacatgtttgctcacattgccgttatttcaatagaaccaactgtgagagcggagctgatggaacaggtgcctcacatcgcactgttttgtcaagaaaaccggccttcaataccatatgctttttcaaaattcttactacctattgtggttagataccttgcagatcagaataatcag

SEQ ID NO: 17227 - DNA, 223 bp, Homo sapiens
  MAP TO CHR22_144.0; EXPRESSED IN FETAL LIVER, SIGNAL = 1.3; EXPRESSED IN BONE MARROW, SIGNAL = 0.5; EXPRESSED IN ADULT LIVER, SIGNAL = 0.95; EXPRESSED IN HELA, SIGNAL = 2.6; EST_HUMAN HIT: BG471304.1, EVALUE 4.60e+00; SWISSPROT HIT: O13727, EVALUE 3.20e+00; NT HIT: AF276513.1, EVALUE 8.00e-01
gcccccttggtggttccagggatggccaagaggcagcgagtcactgcagggggttcccccggctgcccatactcacggtccgactggttgtacaagccatagtgcacccgcacaccgggcccggtgagggagatctgggaggtgaagttgatggtgatcccggccgtggccaccacggggatcctctcggcgtagggctgcaggatgcgcaagccacacagcc

SEQ ID NO: 17228 - DNA, 372 bp, Homo sapiens
  MAP TO AC012360.2; EXPRESSED IN HELA, SIGNAL = 1.2; EXPRESSED IN PLACENTA, SIGNAL = 2.3; EXPRESSED IN LUNG, SIGNAL = 1.8; EXPRESSED IN ADULT LIVER, SIGNAL = 1.8; EXPRESSED IN FETAL LIVER, SIGNAL = 1.7; EXPRESSED IN BONE MARROW, SIGNAL = 1.9; NT HIT: AB038792.1, EVALUE 0.00e+00; EST_HUMAN HIT: BF667205.1, EVALUE 2.00e-90; SWISSPROT HIT: Q14192, EVALUE 6.00e-31
tcaacaatgttgatgtctttgaaagaaggatggacacccagacccgatggataaatgctcagaatgtaaggcaggacaggcacagctcccacgccacttaagtatcacaggtatccttggttttggaaagagaactgacagacatggaccatggaggcaaaccagccagaacgtgcaagggccaagggggcatctgagatacctttttgcactgaacgcactgcatggcatgttgtttctcatagcagggcacacagaaattctgattgtctttggggatgaaactcttggttccaattggctgctggcagcggtggcagatgaagcaggtctcatgccagctgctgcccttgtactccatcttgcgggtac

SEQ ID NO: 17229 - DNA, 284 bp, Homo sapiens
  MAP TO CHR22_165.0; EXPRESSED IN FETAL LIVER, SIGNAL = 5.8; EXPRESSED IN LUNG, SIGNAL =  11; EXPRESSED IN ADULT LIVER, SIGNAL =   9; EXPRESSED IN BONE MARROW, SIGNAL = 7.3; EXPRESSED IN HELA, SIGNAL = 3.1; NT HIT: AL163246.2, EVALUE 3.00e-72; SWISSPROT HIT: O13776, EVALUE 1.60e-01; EST_HUMAN HIT: AV716883.1, EVALUE 2.00e-77
gatctgtggaactttgaacttgagagagatgatctagggtttctggtggaagaaatttctaagcatcaaggcattcaagaggtgacttggttgctgttaaaggcattccgttttaaaagggaaacagagcataaaagtttggaaaattttcaacctgacaatgcgatagaaaataaaaacccattttctgaggagaaattcaaggaggctgcagaaatttgcataagtaatgagaagccaaatgttaatcaccaagacaaaggagaaaatgtctccagggcatg

SEQ ID NO: 17230 - DNA, 255 bp, Homo sapiens
  MAP TO AJ239319.2; EXPRESSED IN FETAL LIVER, SIGNAL = 5.2; EXPRESSED IN BONE MARROW, SIGNAL = 4.3; EXPRESSED IN HELA, SIGNAL = 0.72; EXPRESSED IN LUNG, SIGNAL = 6.2; EXPRESSED IN ADULT LIVER, SIGNAL = 7.6; EST_HUMAN HIT: BF891036.1, EVALUE 1.00e-43; SWISSPROT HIT: P21675, EVALUE 2.00e-28; NT HIT: X07024.1, EVALUE 5.00e-95
attaaaaagttgtcccgctgggaagtgattgatgtggtgcgcacaatgtcaacagaacaggctcgttctggagaggggcccatgagtaaatttgcccgtggatcaaggttttctgtggctgagcatcaagagcgttacaaagaggaatgtcagcgcatctttgacctacagaacaagtgggtcgttttagtgctgcagaaaatccaagctggaaagggggaggagttccaggcactatttcataataaagaggag

SEQ ID NO: 17231 - DNA, 231 bp, Homo sapiens
  MAP TO AC011636.3; EXPRESSED IN BONE MARROW, SIGNAL = 2.9; EXPRESSED IN HEART, SIGNAL = 2.3; EXPRESSED IN PLACENTA, SIGNAL = 3.2; EXPRESSED IN LUNG, SIGNAL = 2.9; EXPRESSED IN ADULT LIVER, SIGNAL = 2.7; EXPRESSED IN HELA, SIGNAL = 1.6; EST_HUMAN HIT: BG535588.1, EVALUE 2.00e-02; SWISSPROT HIT: P49079, EVALUE 2.00e+00; NT HIT: U43183.1, EVALUE 2.10e-01
gcccagaaggagacagaaataaatcagcggaaattatctattttctacagtgtcaaaacaacactttctatgttggagttgggagaaaaccaattcacctcttttcccaaccagcagaaacacgttgcatctcccgagtgtcccagggagaagaaagaagagaaacaagagaaggtggagcccgggtactgggggcttccgctgaagagcacctttcccaccgcaccttaa

SEQ ID NO: 17232 - DNA, 115 bp, Homo sapiens
  MAP TO AL133520.2; EXPRESSED IN FETAL LIVER, SIGNAL = 3.2; EXPRESSED IN PLACENTA, SIGNAL =   3; EXPRESSED IN LUNG, SIGNAL = 3.3; EXPRESSED IN ADULT LIVER, SIGNAL = 3.5; EXPRESSED IN BONE MARROW, SIGNAL =   3; EXPRESSED IN HELA, SIGNAL = 1.9; SWISSPROT HIT: P07324, EVALUE 7.90e+00; NT HIT: U29185.1, EVALUE 4.00e-07; EST_HUMAN HIT: AW949104.1, EVALUE 2.00e-06
gtaggagttttcagaacagcagcctcagcatcacctgggaagttgttagcaatgcagattctcaggccagtctcagacctttgattcagaagctttggaatggcagcctggcaag

SEQ ID NO: 17233 - DNA, 246 bp, Homo sapiens
  MAP TO AC019325.3; EXPRESSED IN PLACENTA, SIGNAL = 0.89; EXPRESSED IN LUNG, SIGNAL = 1.5; EXPRESSED IN ADULT LIVER, SIGNAL = 0.88; EXPRESSED IN BONE MARROW, SIGNAL = 0.88; EXPRESSED IN HELA, SIGNAL = 1.6; SWISSPROT HIT: P21851, EVALUE 7.00e-44; NT HIT: gi4557468, EVALUE 0.00e+00; EST_HUMAN HIT: AL539834.1, EVALUE 0.00e+00
cattggatttgaatctgctatgagatcccgtagagaatccagaaatccctgatcttccaccatttgggcattgatatcatggagttttgccacgcagactgctgctgttttccgaacatagggatcctcatccttcaagcacttgcggagcggctcacagagatattctgtaattttgtctacccggatgcaccccatggttctgactgccaaggctcgaatcaaaggattaggatcttcacagtc

SEQ ID NO: 17234 - DNA, 197 bp, Homo sapiens
  MAP TO CHR22_83.0; EXPRESSED IN HELA, SIGNAL =   2; SWISSPROT HIT: Q9UJY5, EVALUE 2.00e-10; NT HIT: gi14778723, EVALUE 1.00e-107; EST_HUMAN HIT: BG030268.1, EVALUE 1.00e-107
ggagaagcagcagccaaccccccggctcacactccgggacctgcagaataagagcagcagctgcagctcccccagctccagcgccaccagccttctccacaccgtgtccccagagccccccaggcctccgcagcagcccgtaccaaccgagctctcactggccagcatcactgtgcccctggagtccatcaaaccca

SEQ ID NO: 17235 - DNA, 56 bp, Homo sapiens
  MAP TO CHR22_147.0; EXPRESSED IN HELA, SIGNAL = 0.7; NT HIT: AB008681.1, EVALUE 2.00e-07; EST_HUMAN HIT: AV759395.1, EVALUE 2.00e-14
cactggattaaagccttcttcctcggcaatacctgttgtctcagtgactggcttcc

SEQ ID NO: 17236 - DNA, 155 bp, Homo sapiens
  MAP TO AC013613.3; EXPRESSED IN HELA, SIGNAL = 1.2; EXPRESSED IN PLACENTA, SIGNAL = 2.5; EXPRESSED IN LUNG, SIGNAL = 2.6; EXPRESSED IN ADULT LIVER, SIGNAL = 2.3; EXPRESSED IN FETAL LIVER, SIGNAL = 1.9; EXPRESSED IN BONE MARROW, SIGNAL = 1.8; NT HIT: AL163249.2, EVALUE 4.00e-42; EST_HUMAN HIT: BF510078.1, EVALUE 9.00e-50; SWISSPROT HIT: O28579, EVALUE 8.80e-01
ctgcacactcatccatggagtggcactgagaggtgacagcgtgctggccgtcctcgtagccgtcgcttgctctcggcgcctcctctgcctgggctcccactttggcggcacttgaggagaccttcagcccaccgctgcactgtgggagccccttt

SEQ ID NO: 17237 - DNA, 304 bp, Homo sapiens
  MAP TO AC020588.4; EXPRESSED IN FETAL LIVER, SIGNAL = 2.7; EXPRESSED IN BONE MARROW, SIGNAL = 2.5; EXPRESSED IN LUNG, SIGNAL = 8.4; EXPRESSED IN ADULT LIVER, SIGNAL = 5.3; EXPRESSED IN HELA, SIGNAL = 4.3; NT HIT: gi14744017, EVALUE 0.00e+00; EST_HUMAN HIT: BG763033.1, EVALUE 0.00e+00; SWISSPROT HIT: Q13115, EVALUE 4.00e-51
ctaacagctgggagaggtggtgatggggctgtgcaggtagggcaggctgctgggggccgagtgcacgcccacggagaccggaaagctgaagacgaactgcgaggtgggggtggcgggggtcttgacccgctcccgcaggggtcccgaggggctagcagcctccgcagcacaggacgtggccagcacctgggactcgaactgcagcagctgccccatgaagctgaagttgggcgagatgatgctgcggcgctgcttaacgaactcgaaggcctcctccagcctcacccgtttcttcatcatcagg

SEQ ID NO: 17238 - DNA, 366 bp, Homo sapiens
  MAP TO CHR22_122.0; EXPRESSED IN FETAL LIVER, SIGNAL = 0.8; EXPRESSED IN BONE MARROW, SIGNAL = 0.9; EXPRESSED IN PLACENTA, SIGNAL = 0.76; EXPRESSED IN LUNG, SIGNAL = 0.96; EXPRESSED IN ADULT LIVER, SIGNAL = 0.87; EXPRESSED IN HELA, SIGNAL = 0.55; EST_HUMAN HIT: AA601190.1, EVALUE 5.00e-01
gagcttagggctcaggtaaagtccaacgttgtcaacaacttaggtcctgatggtgatgatgatggtgatggtgatgatgatgatgaggatggtgatgatgatggcaataatgatgatgatgatgatggtgatgatgtgatggtgatgatgatgatggtgatgaagatgtgatggtgatgatgatgatggtgatgaggacaatggtgttgatggtgatgatcataatgatgatgatgactgataatggcgatgatgatggtgataatgatggtgatgatgatggtggtgatgatggtgatgatggtgatggtgctaatgatggtgatgatgataatgatggtgatggtgttgatgacaatgatcata

SEQ ID NO: 17239 - DNA, 285 bp, Homo sapiens
  MAP TO AC018671.5; EXPRESSED IN BONE MARROW, SIGNAL = 1.7; EXPRESSED IN PLACENTA, SIGNAL = 1.6; EXPRESSED IN LUNG, SIGNAL = 1.6; EXPRESSED IN ADULT LIVER, SIGNAL = 1.7; EXPRESSED IN HELA, SIGNAL = 2.8; EXPRESSED IN FETAL LIVER, SIGNAL = 1.8; NT HIT: AJ006345.1, EVALUE 1.00e-15; EST_HUMAN HIT: BE301300.1, EVALUE 8.00e-24; SWISSPROT HIT: P11369, EVALUE 2.00e-28
atgagtattgacgtaaaagtcctcaacagaatactagcaaaccagattcaaaagatcattcttcgtgaccaagtgggatttatccctcggatgcaaggatggttcagcatacatagatcaatcaatgtgatccatcttatcaacagaatgaagaataaaagccatataatcatttcaattgatactgaaaaagtgtttgatgaagttcaacatcatatcatgacaaaaacccttgagaaactggttatggaaggaacatacctgaacatcataaacgccatatag

SEQ ID NO: 17240 - DNA, 134 bp, Homo sapiens
  MAP TO CHR22_138.0; EXPRESSED IN HELA, SIGNAL = 0.97; EXPRESSED IN PLACENTA, SIGNAL = 0.35; EST_HUMAN HIT: AV699840.1, EVALUE 6.60e-01; SWISSPROT HIT: P09352, EVALUE 5.90e+00; NT HIT: AE006932.1, EVALUE 7.00e+00
ggcaaccgtgacgtggtcgggcagtggcccaacagtggtcattgggaacattccccgggtgtctcggggggtgtcacagagaccagatgtgccctgaggctcttgtaccatcgcacaggaggacaccagatcag

SEQ ID NO: 17241 - DNA, 187 bp, Homo sapiens
  MAP TO AL133553.2; EXPRESSED IN ADULT LIVER, SIGNAL = 1.2; EXPRESSED IN PLACENTA, SIGNAL =   1; EXPRESSED IN HELA, SIGNAL = 0.54; EXPRESSED IN FETAL LIVER, SIGNAL = 0.85; EXPRESSED IN BONE MARROW, SIGNAL = 0.85; NT HIT: gi14730477, EVALUE 1.00e-91; EST_HUMAN HIT: AV647669.1, EVALUE 2.00e-91; SWISSPROT HIT: P35440, EVALUE 2.00e-16
tatttccaacactcacttgggcaagggtcactgttgcaaaaatcactctggacatcactcccttcgcatttccttcctccatactggggcacagggtcggagcagccccttgttctctgtctggcacctcctccacatgacacagaacaggcactccaactggcccaagtcgcccacttgccatgaa

SEQ ID NO: 17242 - DNA, 200 bp, Homo sapiens
  MAP TO CHR22_128.0; EXPRESSED IN BONE MARROW, SIGNAL = 1.7; EXPRESSED IN HELA, SIGNAL = 1.4; EXPRESSED IN HEART, SIGNAL = 1.9; EXPRESSED IN FETAL LIVER, SIGNAL = 1.9; EXPRESSED IN PLACENTA, SIGNAL =   2; EXPRESSED IN ADULT LIVER, SIGNAL = 1.9; NT HIT: Y09795.1, EVALUE 2.80e+00; EST_HUMAN HIT: F26963.1, EVALUE 2.60e-01; SWISSPROT HIT: Q14587, EVALUE 7.40e-02
tgacattaggataggccctgtggatctgcagggagcacccaggatatttattgggctcacagacgcacacgacattaggataggccctgtggatctgcagggagcacccaggatatttattgggctcacagacgcacacaatgttaggatagaccctgtggatccacagggagcacccagttgtgctcttggccttaaac

SEQ ID NO: 17243 - DNA, 94 bp, Homo sapiens
  MAP TO AC016672.4; EXPRESSED IN HELA, SIGNAL = 0.55; EXPRESSED IN LUNG, SIGNAL = 0.6; NT HIT: AF386077.2, EVALUE 7.40e-02; SWISSPROT HIT: Q9Z7A0, EVALUE 4.70e+00
gcccctggccagtgccatggatgtctacggacccaaagaaaggcctccacatgagcagatccagctgtgtggggcccaatgcttctatcgttga

SEQ ID NO: 17244 - DNA, 102 bp, Homo sapiens
  MAP TO CHR22_141.0; EXPRESSED IN HELA, SIGNAL = 1.3; SWISSPROT HIT: P35626, EVALUE 3.00e-14; NT HIT: X69117.1, EVALUE 1.00e-50; EST_HUMAN HIT: BG391508.1, EVALUE 1.00e-50
ataaaggaatatgaaaaacttgataatgaggaagaccgcctttgcagaagtcgacaaatttatgatgcctacatcatgaaggaacttctttcctgttcacat

SEQ ID NO: 17245 - DNA, 221 bp, Homo sapiens
  MAP TO CHR21_64.0; EXPRESSED IN FETAL LIVER, SIGNAL = 1.1; EXPRESSED IN LUNG, SIGNAL = 0.87; EXPRESSED IN PLACENTA, SIGNAL = 0.77; EXPRESSED IN HELA, SIGNAL = 3.7; EXPRESSED IN ADULT LIVER, SIGNAL = 0.65; NT HIT: gi14780530, EVALUE 1.00e-121; EST_HUMAN HIT: AA575913.1, EVALUE 2.00e-98; SWISSPROT HIT: Q9Y426, EVALUE 2.00e-37
ctacgtgcagggctccacgggggcaccgttcatggtgttcttgtttctgtgcctggagagcagcttcttgttcaggatcctggtgagggtgatgcctttcctccgggaaccctctggctgctccaggaacacaaggtcattgtgtgactgactcatgcctgggtctttctgttgatgccgccggcggaagaacagctttgcacctttccttagaattcctc

SEQ ID NO: 17246 - DNA, 17 bp, Homo sapiens
  MAP TO CHR22_127.0; EXPRESSED IN HEART, SIGNAL = 2.8; EXPRESSED IN LUNG, SIGNAL = 3.2; EXPRESSED IN PLACENTA, SIGNAL = 3.7; EXPRESSED IN ADULT LIVER, SIGNAL = 3.3; EXPRESSED IN HELA, SIGNAL = 2.3; EXPRESSED IN FETAL LIVER, SIGNAL = 3.2; NT HIT: U19817.1, EVALUE 2.40e-01
cagtcctccaccgtcat

SEQ ID NO: 17247 - DNA, 413 bp, Homo sapiens
  MAP TO AF168787.1; EXPRESSED IN FETAL LIVER, SIGNAL = 0.6; EXPRESSED IN BONE MARROW, SIGNAL = 0.52; EXPRESSED IN PLACENTA, SIGNAL = 0.59; EXPRESSED IN ADULT LIVER, SIGNAL = 0.73; EXPRESSED IN HELA, SIGNAL = 0.81; SWISSPROT HIT: Q9UHJ6, EVALUE 6.00e-72; EST_HUMAN HIT: BE281398.1, EVALUE 0.00e+00; NT HIT: gi11426863, EVALUE 0.00e+00
ctaagattccttctggttgaggtgtctccggagcatgaccagagctgccccgacagctgcatccacatcctgcccaaaggacatgggcaaagggaaagccctctgcacctcctgcttcagcacgtcattcctggacagcgcactcccactgcccatcaccctctccacgccccactcctggagctgctgaatcggaagcatggagtgcaggttctgaacaatgcctcggcacagagcccgggtcacgtgccccagggagaggtcggaggaggagattctggtcactgaggccagctggtccggcaggtgcctctcccccagcactgtcggggtgatggtcaggtgggtatctctctgctgcacagctgcctgaatcatgcgtgaatacacagtggattcttcaacctccaggc

SEQ ID NO: 17248 - DNA, 177 bp, Homo sapiens
  MAP TO AC022490.3; EXPRESSED IN HELA, SIGNAL = 1.3; SWISSPROT HIT: P16157, EVALUE 2.60e-02; EST_HUMAN HIT: BG779885.1, EVALUE 1.00e-70; NT HIT: gi14762261, EVALUE 9.00e-71
ttttcgttttcttttcttgttttggtttgctttttgctttacctgactccagaagcttcttgacacaggctctctgttggttttcacaagccaaatagagtggagtgcccaggtggctgatcttatggtcaatgttgcccccataagctataagagagttgacacactccacgtggc

SEQ ID NO: 17249 - DNA, 76 bp, Homo sapiens
  MAP TO AL159176.2; EXPRESSED IN LUNG, SIGNAL = 0.82; EXPRESSED IN FETAL LIVER, SIGNAL = 0.7; EXPRESSED IN ADULT LIVER, SIGNAL =   1; EXPRESSED IN BONE MARROW, SIGNAL = 0.63; EXPRESSED IN HELA, SIGNAL = 0.53; EXPRESSED IN PLACENTA, SIGNAL = 0.92; EST_HUMAN HIT: BI598972.1, EVALUE 3.00e-35; NT HIT: gi14729707, EVALUE 2.00e-35
tatatttcatgttgttccaagcagatataaatttggtttttagcttgtcaacttcatctgttcctgtagcctccat

SEQ ID NO: 17250 - DNA, 146 bp, Homo sapiens
  MAP TO AL160313.1; EXPRESSED IN PLACENTA, SIGNAL = 1.6; EXPRESSED IN LUNG, SIGNAL = 1.8; EXPRESSED IN FETAL LIVER, SIGNAL = 1.7; EXPRESSED IN ADULT LIVER, SIGNAL = 1.8; EXPRESSED IN HELA, SIGNAL = 1.3; EXPRESSED IN HEART, SIGNAL = 1.5; SWISSPROT HIT: Q9Y6A2, EVALUE 5.00e-19; EST_HUMAN HIT: R36281.1, EVALUE 5.00e-73; NT HIT: gi14754419, EVALUE 3.00e-73
ccatcaccttggccaggatgtccatggcggtgtaggtcagcatgtcctgcatggacactggggtctgcccatctgccttggcttctagaatctccaccagctgctcagccttctcgttgaatgtttccattaagctaaccaaggag

SEQ ID NO: 17251 - DNA, 178 bp, Homo sapiens
  MAP TO CHR22_230.0; EXPRESSED IN HELA, SIGNAL = 2.9; EXPRESSED IN FETAL LIVER, SIGNAL = 1.3; EXPRESSED IN PLACENTA, SIGNAL = 1.1; EXPRESSED IN LUNG, SIGNAL = 1.1; EXPRESSED IN BONE MARROW, SIGNAL = 1.6; EXPRESSED IN ADULT LIVER, SIGNAL = 1.1; SWISSPROT HIT: P11035, EVALUE 5.00e-01
tgtcagaacctcaggtgtatgccaatgagatagatcagaacctcaggcatgtacccgatgagacagatcagaacctcaggcgtgtacccggtgagacaggtcagaacctcaagcgtgtacctgttgagacaggtcagaacctcaggcgtgtagccagtgagacaggtcagaacctcag

SEQ ID NO: 17252 - DNA, 209 bp, Homo sapiens
  MAP TO AC010125.3; EXPRESSED IN BONE MARROW, SIGNAL =   7; EXPRESSED IN HELA, SIGNAL = 8.2; EXPRESSED IN FETAL LIVER, SIGNAL = 5.6; EXPRESSED IN LUNG, SIGNAL = 5.1; EXPRESSED IN PLACENTA, SIGNAL = 4.3; EXPRESSED IN ADULT LIVER, SIGNAL = 4.4; SWISSPROT HIT: P75328, EVALUE 7.20e+00; NT HIT: gi14747040, EVALUE 1.90e-01; EST_HUMAN HIT: AW408956.1, EVALUE 4.00e-03
tccacgtgcagacctgttggactgtttttctttcactgtgccgtaattctgaatacattttcatgcagctgatgaagacccaggtagaatcacttcctttaaactctaacagcacctctctgttggttaaactcgataagaggtttctggtttctgttccttcatattccactggacaggcaattatcaggcccacaggtgcacagcac

SEQ ID NO: 17253 - DNA, 312 bp, Homo sapiens
  MAP TO CHR21_10.0; EXPRESSED IN HELA, SIGNAL = 0.69; EXPRESSED IN FETAL LIVER, SIGNAL = 0.43; EXPRESSED IN ADULT LIVER, SIGNAL = 0.47; EXPRESSED IN BONE MARROW, SIGNAL = 0.44; SWISSPROT HIT: P26808, EVALUE 1.00e-20; NT HIT: AJ278581.1, EVALUE 1.00e-99; EST_HUMAN HIT: BE168410.1, EVALUE 1.00e-105
gtcagcagaatggttcactgttctgatcctcaaggatgccttctgtattctcctgcactctgactcccagtttctctttgcctttgaggatcccacagaccacacgtcccaacttacatggacagtcttgcctcaagattttagggatagccctcatctctttggtcaggcactggcccaaaatctaggccacttctcaagcccaggcactctggtccttcagtatgtggatgatttacttttggctaccagtttggaagcctcatgccagcaggctactctagatctcttgaactttgaagctaatcaaag

SEQ ID NO: 17254 - DNA, 98 bp, Homo sapiens
  MAP TO AC007029.3; EXPRESSED IN BONE MARROW, SIGNAL =   2; EXPRESSED IN LUNG, SIGNAL = 1.6; EXPRESSED IN HELA, SIGNAL = 2.8; EXPRESSED IN FETAL LIVER, SIGNAL = 1.9; EXPRESSED IN PLACENTA, SIGNAL = 1.3; EXPRESSED IN ADULT LIVER, SIGNAL = 1.6; SWISSPROT HIT: P39194, EVALUE 1.00e-04; NT HIT: AY046055.1, EVALUE 8.00e-08; EST_HUMAN HIT: AW337819.1, EVALUE 1.00e-13
agtcccagctactagggagactgaggtgagaaggtcacttgagcccaggtgtttgaggacacagtgagatgcaatggtaccactgtactccagcctgg

SEQ ID NO: 17255 - DNA, 258 bp, Homo sapiens
  MAP TO AC005627.2; EXPRESSED IN PLACENTA, SIGNAL =   4; EXPRESSED IN HELA, SIGNAL = 5.6; EXPRESSED IN ADULT LIVER, SIGNAL = 3.7; EXPRESSED IN FETAL LIVER, SIGNAL = 3.5; EXPRESSED IN BONE MARROW, SIGNAL = 5.8; NT HIT: AF109718.1, EVALUE 1.00e-114; EST_HUMAN HIT: BG015076.1, EVALUE 2.00e-79; SWISSPROT HIT: P37743, EVALUE 2.60e+00
aaggccaggttgtatttctgcatctcattgggccccagggtgtaccaccgctcgctcagcatctggctgatggtctggttatcctggttagggtgaccctggtgcgccctgccagggcctggtgccgcttgctgaagatcatgaccgccactcatgggccaccagatgtggtccttgtcccatttgttggggttgcgtccatccttatcagaagatgagtcctgttccttgcgcagggcactgagggactgggcctga

SEQ ID NO: 17256 - DNA, 273 bp, Homo sapiens
  MAP TO AC013341.3; EXPRESSED IN LUNG, SIGNAL = 2.4; EXPRESSED IN HELA, SIGNAL = 0.9; EXPRESSED IN ADULT LIVER, SIGNAL = 2.7; EST_HUMAN HIT: BE276563.1, EVALUE 3.70e-01; NT HIT: gi16171871, EVALUE 2.50e-01
aaaaaccatctgtatcctgtctactcaagacttcatggcacttttccatatctttagagacatcactatacacacatgtacgcacaaatgcgcgcgcgcacacacacacacacacacacacacacatatacacagaactaggctgatgagatatgtgtttcaagaagtccttgtcagcaacagtccagttcaaagcatctgcaaacctacaggcagccctgtaattgtcataaagtcagagcttgaggtgagcagctggcttggaaagtttgg

SEQ ID NO: 17257 - DNA, 159 bp, Homo sapiens
  MAP TO AL160231.1; EXPRESSED IN FETAL LIVER, SIGNAL = 0.8; EXPRESSED IN BONE MARROW, SIGNAL = 0.71; EXPRESSED IN HELA, SIGNAL = 0.74; EXPRESSED IN LUNG, SIGNAL = 0.74; EXPRESSED IN PLACENTA, SIGNAL = 0.75; NT HIT: gi14749996, EVALUE 2.00e-84; EST_HUMAN HIT: BG610879.1, EVALUE 2.00e-84; SWISSPROT HIT: P49816, EVALUE 2.00e-03
ctctggttttttcattatctgaatactgaacatgtgatttttcattggatatattacaataaggacatcaccaaattctgtgggaataattcctctcctgtagtctctagtatgctctgaccaaacaatgtgcacttcatcatttcccaaatgtctcaa

SEQ ID NO: 17258 - DNA, 180 bp, Homo sapiens
  MAP TO AL137068.1; EXPRESSED IN HELA, SIGNAL = 1.7; EXPRESSED IN FETAL LIVER, SIGNAL = 1.8; EXPRESSED IN BONE MARROW, SIGNAL = 1.7; EXPRESSED IN PLACENTA, SIGNAL = 2.7; EXPRESSED IN ADULT LIVER, SIGNAL = 2.3; EXPRESSED IN LUNG, SIGNAL = 2.6; NT HIT: Z99107.1, EVALUE 6.30e-01; EST_HUMAN HIT: AL040858.1, EVALUE 2.00e-94; SWISSPROT HIT: P09661, EVALUE 1.50e-02
atataagcaagttgaaaccgcttcaagatttgatttctctgatcctagttgaaaatccagttgtgacccttcctcattacctccagtttaccattttccacctccgttcattggaaagtttggaaggtcagccagtaaccactcaggatagacaggaggcttttgagagattcagtttag

SEQ ID NO: 17259 - DNA, 214 bp, Homo sapiens
  MAP TO AC020996.4; EXPRESSED IN BONE MARROW, SIGNAL = 4.3; EXPRESSED IN HELA, SIGNAL = 1.7; EXPRESSED IN PLACENTA, SIGNAL = 7.1; EXPRESSED IN LUNG, SIGNAL = 6.1; EXPRESSED IN FETAL LIVER, SIGNAL = 3.9; EXPRESSED IN ADULT LIVER, SIGNAL = 5.6; NT HIT: AL163227.2, EVALUE 8.00e-44; EST_HUMAN HIT: BE062167.1, EVALUE 1.00e-55; SWISSPROT HIT: P52746, EVALUE 4.80e+00
tgatatggacaatgaagtccaggatgaggtgttctcagatggagatgagaaacttattgggaactggagtaaagatcacccttcttatgctttagcaaagagactggcagcattttgcccctgccctggagatctgtggaactttgaacttgagagagatgagttacagtatctggcagaagaaattcctaagcagcaagtgttcaagaagtga

SEQ ID NO: 17260 - DNA, 97 bp, Homo sapiens
  MAP TO AL136457.1; EXPRESSED IN FETAL LIVER, SIGNAL =   5; EXPRESSED IN LUNG, SIGNAL = 8.6; EXPRESSED IN ADULT LIVER, SIGNAL = 6.8; EXPRESSED IN HELA, SIGNAL =   1; NT HIT: M58532.1, EVALUE 7.70e-02; EST_HUMAN HIT: BE787369.1, EVALUE 7.00e+00; SWISSPROT HIT: P56941, EVALUE 8.10e+00
cccaatccagtcagatccaactgaagtttgaagtctgaccctggcaggggccctttttcaggctttctcagatgctcctgagggcagaaaatttgta

SEQ ID NO: 17261 - DNA, 90 bp, Homo sapiens
  MAP TO AC020550.2; EXPRESSED IN HELA, SIGNAL = 2.5; EXPRESSED IN ADULT LIVER, SIGNAL = 4.3; EXPRESSED IN PLACENTA, SIGNAL = 0.79; EXPRESSED IN LUNG, SIGNAL = 1.9; EXPRESSED IN FETAL LIVER, SIGNAL = 1.4; SWISSPROT HIT: P26772, EVALUE 4.00e-11; NT HIT: AF109872.1, EVALUE 1.00e-43; EST_HUMAN HIT: BG566213.1, EVALUE 2.00e-43
ggtggagagattcaaccagttagcgtgaaagttggagataaagttcttctcccagaatatggaggcaccaaagtagttctagatgacaag

SEQ ID NO: 17262 - DNA, 353 bp, Homo sapiens
  MAP TO AL136444.1; EXPRESSED IN FETAL LIVER, SIGNAL = 0.86; EXPRESSED IN HELA, SIGNAL = 2.4; EXPRESSED IN ADULT LIVER, SIGNAL = 1.3; EXPRESSED IN PLACENTA, SIGNAL = 0.97; EXPRESSED IN LUNG, SIGNAL =   1; EST_HUMAN HIT: BI753905.1, EVALUE 3.00e-05; SWISSPROT HIT: P35372, EVALUE 4.00e-58; NT HIT: gi4505514, EVALUE 0.00e+00
atacaccaagatgaagactgccaccaacatctacattttcaaccttgctctggcagatgccttagccaccagtaccctgcccttccagagtgtgaattacctaatgggaacatggccatttggaaccatcctttgcaagatagtgatctccatagattactataacatgttcaccagcatattcaccctctgcaccatgagtgttgatcgatacattgcagtctgccaccctgtcaaggccttagatttccgtactccccgaaatgccaaaattatcaatgtctgcaactggatcctctcttcagccattggtcttcctgtaatgttcatggctacaacaaaatacaggcaag

SEQ ID NO: 17263 - DNA, 195 bp, Homo sapiens
  MAP TO AL121993.2; EXPRESSED IN ADULT LIVER, SIGNAL = 1.1; EXPRESSED IN HELA, SIGNAL = 1.2; EXPRESSED IN PLACENTA, SIGNAL = 0.79; EXPRESSED IN LUNG, SIGNAL = 0.75; SWISSPROT HIT: Q9UNX4, EVALUE 6.00e-33; NT HIT: gi14748718, EVALUE 1.00e-106; EST_HUMAN HIT: BF819666.1, EVALUE 1.00e-105
cttggacccagatgccagtctgcctcctagctgatcatacttcaaggtagtgatagctgctttgtgaccattgaaggtcacatttccttccccactcaggagactgaagattcggatcgacccatcctcatacccaacagctaagtgtagcccatctggggaggggcataagcaagtaacttcttgtttaagccc

SEQ ID NO: 17264 - DNA, 91 bp, Homo sapiens
  MAP TO AL136115.5; EXPRESSED IN FETAL LIVER, SIGNAL = 0.84; EXPRESSED IN BONE MARROW, SIGNAL = 0.67; EXPRESSED IN LUNG, SIGNAL = 0.76; EXPRESSED IN ADULT LIVER, SIGNAL = 0.84; EXPRESSED IN HELA, SIGNAL = 0.53; NT HIT: L39000.1, EVALUE 3.00e-44; EST_HUMAN HIT: AW954482.1, EVALUE 4.00e-44; SWISSPROT HIT: Q9FUM1, EVALUE 3.60e+00
ctggctcttcacgaaatttggtttttaacaggtttaaccaatcatctactatctgattagggggtggagctccatcatcaaatggccaatc

SEQ ID NO: 17265 - DNA, 124 bp, Homo sapiens
  MAP TO AC012172.3; EXPRESSED IN HELA, SIGNAL = 0.64; EXPRESSED IN FETAL LIVER, SIGNAL = 1.4; EXPRESSED IN HEART, SIGNAL = 2.9; EXPRESSED IN PLACENTA, SIGNAL = 1.6; EXPRESSED IN LUNG, SIGNAL = 1.8; EXPRESSED IN BONE MARROW, SIGNAL = 1.3; EXPRESSED IN ADULT LIVER, SIGNAL = 1.7; NT HIT: gi15295589, EVALUE 7.00e-06; EST_HUMAN HIT: AA481166.1, EVALUE 2.00e-03
aacaatcaccttgatgcagaaccacctcagctatttcaccattagtcaataaacaaacaaatagagcctcattatcaatgttaaaattttctttgatatctacttcttccagcttacagacacc

SEQ ID NO: 17266 - DNA, 116 bp, Homo sapiens
  MAP TO AL035464.20; EXPRESSED IN FETAL LIVER, SIGNAL = 1.3; EXPRESSED IN ADULT LIVER, SIGNAL = 1.3; EXPRESSED IN BONE MARROW, SIGNAL = 1.2; EXPRESSED IN HEART, SIGNAL = 1.2; EXPRESSED IN PLACENTA, SIGNAL = 1.2; EXPRESSED IN LUNG, SIGNAL = 1.4; EXPRESSED IN HELA, SIGNAL = 0.99; SWISSPROT HIT: P43213, EVALUE 2.70e+00; EST_HUMAN HIT: BF934333.1, EVALUE 3.60e-02; NT HIT: AL115398.1, EVALUE 2.40e-02
atccctcaggaaggtggtgtgccacagacaggggaagatgtccagacacacacgctctttgctgatgcccacctgctgtgatagacagctggtagagatggaggtggaggagtgtt

SEQ ID NO: 17267 - DNA, 263 bp, Homo sapiens
  MAP TO AL133552.2; EXPRESSED IN LUNG, SIGNAL = 0.9; EXPRESSED IN FETAL LIVER, SIGNAL = 2.9; EXPRESSED IN BONE MARROW, SIGNAL = 3.2; EXPRESSED IN HELA, SIGNAL = 2.4; EXPRESSED IN HEART, SIGNAL = 3.1; NT HIT: AF336797.2, EVALUE 9.50e-01; SWISSPROT HIT: P35085, EVALUE 2.20e-01
agactgatggcctggctctgccccatagagtggaggaacccccggggaggttgtattacctcgaaggggtgggcgagccagggctgctgaacctgttcgtgctagaccccaggtcccctgtccggctctgtgaagggctctccaggggtggcagaagggtgctgggagagctatgctcgggagagaagatgaatggacttggggagtcctggaagttggtgcaccaggtcctggatgccttaaataaaacttctcgagacaaa

SEQ ID NO: 17268 - DNA, 152 bp, Homo sapiens
  MAP TO AL137846.1; EXPRESSED IN PLACENTA, SIGNAL = 3.1; EXPRESSED IN LUNG, SIGNAL = 4.1; EXPRESSED IN HELA, SIGNAL =  12; NT HIT: gi14744287, EVALUE 2.00e-80; SWISSPROT HIT: Q09841, EVALUE 5.00e-09
gaggaggaagccaagaatctggtgagcgaagccatcgcagctggcatcttcaacgacctgggctccggaagcaacattgacctctgcgtcatcagcaagaacaagctggattttctccgcccatacacagtgcccaacaagaaggggaccag

SEQ ID NO: 17269 - DNA, 136 bp, Homo sapiens
  MAP TO AF238280.1; EXPRESSED IN HELA, SIGNAL = 1.7; EXPRESSED IN FETAL LIVER, SIGNAL = 5.3; EXPRESSED IN LUNG, SIGNAL = 8.1; EXPRESSED IN PLACENTA, SIGNAL = 7.6; EXPRESSED IN ADULT LIVER, SIGNAL = 8.3; EXPRESSED IN BONE MARROW, SIGNAL = 5.7; NT HIT: AL163246.2, EVALUE 2.00e-25; EST_HUMAN HIT: BF959202.1, EVALUE 2.00e-35; SWISSPROT HIT: P53283, EVALUE 3.50e+00
ctttgctccagttcccaagaaattcctcatctccatctgagatgacttcagcctggatttcattgtccatatcattttcagcattttggtcaaagccattcagtaagtctctaggaggttccaaattgtcccacat

SEQ ID NO: 17270 - DNA, 225 bp, Homo sapiens
  MAP TO CHR22_4.0; EXPRESSED IN LUNG, SIGNAL = 2.4; EXPRESSED IN BONE MARROW, SIGNAL = 1.4; EXPRESSED IN ADULT LIVER, SIGNAL = 2.1; EXPRESSED IN HELA, SIGNAL = 1.3; EXPRESSED IN FETAL LIVER, SIGNAL = 1.7; NT HIT: gi10946611, EVALUE 1.00e-05; EST_HUMAN HIT: BF246708.1, EVALUE 1.00e-06; SWISSPROT HIT: O04379, EVALUE 3.30e-02
ggaatgtcatgtttgctggttttcaaggtgatttgtatcctgcccaatgatgacaaacgtagatatgacagcataaaaagatacctatgtaccaaatgcccaattccaagccagtgtgtggtgaaaaagaccttagaaaaagtccaggcaaggaccatcgtcaccaagattgcccagcagatgaattgcaagatgggaggagccctctggaaggtggagacagac

SEQ ID NO: 17271 - DNA, 165 bp, Homo sapiens
  MAP TO AC022215.2; EXPRESSED IN FETAL LIVER, SIGNAL = 2.8; EXPRESSED IN ADULT LIVER, SIGNAL = 5.1; EXPRESSED IN BONE MARROW, SIGNAL = 4.9; EXPRESSED IN HELA, SIGNAL = 2.1; NT HIT: gi9635487, EVALUE 4.00e-76; SWISSPROT HIT: P04027, EVALUE 1.00e-14; EST_HUMAN HIT: AW847812.1, EVALUE 2.00e-78
ttgcttggttggcaagtttttgggctctatccttgagtttgtttatgttgtcatacaccaggccagattgatttaggtaaaaacaacacttttcatttaagaatatacagagtcctcctttttcagcagtgagtaagtcaaggcctcggcggttttggaggacaa

SEQ ID NO: 17272 - DNA, 235 bp, Homo sapiens
  MAP TO AL136382.1; EXPRESSED IN FETAL LIVER, SIGNAL = 2.2; EXPRESSED IN BONE MARROW, SIGNAL = 1.6; EXPRESSED IN HEART, SIGNAL = 2.1; EXPRESSED IN LUNG, SIGNAL = 2.1; EXPRESSED IN ADULT LIVER, SIGNAL = 2.5; EXPRESSED IN PLACENTA, SIGNAL = 2.8; EXPRESSED IN HELA, SIGNAL = 2.2; EST_HUMAN HIT: BF878237.1, EVALUE 5.00e-46; SWISSPROT HIT: P14074, EVALUE 7.20e-01; NT HIT: gi11467755, EVALUE 3.00e-03
agagtttcagtacctcacccagtcttatgaactaacctggcatgacctctatgttatcctctcttccaccctcaccccagaagaccgagaccatatctggaccctagctccgtcacatgctaatacaattcatcaccaagctcctgcccagcctactggcacagaggcagtccccaaccaggaccccactgggattatcaagacaggacctctggacaccgccattgagaccaca

SEQ ID NO: 17273 - DNA, 253 bp, Homo sapiens
  MAP TO CHR22_153.0; EXPRESSED IN BONE MARROW, SIGNAL = 0.43; EXPRESSED IN ADULT LIVER, SIGNAL = 0.44; EXPRESSED IN HELA, SIGNAL = 2.4; EXPRESSED IN FETAL LIVER, SIGNAL = 0.4; SWISSPROT HIT: P98165, EVALUE 2.60e+00; NT HIT: gi5454137, EVALUE 1.50e-02; EST_HUMAN HIT: BF096131.1, EVALUE 2.20e-02
gtctttctctggtctgggcacacccagctgcagggctcacctttgcctgtaagaatacagcccccaaacacagtcagtaccccaagaacagtccctgccatctctggcggcacagatgctggccaagctgcagctgccagtgctgcccagggagctggagagctgccggccaagagcccagcccctctgggtagagcaggagccagtgccaccactccctgtgggattcggattaaggacacacccacccaaa

SEQ ID NO: 17274 - DNA, 405 bp, Homo sapiens
  MAP TO AC005283.2; EXPRESSED IN LUNG, SIGNAL = 0.69; EXPRESSED IN PLACENTA, SIGNAL =   1; EXPRESSED IN HELA, SIGNAL = 0.55; EXPRESSED IN FETAL LIVER, SIGNAL = 0.53; EST_HUMAN HIT: BE536489.1, EVALUE 0.00e+00; NT HIT: gi14741311, EVALUE 0.00e+00; SWISSPROT HIT: Q62786, EVALUE 3.00e-04
ctggctgcagcaccctgatcaccagcaggttggaggtcctctccgccagttgcgtccaggtgttgttgtagttcttccaccacagctctgccacacactggtacttgcctgcttccgtgtcactggctcggctgatgattaggcggacgttgttgctggactcagccttctcggtggcagttcgggttcggaagctggaggacctgtccccccactggacccctccgtcccgggtgaaggtcaccaagtcatggaactccaccgtgcccaccggctggaaccgccatgtcactgacacggggacctgggcagggtagtggggtttgatgatacactgcaagtcaaaggagtcgctgtaggtcacccccggtgtccgggagatggctgtgactgcgaagcccattt

SEQ ID NO: 17275 - DNA, 123 bp, Homo sapiens
  MAP TO AL135920.4; EXPRESSED IN FETAL LIVER, SIGNAL = 2.5; EXPRESSED IN BONE MARROW, SIGNAL = 2.5; EXPRESSED IN HEART, SIGNAL = 2.8; EXPRESSED IN HELA, SIGNAL = 3.8; EXPRESSED IN LUNG, SIGNAL = 3.7; EXPRESSED IN ADULT LIVER, SIGNAL = 3.9; EXPRESSED IN PLACENTA, SIGNAL = 3.4; SWISSPROT HIT: P11369, EVALUE 1.20e+00; NT HIT: AB012223.1, EVALUE 1.00e-01; EST_HUMAN HIT: BF817943.1, EVALUE 4.00e-05
gtaatatgcgttcacattcccaccaacagcgtacaacactttgcttttctccaaaacctcatcgagacttgttgtattatctttctgataatagctatccaaaaaggtgagataatagctcat

SEQ ID NO: 17276 - DNA, 164 bp, Homo sapiens
  MAP TO AL136987.1; EXPRESSED IN LUNG, SIGNAL = 2.8; EXPRESSED IN ADULT LIVER, SIGNAL = 2.2; EXPRESSED IN HELA, SIGNAL =   2; EXPRESSED IN PLACENTA, SIGNAL = 1.9; EXPRESSED IN FETAL LIVER, SIGNAL = 1.6; EXPRESSED IN BONE MARROW, SIGNAL = 1.7; EXPRESSED IN HEART, SIGNAL = 1.8; EST_HUMAN HIT: AL037176.3, EVALUE 2.00e-87; SWISSPROT HIT: Q08116, EVALUE 8.00e-27; NT HIT: gi4506514, EVALUE 2.00e-87
ctggtcaaaatgtctttggaagtttcctaaagtctgaattcagtgaggagaatattgagttctggctggcttgtgaagactataagaaaacagagtctgatcttttgccctgtaaagcagaagagatatataaagcatttgtgcattcagatgctgctaaacaa

SEQ ID NO: 17277 - DNA, 159 bp, Homo sapiens
  MAP TO CHR22_211.0; EXPRESSED IN BONE MARROW, SIGNAL = 1.8; EXPRESSED IN LUNG, SIGNAL = 1.2; EXPRESSED IN HELA, SIGNAL = 4.3; EXPRESSED IN PLACENTA, SIGNAL = 0.99; EXPRESSED IN ADULT LIVER, SIGNAL = 1.1; EXPRESSED IN FETAL LIVER, SIGNAL = 1.7; NT HIT: gi14518450, EVALUE 1.40e-01; SWISSPROT HIT: O15118, EVALUE 5.80e+00
tccttctcatcttagggtatttttccgtcatacttcctccacgaaggtaagtatcttcgtggactgatgcatacgcatagtggatacacttggctgcttccctttgcatctcctcctccctaactgaacagtagttgtgttcagcgaccggcccctcct

SEQ ID NO: 17278 - DNA, 146 bp, Homo sapiens
  MAP TO AL138781.2; EXPRESSED IN HEART, SIGNAL = 1.7; EXPRESSED IN PLACENTA, SIGNAL = 1.9; EXPRESSED IN LUNG, SIGNAL = 1.7; EXPRESSED IN HELA, SIGNAL = 2.2; EXPRESSED IN FETAL LIVER, SIGNAL = 1.9; EXPRESSED IN BONE MARROW, SIGNAL = 1.7; EST_HUMAN HIT: H70373.1, EVALUE 7.30e-01; NT HIT: AE000889.1, EVALUE 2.00e+00; SWISSPROT HIT: P07304, EVALUE 4.50e+00
gtgatcttagacctgatcccgtatgaaagcatcgtggtgacccgagcactggacggggacaaagcatttctggagaaacttggtgtttcttcagtcccttcgtgttacctgatctacccaaatgggtcgcatggattgattaacgt

SEQ ID NO: 17279 - DNA, 59 bp, Homo sapiens
  MAP TO CHR22_21.0; EXPRESSED IN HELA, SIGNAL = 2.7; EXPRESSED IN FETAL LIVER, SIGNAL = 1.7; EXPRESSED IN BONE MARROW, SIGNAL = 1.6; EXPRESSED IN LUNG, SIGNAL = 1.9; EXPRESSED IN ADULT LIVER, SIGNAL = 1.8; EXPRESSED IN PLACENTA, SIGNAL = 1.7; NT HIT: AF086788.1, EVALUE 2.00e-25; EST_HUMAN HIT: BG106058.1, EVALUE 7.00e-11
ctttcctggccctgtccctgcctcgcaagaagcgtgggcccaagcagcggcggccgggt

SEQ ID NO: 17280 - DNA, 104 bp, Homo sapiens
  MAP TO AL035633.18; EXPRESSED IN FETAL LIVER, SIGNAL = 1.5; EXPRESSED IN HELA, SIGNAL = 0.81; EXPRESSED IN PLACENTA, SIGNAL = 1.4; EXPRESSED IN LUNG, SIGNAL = 1.1; EXPRESSED IN ADULT LIVER, SIGNAL =   1; NT HIT: gi14755927, EVALUE 6.00e-52; SWISSPROT HIT: P38552, EVALUE 8.00e+00; EST_HUMAN HIT: AW956936.1, EVALUE 9.00e-52
aaattgttcccaccgtcctcactggtggatcccacactcactcccctcacccggcgggcttcccagtcatctctggaaagttcaactgggcctccctgtattcg

SEQ ID NO: 17281 - DNA, 121 bp, Homo sapiens
  MAP TO CHR22_228.0; EXPRESSED IN HELA, SIGNAL = 4.1; EXPRESSED IN FETAL LIVER, SIGNAL = 1.7; EXPRESSED IN BONE MARROW, SIGNAL =   2; EXPRESSED IN HEART, SIGNAL = 1.5; EXPRESSED IN LUNG, SIGNAL =   1; EXPRESSED IN PLACENTA, SIGNAL = 0.92; EXPRESSED IN ADULT LIVER, SIGNAL = 0.92; NT HIT: AB014460.1, EVALUE 6.20e+00; EST_HUMAN HIT: BG424174.1, EVALUE 2.00e-03
cagagccatgggcacagaaaagggagcctgggtaccccctgctggcagaggtgctggggcaggagcaggcgctccaggtcgcgcgcgaagtcagtgaggacccttttgagctccccgcaac

SEQ ID NO: 17282 - DNA, 135 bp, Homo sapiens
  MAP TO CHR21_21.0; EXPRESSED IN HELA, SIGNAL = 5.7; EXPRESSED IN FETAL LIVER, SIGNAL = 2.3; EXPRESSED IN HEART, SIGNAL = 1.9; EXPRESSED IN LUNG, SIGNAL = 1.2; EXPRESSED IN PLACENTA, SIGNAL = 1.1; EXPRESSED IN ADULT LIVER, SIGNAL = 1.5; EXPRESSED IN BONE MARROW, SIGNAL = 2.4; EST_HUMAN HIT: AW818339.1, EVALUE 6.70e-01
tgtgccttctcttgagtgtaagcaggacttgtcaacttgaagagattggctcctgtgattacatcattttaaataacaaagctgatattaaggtccaaaatcagttgactttgagtccaaaggagattatttcag

SEQ ID NO: 17283 - DNA, 14 bp, Homo sapiens
  MAP TO CHR21_25.0; EXPRESSED IN HELA, SIGNAL = 3.7; EXPRESSED IN HEART, SIGNAL = 1.5; EXPRESSED IN LUNG, SIGNAL = 0.99; EXPRESSED IN PLACENTA, SIGNAL = 0.88; EXPRESSED IN ADULT LIVER, SIGNAL = 1.1; EXPRESSED IN FETAL LIVER, SIGNAL = 1.9; EXPRESSED IN BONE MARROW, SIGNAL = 1.8
tcagaatttatccc

SEQ ID NO: 17284 - DNA, 126 bp, Homo sapiens
  MAP TO CHR22_170.0; EXPRESSED IN HEART, SIGNAL = 1.2; EXPRESSED IN BONE MARROW, SIGNAL = 1.2; EXPRESSED IN PLACENTA, SIGNAL =   2; EXPRESSED IN LUNG, SIGNAL = 1.2; EXPRESSED IN ADULT LIVER, SIGNAL = 1.2; EXPRESSED IN HELA, SIGNAL = 0.72; EXPRESSED IN FETAL LIVER, SIGNAL =   2; NT HIT: AF111103.1, EVALUE 4.20e-01; EST_HUMAN HIT: BI822402.1, EVALUE 1.60e-01; SWISSPROT HIT: P08424, EVALUE 7.80e+00
ctggaagcaacctctgctcctggtgctggcacagttagagtggcgtgggccacatttgctttggggagggaaacagcttctggagcctgcgtctctggtacccaggtgacagcagacccggccatg

SEQ ID NO: 17285 - DNA, 77 bp, Homo sapiens
  MAP TO CHR21_28.0; EXPRESSED IN FETAL LIVER, SIGNAL = 2.8; EXPRESSED IN BONE MARROW, SIGNAL = 3.6; EXPRESSED IN HEART, SIGNAL = 1.9; EXPRESSED IN PLACENTA, SIGNAL = 1.7; EXPRESSED IN LUNG, SIGNAL = 3.5; EXPRESSED IN HELA, SIGNAL =   4; EXPRESSED IN ADULT LIVER, SIGNAL = 3.6; NT HIT: AF156961.1, EVALUE 8.00e-32; EST_HUMAN HIT: H63980.1, EVALUE 8.00e-33
tggtggcaagcctcgtgttctctgacctggggttcttggcctcacggatttcaaggaatggaatcttgggccatgcg

SEQ ID NO: 17286 - DNA, 209 bp, Homo sapiens
  MAP TO CHR22_171.0; EXPRESSED IN BONE MARROW, SIGNAL = 1.2; EXPRESSED IN HELA, SIGNAL = 0.98; EXPRESSED IN HEART, SIGNAL =   2; EXPRESSED IN FETAL LIVER, SIGNAL = 1.1; EXPRESSED IN PLACENTA, SIGNAL = 1.4; EXPRESSED IN LUNG, SIGNAL = 1.3; EXPRESSED IN ADULT LIVER, SIGNAL = 1.3; NT HIT: AB003286.1, EVALUE 1.00e-114; EST_HUMAN HIT: BE780650.1, EVALUE 1.00e-102; SWISSPROT HIT: Q92523, EVALUE 6.00e-22
tgtggggctggggctgccgtacctgttgtagcagttgccatgtagcagggccttgccatagaggctgaggctggcctcatcttcggggtcataggagtaggattcctcatccagggccacgaagaaagcggcacgctcgatggcctccaaggcagccttattctttccagagctaaagaaggcctggcgtgcctgcgcccactccaccc

SEQ ID NO: 17287 - DNA, 204 bp, Homo sapiens
  MAP TO CHR21_66.0; EXPRESSED IN FETAL LIVER, SIGNAL = 1.2; EXPRESSED IN BONE MARROW, SIGNAL = 1.3; EXPRESSED IN PLACENTA, SIGNAL = 0.73; EXPRESSED IN LUNG, SIGNAL = 0.83; EXPRESSED IN ADULT LIVER, SIGNAL = 0.8; EXPRESSED IN HELA, SIGNAL = 3.8; SWISSPROT HIT: P23726, EVALUE 2.80e-01; NT HIT: gi16168368, EVALUE 1.80e-01; EST_HUMAN HIT: BF769991.1, EVALUE 2.70e-01
ctccccaggcaaaaggagttgctgcccattttctcgttcatgtgtctagtggcacttttgtatcatacgggccatgtgtctggtgcagcaccgcatccctcaccagaccgagtccctcaagggaaggcagatacctcactcatctttgcacccccagaaactagcacagcccctaaaacagagtttgtgcttccaaaatgtgtg

SEQ ID NO: 17288 - DNA, 66 bp, Homo sapiens
  MAP TO CHR21_33.0; EXPRESSED IN FETAL LIVER, SIGNAL = 1.9; EXPRESSED IN BONE MARROW, SIGNAL = 2.2; EXPRESSED IN HEART, SIGNAL = 1.5; EXPRESSED IN LUNG, SIGNAL = 1.3; EXPRESSED IN ADULT LIVER, SIGNAL = 1.5; EXPRESSED IN PLACENTA, SIGNAL = 1.1; EXPRESSED IN HELA, SIGNAL = 4.2; NT HIT: AE001133.1, EVALUE 2.90e+00; EST_HUMAN HIT: BE000340.1, EVALUE 7.00e-02
gcttacagtatgatctatgatattcagtaccctggagagcagcacaatatttcattgccttgtggg

SEQ ID NO: 17289 - DNA, 147 bp, Homo sapiens
  MAP TO CHR22_139.0; EXPRESSED IN PLACENTA, SIGNAL = 0.46; EXPRESSED IN LUNG, SIGNAL = 0.44; EXPRESSED IN HELA, SIGNAL = 2.1; EXPRESSED IN FETAL LIVER, SIGNAL = 0.41; EXPRESSED IN BONE MARROW, SIGNAL = 0.4; NT HIT: AF020551.1, EVALUE 7.80e+00; SWISSPROT HIT: O95644, EVALUE 3.40e+00; EST_HUMAN HIT: AW021449.1, EVALUE 1.90e-01
ctgggaggggagcaggacctctccataggcacagagatggcagatggcgagggtgcagaggggggcaggctgtcttggtggtgggaaggcacgggccttcctgctgactgcttgtgatttctcagtgaagaccttccctgggtggtg

SEQ ID NO: 17290 - DNA, 233 bp, Homo sapiens
  MAP TO AL132671.19; EXPRESSED IN FETAL LIVER, SIGNAL = 0.93; EXPRESSED IN HELA, SIGNAL = 0.54; NT HIT: gi4506578, EVALUE 4.00e-98; SWISSPROT HIT: P08922, EVALUE 3.00e-35; EST_HUMAN HIT: AW861313.1, EVALUE 1.20e+00
aaatcaacccatttcctcacctcataactcttcttggtaacaagatagtttttttagatatggatcaaaatcaagttgtgtggacgttttcagcagaaagagttatcagtgccgtttgctacacagctgataatgagatgggatattatgctgaaggggactcactctttcttctgcacttgcacaatcgctctagctctgaggtatttcactatgtaattcttccgaaataa

SEQ ID NO: 17291 - DNA, 172 bp, Homo sapiens
  MAP TO CHR21_69.0; EXPRESSED IN BONE MARROW, SIGNAL =  23; EXPRESSED IN ADULT LIVER, SIGNAL =  18; EXPRESSED IN HELA, SIGNAL =  18; EXPRESSED IN HEART, SIGNAL =  20; EXPRESSED IN FETAL LIVER, SIGNAL =  20; EXPRESSED IN PLACENTA, SIGNAL =  23; EXPRESSED IN LUNG, SIGNAL =  24; SWISSPROT HIT: P55347, EVALUE 8.00e-29; EST_HUMAN HIT: AL545010.1, EVALUE 4.00e-92; NT HIT: gi15320349, EVALUE 3.00e-92
gcatccactatttccattattagctttgttgtttgaaaaatgtgaacaatctacacagggctctgaaggcacaacttctgccagttttgatgtagacatcgaaaattttgtaagaaagcaagagaaggaagggaaacctttcttttgtgaagatccagaaactgataattta

SEQ ID NO: 17292 - DNA, 89 bp, Homo sapiens
  MAP TO AL121954.3; EXPRESSED IN LUNG, SIGNAL = 1.1; EXPRESSED IN HELA, SIGNAL = 0.59; EXPRESSED IN PLACENTA, SIGNAL = 0.95; EXPRESSED IN ADULT LIVER, SIGNAL = 0.95; EXPRESSED IN FETAL LIVER, SIGNAL = 0.7; EXPRESSED IN BONE MARROW, SIGNAL = 0.73; NT HIT: L78810.1, EVALUE 4.30e+00; EST_HUMAN HIT: BF028579.1, EVALUE 7.00e-43
tttttaccctgttgaagatttgctttaacttcaaaagtgatgacaagaaagtatggacaccccttcaggaccaacctgataagtcactg

SEQ ID NO: 17293 - DNA, 228 bp, Homo sapiens
  MAP TO AL138840.1; EXPRESSED IN HELA, SIGNAL = 1.2; EXPRESSED IN FETAL LIVER, SIGNAL = 2.8; EXPRESSED IN BONE MARROW, SIGNAL = 2.9; EXPRESSED IN PLACENTA, SIGNAL = 2.9; EXPRESSED IN ADULT LIVER, SIGNAL = 2.8; NT HIT: AB018491.1, EVALUE 1.00e-05; SWISSPROT HIT: P22333, EVALUE 4.40e+00; EST_HUMAN HIT: BF817215.1, EVALUE 2.00e-39
gtgatactgctgctgctgctcctgctgctgctgctgctgctcttcctgctgctgctgctgctcctgctgttagttggcccaagagcactgctaatagcgtggctcagtgatcagctcccagccctgtcccttggttcaaatgacttgggccatcctggtcaagtgttcttctctggtccaatcatttatggccaggggatggagttacagggtgtagacacagctgcc

SEQ ID NO: 17294 - DNA, 193 bp, Homo sapiens
  MAP TO AL137798.1; EXPRESSED IN LUNG, SIGNAL = 2.3; EXPRESSED IN PLACENTA, SIGNAL = 2.6; EXPRESSED IN BONE MARROW, SIGNAL = 1.9; EXPRESSED IN HELA, SIGNAL = 1.8; EXPRESSED IN FETAL LIVER, SIGNAL = 2.1; SWISSPROT HIT: Q00174, EVALUE 1.70e-01; EST_HUMAN HIT: BG494061.1, EVALUE 2.50e-01; NT HIT: gi16161778, EVALUE 1.00e-36
ccgctgcacaagctgggcctgccgctgctggccctccaggtaggcctgcagcttgcgccactaggaggcctgctcctcctgcagctgcctccgcaactccacgctctggagtaccagccccctgggctcttgcgtctccagctcaccagattgcagccacagagcctgctccagctgcagggaagggccctgg

SEQ ID NO: 17295 - DNA, 237 bp, Homo sapiens
  MAP TO AC016692.4; EXPRESSED IN HELA, SIGNAL = 3.1; EXPRESSED IN ADULT LIVER, SIGNAL = 2.9; NT HIT: gi16157411, EVALUE 4.00e-86; EST_HUMAN HIT: AL046307.1, EVALUE 6.00e-86
gaagaggaggctgcaaaatgggcccgggaagaagaagaagcccagcgtcgattagaggagaaccggctgcggatggaagaggaggcagccagactccggcatgaggaagaagaacggaagagaaaggagctggaggtccagcggcagaaggagttaatgcgccagaggcagcagcagcaagaggctctccggaggttgcagcagcagcagcagcaacaacagctggcgcagatgaag

SEQ ID NO: 17296 - DNA, 165 bp, Homo sapiens
  MAP TO AC011734.4; EXPRESSED IN FETAL LIVER, SIGNAL = 4.3; EXPRESSED IN HELA, SIGNAL = 4.6; EXPRESSED IN ADULT LIVER, SIGNAL = 7.4; NT HIT: AL163218.2, EVALUE 3.00e-27; EST_HUMAN HIT: AU140358.1, EVALUE 5.00e-27
ccaagctttgacagcttccatgtggtgttgagcctgcggatgcacagaagtcaagaattgaagtttggaaacctctgcctaggtttcagatttatacggaaatgcctgaatatccaggcagaagtttgctgcagtgacaaggccctcatggagaacctctgctag

SEQ ID NO: 17297 - DNA, 239 bp, Homo sapiens
  MAP TO AL137798.1; EXPRESSED IN BONE MARROW, SIGNAL = 1.9; EXPRESSED IN HELA, SIGNAL = 5.7; EXPRESSED IN FETAL LIVER, SIGNAL = 1.8; EXPRESSED IN ADULT LIVER, SIGNAL = 5.6; EST_HUMAN HIT: BI192970.1, EVALUE 4.00e-93; SWISSPROT HIT: P17065, EVALUE 1.00e+00; NT HIT: gi16161787, EVALUE 1.00e-115
tccctggctccacctcttctgccacaaacgtcagcatggtggtatcagctggcccttggtccagcgagaaggcagagacgaacattttagaaatcaacgagaaattgcgcccccagctggcagagaacaaacagcagttcagaaacctcaaagagaaatgttttgtaactcaactggccggcttcctggccaaccgacagaagaaatacagtaagatctataggctcaccatcatgaaa

SEQ ID NO: 17298 - DNA, 79 bp, Homo sapiens
  MAP TO AC011931.3; EXPRESSED IN PLACENTA, SIGNAL = 1.4; EXPRESSED IN LUNG, SIGNAL = 1.3; EXPRESSED IN ADULT LIVER, SIGNAL = 1.2; EXPRESSED IN HELA, SIGNAL = 1.1; EXPRESSED IN FETAL LIVER, SIGNAL = 1.3; NT HIT: gi14735328, EVALUE 4.00e-37; EST_HUMAN HIT: BE727305.1, EVALUE 5.00e-37
accacagatgacatccttgtggcctcagcagagtgtcccagcgatgatgaggacattgacccctgtgagccgagctcag

SEQ ID NO: 17299 - DNA, 261 bp, Homo sapiens
  MAP TO AC011881.5; EXPRESSED IN PLACENTA, SIGNAL = 1.1; EXPRESSED IN LUNG, SIGNAL = 1.3; EXPRESSED IN ADULT LIVER, SIGNAL = 1.1; EXPRESSED IN HELA, SIGNAL = 0.64; EXPRESSED IN FETAL LIVER, SIGNAL = 0.58; SWISSPROT HIT: P18175, EVALUE 4.00e-04; NT HIT: AL163202.2, EVALUE 2.00e-45; EST_HUMAN HIT: AW976364.1, EVALUE 1.00e-128
atgaatgttctggaatcctatgtgagggacaaacattcagaccacggcaggagtgttctggaatcctatgtgaggaacaaacattcagaccacagcaggagtattctggaatcccatatgagggataagcattcagaccctcgtagcagtgttctggaatcctatgtgagggagaagcattcagagcacagcaggagtgctctggaatcctatgttagggacaaacattcagaacctcgtaacattgtgctggaaacctat

SEQ ID NO: 17300 - DNA, 450 bp, Homo sapiens
  MAP TO AC017050.4; EXPRESSED IN HELA, SIGNAL = 1.1; EXPRESSED IN FETAL LIVER, SIGNAL = 0.64; EXPRESSED IN PLACENTA, SIGNAL = 0.77; EXPRESSED IN ADULT LIVER, SIGNAL =   1; EXPRESSED IN BONE MARROW, SIGNAL = 0.84; SWISSPROT HIT: O35682, EVALUE 8.00e-40; NT HIT: gi14758030, EVALUE 1.00e-124; EST_HUMAN HIT: BI461933.1, EVALUE 0.00e+00
ttcctgtcccacggccgttcccgcgaccacgccatcgccgccatcgtcttctctggcatcgcctgtgtggcttacgccaccgaagtaacctggacccggcccggcccggcgagatcactgactacatggcctccgagctggggctgctgaaggtgctggagaccttcgtggcctgcctcatcttcgtgttcatcaatagcccctacgtgtaccacaaccggccggccctggagtggtgggtggcggtgtacgccctctgcttcgtcctggcggccctcactatcctgctgagcctggggcactgcaccaacatgctgcccatccgcttccccagtttcctgttggggctggccttgctgtccgtcctcctctatgccactgcccttgtcctctggcccctctaccagttcaacgagaagtatggtgtccagccctggcagacgagagatg

SEQ ID NO: 17301 - DNA, 172 bp, Homo sapiens
  MAP TO CHR22_173.0; EXPRESSED IN HELA, SIGNAL = 1.1; EXPRESSED IN ADULT LIVER, SIGNAL = 2.8; EXPRESSED IN FETAL LIVER, SIGNAL = 2.4; EXPRESSED IN BONE MARROW, SIGNAL = 2.8; SWISSPROT HIT: P28584, EVALUE 6.60e-01; NT HIT: AF319536.1, EVALUE 3.80e-02
gccatcctcactgctgcccagtggggctatcgctcctgtggacacagcccagctcatcagcccacagtagccccgggaatgcttcctcattgcacagccttctggaaggaatctttggcaaatgtcaactcttgttctgctctcacggcaaacacgccttggtcacataccc

SEQ ID NO: 17302 - DNA, 150 bp, Homo sapiens
  MAP TO AL121939.3; EXPRESSED IN HELA, SIGNAL = 1.2; EXPRESSED IN HEART, SIGNAL = 1.3; EXPRESSED IN PLACENTA, SIGNAL = 1.5; EXPRESSED IN LUNG, SIGNAL = 1.5; EXPRESSED IN ADULT LIVER, SIGNAL = 1.2; EXPRESSED IN FETAL LIVER, SIGNAL = 1.2; EXPRESSED IN BONE MARROW, SIGNAL = 1.5; EST_HUMAN HIT: AW961216.1, EVALUE 5.00e-79; SWISSPROT HIT: Q61548, EVALUE 2.00e-03; NT HIT: gi7662227, EVALUE 3.00e-79
tgtttgatggtctaggtgatcttttgatgccaaccatggcaccagctgggcagcctgcacctgtctcaatggtaccacccagtcctgcaatggcagccagcaaagcccttggaagtgatcttgattcatctcttgccagcttagtaggca

SEQ ID NO: 17303 - DNA, 188 bp, Homo sapiens
  MAP TO AL132875.5; EXPRESSED IN HELA, SIGNAL = 1.1; EXPRESSED IN FETAL LIVER, SIGNAL = 0.7; EXPRESSED IN BONE MARROW, SIGNAL = 0.7; EXPRESSED IN LUNG, SIGNAL = 0.79; SWISSPROT HIT: Q12599, EVALUE 1.10e+00; NT HIT: gi14748472, EVALUE 1.00e-102; EST_HUMAN HIT: BG742712.1, EVALUE 1.00e-101
ataagcgtgtggaaaattggcctctgatgcagtctccttggcctacactaagtataagcactctttatctcctgtttgtgtggctgggtccaaaatggatgaaggaccgagaaccttttcagatgcgtctagtgctcattatctataattttgggatggttttgcttaacctctttatcttcagagag

SEQ ID NO: 17304 - DNA, 234 bp, Homo sapiens
  MAP TO CHR22_126.0; EXPRESSED IN HELA, SIGNAL = 1.2; EXPRESSED IN FETAL LIVER, SIGNAL = 1.1; EXPRESSED IN PLACENTA, SIGNAL = 1.2; EXPRESSED IN LUNG, SIGNAL = 1.3; EXPRESSED IN BONE MARROW, SIGNAL =   1; EXPRESSED IN ADULT LIVER, SIGNAL = 1.5; EST_HUMAN HIT: BE392117.1, EVALUE 9.00e-88; SWISSPROT HIT: Q9Z0H3, EVALUE 2.00e-25; NT HIT: Y17123.1, EVALUE 1.00e-129
aagttgatgacgcctgagatgttttcagaaatcctctgtgacgatctggatttgaacccgctgacgtttgtgccagccatcgcctctgccatcagacagcagatcgagtcctaccccacggacagcatcctggaggaccagtcagaccagcgcgtcatcatcaaggtaggtgacttctcacccagcactggagccttcctggccctcagggtgggtgtcatcatggagcactga

SEQ ID NO: 17305 - DNA, 150 bp, Homo sapiens
  MAP TO AL160192.1; EXPRESSED IN FETAL LIVER, SIGNAL =  44; EXPRESSED IN PLACENTA, SIGNAL =  27; EXPRESSED IN ADULT LIVER, SIGNAL =  47; EXPRESSED IN LUNG, SIGNAL =  43; EXPRESSED IN HELA, SIGNAL =  20; NT HIT: U09823.1, EVALUE 2.00e-43; EST_HUMAN HIT: W28782.1, EVALUE 2.00e-41; SWISSPROT HIT: Q90835, EVALUE 2.00e-16
atgtaccatgaagctttgagtgaagctcttcctagggacaatgtaagcttcaatgtcaaaaaggtgcctgtcaaagatgttcattgtggcaacactgctggtaacagcaaaaatgacccaccagtggaagaagctggcttcactgcccag

SEQ ID NO: 17306 - DNA, 152 bp, Homo sapiens
  MAP TO CHR22_152.0; EXPRESSED IN HELA, SIGNAL = 0.89; EXPRESSED IN PLACENTA, SIGNAL = 0.35; SWISSPROT HIT: Q62177, EVALUE 2.60e+00; NT HIT: AF012946.1, EVALUE 5.20e-01; EST_HUMAN HIT: AI824951.1, EVALUE 3.00e-80
tatgaagaataattggaggcacttccttgtgacttggcttcatccggaccggatgacttctgggtgccagcaacagttccccatttccattcacgtttccccacatcgttcatgccaaagagatgggtgccaagaggccatccgtcttcatc

SEQ ID NO: 17307 - DNA, 177 bp, Homo sapiens
  MAP TO AC022525.3; EXPRESSED IN PLACENTA, SIGNAL = 0.7; EXPRESSED IN LUNG, SIGNAL = 0.71; EXPRESSED IN HELA, SIGNAL = 0.55; EXPRESSED IN ADULT LIVER, SIGNAL = 0.67; EXPRESSED IN FETAL LIVER, SIGNAL = 0.63; EXPRESSED IN BONE MARROW, SIGNAL = 0.73; NT HIT: Z46867.1, EVALUE 9.60e+00; EST_HUMAN HIT: BF743694.1, EVALUE 9.10e-01; SWISSPROT HIT: P35563, EVALUE 2.50e+00
atggatactttcaatgattctgcaagtgtaaattgggtttgtccctacccttccctactgatggcagtttccattcattcgtttatagtttccgaaactgtgccctttactgctcctgatttccccatccttgtggtttatatttttaagaatatacacccctttgctatcattttt

SEQ ID NO: 17308 - DNA, 126 bp, Homo sapiens
  MAP TO AL137007.4; EXPRESSED IN FETAL LIVER, SIGNAL = 3.8; EXPRESSED IN PLACENTA, SIGNAL = 5.1; EXPRESSED IN ADULT LIVER, SIGNAL = 5.2; EXPRESSED IN BONE MARROW, SIGNAL = 4.2; EXPRESSED IN HEART, SIGNAL = 3.3; EXPRESSED IN LUNG, SIGNAL = 5.1; EXPRESSED IN HELA, SIGNAL = 2.1; SWISSPROT HIT: P11369, EVALUE 8.00e-02; NT HIT: U66061.1, EVALUE 2.00e-06; EST_HUMAN HIT: R87056.1, EVALUE 3.00e-06
atgtacctcaacacagttaaggtcaaatataacaaacatatagctaacatcattctcaatgatgaaatgttgaaagctttttctctaagatcaaggataagcatgtccatcctcaccacttctttt

SEQ ID NO: 17309 - DNA, 135 bp, Homo sapiens
  MAP TO CHR22_75.0; EXPRESSED IN HELA, SIGNAL = 5.7; EST_HUMAN HIT: BG760640.1, EVALUE 1.00e-67; SWISSPROT HIT: Q9Y512, EVALUE 2.00e-19; NT HIT: gi14779515, EVALUE 7.00e-68
gtacttggcctcaagcttcctaatcttcttggtcgtgcagaaaaggtgacctttcagttttcctatggaacaaaagaaacttcgtatggcctgtccttcttcaaaccacggcccggaaacttcgaaagaaagtag

SEQ ID NO: 17310 - DNA, 96 bp, Homo sapiens
  MAP TO AL136372.1; EXPRESSED IN ADULT LIVER, SIGNAL = 0.74; EXPRESSED IN LUNG, SIGNAL = 0.59; EXPRESSED IN HELA, SIGNAL = 0.53; EST_HUMAN HIT: AV646301.1, EVALUE 2.00e-40; NT HIT: Z48540.2, EVALUE 3.00e-01
ctcttttacttcagtctgaagctcaccaaatgacttctttccacagcctgccattctggtcgagttgctggcttcctggtcatccaggtcttgggg

SEQ ID NO: 17311 - DNA, 359 bp, Homo sapiens
  MAP TO CHR22_78.0; EXPRESSED IN HELA, SIGNAL =   1; NT HIT: Z68149.1, EVALUE 5.00e-03; EST_HUMAN HIT: BF246900.1, EVALUE 1.20e-01
ttaatcatcatctttttttatctccatctctatcacctccatcatcttcatcatctccatcatttccatcaccatctccattatcttcatcacctccatttctattgcctccatcacttccaccttcattacctctgccatttcctccatcatcatcatctctatcacctccgtcaccatctccatcatctccttctttatctccatcactatcaccttcatcacctcaatcatcttcatcacctccatttctatcacctccatccctctatcctcatcttcatctccatctccattatcttcatcaccatctctatcacctccatcatgtccatcacaatctctagcacctccatctc

SEQ ID NO: 17312 - DNA, 223 bp, Homo sapiens
  MAP TO CHR22_144.0; EXPRESSED IN ADULT LIVER, SIGNAL = 0.31; EXPRESSED IN HELA, SIGNAL =   1
aaggagaagaggaagaggaagaggaagaggaaggaggaggcggaggagaagaagaagaaaagatgaagaggaagaaaggagaaagagaatgaggagaaggaggaggagaagaagaaggaggaggaggaagaggagaaggagaagaagaagaaagaggaggaggagaaggaagagaaggagaagaaggagaagaggaagggagaagaagggaaaaggagaataa

SEQ ID NO: 17313 - DNA, 104 bp, Homo sapiens
  MAP TO AL138889.2; EXPRESSED IN HELA, SIGNAL = 3.2; EXPRESSED IN FETAL LIVER, SIGNAL = 1.9; EXPRESSED IN HEART, SIGNAL = 1.1; EXPRESSED IN LUNG, SIGNAL = 1.3; EXPRESSED IN BONE MARROW, SIGNAL = 1.9; EXPRESSED IN PLACENTA, SIGNAL = 1.1; EXPRESSED IN ADULT LIVER, SIGNAL = 1.3; NT HIT: AB000884.1, EVALUE 3.30e-01; SWISSPROT HIT: Q09564, EVALUE 7.00e-01
acatgtcgttgcctccctgttccagaccgttaatgaagatgttatggcggtacctggcaaacaatattttcaaggtcatgaggagaggagagctaaactgctaa

SEQ ID NO: 17314 - DNA, 295 bp, Homo sapiens
  MAP TO U82695.2; EXPRESSED IN PLACENTA, SIGNAL = 0.96; EXPRESSED IN HELA, SIGNAL = 0.7; EXPRESSED IN ADULT LIVER, SIGNAL = 1.1; EXPRESSED IN LUNG, SIGNAL = 1.1; EXPRESSED IN BONE MARROW, SIGNAL =   1; SWISSPROT HIT: Q16720, EVALUE 8.00e-42; EST_HUMAN HIT: BE254937.1, EVALUE 0.00e+00; NT HIT: U82695.2, EVALUE 0.00e+00
cctcctgagaaggaaggcgccctcccacgccaggtgggcaataagacggagtgcgccctgctgggcttcgtcttggacctgaagcgggacttccagcccgtgcgcgagcagatcccggaagacaagctttacaaagtgtacaccttcaactcggtccgcaagtccatgagcacagtcatccgcatgcccgacggtggcttccgcctcttcagcaagggggcctcagagatcctcttgaaaaagtgagtgagcagcagggaggtgccggggtacgcacggagtttctgattctatt

SEQ ID NO: 17315 - DNA, 157 bp, Homo sapiens
  MAP TO AL133547.3; EXPRESSED IN BONE MARROW, SIGNAL = 4.4; EXPRESSED IN PLACENTA, SIGNAL = 2.4; EXPRESSED IN ADULT LIVER, SIGNAL = 2.9; EXPRESSED IN HELA, SIGNAL =   3; EXPRESSED IN LUNG, SIGNAL =   3; EXPRESSED IN FETAL LIVER, SIGNAL = 3.1; EST_HUMAN HIT: BE881303.1, EVALUE 4.00e-64; SWISSPROT HIT: P09602, EVALUE 5.00e-12; NT HIT: gi13651005, EVALUE 7.00e-62
agctcaagcctaaaaacgcccatgcaaagacaggagagaagatacccatagggaaaaagggaaaagctgatgctggcaaggaggggaataaccctgcagaaaatggagacgccaaaacagaccaggcacagaaagccgaaggtgctggagatgccaa

SEQ ID NO: 17316 - DNA, 175 bp, Homo sapiens
  MAP TO AC015957.3; EXPRESSED IN HELA, SIGNAL = 0.54; EXPRESSED IN FETAL LIVER, SIGNAL = 0.57; EXPRESSED IN LUNG, SIGNAL = 1.4; EXPRESSED IN BONE MARROW, SIGNAL = 0.58; NT HIT: gi4506318, EVALUE 5.00e-94; SWISSPROT HIT: P28827, EVALUE 3.00e-27; EST_HUMAN HIT: AL589249.1, EVALUE 7.00e-94
ctttaactaccaactctgcatagtttgatattccaacacctccttcagtgcgaatcatgcagcggtactttccagcatctcgtttggtggtattcacaacattaaatgaagcaatgaagcgtcgggagctggtcaccttgatttccttcagaggagcatctcgcacatcaatgcc

SEQ ID NO: 17317 - DNA, 186 bp, Homo sapiens
  MAP TO CHR22_144.0; EXPRESSED IN HELA, SIGNAL = 4.9; EXPRESSED IN FETAL LIVER, SIGNAL = 1.6; EXPRESSED IN HEART, SIGNAL = 1.3; EXPRESSED IN ADULT LIVER, SIGNAL = 1.6; EXPRESSED IN PLACENTA, SIGNAL = 1.3; EXPRESSED IN BONE MARROW, SIGNAL = 1.5; EXPRESSED IN LUNG, SIGNAL = 1.5; SWISSPROT HIT: P14784, EVALUE 5.00e-29; EST_HUMAN HIT: BI911897.1, EVALUE 5.00e-61; NT HIT: gi4504664, EVALUE 3.00e-89
ccttgccgcccaccagtacctgcaggctttgtcctgaaggccaggggctggctccaggggctccaggtcgtgaactcgccttgcagaggcttgacccgcacctgaaactcatactgggtgtctggggtgagcgtctccaggcagatccattcctgcttctgcttgagagtcagcaggggggcctcc

SEQ ID NO: 17318 - DNA, 125 bp, Homo sapiens
  MAP TO AL133500.2; EXPRESSED IN HELA, SIGNAL = 0.97; EXPRESSED IN HEART, SIGNAL = 1.9; EXPRESSED IN FETAL LIVER, SIGNAL =   2; EXPRESSED IN PLACENTA, SIGNAL = 2.1; EXPRESSED IN LUNG, SIGNAL = 2.1; EXPRESSED IN ADULT LIVER, SIGNAL = 1.9; EXPRESSED IN BONE MARROW, SIGNAL = 2.2; NT HIT: AJ271735.1, EVALUE 2.00e-06; EST_HUMAN HIT: BG979557.1, EVALUE 2.00e-07; SWISSPROT HIT: P34620, EVALUE 3.50e+00
ctgttgctaaatccaatggtcaattctcagttctcatcttacttgatttctcagcagcatatgacacagttggccactccctcttccttgaaacactttcttcacaagaggacaacacactcttc

SEQ ID NO: 17319 - DNA, 462 bp, Homo sapiens
  MAP TO AC006477.3; EXPRESSED IN HELA, SIGNAL =  38; EXPRESSED IN FETAL LIVER, SIGNAL = 4.8; NT HIT: gi4506660, EVALUE 0.00e+00; EST_HUMAN HIT: AW163779.1, EVALUE 0.00e+00; SWISSPROT HIT: P32429, EVALUE 1.00e-48
caccagcagagctttcttgttatccacaaaggtggtgatggtgttaactcctgctcgaaagacaggtggtctcttaatggggaggtcccctttgcccacaactctgcctgggccaacagcctccgcttcttctcttgctttgtctctggtctgtatttgtgggccagcttaagcagctgagtagctgtttggccttccagggcctgggtgaactggttaatcgcaggaggcactttcagctgcttatagagtatggatctctgccattgcaacctgatatagcggggccatttcacaaagcaggtgaggtctcttttgggctggatgtcctgtccaatgccaaaattcttaggccttttctcaaacaggggattcaccactttcttggcctcctgcttcttcacaaaagcaggggccagagccaacttcttccccttggcctcctttcctttcggcatcttg

SEQ ID NO: 17320 - DNA, 111 bp, Homo sapiens
  MAP TO AL137070.3; EXPRESSED IN ADULT LIVER, SIGNAL = 6.5; EXPRESSED IN BONE MARROW, SIGNAL =   5; EXPRESSED IN HELA, SIGNAL = 3.4; EXPRESSED IN FETAL LIVER, SIGNAL =   4; SWISSPROT HIT: Q64318, EVALUE 7.00e-01; NT HIT: L78810.1, EVALUE 5.00e-28; EST_HUMAN HIT: BI013264.1, EVALUE 6.00e-41
atggtgtgtctggagtttgttctttctgatgttcggaagtgttcggagtttcttccttctggtgggtttgtggtctcgctggcttcaggagtgaagctgcagacctttgcg

SEQ ID NO: 17321 - DNA, 239 bp, Homo sapiens
  MAP TO AC005627.2; EXPRESSED IN HELA, SIGNAL = 3.3; EXPRESSED IN FETAL LIVER, SIGNAL = 2.1; EST_HUMAN HIT: BE835065.1, EVALUE 1.00e-127; SWISSPROT HIT: P20059, EVALUE 6.40e-01; NT HIT: gi14730218, EVALUE 0.00e+00
tcctcttggctgggtctacaggcacaactgctgcctcacaacagccttttttggcccagttcctgtccagctcatggcggccaatgtaggcccaaaacttcctcaagtcaaactctccaggcccaccttctgcttcccggtggcatgaaccggcccagctttgacttgagaacagcctctgcaggccctgctcttgcctcccaggggctttttccaggcccagctcttgcctcatggca

SEQ ID NO: 17322 - DNA, 136 bp, Homo sapiens
  MAP TO CHR22_165.0; EXPRESSED IN HEART, SIGNAL = 3.6; EXPRESSED IN FETAL LIVER, SIGNAL =   4; EXPRESSED IN PLACENTA, SIGNAL = 4.3; EXPRESSED IN ADULT LIVER, SIGNAL = 4.4; EXPRESSED IN BONE MARROW, SIGNAL = 3.8; EXPRESSED IN LUNG, SIGNAL = 4.2; EXPRESSED IN HELA, SIGNAL = 2.4; EST_HUMAN HIT: BE842789.1, EVALUE 4.30e-02; SWISSPROT HIT: P03896, EVALUE 3.50e+00
ctgattataattctctgttcaaatatttcaatttcatcaactttgtccagcagttttcctattttattttccgtatttatcacaattaattggaattccttgtctgctaccttaaactctggatcatctcttggtc

SEQ ID NO: 17323 - DNA, 143 bp, Homo sapiens
  MAP TO AC021010.3; EXPRESSED IN BONE MARROW, SIGNAL =   1; EXPRESSED IN LUNG, SIGNAL = 0.67; EXPRESSED IN ADULT LIVER, SIGNAL = 0.85; EXPRESSED IN HELA, SIGNAL = 0.74; EXPRESSED IN FETAL LIVER, SIGNAL = 0.77; SWISSPROT HIT: O49196, EVALUE 3.40e+00
aatcagtctggtagcaaatatttccagaattcacggatttagtagtgtcaatgttgaggctactagtcagcttccttccaatttcactggtttttctatccatgatctcaagatagcagttacagcatccaccatcactggct

SEQ ID NO: 17324 - DNA, 438 bp, Homo sapiens
  MAP TO AJ239319.2; EXPRESSED IN HELA, SIGNAL = 1.4; EXPRESSED IN FETAL LIVER, SIGNAL = 2.8; EXPRESSED IN HEART, SIGNAL = 2.4; EXPRESSED IN LUNG, SIGNAL = 2.8; EXPRESSED IN BONE MARROW, SIGNAL = 2.6; EXPRESSED IN PLACENTA, SIGNAL = 2.7; EXPRESSED IN ADULT LIVER, SIGNAL = 3.1; EST_HUMAN HIT: BI768435.1, EVALUE 0.00e+00; SWISSPROT HIT: P49682, EVALUE 1.00e-49; NT HIT: gi14759217, EVALUE 0.00e+00
ggtggcatgaactatgttcaggtagcggtcaaagctgatgcaggccagcaggagggctcctgcgtagaagttgatgttgaagagggcacctgccactttgcagaggccagagccaaagacccactggacggcagcgtccactgcccagagcggcagtgtcagcaccagcagcgtgtctgctacagctaggtggagcaggaaggtgtcggtgctgctcagggctgtccgccggctcagcagcacggctgccaccgcgccgttgcccagcagccccagcagaaagaggaggctgtagagggctggcaggaaggcccggtcgaagttcaggctgaagtcctgtgggcagggcggggaggtacagcacgagtcactctcgttttctccatagtcataggaagagctgaagttctccaggagggcggcaacctcggcgtcatt

SEQ ID NO: 17325 - DNA, 107 bp, Homo sapiens
  MAP TO AL031602.14; EXPRESSED IN HELA, SIGNAL = 0.69; EXPRESSED IN HEART, SIGNAL = 1.4; EXPRESSED IN FETAL LIVER, SIGNAL = 0.86; EXPRESSED IN BONE MARROW, SIGNAL = 0.94; EXPRESSED IN PLACENTA, SIGNAL = 1.1; EXPRESSED IN LUNG, SIGNAL =   1; EXPRESSED IN ADULT LIVER, SIGNAL = 1.5
ggctgctggatgaagggagtgatgacggaaatggagagaagctgtttgatttcataggtattttggaactagaacagcaggacttgcaggtggatagaatgtaaaga

SEQ ID NO: 17326 - DNA, 202 bp, Homo sapiens
  MAP TO CHR22_166.0; EXPRESSED IN PLACENTA, SIGNAL = 0.67; EXPRESSED IN ADULT LIVER, SIGNAL = 1.6; EXPRESSED IN FETAL LIVER, SIGNAL = 1.1; EXPRESSED IN LUNG, SIGNAL = 0.76; EXPRESSED IN BONE MARROW, SIGNAL = 0.63; EXPRESSED IN HELA, SIGNAL = 0.86; EST_HUMAN HIT: AW303971.1, EVALUE 1.00e+00; SWISSPROT HIT: O08530, EVALUE 1.90e+00; NT HIT: AE003930.1, EVALUE 7.00e-04
ttccatactcatacccataagcaatggactggttttgtgtgtcccttttgaaggctacatcaacagtacatttcctgctgtaggggtcgttctgcagattgtcattttcacccgcaatgatgtattgtgagatcttcctatgctgatacatgcagatgtggttcatttctttccactgccatagatcatcccatttgtccat

SEQ ID NO: 17327 - DNA, 149 bp, Homo sapiens
  MAP TO AC007029.3; EXPRESSED IN ADULT LIVER, SIGNAL = 0.88; EXPRESSED IN LUNG, SIGNAL = 0.9; EXPRESSED IN HELA, SIGNAL = 1.3; SWISSPROT HIT: Q9ULD4, EVALUE 2.00e-03; NT HIT: gi7662303, EVALUE 2.00e-77; EST_HUMAN HIT: BE815811.1, EVALUE 8.00e-75
cttcatggactgtaatgccacaattgtcacactgaattatttcatcagcgtcctcactattatctcccagacaaacacagcaaatcagaatatggtccattttttgagagctccagttttgactcttctcaagaatcagcgagtcctaa

SEQ ID NO: 17328 - DNA, 175 bp, Homo sapiens
  MAP TO AC004845.2; EXPRESSED IN HELA, SIGNAL = 0.86; EXPRESSED IN FETAL LIVER, SIGNAL =   1; EXPRESSED IN ADULT LIVER, SIGNAL = 1.2; SWISSPROT HIT: P17511, EVALUE 6.60e-01; EST_HUMAN HIT: BE868764.1, EVALUE 3.60e+00; NT HIT: AE007673.1, EVALUE 2.40e+00
tcagacgatgcgtgttgccacgtgtcttttcatactccacacaatgacagttggacaggttcctatcaccattgcagagagcatttctgtggcccacaaagacatcttggaggtggttaaaattggcatactagtgtctaacgtgcacgtgttgcatgagatggaggagtaaagt

SEQ ID NO: 17329 - DNA, 363 bp, Homo sapiens
  MAP TO AL137183.1; EXPRESSED IN HELA, SIGNAL =  18; EXPRESSED IN FETAL LIVER, SIGNAL =  14; SWISSPROT HIT: P12750, EVALUE 5.00e-47; NT HIT: AB015610.1, EVALUE 1.00e-121; EST_HUMAN HIT: W00563.1, EVALUE 1.00e-116
atgaaaaagatttgcatgcagcagttcattaagatagatggcaaggtccaaactgatataacctaccctgctagatttatggatgtcatcagcattgacaagggacacaatttctgtctgatctatgacaccaagggttgctttggtgtacattgtattacacctgaggaggtcaagtacaagttatgcaaagtgagaaaaatcttagtgggcacaaaaggaatccctcatctggtgactcatgatgcttgtaccatctgctaccctgatcccctcatcaaggttaatgaaaccgttcagattgactcggagactggcaagatactgatttcatcaagcttgatgctggtaaccagcatatgg

SEQ ID NO: 17330 - DNA, 206 bp, Homo sapiens
  MAP TO CHR22_72.0; EXPRESSED IN ADULT LIVER, SIGNAL = 0.44; EXPRESSED IN BONE MARROW, SIGNAL = 0.45; EXPRESSED IN HELA, SIGNAL = 2.9; NT HIT: gi14778210, EVALUE 1.00e-112; SWISSPROT HIT: Q9Y217, EVALUE 6.00e-04; EST_HUMAN HIT: BE144271.1, EVALUE 1.00e-112
gcaccagagcaatggagctgtcattgcccgctgtggacagccagaggttagctggtggggctggcgaaatgcagatgatgagcatctggtacagtcagtagccaaagcttgtgcctctgactcccgatcgagtggcagcaagctgtcaactaggaacacttctcgagactttcccaatgggggagacctttctgacgtggagttcg

SEQ ID NO: 17331 - DNA, 218 bp, Homo sapiens
  MAP TO CHR22_139.0; EXPRESSED IN HELA, SIGNAL = 0.85; EXPRESSED IN ADULT LIVER, SIGNAL = 0.36; NT HIT: AF260753.1, EVALUE 3.10e+00; SWISSPROT HIT: P39806, EVALUE 6.80e+00; EST_HUMAN HIT: AW611542.1, EVALUE 3.00e-81
ctggagaagttgtcttgcagctcctttagatgcttgtcaaaataattccattcagtccaatgatgctggtacaactgattgaggttgtctttccgcttcttcatgctgcacagggtctcgctgatgacatcagtatacgttggggtgcagtcagtggcttccgctgtcaaggaaatccccgtactgtggaactgtgttgacgctgcattattagtggc

SEQ ID NO: 17332 - DNA, 335 bp, Homo sapiens
  MAP TO CHR22_76.0; EXPRESSED IN LUNG, SIGNAL = 0.5; EXPRESSED IN BONE MARROW, SIGNAL = 0.41; EXPRESSED IN HELA, SIGNAL = 1.5; EXPRESSED IN ADULT LIVER, SIGNAL = 0.53; EST_HUMAN HIT: AI917384.1, EVALUE 0.00e+00; NT HIT: U40770.1, EVALUE 0.00e+00; SWISSPROT HIT: P29274, EVALUE 4.00e-50
caccggagcgggatgcggatggcaatgtagcggtcaatggcgatggccaggagactgaagatggagctctgcgtgaggaccaggacgaagcaggcaatgaagaggcagccgtggcaggcagcgcagaacccggtgctgatggtgatggcaaaggggatggcgagcacacccactgcgatgtcggccgccgccagtgacaccacaaagtagttggtgacgttctgcaggttgctgttgagccacacggcccagcacaccagcacattgcccaggatggccagcacagcaatggccagctccaccgtgatgtacaccgaggagcccatgatgggcat

SEQ ID NO: 17333 - DNA, 166 bp, Homo sapiens
  MAP TO AL136362.1; EXPRESSED IN FETAL LIVER, SIGNAL = 1.3; EXPRESSED IN PLACENTA, SIGNAL = 1.5; EXPRESSED IN ADULT LIVER, SIGNAL = 1.6; EXPRESSED IN LUNG, SIGNAL = 1.5; EXPRESSED IN HELA, SIGNAL = 0.66; NT HIT: AL163206.2, EVALUE 5.00e-20; SWISSPROT HIT: P11369, EVALUE 2.00e-13; EST_HUMAN HIT: BG485422.1, EVALUE 2.00e-32
tcagttactgaagcgactgtctttgccccagagtatgttcttggcacctttgttgaaaaggagttcactgtaggtgtatggatttatctctgggttctctattctgttccactgatctatgtgtctgtttttaatgtcagtgcatgccatttttgttactatagct

SEQ ID NO: 17334 - DNA, 303 bp, Homo sapiens
  MAP TO AL136228.2; EXPRESSED IN BONE MARROW, SIGNAL = 2.1; EXPRESSED IN HELA, SIGNAL = 1.1; EXPRESSED IN LUNG, SIGNAL = 2.1; EXPRESSED IN FETAL LIVER, SIGNAL = 2.5; EXPRESSED IN PLACENTA, SIGNAL = 2.7; EXPRESSED IN ADULT LIVER, SIGNAL = 2.3; SWISSPROT HIT: P18084, EVALUE 1.20e+00; EST_HUMAN HIT: BF843858.1, EVALUE 0.00e+00; NT HIT: U28422.1, EVALUE 7.10e-02
agtactgctgccatgtccctttgaggtggcctctgtgtgcacctgctggtcctccagcccagtctgctctctgtacacaatccccatgagcagcatgagtgccaagaactgctcagtgctcaggtctggcacctgggcttctttcacgtgctcataaggcagccagcgtgtttccctaggtaccccggaggctttgggcacagaggaccacacgtccagaagtttgggccattcacatgtgtgccatgtggacctctctggagaagagagctgggtgcacatctcagcgtgtgcaatgggcat

SEQ ID NO: 17335 - DNA, 232 bp, Homo sapiens
  MAP TO AL136312.1; EXPRESSED IN HELA, SIGNAL =   1; EXPRESSED IN FETAL LIVER, SIGNAL = 0.83; EXPRESSED IN PLACENTA, SIGNAL = 0.62; EXPRESSED IN BONE MARROW, SIGNAL = 0.85; SWISSPROT HIT: O67293, EVALUE 2.00e+00; EST_HUMAN HIT: BI087026.1, EVALUE 2.00e-02
ctgcattttgtgcctctctctctctctggcaagactttagattcctcattattaagcccaggcgtggcctttgaacatgaaccagtggaatctgagtggaagtatcatgtctcttctgagcagaagttttaagagtcaggctgaggtttgccatgttcttttttgcctctgtcacaacgactgcccatctttcagatggaggctgctctttcagtgtattagtcagggttcc

SEQ ID NO: 17336 - DNA, 187 bp, Homo sapiens
  MAP TO CHR22_148.0; EXPRESSED IN HELA, SIGNAL = 0.64; EXPRESSED IN PLACENTA, SIGNAL = 0.31; SWISSPROT HIT: O15072, EVALUE 5.60e+00; EST_HUMAN HIT: BF758369.1, EVALUE 9.70e-01
atttctgtgcatgcccacccaactatcaactgccagcagccctttccagcacccttggaatgtttctcctgggcacttgaaccctggctgctcttgcacaaagcacaccaggattaatgctctctggaagcatcccttaaccagtgaccgatgagaattaggagagaacaactctgaccctctcatc

SEQ ID NO: 17337 - DNA, 381 bp, Homo sapiens
  MAP TO CHR22_172.0; EXPRESSED IN HEART, SIGNAL = 2.8; EXPRESSED IN PLACENTA, SIGNAL = 3.4; EXPRESSED IN LUNG, SIGNAL = 3.4; EXPRESSED IN HELA, SIGNAL = 2.5; EXPRESSED IN ADULT LIVER, SIGNAL =   3; EXPRESSED IN BONE MARROW, SIGNAL = 2.7; NT HIT: gi14778276, EVALUE 0.00e+00; SWISSPROT HIT: Q13625, EVALUE 1.20e-01; EST_HUMAN HIT: BE894362.1, EVALUE 0.00e+00
cggggagagtttgatgggtgactctgtcttcttcaccactggagtcttgatgactttgggagaaggaacctcccgagggctcttggagttgggcagtaaagatggtgacagttgctgcaccagaggggcaggtcgggatgcagtcttgacgagagtgttggcaggctttcggggtgcctcaggtggctggagcagcctagatgtgctggcctcctcccgggctgccaaagcagggagctttggggtactgctgatgacaggagcctttcggggctggctggctggtctaggagttggcaaagaagggggtctgctgggggcgttcctgatcacagcaggtaaagggggcgaccgaggacgctgaggtctacgcacaggttc

SEQ ID NO: 17338 - DNA, 183 bp, Homo sapiens
  MAP TO AL138832.2; EXPRESSED IN HELA, SIGNAL = 0.87; EXPRESSED IN FETAL LIVER, SIGNAL = 0.78; EXPRESSED IN BONE MARROW, SIGNAL = 0.84; EXPRESSED IN PLACENTA, SIGNAL = 0.84; EXPRESSED IN ADULT LIVER, SIGNAL = 0.93; SWISSPROT HIT: Q9WVC7, EVALUE 2.60e-02; EST_HUMAN HIT: AW292779.1, EVALUE 3.00e-53; NT HIT: AF281870.1, EVALUE 3.00e-12
ctggtggagcttctcctggacggctgggatattggttagcaggtcagtccactggctatcaatgcgcgacagctcagagcgcagcgtggctgtgtccaccttttttagtcgaaggagctgatttccagtactcagaacagatgatttcagggaagattgggcatccacttctttagaaaactc

SEQ ID NO: 17339 - DNA, 161 bp, Homo sapiens
  MAP TO AL137844.2; EXPRESSED IN FETAL LIVER, SIGNAL = 0.72; EXPRESSED IN BONE MARROW, SIGNAL = 0.83; EXPRESSED IN HELA, SIGNAL = 0.6; SWISSPROT HIT: O95751, EVALUE 1.10e+00; EST_HUMAN HIT: AW900998.1, EVALUE 3.20e+00; NT HIT: gi15312977, EVALUE 1.00e-85
ctccatttgcaagatgaaccacctctctgctgctcccagatgaagagataccagaaatgccattctctctgaatcgtccaaaaaccccttcatttgcttctcctcatcaatctccatctcttcctccacagagcatgagccccgggctgcttcctgctctt

SEQ ID NO: 17340 - DNA, 99 bp, Homo sapiens
  MAP TO AL135920.4; EXPRESSED IN BONE MARROW, SIGNAL = 8.7; EXPRESSED IN HELA, SIGNAL = 3.5; EXPRESSED IN FETAL LIVER, SIGNAL =  13; EXPRESSED IN HEART, SIGNAL =   8; NT HIT: D86240.2, EVALUE 4.90e+00
agagagagagagaaagagagaaggaggaagaagaaggaggaggaggaggagggggaggaggaggaggaaaaggagaaggagaagacgataaaaaagtaa

SEQ ID NO: 17341 - DNA, 133 bp, Homo sapiens
  MAP TO AL049647.7; EXPRESSED IN PLACENTA, SIGNAL = 8.1; EXPRESSED IN FETAL LIVER, SIGNAL = 7.4; EXPRESSED IN HEART, SIGNAL = 6.2; EXPRESSED IN LUNG, SIGNAL = 7.1; EXPRESSED IN ADULT LIVER, SIGNAL = 7.8; EXPRESSED IN BONE MARROW, SIGNAL = 5.7; EXPRESSED IN HELA, SIGNAL = 0.95; NT HIT: U67563.1, EVALUE 1.80e+00; SWISSPROT HIT: O62768, EVALUE 4.50e+00; EST_HUMAN HIT: BF965354.1, EVALUE 2.60e+00
tgcaggagtcttagggggaagtgacagatttggcctgttgcaaagagcggtgtgggaagagaagggaattgtttcaccaaagcggtttgtggtatcagtaataatcagagaactagggagaaacgaaattttt

SEQ ID NO: 17342 - DNA, 76 bp, Homo sapiens
  MAP TO AL133418.2; EXPRESSED IN FETAL LIVER, SIGNAL = 1.2; EXPRESSED IN BONE MARROW, SIGNAL = 1.3; EXPRESSED IN PLACENTA, SIGNAL = 1.4; EXPRESSED IN HELA, SIGNAL = 0.88; EXPRESSED IN LUNG, SIGNAL = 1.5; EST_HUMAN HIT: BI755074.1, EVALUE 3.00e-35; NT HIT: gi16167963, EVALUE 2.00e-35
tcagctaaagttaacataacagcagctgttatggaactggatgaaggtgaagaggaggatgaggatgtagcagcac

SEQ ID NO: 17343 - DNA, 183 bp, Homo sapiens
  MAP TO AL137855.1; EXPRESSED IN HELA, SIGNAL = 1.2; EXPRESSED IN HEART, SIGNAL = 1.5; EXPRESSED IN FETAL LIVER, SIGNAL = 1.9; EXPRESSED IN BONE MARROW, SIGNAL = 1.8; EXPRESSED IN PLACENTA, SIGNAL = 2.2; EXPRESSED IN LUNG, SIGNAL =   2; EXPRESSED IN ADULT LIVER, SIGNAL = 2.1; EST_HUMAN HIT: AW207187.1, EVALUE 2.40e-01; SWISSPROT HIT: P10052, EVALUE 6.50e-01; NT HIT: gi13654161, EVALUE 1.60e-01
aataaaagacaacaactgcgtgatcgtagatttttgttttccatttttcaactcgttgctatggtgtcatgtggggagaacccatctgcaactcatagtgttttgtatcaggaggcgactgtcagtcctcaattaattattcatgctttcattaggagcaataatgagaaacagtttaaatga

SEQ ID NO: 17344 - DNA, 160 bp, Homo sapiens
  MAP TO AL138843.2; EXPRESSED IN PLACENTA, SIGNAL = 1.2; EXPRESSED IN BONE MARROW, SIGNAL = 0.85; EXPRESSED IN ADULT LIVER, SIGNAL = 1.1; EXPRESSED IN LUNG, SIGNAL = 0.98; EXPRESSED IN HELA, SIGNAL = 0.56; EXPRESSED IN FETAL LIVER, SIGNAL = 0.88; EST_HUMAN HIT: AW838310.1, EVALUE 6.00e-85; SWISSPROT HIT: Q9UL18, EVALUE 5.00e-24; NT HIT: gi14733037, EVALUE 4.00e-85
ctttgatgaggtacaagaatattattgatccctccgagtttaacatttatctttaggcacaagtttgacagagtttgaggagatgtttttattacattcttgacttgaacacattgtgtagccatacccaaaagtgtgtctcctacacgtttcacttccg

SEQ ID NO: 17345 - DNA, 110 bp, Homo sapiens
  MAP TO AC018678.5; EXPRESSED IN LUNG, SIGNAL = 7.2; EXPRESSED IN FETAL LIVER, SIGNAL = 4.6; EXPRESSED IN ADULT LIVER, SIGNAL = 6.3; EXPRESSED IN BONE MARROW, SIGNAL = 5.7; EXPRESSED IN HELA, SIGNAL =   2; SWISSPROT HIT: P52746, EVALUE 2.10e+00; NT HIT: AL163227.2, EVALUE 4.00e-13; EST_HUMAN HIT: BG211345.1, EVALUE 2.00e-19
ctttattccagttaccaataagtttcttatctccatctgcactcacctcaacctggacttcattgtccatatcactatcagcctctttgtcaaaaccattcatcaagtct

SEQ ID NO: 17346 - DNA, 180 bp, Homo sapiens
  MAP TO AC012360.2; EXPRESSED IN HELA, SIGNAL = 1.1; EXPRESSED IN FETAL LIVER, SIGNAL = 1.6; EXPRESSED IN HEART, SIGNAL = 1.5; EXPRESSED IN PLACENTA, SIGNAL = 1.6; EXPRESSED IN BONE MARROW, SIGNAL = 1.4; EXPRESSED IN ADULT LIVER, SIGNAL = 1.6; EXPRESSED IN LUNG, SIGNAL = 1.7; SWISSPROT HIT: Q62556, EVALUE 2.20e-01; NT HIT: gi6671623, EVALUE 6.30e-01; EST_HUMAN HIT: AI205914.1, EVALUE 3.00e-53
tcagctttcggacctccccctgatcatctgtggccagtggagaagaaaggcctgaccgggaaattgaaggagccagcagggtacctccacatgatggaactcttggaaacattcgaaaaaccccactcccattctcaagatgaaaaatacaccaacctggccccgcggtttccataccta

SEQ ID NO: 17347 - DNA, 147 bp, Homo sapiens
  MAP TO AL138752.2; EXPRESSED IN BONE MARROW, SIGNAL = 3.1; EXPRESSED IN HEART, SIGNAL = 2.3; EXPRESSED IN HELA, SIGNAL = 1.9; EXPRESSED IN PLACENTA, SIGNAL =   3; EXPRESSED IN LUNG, SIGNAL = 3.5; EXPRESSED IN ADULT LIVER, SIGNAL = 3.5; EST_HUMAN HIT: BF036019.1, EVALUE 1.00e-48; SWISSPROT HIT: P22234, EVALUE 7.00e-15; NT HIT: gi5453538, EVALUE 6.00e-47
atccttccttgacaccaggatttctttcgagtgaagaaccagttggtattcttctgcaaaccattcagttggaattatttcacactggggcacaatgaaagctgtctcctcacattttctggtgaaagcagttttaatacctgcttc

SEQ ID NO: 17348 - DNA, 124 bp, Homo sapiens
  MAP TO AL121962.4; EXPRESSED IN HELA, SIGNAL = 0.78; EXPRESSED IN PLACENTA, SIGNAL = 1.2; EXPRESSED IN ADULT LIVER, SIGNAL = 1.3; EXPRESSED IN LUNG, SIGNAL = 1.3; SWISSPROT HIT: O08586, EVALUE 6.00e+00; NT HIT: AF026976.2, EVALUE 6.40e+00
cttcatgagagaaggagaataatctatccactccccagagaacatgttagaagcatcatctctttcactattggatgaacatgttttatgttcccccatttgttcagggtatagcacattagct

SEQ ID NO: 17349 - DNA, 146 bp, Homo sapiens
  MAP TO AL137799.2; EXPRESSED IN FETAL LIVER, SIGNAL = 0.88; EXPRESSED IN LUNG, SIGNAL = 1.9; EXPRESSED IN BONE MARROW, SIGNAL =   1; EXPRESSED IN PLACENTA, SIGNAL = 1.4; EXPRESSED IN HELA, SIGNAL = 1.3; EXPRESSED IN ADULT LIVER, SIGNAL = 1.8; NT HIT: AB027132.1, EVALUE 1.00e-04; EST_HUMAN HIT: BI756183.1, EVALUE 1.00e-76; SWISSPROT HIT: O00519, EVALUE 2.00e-09
ctctgagaaatttttgtcagaactatctccgtagcaccccttgtagaaggccagttcctcctcgtcctgtagtgtcacgatagtgacaggcaccacgcccgcgggaaagtccaggaggttgtacagggtcacataagactgacttt

SEQ ID NO: 17350 - DNA, 348 bp, Homo sapiens
  MAP TO AC013371.4; EXPRESSED IN HELA, SIGNAL =   2; EXPRESSED IN PLACENTA, SIGNAL = 1.9; EXPRESSED IN LUNG, SIGNAL = 1.2; EXPRESSED IN ADULT LIVER, SIGNAL = 1.8; EXPRESSED IN FETAL LIVER, SIGNAL = 1.4; EXPRESSED IN BONE MARROW, SIGNAL = 1.1; EST_HUMAN HIT: H15482.1, EVALUE 1.00e-07; SWISSPROT HIT: Q9LY32, EVALUE 7.80e+00; NT HIT: AF195953.1, EVALUE 2.00e-05
atgagggcaaaactctgtcttcgtgacctaatcagctcccaaaagtccccatctactaatatcatcaccttggaggttaaggtttcaacatgtgaattttgggtgtacacaaatattcagactgtagcagtcaaaatgatttgtcacagtggtcacagctccttcccagttatcatggccctgtcttctgccacttttagccatgagcccctagagagagagatggctcagattatcatactggggcctaatgatatgtatgtgagtgactttgaccacctggacattcagctggtatttctaagtgaaaatcatatcaagagttatgtttatgttcagattttaaaa

SEQ ID NO: 17351 - DNA, 118 bp, Homo sapiens
  MAP TO AL138743.1; EXPRESSED IN BONE MARROW, SIGNAL = 0.6; EXPRESSED IN HELA, SIGNAL = 2.7; EXPRESSED IN PLACENTA, SIGNAL = 0.86; EXPRESSED IN ADULT LIVER, SIGNAL = 0.94; EXPRESSED IN LUNG, SIGNAL = 0.85; NT HIT: gi14757722, EVALUE 3.00e-60; EST_HUMAN HIT: BG485304.1, EVALUE 5.00e-60; SWISSPROT HIT: O35777, EVALUE 3.00e-16
gcaagctgatgaagaattccagatcctggcaaactcctggcgatactccagtgcattcaccaacaggatattttttgccatggtggattttgatgaaggctctgatgtatttcagatg

SEQ ID NO: 17352 - DNA, 350 bp, Homo sapiens
  MAP TO AC015534.5; EXPRESSED IN HELA, SIGNAL = 0.61; NT HIT: gi16168201, EVALUE 0.00e+00; EST_HUMAN HIT: AA206184.1, EVALUE 2.00e-86
gctttcatctgagtggcacagtaactgagctggccactgcctctgaaccagcagtgacttataaagttgcaatcagttttgatcgatgcaaaatcacctcagtgacatgtggctgtgggaacaaggacatattctactgtgcccatgtggtagcactctcactctacaggatccgtaaaccagaccaagtcaaattgcgtcttcctatctccgaaacccttttccagatgaatagggaccagctacaaaagtttattcaatatttaatcacggcacaccacactgaagttcttcctactgcacagaaactggcagatgagattctatcctccaactcagaaatcaaccaa

SEQ ID NO: 17353 - DNA, 134 bp, Homo sapiens
  MAP TO CHR22_144.0; EXPRESSED IN LUNG, SIGNAL = 0.6; EXPRESSED IN HELA, SIGNAL = 1.5; EXPRESSED IN FETAL LIVER, SIGNAL = 0.57; EXPRESSED IN PLACENTA, SIGNAL =   1; EXPRESSED IN ADULT LIVER, SIGNAL = 0.8; SWISSPROT HIT: P07742, EVALUE 5.90e+00; NT HIT: AF332547.1, EVALUE 1.80e+00; EST_HUMAN HIT: BI832330.1, EVALUE 2.00e-69
catcttctgggctttggcggtttcactgcggaaggcactagattcccggcgggtaagatcctgggagaagtggcgattgagtacacgcagactgcctgagtacacctggctgaccatcacctccgccttgtacc

SEQ ID NO: 17354 - DNA, 141 bp, Homo sapiens
  MAP TO AL137861.1; EXPRESSED IN BONE MARROW, SIGNAL = 0.78; EXPRESSED IN HELA, SIGNAL = 0.75; EXPRESSED IN LUNG, SIGNAL = 0.84; EXPRESSED IN ADULT LIVER, SIGNAL = 0.9; SWISSPROT HIT: Q14694, EVALUE 4.50e+00; NT HIT: AL163202.2, EVALUE 4.00e-26; EST_HUMAN HIT: BF929482.1, EVALUE 2.00e-22
atggacaaacattcagacccacgtagcagtgttccagaatcctacgtaagggaaaaacattcagaccccagcatcagcgttctggatttctatgtgagggacaaacattcagaccccagcagcagtgttctgggatctcat

SEQ ID NO: 17355 - DNA, 132 bp, Homo sapiens
  MAP TO CHR22_140.0; EXPRESSED IN HELA, SIGNAL = 1.4; EXPRESSED IN PLACENTA, SIGNAL = 0.54; EXPRESSED IN ADULT LIVER, SIGNAL = 0.6; SWISSPROT HIT: Q9NG98, EVALUE 2.00e+00; EST_HUMAN HIT: AW009233.1, EVALUE 1.60e-01
ctctcctcggggcctacagttacctcctctcctgtctccgcaggacccagccaaccctttcttcccgtccccaaggctccacttccccctgcagccaccaggtgtcagcaaagcatcatccttggggctcat

SEQ ID NO: 17356 - DNA, 111 bp, Homo sapiens
  MAP TO AC025735.1; EXPRESSED IN PLACENTA, SIGNAL = 2.6; EXPRESSED IN ADULT LIVER, SIGNAL = 2.5; EXPRESSED IN FETAL LIVER, SIGNAL =   2; EXPRESSED IN HELA, SIGNAL =   1; NT HIT: AJ278581.1, EVALUE 1.00e-34; SWISSPROT HIT: P15609, EVALUE 3.50e+00; EST_HUMAN HIT: AA663213.1, EVALUE 3.00e-18
ctatcaggatcatctgaaaacttccccaggtctgccttgatctgctttaaatcagagagggagaaggggacatgcacctgggttgggccaagttctctgccccctacagct

SEQ ID NO: 17357 - DNA, 168 bp, Homo sapiens
  MAP TO AL137006.2; EXPRESSED IN ADULT LIVER, SIGNAL = 5.1; EXPRESSED IN HELA, SIGNAL =  18; EST_HUMAN HIT: BG336862.1, EVALUE 5.00e-24; NT HIT: gi14758285, EVALUE 3.00e-33; SWISSPROT HIT: P57776, EVALUE 1.00e-12
ccaggcctccaggttggagaccgcctgctgcagctcctgcaccacgccgcgcaggctctggttctccacttccaggctggcgatctggaggacgagctcgctgtggtcttccctggggccgagctctggcgggaggcgctggccacaggcccattcatctgcttgtag

SEQ ID NO: 17358 - DNA, 115 bp, Homo sapiens
  MAP TO AC011792.5; EXPRESSED IN HELA, SIGNAL = 0.86; EXPRESSED IN LUNG, SIGNAL = 3.2; EXPRESSED IN ADULT LIVER, SIGNAL = 3.1; NT HIT: gi15295325, EVALUE 3.80e-01; EST_HUMAN HIT: AA926858.1, EVALUE 5.50e-01
ctgagcatgtgggcagcattgaagacaacatcaaactctgtgctgtctagttcagctgctttttttgccatctcagctgcttctatgagacgagcttcttccagaagaaactgac

SEQ ID NO: 17359 - DNA, 123 bp, Homo sapiens
  MAP TO AC015930.3; EXPRESSED IN BONE MARROW, SIGNAL = 0.45; EXPRESSED IN PLACENTA, SIGNAL = 0.77; EXPRESSED IN ADULT LIVER, SIGNAL = 0.83; EXPRESSED IN HELA, SIGNAL = 1.4; EXPRESSED IN FETAL LIVER, SIGNAL = 0.56; EST_HUMAN HIT: BG206398.1, EVALUE 2.40e+00; NT HIT: AF400441.1, EVALUE 4.00e-63; SWISSPROT HIT: Q63604, EVALUE 2.00e-18
cttcactgccaccaagatcttgtcctgctcaggacagaggttatagcattcagctaggaacacttttccaaaggctccttcgcctagctcccttttcagaacaatgttatgtcgcttgatgtg

SEQ ID NO: 17360 - DNA, 99 bp, Homo sapiens
  MAP TO CHR22_105.0; EXPRESSED IN FETAL LIVER, SIGNAL = 2.5; EXPRESSED IN BONE MARROW, SIGNAL = 2.1; EXPRESSED IN LUNG, SIGNAL = 2.4; EXPRESSED IN HELA, SIGNAL = 4.3; EXPRESSED IN PLACENTA, SIGNAL = 2.2; EXPRESSED IN ADULT LIVER, SIGNAL = 2.4; SWISSPROT HIT: P22265, EVALUE 3.60e+00; EST_HUMAN HIT: BI093547.1, EVALUE 8.00e-49; NT HIT: gi14779780, EVALUE 6.00e-49
ctatttcggcttcatcaccaaacaccccctgctgagccgcttcgcctgccacgtctttgtctcccaggagtccatgaggccggtggcgcagagtgtggg

SEQ ID NO: 17361 - DNA, 285 bp, Homo sapiens
  MAP TO CHR22_143.0; EXPRESSED IN HEART, SIGNAL = 1.3; EXPRESSED IN LUNG, SIGNAL = 0.84; EXPRESSED IN FETAL LIVER, SIGNAL = 1.2; EXPRESSED IN PLACENTA, SIGNAL =   1; EXPRESSED IN BONE MARROW, SIGNAL = 0.84; EXPRESSED IN HELA, SIGNAL = 1.6; SWISSPROT HIT: O60462, EVALUE 1.10e+00; NT HIT: M11911.1, EVALUE 1.00e+00; EST_HUMAN HIT: U46370.1, EVALUE 2.00e-86
gaaaagctcacagtgtgaaaggcgacgatgaggctgctcccacctacgagggccctgcagtagcagactcggaaggatcagccggaaaatgcgagagcctgctcgaggtcccctcacctgctgagctgcaagacagacgcctgctgcaaacacctcatcttccgttagatcagccagcttacctggagcctgcaaaacctgaacttggggctcctggcctctattccattttttccatttctgtgagggttaagaggttctctgaaaaagcctgggaaattttat

SEQ ID NO: 17362 - DNA, 80 bp, Homo sapiens
  MAP TO AL138974.1; EXPRESSED IN HELA, SIGNAL = 1.5; EST_HUMAN HIT: BF742821.1, EVALUE 8.90e-02; NT HIT: gi15668172, EVALUE 3.80e+00
atggctgccattaattacactctcttatgctctatcattgaaagtatctcaatccagttccctcatgtggatcagaacag

SEQ ID NO: 17363 - DNA, 104 bp, Homo sapiens
  MAP TO AC009472.2; EXPRESSED IN HELA, SIGNAL = 1.2; EXPRESSED IN PLACENTA, SIGNAL = 1.8; EXPRESSED IN LUNG, SIGNAL = 2.1; EXPRESSED IN ADULT LIVER, SIGNAL = 2.1; EST_HUMAN HIT: R59904.1, EVALUE 9.00e-52; NT HIT: X14061.1, EVALUE 8.40e-02
gtgttcttcaagctaatcaaccacaagtcaaggtcacctttcagacattccataccaccatgtcctcaactcttgtgttgcctgcaaggaccaatccagatcag

SEQ ID NO: 17364 - DNA, 88 bp, Homo sapiens
  MAP TO AC021722.4; EXPRESSED IN BONE MARROW, SIGNAL = 0.58; EXPRESSED IN LUNG, SIGNAL = 0.79; EXPRESSED IN HELA, SIGNAL = 0.71; EXPRESSED IN FETAL LIVER, SIGNAL = 0.64; NT HIT: gi14785744, EVALUE 1.10e+00; EST_HUMAN HIT: BE793107.1, EVALUE 1.60e+00
tgtggacatcttcccccacagtccttgtgctcatcgctttcttgtcattcttttccaagtcacttggactctccagcttcactttcat

SEQ ID NO: 17365 - DNA, 299 bp, Homo sapiens
  MAP TO CHR22_166.0; EXPRESSED IN BONE MARROW, SIGNAL = 1.1; EXPRESSED IN PLACENTA, SIGNAL = 0.66; EXPRESSED IN HELA, SIGNAL = 1.5; EXPRESSED IN FETAL LIVER, SIGNAL = 1.7; EST_HUMAN HIT: BI084983.1, EVALUE 0.00e+00; SWISSPROT HIT: P25325, EVALUE 2.00e-55; NT HIT: gi4507706, EVALUE 0.00e+00
gcattgaacctggccacatcccaggtaccgtgaacatccccttcacagacttcctgagccaggaggggctggagaagagccctgaggagatccgccatctgttccaggagaagaaagtggacctgtctaagccactggtggccacgtgtggctctggcgtcacagcctgccacgtggcactaggggcctacctctgcggcaagccagacgtgcccatctacgatggctcctgggtggagtggtacatgcgcgcccggcccgaggatgtcatctcagagggccgggggaagacccactga

SEQ ID NO: 17366 - DNA, 165 bp, Homo sapiens
  MAP TO CHR22_183_2.0; EXPRESSED IN HELA, SIGNAL = 1.2; EXPRESSED IN FETAL LIVER, SIGNAL = 1.6; EXPRESSED IN HEART, SIGNAL = 1.3; EXPRESSED IN BONE MARROW, SIGNAL = 1.7; EXPRESSED IN PLACENTA, SIGNAL = 1.7; EXPRESSED IN LUNG, SIGNAL = 1.5; EXPRESSED IN ADULT LIVER, SIGNAL = 1.7; SWISSPROT HIT: P10163, EVALUE 3.00e-01; NT HIT: U07000.1, EVALUE 4.00e-88
aaaacagtgtccacgggggagaaagaggccaggctggtgtcgcagagcgccaatggcatagtcaccaccactcctccgacttacttcctcctgggatcccacaaacaagccccccagctgggagcctggacctccagggaccagggcagccgccacctacttggc

SEQ ID NO: 17367 - DNA, 101 bp, Homo sapiens
  MAP TO CHR22_185_1.0; EXPRESSED IN FETAL LIVER, SIGNAL = 1.4; EXPRESSED IN LUNG, SIGNAL = 1.7; EXPRESSED IN PLACENTA, SIGNAL = 1.8; EXPRESSED IN BONE MARROW, SIGNAL = 1.4; EXPRESSED IN HELA, SIGNAL = 1.6; SWISSPROT HIT: Q09522, EVALUE 4.70e+00; NT HIT: AF049796.1, EVALUE 1.30e+00
tgctgcgttatcttggatgagtttcatcacctctttgagccttgactttctccccatgaagatgagggcaggaataccttccatgtgaggttgtggtgggt

SEQ ID NO: 17368 - DNA, 191 bp, Homo sapiens
  MAP TO CHR21_53.0; EXPRESSED IN HELA, SIGNAL = 0.53; EXPRESSED IN BONE MARROW, SIGNAL = 0.47; NT HIT: gi14780345, EVALUE 1.00e-103; EST_HUMAN HIT: AL589258.1, EVALUE 1.00e-103; SWISSPROT HIT: Q9Y3R5, EVALUE 2.00e-30
aacggatgctctgctcctgagactgtcgctggtggttggcaaagaggtgttttacaccgccctctgggggagcgtcctggccagcccgtccatccgcctccctgcctcagtcttcgtggtgggccacatcaacagggatgcccccggccgggagcagaagtacatgctggggaccaatcaccaactcacgg
